United States Patent Application Publication US 2026/0191920 A1 - sequence listing, part 10

SEQ ID NO: 45851 - protein, 153 aa, Enhygromyxa salina
  REGION 1..153: note = tr|A0A2S9YRX6|A0A2S9YRX6_9DELT NADPH-dependent 7-cyano-7-deazaguanine reductase OS=Enhygromyxa salina; OX = 215803 GN=queF PE=3 SV=1
MDAPSITLPRPTLAPQTSEQAHTLTAPPTRGTHRPVPSQPSRELETFANPKPGRDYEIRFECPEFTCVCPKTGQPDFATIRIRYTPDQRCVELKSLKLYLWSFRDVGAFHEAVTNQILDDLVAALQPRAMVVEGDFLVRGGIHTVVEARYSMP

SEQ ID NO: 45852 - protein, 154 aa, Ensifer adhaerens
  REGION 1..154: note = tr|A0A285XHM0|A0A285XHM0_ENSAD NADPH-dependent 7-cyano-7-deazaguanine reductase OS=Ensifer adhaerens; OX = 106592 GN=queF PE=3 SV=1
MSKTDVSGLTQLGAAVEAPKTPEEAVLERVPNGNEGTNYVVRFTAPEFTSLCPMTGQPDFAHIVIDYVPGKWLVESKSLKLFLFAFRNHGAFHEDCSVYIAKRIIDLLEPEWLRIGAYWYPRGGIPIDVFWQTGEPPKGVWLPDQGVPTYRGRG

SEQ ID NO: 45853 - protein, 154 aa, Ensifer adhaerens
  REGION 1..154: note = tr|A0A2V4XR24|A0A2V4XR24_ENSAD NADPH-dependent 7-cyano-7-deazaguanine reductase OS=Ensifer adhaerens; OX = 106592 GN=queF PE=3 SV=1
MSKTDVSGLSQLGAKVDLPQSPEDAVLERVPSGNKGKDYLVRFTAPEFTSLCPMTGQPDFAHIVIDYVPDEWLVESKSLKLFLHSFRNHGAFHEDCTIEIAQRLVSLLQPRWLRIGAYWYPRGGIPIDVFWQTGKPPEGLWLPDQGVPTYRGRG

SEQ ID NO: 45854 - protein, 154 aa, unidentified
  source 1..154: note = Ensifer alkalisoli
  REGION 1..154: note = tr|A0A1E3VE59|A0A1E3VE59_9RHIZ NADPH-dependent 7-cyano-7-deazaguanine reductase OS=Ensifer alkalisoli; OX = 1752398 GN=queF PE=3 SV=1
MTKTDVSGLSQLGAKVDLPQSPEEAELERVPSGHAGTDFVVRFTAPEFTSLCPMTGQPDFAHIVIDYVPDGWLVESKSLKLFLHSFRNHGAFHEDCTMEIAKRLVSLLSPKWLRIGAYWYPRGGIPIDVFWQTGNPPGGVWLPDQGVPTYRGRG

SEQ ID NO: 45855 - protein, 154 aa, unidentified
  source 1..154: note = Ensifer glycinis
  REGION 1..154: note = tr|A0A178XSB1|A0A178XSB1_9RHIZ NADPH-dependent 7-cyano-7-deazaguanine reductase OS=Ensifer glycinis; OX = 1472378 GN=queF PE=3 SV=1
MTKTDVSGLSQLGTKVDLPQSPEEAVLERVPSGHEGTDFVVRFTAPEFTSLCPMTGQPDFAHIVIDYVPDGWLVESKSLKLFLHSFRNHGAFHEDCTIDIAKRLVSLLSPKWLRIGAYWYPRGGIPIDVFWQTGNPPEGVWLPDQGVPTYRGRG

SEQ ID NO: 45856 - protein, 171 aa, Ensifer sojae
  REGION 1..171: note = tr|A0A249PD74|A0A249PD74_9RHIZ NADPH-dependent 7-cyano-7-deazaguanine reductase OS=Ensifer sojae CCBAU 05684 OX=716928 GN=queF PE=3 SV=1
MGGAPIRRLNADWSMTEMTKTDVSGLSQLGAKVDLPQSPEDAVLERVPSGHAGTDFVVRFTAPEFTSLCPMTGQPDFAHIVIDYVPDGWLVESKSLKLFLHSFRNHGAFHEDCTMEIAKRLVSLLSPKWLRIGAYWYPRGGIPIDVFWQTGNPPEGVWLPDQGVPTYRGRG

SEQ ID NO: 45857 - protein, 154 aa, Ensifer sp.
  REGION 1..154: note = tr|A0A395L9C4|A0A395L9C4_9RHIZ NADPH-dependent 7-cyano-7-deazaguanine reductase OS=Ensifer sp. M14; OX = 2203782 GN=queF PE=3 SV=1
MSQTDVSGLSQLGAKVDLPQSPDEAVLERVPSGNRGADFLVRFTAPEFTSLCPMTGQPDFAHIVIDYVPDEWLVESKSLKLFLHSFRNHGAFHEDCTIDIANRLVTLLSPRWLRIGAYWYPRGGIPIDVFWQTGKPPEGLWLPDQGVPTYRGRG

SEQ ID NO: 45858 - protein, 154 aa, Ensifer sp.
  REGION 1..154: note = tr|A0A1C0SM11|A0A1C0SM11_9RHIZ NADPH-dependent 7-cyano-7-deazaguanine reductase OS=Ensifer sp. LC14; OX = 1873714 GN=queF PE=3 SV=1
MSKTDVSGLSQLGAKVDLPQSPEEAVLERVPSGNKGKDYLVRFTAPEFTSLCPMTGQPDFAHIVIDYVPDEWLVESKSLKLFLHSFRNHGAFHEDCTIEIAGRLVSLLSPRWLRIGAYWYPRGGIPIDVFWQTGKPPEGLWLPDQGVPTYRGRG

SEQ ID NO: 45859 - protein, 281 aa, unidentified
  source 1..281: note = Enterobacillus tribolii
  REGION 1..281: note = tr|A0A370QQT0|A0A370QQT0_9ENTR NADPH-dependent 7-cyano-7-deazaguanine reductase OS=Enterobacillus tribolii OX=1487935 GN=queF PE=3 SV=1
MSYQNHQALAGLTLGKTTEYRDTYDATLLQAVPRSLNREPLGLFPGNLPFHGGDIWTLYELSWLNARGLPQVAVAEVTLDAFSSNLIESKSFKLYLNSFNQTRFDDWDAVTRTLQHDLAHCAQGTVSVRLMRLQELEGQPVGAFSGVCIDDQDITIDSYEFDAGLLHGAADGAEIVEETLVSHLLKSNCLITHQPDWGSVMIRYCGAQINREALLRYLVSFRHHNEFHEQCVERIFNDIQRFCRPESLAVYARYTRRGGLDINPWRANTPFTPPPARLARQ

SEQ ID NO: 45860 - protein, 281 aa, unidentified
  source 1..281: note = Enterobacter agglomerans
  REGION 1..281: note = tr|A0A4U3CQ87|A0A4U3CQ87_ENTAG NADPH-dependent 7-cyano-7-deazaguanine reductase OS=Enterobacter agglomerans OX=549 GN=queF PE=3 SV=1
MTTHEQDQALSNLTLGKPTAYHDHYDNSLLQAVPRSLNREPLGLFPDSLPFTGSDIWTLYELSWLNSKGLPQVAVGEVVLNAQSRNLIESKSFKLYLNSFNQTRFADWGEVRQTLERDLSACAEGEARVALFRLNEVEGQPIGHFEGCCIDEQDIAIEDYRFNADYLADAAGSEIVEETLVSHLLKSNCLITNQPDWGSVMIRYKGPRIDREALLRYLVSFRQHNEFHEQCVERIFNDVMRFCHPEALTVYARYTRRGGLDINPWRTNVPFSPGFSRLVRQ

SEQ ID NO: 45861 - protein, 162 aa, unidentified
  source 1..162: note = Enterobacter agglomerans
  REGION 1..162: note = tr|A0A379ADE8|A0A379ADE8_ENTAG NADPH-dependent 7-cyano-7-deazaguanine reductase OS=Enterobacter agglomerans OX=549 GN=queF_1 PE=4 SV=1
MPVLKVKRGSRCSVSMKWKVSPSAHFEGVCIDEQDIAIEDYRFNADYLADAAGSEIVEETLVSHLLKSNCLITNQPDWGSVMIRYKGPRIDREALLRYLVSFRQHNEFHEQCVERIFNDVMRFCHPEALTVYARYTRRGGLDINPWRTNVPFSPGFSRLVRQ

SEQ ID NO: 45862 - protein, 280 aa, Enterobacter asburiae
  REGION 1..280: note = tr|A0A263VUB1|A0A263VUB1_ENTAS NADPH-dependent 7-cyano-7-deazaguanine reductase OS=Enterobacter asburiae; OX = 61645 GN=queF PE=3 SV=1
MSYENHQALTGLTLGKSTDYRDTYDASLLQGVPRSLNRDPLGLHADALPFVGGDIWTLYELSWLNARGLPQVAVGHVELDYATVNLVESKSFKLYLNSFNQTKFNSRDDVQHTLERDLSACAQGKVSVSLYRLHELEGQPVAHFNGTCIDDQDIEVENYEFSADYLENAASGKVVEETLVSHLLKSNCLITHQPDWGSVQIQYRGPKIDREKLLRYLVSFRHHNEFHEQCVERIFSDIQRFCQPEKLSVYARYTRRGGLDINPWRTNTDFVPATGRLVRQ

SEQ ID NO: 45863 - protein, 280 aa, Enterobacter asburiae
  REGION 1..280: note = tr|A0A455VU37|A0A455VU37_ENTAS NADPH-dependent 7-cyano-7-deazaguanine reductase OS=Enterobacter asburiae; OX = 61645 GN=queF PE=3 SV=1
MSYENHQALTGLTLGKSTDYRDTYDASLLQGVPRSLNRDPLGLHADALPFVGGDIWTLYELSWLNARGLPQVAVGHVELDYASVNLVESKSFKLFLNSFNQTKFNSWDDVQHTLERDLSACSQGKVSVSLYRLHELEGQPVAHFSGTCIDDQDIEVENYEFSADYLENAATGKVVEETLVSHLLKSNCLITHQPDWGSVQIQYRGPKIDREKLLRYLVSFRHHNEFHEQCVERIFSDIQRFCQPEKLSVYARYTRRGGLDINPWRTNTDFVPATGRLVRQ

SEQ ID NO: 45864 - protein, 280 aa, unidentified
  source 1..280: note = Enterobacter bugandensis
  REGION 1..280: note = tr|A0A167J5J9|A0A167J5J9_9ENTR NADPH-dependent 7-cyano-7-deazaguanine reductase OS=Enterobacter bugandensis OX=881260 GN=queF PE=3 SV=1
MSYENHQALTGLTLGKSTDYRDTYDASLLQGVPRSLNRDPLGLHADALPFVGGDIWTLYELSWLNARGLPQVAVGHVELDYASVNLVESKSFKLYLNSFNQTRFNSWDEVQQTLERDLAACAQGNVSVSLYRLHELEGQPIAHFHGTCIDEQDIEVENYEFSADYLENAAGGKVVEETLVSHLLKSNCLITHQPDWGSVQIQYRGPKIDREKLLRYLVSFRHHNEFHEQCVERIFNDIQRFCQPEKLSVYARYTRRGGLDINPWRTNTDFVPATGRLVRQ

SEQ ID NO: 45865 - protein, 280 aa, unidentified
  source 1..280: note = Enterobacter bugandensis
  REGION 1..280: note = tr|A0A431SXV9|A0A431SXV9_9ENTR NADPH-dependent 7-cyano-7-deazaguanine reductase OS=Enterobacter bugandensis OX=881260 GN=queF PE=3 SV=1
MSYENHQALTGLTLGKSTDYRDTYDASLLQGVPRSLNRDPLGLRADALPFVGGDIWTLYELSWLNERGLPQVAVGHVELDYASVNLVESKSFKLYLNSFNQTRFNSWDEVQQTLERDLAACAQGNVSVSLYRLHELEGQPIAHFHGTCIDEQDIEVENYEFSADYLENAADGKVVEETLVSHLLKSNCLITHQPDWGSVQIQYRGPKIDREKLLRYLVSFRHHNEFHEQCVERIFNDIQRFCQPEKLSVYARYTRRGGLDINPWRTNTDFVPATGRLVRQ

SEQ ID NO: 45866 - protein, 280 aa, Enterobacter cancerogenus
  REGION 1..280: note = tr|D2ZJQ5|D2ZJQ5_9ENTR NADPH-dependent 7-cyano-7-deazaguanine reductase OS=Enterobacter cancerogenus ATCC 35316 OX=500639 GN=queF PE=3 SV=1
MSYENHQALTGLTLGKTTDYRDTYDASLLQGVPRSLNRDPLGLHADALPFVGGDIWTLYELSWLNARGLPQVAVGHVELDYASQNLIESKSFKLYLNSFNQTTFNSWEDVQHTLQRDLSACAQGDVTVSLYRLHELEGQPVAHFHGTCIDDQDIGIDSYEFSADYLENAARGKVVDETLVSHLLKSNCLITHQPDWGSVQIQYRGPKIDREKLLRYLVSFRHHNEFHEQCVERIFNDIMRFCQPEKLSVYARYTRRGGLDINPWRTNTDFVPATGRLVRQ

SEQ ID NO: 45867 - protein, 280 aa, Enterobacter cancerogenus
  REGION 1..280: note = tr|A0A2J7NZZ1|A0A2J7NZZ1_9ENTR NADPH-dependent 7-cyano-7-deazaguanine reductase OS=Enterobacter cancerogenus OX=69218 GN=queF PE=3 SV=1
MSYENHQALTGLTLGKMTDYRDTYDASLLQGVPRSLNRDPLGLHADALPFVGGDIWTLYELSWLNARGLPQVAVGHVELDYASQNLIESKSFKLYLNSFNQTTFNSWEDVQHTLQRDLSACAQGGVTVSLYRLHELEGQPVAHFHGTCIDDQDIGIDSYEFSADYLENAASGKVVDETLVSHLLKSNCLITHQPDWGSVQIQYRGPKIDREKLLRYLVSFRHHNEFHEQCVERIFNDIMRFCQPEKLSVYARYTRRGGLDINPWRTNTDFVPATGRLVRQ

SEQ ID NO: 45868 - protein, 280 aa, unidentified
  source 1..280: note = Enterobacter chengduensis
  REGION 1..280: note = tr|A0A0F4BDJ4|A0A0F4BDJ4_9ENTR NADPH-dependent 7-cyano-7-deazaguanine reductase OS=Enterobacter chengduensis OX=2494701 GN=queF PE=3 SV=1
MSYENHQALTGLTLGKSTDYRDTYDASLLQGVPRSLNRDPLGLHADALPFVGGDIWTLYELSWLNARGLPQVAVGHVELDYASVNLVESKSFKLYLNSFNQTKFNSWDDVQHTLERDLSACAQGKVGVSLYRLNEFEGQPVAHFNGTCIDDQDIEVENYEFSADYLENAASGKVVEETLVSHLLKSNCLITHQPDWGSVQIQYRGPTIDREKLLRYLVSFRHHNEFHEQCVERIFSDIQRFCQPEKLSVYARYTRRGGLDINPWRTNTDFVPATGRLVRQ

SEQ ID NO: 45869 - protein, 280 aa, unidentified
  source 1..280: note = Enterobacter chuandaensis
  REGION 1..280: note = tr|A0A3A3Z7V6|A0A3A3Z7V6_9ENTR NADPH-dependent 7-cyano-7-deazaguanine reductase OS=Enterobacter chuandaensis OX=2497875 GN=queF PE=3 SV=1
MSYENHQALTGLTLGKSTDYRDTYDASLLQGVPRSLNRDPLGLHAGALPFVGGDIWTLYELSWLNARGLPQVAVGHVELDYASQNLVESKSFKLYLNSFNQTKFNSWDDVQQTLERDLTACAQGKVSVSLYRLHELEGQPIAHFHGTCIDDQDIEVENYEFSADYLENAASGKVVEETLVSHLLKSNCLITHQPDWGSVQIQYRGPKIDREKLLRYLVSFRHHNEFHEQCVERIFNDIQRFCQPETLSVYARYTRRGGLDINPWRTNTDFVPATGRLVRQ

SEQ ID NO: 45870 - protein, 280 aa, Enterobacter cloacae
  REGION 1..280: note = tr|A0A0F0TCP5|A0A0F0TCP5_ENTCL NADPH-dependent 7-cyano-7-deazaguanine reductase OS=Enterobacter cloacae subsp. cloacae OX=336306 GN=queF PE=3 SV=1
MSYENHQALSGLTLGKSTDYRDTYDASLLQGVPRSLNRDPLGLRADALPFVGGDIWTLYELSWLNARGLPQVAVGQVELDHATLNLVESKSFKLYLNSFNQTKFTSLEEVQHTLERDLRACAQGNVTVALYRLNELEGQPVAHFNGTCIDDQDIEVDNYEFSAGYLENAASGKIVEETLVSHLLKSNCLITHQPDWGSVQIQYRGPKIDREKLLRYLVSFRHHNEFHEQCVERIFSDIQRFCQPETLSVYARYTRRGGLDINPWRTNTDFVPATGRLVRQ

SEQ ID NO: 45871 - protein, 280 aa, Enterobacter cloacae
  REGION 1..280: note = tr|A0A5D9RTB6|A0A5D9RTB6_ENTCL NADPH-dependent 7-cyano-7-deazaguanine reductase OS=Enterobacter cloacae; OX = 550 GN=queF PE=3 SV=1
MSYENHQALTGLTLGKSTDYRDTYDASLLQGVPRSLNRDPLGLHADALPFVGGDIWTLYELSWLNARGLPQVAVGHVELDYASVNLVESKSFKLYLNSFNQTKFNSWDEVQQTLERDLSACAQGNVTVSLYRLHELEGQPIAHFHGTCIDDQDIEVESYEFSSDYLENAAGGKVVNETLVSHLLKSNCLITHQPDWGSVQIQYRGPQIDREKLLRYLVSFRHHNEFHEQCVERIFNDIQRFCQPEKLSVYARYTRRGGLDINPWRTNTDFVPATGRLVRQ

SEQ ID NO: 45872 - protein, 280 aa, unidentified
  source 1..280: note = Enterobacter genomosp.
  REGION 1..280: note = tr|A0A0X4EM42|A0A0X4EM42_9ENTR NADPH-dependent 7-cyano-7-deazaguanine reductase OS=Enterobacter genomosp. O OX=2364150 GN=queF PE=3 SV=1
MSYENHQALTGLTLGKSTDYRDTYDASLLQGVPRSLNRDPLGLHADALPFVGGDIWTLYELSWLNARGLPQVAVGHVELDYASQNLVESKSFKLYLNSFNQTTFNSWDDVQHTLERDLSACAQGKVSVSLYRLHELEGQPIAHFNGTCIDDQDIEVKNYEFSADYLENAASGKVVEETLVSHLLKSNCLITHQPDWGSVQIQYRGPKIDREKLLRYLVSFRHHNEFHEQCVERIFSDIQRFCQPEKLSVYARYTRRGGLDINPWRTNTEFVPATGRLVRQ

SEQ ID NO: 45873 - protein, 280 aa, Enterobacter hormaechei
  REGION 1..280: note = tr|F5S1A7|F5S1A7_9ENTR NADPH-dependent 7-cyano-7-deazaguanine reductase OS=Enterobacter hormaechei ATCC 49162 OX=888063 GN=queF PE=3 SV=1
MSYENHQALTGLTLGKSTDYRDTYDASLLQGVPRSLNRDPLGLHADALPFVGGDIWTLYELSWLNARGLPQVAVGHVELDYASVNLVESKSFKLYLNSFNQTKFNSWDEVQQTLERDLSACAQGNVTVSLYRLHELEGQPIAHFHGTCIDDQDIEVESYEFSTDCLENAAGGKVVDETLVSHLLKSNCLITHQPDWGSVQIQYRGPKIDREKLLRYLVSFRHHNEFHEQCVERIFNDIQRFCQPEKLSVYARYTRRGGLDINPWRTNTDFVPATGRLVRQ

SEQ ID NO: 45874 - protein, 280 aa, Enterobacter hormaechei
  REGION 1..280: note = tr|A0A5D1UXA7|A0A5D1UXA7_9ENTR NADPH-dependent 7-cyano-7-deazaguanine reductase OS=Enterobacter hormaechei OX=158836 GN=queF PE=3 SV=1
MSYENHQALTGLTLGKSTDYRDTYDASLLQGVPRSLNRDPLGLHADALPFVGGDIWTLYELSWLNARGLPQVAVGHVELDYASVNLVESKSFKLYLNSFNQTKFNSWDEVQQTLERDLSACAQGNVTVSLYRLHELEGQPIAHFHGTCIDDQDIDVESYEFSTDYLENAAGGKVVDETLVSHLLKSNCLITHQPDWGSVQIQYRGSQIDREKLLRYLVSFRHHNEFHEQCVERIFNDIQRFCQPEKLSVYARYTRRGGLDINPWRTNTDFVPATGRLVRQ

SEQ ID NO: 45875 - protein, 280 aa, unidentified
  source 1..280: note = Enterobacter huaxiensis
  REGION 1..280: note = tr|A0A428LPK4|A0A428LPK4_9ENTR NADPH-dependent 7-cyano-7-deazaguanine reductase OS=Enterobacter huaxiensis OX=2494702 GN=queF PE=3 SV=1
MSYENHQALTGLTLGKSTDYRDTYDASLLQGVPRSLNRDPLGLHADALPFVGGDIWTLYELSWLNARGLPQVAVGHVELDYASVNLVESKSFKLYLNSFNQTKFDSWDDVQRTLERDLRACAQGDVAVSLYRLNELEGQPVAHFNGACIDDQDIEVDSYEFSTDYLENAACGKVIEETLVSHLLKSNCLITHQPDWGSVQIQYRGPKIDREKLLRYLVSFRHHNEFHEQCVERIFNDVMRFCQPEKLSVYARYTRRGGLDINPWRTNTDFVPATGRLVRQ

SEQ ID NO: 45876 - protein, 280 aa, Enterobacter kobei
  REGION 1..280: note = tr|A0A5A9BDP9|A0A5A9BDP9_9ENTR NADPH-dependent 7-cyano-7-deazaguanine reductase OS=Enterobacter kobei; OX = 208224 GN=queF PE=3 SV=1
MSYENHQALTGLTLGKSTDYRDTYDASLLQGVPRSLNRDPLGLHADALPFVGGDIWTLYEISWLNARGLPQVAVGHVELDYASQNLVESKSFKLYLNSFNQTKFNHWDEVQQTLERDLTACAQGHVSVSLYRLHELEGQPIAHFNGTCIDDQDIEVENYEFSADYLENAASGKVVEETLVSHLLKSNCLITHQPDWGSVQIQYRGPKIDREKLLRYLVSFRHHNEFHEQCVERIFSDIQRFCQPEKLSVYARYTRRGGLDINPWRTNTDFVPATGRLVRQ

SEQ ID NO: 45877 - protein, 280 aa, Enterobacter kobei
  REGION 1..280: note = tr|A0A0P8J4H1|A0A0P8J4H1_9ENTR NADPH-dependent 7-cyano-7-deazaguanine reductase OS=Enterobacter kobei; OX = 208224 GN=queF PE=3 SV=1
MSYENHQALTGLTLGKSTDYRDTYDASLLQGVPRSLNRDPLGLHADALPFVGGDIWTLYEISWLNARGLPQVAVGHVELDYASQNLVESKSFKLYLNSFNQTKFNHWDEVQQTLERDLTACAQGQVSVSLYRLHELEGQPIAHFNGTCIDDQDIEVENYEFSADYLENAASGKVVEETLVSHLLKSNCLITHQPDWGSVQIQYRGPKIDREKLLRYLVSFRHHNEFHEQCVERIFSDIQRFCQPEKLSVYARYTRRGGLDINPWRTNTDFVPATGRLVRQ

SEQ ID NO: 45878 - protein, 281 aa, unidentified
  source 1..281: note = Enterobacter lignolyticus
  REGION 1..281: note = tr|E3G5R2|E3G5R2_ENTLS NADPH-dependent 7-cyano-7-deazaguanine reductase OS=Enterobacter lignolyticus (strain SCF1) OX=701347 GN=queF PE=3 SV=1
MSSYENHQALSGLTLGKATDYRDTYDASLLQGVPRSLNRDPLGLHADNLPFRGGDIWTLYELSWLNANGLPQVAVGHVELSDTSVNLVESKSFKLYLNSFNQTRFADWETVRATLQRDLSACAQGEVSVALYRLDELEGQPVAHFHGACIDDQDIEIDNYRFSADYLQDAAGGNVVSETLVSHLLKSNCLITHQPDWGSVQIQYRGPKIDREKLLRYLVSFRHHNEFHEQCVERIFNDILRFCKPETLSVYARYTRRGGLDINPWRTNTDFVPATGRLVRQ

SEQ ID NO: 45879 - protein, 280 aa, Enterobacter ludwigii
  REGION 1..280: note = tr|W0BHU0|W0BHU0_9ENTR NADPH-dependent 7-cyano-7-deazaguanine reductase OS=Enterobacter ludwigii; OX = 299767 GN=queF PE=3 SV=1
MSYENHQALTGLTLGKSTDYRDTYDANLLQGVPRSLNRDPLGLRADALPFVGGDIWTLYELSWLNARGLPQVAVGHVELDYASQNLVESKSFKLYLNSFNQTKFDSQEEVQHTLERDLSACAQGKVSVSLYRLNELEGQPVAHFNGTCIDDQDIAVDNYEFSTDYLENAASGKTVEETLVSHLLKSNCLITHQPDWGSVQIQYRGPKIDREKLLRYLVSFRHHNEFHEQCVERIFNDIQRFCHPETLSVYARYTRRGGLDINPWRTNTDFVPATGRLVRQ

SEQ ID NO: 45880 - protein, 280 aa, Enterobacter ludwigii
  REGION 1..280: note = tr|A0A5A9AVJ1|A0A5A9AVJ1_9ENTR NADPH-dependent 7-cyano-7-deazaguanine reductase OS=Enterobacter ludwigii; OX = 299767 GN=queF PE=3 SV=1
MSYENHQALTGLTLGKSTDYRDTYDASLLQGVPRSLNRDPLGLRADALPFVGGDIWTLYELSWLNARGLPQVAVGHVELDYASQNLVESKSFKLYLNSFNQTKFDSQEEVQHTLERDLSACAQGKVSVSLYRLNELEGQPVAHFNGTCIDDQDIAVDNYEFSTDYLENAASGKTVEETLVSHLLKSNCLITHQPDWGSVQIQYRGPKIDREKLLRYLVSFRHHNEFHEQCVERIFNDIQRFCHPETLSVYARYTRRGGLDINPWRTNTDFVPATGRLVRQ

SEQ ID NO: 45881 - protein, 280 aa, Enterobacter mori
  REGION 1..280: note = tr|A0A2J0NF81|A0A2J0NF81_9ENTR NADPH-dependent 7-cyano-7-deazaguanine reductase OS=Enterobacter mori; OX = 539813 GN=queF PE=3 SV=1
MSYENHQALTGLTLGKSTDYRDTYDASLLQGVPRSLNRDPLGLHADALPFVGGDIWTLYELSWLNARGLPQVAVGHVELDYASVNLVESKSFKLYLNSFNQTTFNSWEDVQATLERDLRACAQGNVAVSLYRLNELEGQPIAHFNGACIDDQDIEVESYEFSTDYLENAASGKVVEETLVSHLLKSNCLITHQPDWGSVQIQYRGPKIDREKLLRYLVSFRHHNEFHEQCVERIFNDIMRFCQPEKLSVYARYTRRGGLDINPWRTNTDFVPATGRLVRQ

SEQ ID NO: 45882 - protein, 78 aa, Enterobacter mori
  REGION 1..78: note = tr|A0A2U2NGJ6|A0A2U2NGJ6_9ENTR NADPH-dependent 7-cyano-7-deazaguanine reductase QueF (Fragment); OS = Enterobacter mori OX=539813 GN=DEM28_24770 PE=3 SV=1
FSFRNHGDFHEDCMNIIMNDLIDLMDPHYIEVWGKFTPRGVISIDPYTNYGRPDSKYEKMAEHRLMNHDLYPEKIDNR

SEQ ID NO: 45883 - protein, 280 aa, unidentified
  source 1..280: note = Enterobacter roggenkampii
  REGION 1..280: note = tr|A0A1S2AF25|A0A1S2AF25_9ENTR NADPH-dependent 7-cyano-7-deazaguanine reductase OS=Enterobacter roggenkampii OX=1812935 GN=queF PE=3 SV=1
MSYENHQALTGLTLGKSTDYRDTYDASLLQGVPRSLNRDPLGLHADALPFVGGDIWTLYELSWLNARGLPQVAVGHVELDYASVNLVESKSFKLYLNSFNQTKFNSWDDVQRTLERDLSACAQGKVSVSLYRLHELEGQPVAHFNGTCIDDQDIEVENYEFSADYLENAASGKVVEETLVSHLLKSNCLITHQPDWGSVQIQYRGPKIDREKLLRYLVSFRHHNEFHEQCVERIFSDIQRFCQPEKLSVYARYTRRGGLDINPWRTNTDFVPATGRLVRQ

SEQ ID NO: 45884 - protein, 280 aa, unidentified
  source 1..280: note = Enterobacter roggenkampii
  REGION 1..280: note = tr|A0A5D1UBD9|A0A5D1UBD9_9ENTR NADPH-dependent 7-cyano-7-deazaguanine reductase OS=Enterobacter roggenkampii OX=1812935 GN=queF PE=3 SV=1
MSYENHQALTGLTLGKSTDYRDTYDASLLQGVPRSLNRDPLGLHADALPFVGGDIWTLYELSWLNARGLPQVAVGHVELDYASVNLVESKSFKLYLNSFNQTKFNSWDDVQHTLERDLSACAQGKVSVSLYRLHELEGQPVAHFNGTCIDDQDIEVENYEFSADYLENAASGKVVEETLVSHLLKSNCLITHQPDWGSVQIQYRGPKIDREKLLRYLVSFRHHNEFHEQCVERIFSDIQRFCQPEKLSVYARYTRRGGLDINPWRTNTDFVPATGRLVRQ

SEQ ID NO: 45885 - protein, 280 aa, unidentified
  source 1..280: note = Enterobacter sichuanensis
  REGION 1..280: note = tr|A0A0F1AG69|A0A0F1AG69_9ENTR NADPH-dependent 7-cyano-7-deazaguanine reductase OS=Enterobacter sichuanensis OX=2071710 GN=queF PE=3 SV=1
MSYENHQALTGLTLGKSTDYRDTYDASLLQGVPRSLNRDPLGLHADALPFVGGDIWTLYELSWLNARGLPQVAVGHVELDYASQNLVESKSFKLYLNSLNQTKFNSWDDVQHTLERDLSACAQGKVSVSLYRLHELEGQPIAHFNGTCIDDQDIEVENYEFSADYLENAASGKVVDETLVSHLLKSNCLITHQPDWGSVQIQYRGPKIDREKLLRYLVSFRHHNEFHEQCVERIFSDIQRFCQPEKLSVYARYTRRGGLDINPWRTNTDFVPATGRLVRQ

SEQ ID NO: 45886 - protein, 280 aa, Enterobacter soli
  REGION 1..280: note = tr|A0A198H1U6|A0A198H1U6_9ENTR NADPH-dependent 7-cyano-7-deazaguanine reductase OS=Enterobacter soli ATCC BAA-2102 OX=1354262 GN=queF PE=3 SV=1
MSYENHQALTGLTLGKSTDYRDTYDATLLQGVPRSLNRDPLGLHADALPFVGGDIWTLYELSWLNARGLPQVAVGHVELDYASLNLVESKSFKLYLNSFNQTRFDSWDDVLHTLERDLRACAKGDVMVSLYRLHELEGQPIAHFNGTCIDEQDIDIDNYEFSTDYLENAAGGKVVEETLVSHLLKSNCLITHQPDWGSVQIQYSGPKIDREKLLRYLVSFRHHNEFHEQCVERIFNDIQRFCQPEKLSVYARYTRRGGLDINPWRTNTDFVPATGRLVRQ

SEQ ID NO: 45887 - protein, 280 aa, Enterobacter sp.
  REGION 1..280: note = tr|A4WDY1|A4WDY1_ENT38 NADPH-dependent 7-cyano-7-deazaguanine reductase OS=Enterobacter sp. (strain 638) OX=399742 GN=queF PE=3 SV=1
MSYENHQALTGLTLGKTTDYRDTYDASLLQGVPRSLNRDPLGLRADALPFVGGDIWTLYELSWLNARGLPQVAVGHVELDYASVNLVESKSFKLYLNSFNQTRFDSWDDVQRTLERDLSACAQGNVTVALYRLHELEGQPIAHFHGACLDDQEIEIDNYEFSTDYLENATDSKVVEETLVSHLLKSNCLITHQPDWGSVQIQYRGPKIDREKLLRYLVSFRHHNEFHEQCVERIFNDIQRFCQPEKLSVYARYTRRGGLDINPWRTNTDFVPAIGRLVRQ

SEQ ID NO: 45888 - protein, 281 aa, Enterobacter sp.
  REGION 1..281: note = tr|R9VQC1|R9VQC1_9ENTR NADPH-dependent 7-cyano-7-deazaguanine reductase OS=Enterobacter sp. R4-368 OX=1166130 GN=queF PE=3 SV=1
MSSYDNHQALAGLTLGKTTDYRDTYDASLLQGVPRSLNRDPLGLKADSLPFRGADIWTLYELSWLNAKGLPQVAVGHVELDHASVNLVESKSFKLYLNSFNQTRFASWQEVHDTLQRDLSACAQGTVNVVLYRIDELEGQPIAHFPGVCIDDQDIEIANYEFDAALLTDAASGKVVEETLVSHLLKSNCLITHQPDWGSVQIQYRGAQIDREKLLRYLVSFRHHNEFHEQCVERIFTDILRFCQPESLSVYARYTRRGGLDINPWRTNTDFVPATGRLVRQ

SEQ ID NO: 45889 - protein, 281 aa, unidentified
  source 1..281: note = Enterobacterales bacterium
  REGION 1..281: note = tr|A0A389M7A5|A0A389M7A5_9GAMM NADPH-dependent 7-cyano-7-deazaguanine reductase OS=Enterobacterales bacterium OX=1993870 GN=queF PE=3 SV=1
MSSYQDNPALSQLTLGKPTPYRDQYDASLLQAVPRSMNREPLGLYPDALPFHGADIWTLYELSWLNTKGLPQVAVGEISLNANSVNLIESKSFKLYLNSFNQSKFDTWDNVLSTLTRDLSQCAEGDVIVRLSRLNDVEGSKIGHFDGECIDDQDIEIDNYEFSTGYLTDAAGDDIVEESLVSHLLKSNCLITHQPDWGSVQIQYRGPKIDREALLRYLVSFRNHNEFHEQCVERIFNDILAFCAPQALSVYARYTRRGGLDINPWRSNFPFTPATARLVRQ

SEQ ID NO: 45890 - protein, 281 aa, unidentified
  source 1..281: note = Enterobacterales bacterium
  REGION 1..281: note = tr|A0A2I0FQZ5|A0A2I0FQZ5_9GAMM NADPH-dependent 7-cyano-7-deazaguanine reductase OS=Enterobacterales bacterium CwR94 OX=2025587 GN=queF PE=3 SV=1
MSSYDNHQALSGLTLGKPTEYHDSYDASLLQAVPRALNREPLGLFPDNLPFQGADIWTLYELSWLNAKGVPQVAVGEVTLDAFSINLVESKSFKLYLNSFNQTRFADWGEVRTTLERDLSACAQGNVSVALYRLQEIEGQPIGRMQGECIDEQDIAIDNYQFDAQLLANAAGSEVVEETLVSHILKSNCLITHQPDWGSVQISYRGPRLCREALLRYLVSFRHHNEFHEQCVERIFNDIQRFCQPESLSVYARYTRRGGLDINPWRSNTTFRPAHSRLVRQ

SEQ ID NO: 45891 - protein, 281 aa, unidentified
  source 1..281: note = Enterobacteriaceae bacterium
  REGION 1..281: note = tr|A0A3C0H3V7|A0A3C0H3V7_9ENTR NADPH-dependent 7-cyano-7-deazaguanine reductase OS=Enterobacteriaceae bacterium OX=1849603 GN=queF PE=3 SV=1
MTSYENHAALSGLTLGKSTAYRDIYDASLLQPVPRSLNRDPLGLRADALPFHGADIWTLYELSWLNNNGLPQVGVGHVSIDSASVNLVESKSFKLYLNSFNQTRFASWDEVQQTLAQDLGRCAQGNVDVKLFRLHELEGQTVAAFDGTCIDDQPITIDNYEFDADYLAGAAGDRVVEETLVSHLLKSNCLITHQPDWGSVQIRYNGPQIDREKLLRYLVSFRHHNEFHEQCVERIFNDIMRFCQPTSLSVYARYTRRGGLDINPWRSNTDFTPATGRLVRQ

SEQ ID NO: 45892 - protein, 281 aa, unidentified
  source 1..281: note = Enterobacteriaceae bacterium
  REGION 1..281: note = tr|A0A427C6C5|A0A427C6C5_9ENTR NADPH-dependent 7-cyano-7-deazaguanine reductase OS=Enterobacteriaceae bacterium CCUG 66741 OX=1851514 GN=queF PE=3 SV=1
MSSYENHQALSGLTLGKSTDYRDIYDASLLQPVPRSLNRDPLGLHADNLPFHGGDIWTLYELSWLNAKGLPQVAVGHVELSDTSVNLVESKSFKLYLNSFNQTRFADWEEVRATLERDLRHCAQGDVTVALYRIDEMEGQPIAHFHGACIDEQDIEIDSYEFSADYLQDAASGKVVEETLVSHLLKSNCLITHQPDWGSVQIQYRGPKIDREKLLRYLVSFRHHNEFHEQCVERIFNDIQRFCQPESLSVYARYTRRGGLDINPWRSNTDFVPAIGRLVRQ

SEQ ID NO: 45893 - protein, 214 aa, Enterorhabdus caecimuris
  REGION 1..214: note = tr|A0A4S4G5S4|A0A4S4G5S4_9ACTN NADPH-dependent 7-cyano-7-deazaguanine reductase OS=Enterorhabdus caecimuris OX=671266 GN=queF PE=3 SV=1
MAPEGSVDSSALAAIAAHLKRSAEPAEEPAKSGAQAPSTPEAPCAVGASGRDEEETRAGGVTHLGSQGTQYPTDYDPSVLETFENKHPGNDYFVKFNCPEFTSLCPITGQPDFATIYISYVPGERMVESKSLKLYLFSFRNHGDFHEDCMNIIMKDLIALMDPKYIEVWGKFTPRGGISIDPYCNYGRAGTPWEKVAWERLTQHDMYPEKVDNR

SEQ ID NO: 45894 - protein, 236 aa, Enterorhabdus caecimuris
  REGION 1..236: note = tr|R9L4G1|R9L4G1_9ACTN NADPH-dependent 7-cyano-7-deazaguanine reductase OS=Enterorhabdus caecimuris B7 OX=1235794 GN=queF PE=3 SV=1
MKPMEMAEALFGGEGNADGVEEMAPEGSVDSSALAAIAAHLKRSAEPAEEPAKSGAQAPSAPEAPCAAGTSGRDEGETRAGGVTHLGSQGTQYPTDYDPSVLETFENKHPGNDYFVKFNCPEFTSLCPITGQPDFATIYISYVPGERMVESKSLKLYLFSFRNHGDFHEDCMNIIMKDLISLMDPKYIEVWGKFTPRGGISIDPYCNYGRAGTPWEKVAWERLTQHDMYPEKVDNR

SEQ ID NO: 45895 - protein, 154 aa, Enterorhabdus sp.
  REGION 1..154: note = tr|A0A4S2FEL6|A0A4S2FEL6_9ACTN NADPH-dependent 7-cyano-7-deazaguanine reductase OS=Enterorhabdus sp. NM05_H27 OX=2516956 GN=queF PE=3 SV=1
MTHLGSQGTQYPTDYDPSVLETFVNKHPGNDYFVKFNCPEFTSLCPITGQPDFATIYISYVPGELMVESKSLKLYLFSFRNHGDFHEDCMNIIMKDLIALMDPKYIEVWGKFTPRGGISIDPYCNYGRAGTPWEKVAWERLTQHDMYPEKVDNR

SEQ ID NO: 45896 - protein, 281 aa, Enterovibrio coralii
  REGION 1..281: note = tr|A0A135I6H9|A0A135I6H9_9GAMM NADPH-dependent 7-cyano-7-deazaguanine reductase OS=Enterovibrio coralii; OX = 294935 GN=queF PE=3 SV=1
MSKYQDAKELAGLTLGQKTDYQEHYAPELLQPVPRSLNRDDLDLGDSLPFTGYDIWTLYELSWLNAKGLPQVAIGEVRLPATSPNLIESKSFKLYLNSFNQTKFENWQEVVDTLAKDLSACAGADVDVTILPLEEFSNASVVAFGGENIDEQDIAIDNYEFDASLLEGAAEGPVVTETLNSNLLKSNCLITSQPDWGSVRIAYKGKRINREKLLRYIVSFRRHNEFHEQCVERIFTDLMKYCQPELLTVYARYTRRGGLDINPYRTNMGKTPSENNRLARQ

SEQ ID NO: 45897 - protein, 281 aa, Enterovibrio nigricans
  REGION 1..281: note = tr|A0A1T4UBX6|A0A1T4UBX6_9GAMM NADPH-dependent 7-cyano-7-deazaguanine reductase OS=Enterovibrio nigricans DSM 22720 OX=1121868 GN=queF PE=3 SV=1
MSKYQDAKELAGLTLGQKTDYQEHYAPELLQPVPRSLNRDDLDLGDSLPFTGYDIWTLYELSWLNAKGLPQVAIGEVRLPATSPNLIESKSFKLYLNSFNQTKFKNWQEVVDTLAKDLSACAGSDVDVTILPLEEFSNASVVAFGGENIDEQDIEVDNYEFDASLLEGAAEGPIVTETLNSNLLKSNCLITSQPDWGSVRIAYKGKRINREKLLRYIVSFRRHNEFHEQCVERIFTDLMKYCQPELLTVYARYTRRGGLDINPYRTNMGKTPSENNRLARQ

SEQ ID NO: 45898 - protein, 281 aa, Enterovibrio norvegicus
  REGION 1..281: note = tr|A0A4U1ZVR7|A0A4U1ZVR7_9GAMM NADPH-dependent 7-cyano-7-deazaguanine reductase OS=Enterovibrio norvegicus OX=188144 GN=queF PE=3 SV=1
MSKYQDAKELAGLTLGQKTDYQEHYAPELLQPVPRSLNRDDLDMGETLPFTGYDVWTLYELSWLNAKGLPQVAIGEVRLPATSPNLIESKSFKLYLNSFNQTKFKNWQEVVDTLAKDLSACAGEDVDVTILPVEEFTNTPVVAFGGENIDEQDITIDDYVFDSRLLKGAADGPMVSETLNSNLLKSNCLITNQPDWGSVRIAYKGKRINREKLLRYIVSFRRHNEFHEQCVERIFTDIMKYCQPELLTVYARYTRRGGLDINPYRTNMGKTPSENNRLARQ

SEQ ID NO: 45899 - protein, 281 aa, Enterovibrio norvegicus
  REGION 1..281: note = tr|A0A1I5W0P8|A0A1I5W0P8_9GAMM NADPH-dependent 7-cyano-7-deazaguanine reductase OS=Enterovibrio norvegicus DSM 15893 OX=1121869 GN=queF PE=3 SV=1
MSKYQDAKELAGLTLGQKTDYQEHYAPELLQPVPRSLNRDDLDMGETLPFTGYDVWTLYELSWLNAKGLPQVAIGEVRLPATSPNLIESKSFKLYLNSFNQTKFKNWQEVVDTLAKDLSACAGEDVDVTILPVEEFTNTPVVAFGGENIDEQDITIDDYVFDSRLLKGAADGPMVSETLNSNLLKSNCLITSQPDWGSVRIAYKGKRINREKLLRYIVSFRSHNEFHEQCVERIFTDIMKYCQPELLTVYARYTRRGGLDINPYRTNMGKTPSENNRLARQ

SEQ ID NO: 45900 - protein, 281 aa, unidentified
  source 1..281: note = Enterovibrio pacificus
  REGION 1..281: note = tr|A0A1C3EI62|A0A1C3EI62_9GAMM NADPH-dependent 7-cyano-7-deazaguanine reductase OS=Enterovibrio pacificus; OX = 1080227 GN=queF PE=3 SV=1
MSNYDNASELANLTLGQQTEYKEQYAPELLQPVPRSLNREELELKDVLPFTGYDIWSLYELSWLNDKGLPQVALGEVRLPASSPNLIESKSFKLYLNSFNQTRFSSWQDVVEALAKDLSACAGAEVDVTVLPLDEFDDQPIVSIGGENIDNQDISIDSYELDPSLLEGATGDDVVTETLSSNLLKSNCLITNQPDWGSVRIAYTGKQINREKLLRYIVSFRRHNEFHEQCVERMFCDLMKYCQPEFLTVYARYTRRGGLDINPYRTNMGKTPSENNRLARQ

SEQ ID NO: 45901 - protein, 281 aa, Enterovibrio sp.
  REGION 1..281: note = tr|A0A4Q0YNI8|A0A4Q0YNI8_9GAMM NADPH-dependent 7-cyano-7-deazaguanine reductase OS=Enterovibrio sp. CAIM 600 OX=1278244 GN=queF PE=3 SV=1
MSNYDNASELAGLTLGQQTDYKEQYAPELLQAVPRTLNRQELGLDTELPFTGYDIWTLYELSWLNSKGLPQVAIGEVRLPVTSPNLIESKSFKLYLNSFNQTKFASWQEVVETLAKDLSACAGADVDVTIVPVDEFDNQPIVPFGGENIDDQDISISDYELDPALLENAASGETVTETLNSHLLKSNCLITNQPDWGSVRIAYTGKKIDREKLLRYIVSFRRHNEFHEQCVERIFCDVMKYCQPESLTVYARYTRRGGLDINPYRTNMGKTPSENNRLARQ

SEQ ID NO: 45902 - protein, 147 aa, unidentified
  source 1..147: note = Enterovirga rhinocerotis
  REGION 1..147: note = tr|A0A4R7C844|A0A4R7C844_9RHIZ NADPH-dependent 7-cyano-7-deazaguanine reductase OS=Enterovirga rhinocerotis OX=1339210 GN=queF PE=3 SV=1
MTDLLLGRSAALPASPEDAQLDRVPNPHPDTDYLARFTAPEFTSLCPVTGQPDFAILVIDYVPGDWLVESKSLKLYLASFRNHGAFHEDCTVAIGKRLAGLLEPRWLRLGGYWYPRGGIPIDVFWQTGAPPKDLWLPDQGVAPYRGR

SEQ ID NO: 45903 - protein, 272 aa, unidentified
  source 1..272: note = Eoetvoesia caeni
  REGION 1..272: note = tr|A0A366HJX7|A0A366HJX7_9BURK NADPH-dependent 7-cyano-7-deazaguanine reductase OS=Eoetvoesia caeni; OX = 645616 GN=queF PE=3 SV=1
MFDPKLADAPLGHEVAYPQKYDASLLFPIARATNRHALPHMPDWIGADIWHGYEISWLNQKGKPMIAMARFIFPQSTPNLIESKSFKLYLNSFNEERYPGAPAVLDIMRRDLSRAAGAEIEIEFEPVNTRVECTPLEGENIDDADIEITAYRPAPELLRCVDQAQVVSETLTSDLLKSNCPVTGQPDWGSVQIRYTGPRIDREALLAYIVSLRQHDEFHEHCVEKMYCDIWQACKPVALCVYARYTRRGGLDINPWRSSEPVSVEQARTPRQ

SEQ ID NO: 45904 - protein, 154 aa, unidentified
  source 1..154: note = Epibacterium mobile
  REGION 1..154: note = tr|A0A1B1A363|A0A1B1A363_9RHOB NADPH-dependent 7-cyano-7-deazaguanine reductase OS=Epibacterium mobile F1926 OX=1265309 GN=queF PE=3 SV=1
MSEDIYSNLKQLGGETRIPASPEEAELERVPNPQADVAYNVRFTAPEFTSLCPMTGQPDFAHLVIDYVPGPWLVESKSLKLFLTSFRNHGAFHEDCTISIARRLAEFLDPQWLRIGGYWYPRGGIPIDVFWQTGPLPEGVWIPDQGVPPYRGRG

SEQ ID NO: 45905 - protein, 154 aa, unidentified
  source 1..154: note = Epibacterium mobile
  REGION 1..154: note = tr|A0A1H3DI06|A0A1H3DI06_9RHOB NADPH-dependent 7-cyano-7-deazaguanine reductase OS=Epibacterium mobile; OX = 379347 GN=queF PE=3 SV=1
MSEDIYSNLKQLGGETRIPANPEEAELERVPNPQADVAYNVRFTAPEFTSLCPMTGQPDFAHLVIDYVPGPWLVESKSLKLFLTSFRNHGAFHEDCTISIARRLADFLDPQWLRIGGYWYPRGGIPIDVFWQTGPLPEGVWIPDQGVPPYRGRG

SEQ ID NO: 45906 - protein, 154 aa, unidentified
  source 1..154: note = Epibacterium multivorans
  REGION 1..154: note = tr|A0A0P1GDF3|A0A0P1GDF3_9RHOB NADPH-dependent 7-cyano-7-deazaguanine reductase OS=Epibacterium multivorans OX=928856 GN=queF PE=3 SV=1
MTDSIYSNLKQLGGDTVLPTDPSEAELERVQNPQADTAYNVRFVAPEFTSLCPMTGQPDFAHLVIDYVPGEWLVESKSLKLFLGSFRNHGAFHEDCTVSIGRRLAEFLDPQWLRIGGYWYPRGGIPIDVFWQSGPMPESVWIPDQGVPPYRGRG

SEQ ID NO: 45907 - protein, 154 aa, unidentified
  source 1..154: note = Epibacterium ulvae
  REGION 1..154: note = tr|A0A1G5PJ31|A0A1G5PJ31_9RHOB NADPH-dependent 7-cyano-7-deazaguanine reductase OS=Epibacterium ulvae; OX = 1156985 GN=queF PE=3 SV=1
MTDSIYSDLKQLGGATVMPTSPEEAELERVPNPQADVNYNVRFTAPEFTSLCPMTSQPDFAHLVIDYVPGDWLIESKALKLYLGSFRNHGAFHEDCTISIARRLVGFLEPRWLRIGGYWYPRGGIPIDVFWQTGEMPKDVWIPDQGVPPYRGRG

SEQ ID NO: 45908 - protein, 129 aa, unidentified
  source 1..129: note = Epsilonproteobacteria bacterium
  REGION 1..129: note = tr|A0A496XWD2|A0A496XWD2_9PROT NADPH-dependent 7-cyano-7-deazaguanine reductase OS=Epsilonproteobacteria bacterium OX=2026809 GN=queF PE=3 SV=1
MKNKKKYGELEVNQFDINNPQNFWPNTHKKNYKINIKLPEFMCRCPMSGYFDFATIYIQYIPNSLVIELKALKLYINSFASKYISHENSSNEIYDTIYEKLQPKKLKLTAVFNPRGNVSTKIVIDSEDI

SEQ ID NO: 45909 - protein, 125 aa, unidentified
  source 1..125: note = Epsilonproteobacteria bacterium
  REGION 1..125: note = tr|A0A426W1R3|A0A426W1R3_9PROT NADPH-dependent 7-cyano-7-deazaguanine reductase OS=Epsilonproteobacteria bacterium (ex Lamellibrachia satsuma) OX=2496635 GN=queF; PE = 3 SV=1
MKYGEKEIQDFDINKEENYWPNEHKKNYTINIELPEFMCLCPRSGYPDFATMKLSYQPDKKVIELKALKLYINSFMTRHISHENSANEIYDTLYNKLKPKSMKLIADFNPRGNVHTVIEIDSEKC

SEQ ID NO: 45910 - protein, 161 aa, unidentified
  source 1..161: note = Epulopiscium sp.
  REGION 1..161: note = tr|A0A1V2YK98|A0A1V2YK98_9FIRM NADPH-dependent 7-cyano-7-deazaguanine reductase OS=Epulopiscium sp. Nuni2H_MBin003 OX=1884657 GN=queF PE=3 SV=1
MKNTNNEVTLLGKHDIECTYKYTPDLLEVFDNKHPNNDYFVKFNCPEFTSLCPVTGQPDFATIYISYIPYLKLVESKSLKLYLFSFRNHGDFHENCINIIMKDLIKAMDPKYIEVWGKFTPRGGISIDPYCNHGKKGTKFEDMANYRMVNHDMNPEKVDNR

SEQ ID NO: 45911 - protein, 167 aa, unidentified
  source 1..167: note = Epulopiscium sp.
  REGION 1..167: note = tr|A0A1S9CT90|A0A1S9CT90_9FIRM NADPH-dependent 7-cyano-7-deazaguanine reductase OS=Epulopiscium sp. Nele67-Bin004 OX=1764962 GN=queF PE=3 SV=1
MPNIQRTKQEMNDITLLGNQNTQYDFGYNPDVLEVFDNKHPNNDYWVKFNCPEFTSLCPMTGQPDFATIYISYIPSKKMVESKSLKLYLFSFRNHGDFHEDCMNIIMKDLIKVMDPKYIEVWGKFTPRGGISIDPYCNYGKAGTKFEQMAEYRMINHDMNPEKIDNR

SEQ ID NO: 45912 - protein, 124 aa, unidentified
  source 1..124: note = Ereboglobus luteus
  REGION 1..124: note = tr|A0A2U8E228|A0A2U8E228_9BACT NADPH-dependent 7-cyano-7-deazaguanine reductase OS=Ereboglobus luteus; OX = 1796921 GN=queF PE=3 SV=1
MVDPKILETFPNPAPGRDYVIEHTHHEFTSLCPMTGHPDFADITVRYVPDKVCVELKSLKLYFHAFRNEGSFFEAVTNTICDDLGRVMKPRSLTIVSRWKARGGFTSTVTAEWNAKAIRAKRPR

SEQ ID NO: 45913 - protein, 281 aa, Erwinia amylovora
  REGION 1..281: note = tr|D4HWK1|D4HWK1_ERWAC NADPH-dependent 7-cyano-7-deazaguanine reductase OS=Erwinia amylovora (strain CFBP1430) OX=665029 GN=yqcD PE=3 SV=1
MSTYDNHHALEGLTLGQPTEYHHTYQPALLQAVPRSLNRDPLGIHGDSLPFCGADIWTLYELSWLNNKGVPQVALGEVVLDASSVNLIESKSFKLYLNSFNQTKFTDWGEVRQTLERDLSACAVGKVGVALFRLHEIEGQPIGHFDGSCIDEQDIVINDYEFDVSYLQNATGSEIVEEQLVSHLLKSNCLITHQPDWGTVQISYRGPRIQREALLRYLVSFRQHNEFHEQCVERIFSDILRYCKPESLSVYARYTRRGGLDINPWRSNTQFVPGRSRLVRQ

SEQ ID NO: 45914 - protein, 281 aa, Erwinia amylovora; identical to SEQ ID NO: 45913
  REGION 1..281: note = tr|E5B271|E5B271_ERWAM NADPH-dependent 7-cyano-7-deazaguanine reductase OS=Erwinia amylovora ATCC BAA-2158 OX=889211 GN=yqcD PE=3 SV=1

SEQ ID NO: 45915 - protein, 281 aa, Erwinia aphidicola; identical to SEQ ID NO: 44395
  REGION 1..281: note = tr|A0A4R6PDU8|A0A4R6PDU8_ERWAP NADPH-dependent 7-cyano-7-deazaguanine reductase OS=Erwinia aphidicola; OX = 68334 GN=queF PE=3 SV=1

SEQ ID NO: 45916 - protein, 281 aa, Erwinia billingiae
  REGION 1..281: note = tr|D8MW86|D8MW86_ERWBE NADPH-dependent 7-cyano-7-deazaguanine reductase OS=Erwinia billingiae (strain Eb661) OX=634500 GN=queF PE=3 SV=1
MSLTDPHQALSNLTLGKPTEYHDKYQPSLLQAVPRSMNREPLGLYPDSLPFHGADIWTLYELSWLNAKGLPQVAVGEITLQADSVNLIESKSFKLYLNSFNQTKFADWGDVRAALERDLSACAEGKVTVALFRLQEVEGQPIGHFAGSCIDEQDIEIDNYQFTTDYLEQATQPEIVEEQLVSHLLKSNCLITNQPDWGSVQISYRGPRIQREALLRYLVSFRHHNEFHEQCVERIFNDILRFCKPEKLSVYARYTRRGGLDINPWRSNGEFRPGHSRLVRQ

SEQ ID NO: 45917 - protein, 281 aa, Erwinia billingiae
  REGION 1..281: note = tr|A0A5J6LU64|A0A5J6LU64_9GAMM NADPH-dependent 7-cyano-7-deazaguanine reductase QueF OS=Erwinia billingiae OX=182337 GN=queF PE=4 SV=1
MSLTDPHQALSNLTLGKPTEYHDKYQPSLLQAVPRSMNREPLGLYPDSLPFHGADIWTLYELSWLNAKGLPQVAVGEITLQADSINLIESKSFKLYLNSFNQTKFADWGDVRAALERDLSACAEGEVTVALFRLREVEGQPIGHFAGSCIDEQDIEIDNYQFTTDYLEQATQPEIVEEQLVSHLLKSNCLITNQPDWGSVQISYRGPRIQREALLRYLVSFRHHNEFHEQCVERIFNDILRFCKPEKLSVYARYTRRGGLDINPWRSNGEFRPGHSRLVRQ

SEQ ID NO: 45918 - protein, 280 aa, unidentified
  source 1..280: note = Erwinia citreus
  REGION 1..280: note = tr|A0A358L720|A0A358L720_ERWCI NADPH-dependent 7-cyano-7-deazaguanine reductase OS=Erwinia citreus OX=558; GN = queF PE=3 SV=1
MSSDTHQALSGLTLGKPTEYHDQYQPSLLQAVPRSMNREPLGLYPENLPFHGADIWTLYELSWLNAKGLPQVAIGEVSLDAHSINLIESKSFKLYLNSFNQTRFADWGEVRATLERDLSACAQGDVSVALFRLREIEGQPIGHFSGYCIDEQDIEIDNYTFSTDYLQQATQAEVVEEQLVSHLLKSNCLITNQPDWGSVQITYRGPRIQREALLRYLVSFRHHNEFHEQCVERIFNDILRFCQPESLSVYARYTRRGGLDINPWRSNGVFKPGLSRLVRQ

SEQ ID NO: 45919 - protein, 280 aa, unidentified
  source 1..280: note = Erwinia gerundensis
  REGION 1..280: note = tr|A0A0U5L2Q7|A0A0U5L2Q7_9GAMM NADPH-dependent 7-cyano-7-deazaguanine reductase OS=Erwinia gerundensis; OX = 1619313 GN=queF PE=3 SV=1
MSYDNHQALNSLTLGKPTAYHDIYDASLLQAVPRSMNREPLGLYPESLPFQGADIWTLYELSWLNSKGVPQVAVGEVVLDASSQNLIESKSFKLYLNSFNQTKFADWGSVRTTLERDLSACAQGDVSVALFRLQEVEGQPIGHMAGVCIDEQDITIDDYQFNADYLDNATRSEVVEESLVSHLLKSNCLITNQPDWGSVMIRYRGPRIDREALLRYLVSFRHHNEFHEQCVERIFNDVLRYCKPEQLTVYARYTRRGGLDINPWRTNTPFVPCRSRLVRQ

SEQ ID NO: 45920 - protein, 278 aa, unidentified
  source 1..278: note = Erwinia iniecta
  REGION 1..278: note = tr|A0A0L7T840|A0A0L7T840_9GAMM NADPH-dependent 7-cyano-7-deazaguanine reductase OS=Erwinia iniecta; OX = 1560201 GN=queF PE=3 SV=1
MQMNNMDGMTLLGKNTDYIQHYSPDLLETLPRSYGRNEINIKSDNLPFLGFDLWTGFELSWLNHRGKPVVAIAEFIIPATSSNLIESKSFKLYLNSFNQTKFDSPDQVATTLENDLTLAAKGEVNVKIYPHLNHYPLLTTSLPGECIDHLDIQIDDYHFNPQHLTDAASGDYVHESLSSNLLKSNCLVTNQPDWGSVVIKYEGKKIDREKLLRYLISFRMHNEFHEQCVERIFSDILHACRPDKLSVFARYTRRGGLDINPFRSNFEETPAVPRLIRQ

SEQ ID NO: 45921 - protein, 281 aa, unidentified
  source 1..281: note = Erwinia iniecta
  REGION 1..281: note = tr|A0A0L7T1A2|A0A0L7T1A2_9GAMM NADPH-dependent 7-cyano-7-deazaguanine reductase OS=Erwinia iniecta; OX = 1560201 GN=queF PE=3 SV=1
MSTHEQHQALHGLTLGKATEYHDRYDASLLQAVPRSMNREPLGLYPDSLPFSGADIWTLYELSWLNSKGVPQVAVGEVVLNASSLNLIESKSFKLYLNSFNQTPFSDWGEVRQTLERDLSACAQGEVSVALFRLQEVEGQPIGHFDGNCIDEQDITIDNYQFNADYLKNATATEVVEETLVSHLLKSNCLITNQPDWGSVQIRYRGPRIDREALLRYLVSFRHHNEFHEQCVERIFNDIQRFCQPETLSVYARYTRRGGLDINPWRTNSDFTPSHSRLVRQ

SEQ ID NO: 45922 - protein, 278 aa, Erwinia mallotivora
  REGION 1..278: note = tr|A0A014NJZ7|A0A014NJZ7_9GAMM NADPH-dependent 7-cyano-7-deazaguanine reductase OS=Erwinia mallotivora; OX = 69222 GN=queF PE=3 SV=1
MNPENITLLGTKTEYIQHYTPSILEAIPRSLNREEIGIKDNAPLPFSGTDLWTAWEISWLNDKGKPVVAIGEFFIPASSPDLIESKSFKLYLNSFNQSRFPDAEHVSALMKKDLSDVAGAPVELKLYTDINSYNNHITNLPGESLDGLDIAIENYEFDASLLKGSTSPSGEIVSETLHSDLLKSNCLVTNQPDWGSVIIRYEGSKIDREKLLRYIISFRNHNEFHEQCVERIYSDIMLYCQPAKLTVFARYTRRGGLDINPFRSNCEQNLLSARLVRQ

SEQ ID NO: 45923 - protein, 281 aa, Erwinia persicina
  REGION 1..281: note = tr|A0A3S7RZE1|A0A3S7RZE1_9GAMM NADPH-dependent 7-cyano-7-deazaguanine reductase OS=Erwinia persicina; OX = 55211 GN=queF PE=3 SV=1
MSSYEHHQALEGLSLGKPTEYHDHYQPELLQAVPRSLNREPLGLYPENLPFSGADIWTLYELSWLNSKGLPQVAIGEVTLDAGSVNLIESKSFKLYLNSFNQTSFANWGEVRQTLERDLSACAQGKVSVALFRLQEIEGQPVGRFSGECIDEQDITIDNYAFSADYLRDATSHERVEEQLVSHLLKSNCLITNQPDWGSVQITYRGPRIRREALLRYLVSFRNHNEFHEQCVERIFNDIQHYCQPESLTVYARYTRRGGLDINPWRTNDTFVASRSRLVRQ

SEQ ID NO: 45924 - protein, 281 aa, Erwinia persicina
  REGION 1..281: note = tr|A0A4U3FFZ4|A0A4U3FFZ4_9GAMM NADPH-dependent 7-cyano-7-deazaguanine reductase OS=Erwinia persicina; OX = 55211 GN=queF PE=3 SV=1
MSSYEHHQALEGLSLGKPTEYHDHYQPELLQAVPRSLNREPLGLYPENLPFSGADIWTLYELSWLNSKGLPQVAIGEVTLDAGSVNLIESKSFKLYLNSFNQTSFANWGEVRQTLERDLSACAQGKVSVALFRLQEIEGQPVGRFSGECIDEQDITIDNYAFSADYLRDATSHERVEEQLVSHLLKSNCLITNQPDWGSVQISYRGPRIRREALLRYLVSFRNHNEFHEQCVERIFNDIQHYCQPESLTVYARYTRRGGLDINPWRTNDTFVASRSRLVRQ

SEQ ID NO: 45925 - protein, 275 aa, Erwinia piriflorinigrans
  REGION 1..275: note = tr|V5ZCB1|V5ZCB1_9GAMM NADPH-dependent 7-cyano-7-deazaguanine reductase OS=Erwinia piriflorinigrans CFBP 5888 OX=1161919 GN=queF PE=3 SV=1
MKTEEITLLGKNTGYTQHYAPELLESLPRSRGRDEISVKHGSLPFSGYDLWTGFEVSWLNDKGKPLVAVAEFFIPASSHNLIESKSFKLYLNSFNQTKFTTPDRVVATLEKDLSLAAGGNVKVKLYTNFDDYSFLIAPLPGECIDHLDIEIDNYVFNPDYLFDSVSGDVVSETLASNLLKSNCLVTNQPDWGSVIIRYEGKRINRENLLRYLISFRTHNEFHEQCVERIFSDIRHYCKPDKLTVFARYTRRGGLDINPFRSNFEEDLPVERLIRQ

SEQ ID NO: 45926 - protein, 281 aa, Erwinia piriflorinigrans
  REGION 1..281: note = tr|V5Z4B7|V5Z4B7_9GAMM NADPH-dependent 7-cyano-7-deazaguanine reductase OS=Erwinia piriflorinigrans CFBP 5888 OX=1161919 GN=queF PE=3 SV=1
MSTYDNHHALKGLTLGQPTEYHDTYQPALLQAVPRSLNREPLGLYPESLPFGGADIWTMYELSWLNGKGVPQVAVGEVILDASSINLIESKSFKLYLNSFNQTKFADWGEVRQILERDLSACAEGEVSVALYRLHEIEGQPVGHFDGYCIDEQDIVIDNYEFNAGYLHDAVGDEIVEEQLVSHLLKSNCLITNQPDWGTVQISYRGPRIQREALLRYLVSFRQHNEFHEQCVERIFSDILRYCRPESLSVYARYTRRGGLDINPWRSNTHFTPGHSRLVRQ

SEQ ID NO: 45927 - protein, 281 aa, Erwinia psidii
  REGION 1..281: note = tr|A0A3N6SQP6|A0A3N6SQP6_9GAMM NADPH-dependent 7-cyano-7-deazaguanine reductase OS=Erwinia psidii; OX = 69224 GN=queF PE=3 SV=1
MSLKDTQQTLSGLTLGKPTEYHDIYQPSLLQAVPRSMNREPLGLFPQRLPFHGADIWTLYELSWLNAKGVPQVAVGEVTLDANSINLIESKSFKLYLNSFNQTRFADWDEVRHTLEQDLSHCAQGEVSVALFRLQEVEGQPIGHFSGECIDEQDIEIDSYEFSTTHLSQATQSEVVEEQLVSHLLKSNCLITNQPDWGSVQISYRGPRIRHEALLRYLISFRHHNEFHEQCVERIFNDILRFCQPEKLSVYARYTRRGGLDINPWRSNGTFIPARSRLVRQ

SEQ ID NO: 45928 - protein, 281 aa, Erwinia pyrifoliae
  REGION 1..281: note = tr|D2T5N3|D2T5N3_ERWP6 NADPH-dependent 7-cyano-7-deazaguanine reductase OS=Erwinia pyrifoliae (strain DSM 12163 / CIP 106111 / Ep16/96) OX=644651; GN = yqcD PE=3 SV=1
MSTYDNHHALEGLTLGQPTEYHDTYQPALLQAVPRSLNRDPLGLDGDSLPFCGADIWTLYELSWLNSKGVPQVALGEVVLDACSVNLIESKSFKLYLNSFNQTKFADWGEVRQTLERDLSACALGKVSVALFRLHEIEGQPIGHFDGSCIDEQDIEINNYQFDVSYLQNATGSEVVEEQLVSHLLKSNCLITDQPDWGSVQISYRGPRIQREALLRYLVSFRQHNEFHEQCVERIFSEILRYCKPESLSVYARYTRRGGLDINPWRSNTQFVPGRSRLVRQ

SEQ ID NO: 45929 - protein, 281 aa, Erwinia rhapontici
  REGION 1..281: note = tr|A0A4R7GIS1|A0A4R7GIS1_ERWRD NADPH-dependent 7-cyano-7-deazaguanine reductase OS=Erwinia rhapontici; OX = 55212 GN=queF PE=3 SV=1
MSSYDHHQALEGLTLGKPTEYHDSYQPELLQAVPRSLNREPLGLYPDNLPFSGADIWTLYELSWLNSKGLPQVALGEVTLDAGSVNLIESKSFKLYLNSFNQTQFADWGDVRQTLERDLSDCAAGKVSVALFRLQEIEGQPIGRFNGECIDEQDIVIDHYQFNADYLRDATSNERVEEQLVSHLLKSNCLITNQPDWGSVQISYRGPRIQREALLRYLVSFRHHNEFHEQCVERIFNDILRFCQPESLTVYARYTRRGGLDINPWRTNDKFVASRSRLVRQ

SEQ ID NO: 45930 - protein, 281 aa, Erwinia sp.
  REGION 1..281: note = tr|A0A3N1WHY2|A0A3N1WHY2_9GAMM NADPH-dependent 7-cyano-7-deazaguanine reductase OS=Erwinia sp. JUb26; OX = 2485126 GN=queF PE=3 SV=1
MSNYNNHQALQGLTLGQPTEYHDSYQPALLQAVPRSLNREPLGLYPDNLPFCGADIWTLYELSWLNSKGLPQVAVGEVSLSADSVNLIESKSFKLYLNSFNQTSFSDWDDVRHTLERDLSACAEGEVSANLFRLQDIEGQPIGHFDGHCIDEQDIVIDSYEFNADYLRDAADGDVVEEQLVSHLLKSNCLITNQPDWGSVQISYRGPRIQREALLRYLVSFRHHNEFHEQCVERIFSDILRFCQPETLSVYARYTRRGGLDINPWRTNADFAPGRARLVRQ

SEQ ID NO: 45931 - protein, 281 aa, Erwinia sp.
  REGION 1..281: note = tr|A0A0Q4N884|A0A0Q4N884_9GAMM NADPH-dependent 7-cyano-7-deazaguanine reductase OS=Erwinia sp. Leaf53; OX = 1736225 GN=queF PE=3 SV=1
MSSYDNHQALDGLTLGKPTEYHDRYQPTLLQAVPRSLNREPLGLFPDNLPFSGADIWTLYELSWLNAKGLPQVAVAEVSLDAASSNLIESKSFKLYLNSFNQTPFADWGDVRNTLERDLSACAEGDVAVALFRLQEIEGQPIGHFSGHCIDEQDITIDNYQFSTDYLQDATGQEVVEEQLVSHLLKSNCLITNQPDWGSVQISYRGPRIQREALLRYLVSFRHHNEFHEQCVERIFNDILRFCQPETLSVYARYTRRGGLDINPWRTNGSFRPSRSRLVRQ

SEQ ID NO: 45932 - protein, 281 aa, Erwinia tasmaniensis
  REGION 1..281: note = sp|B2VFX1|QUEF_ERWT9 NADPH-dependent 7-cyano-7-deazaguanine reductase OS=Erwinia tasmaniensis (strain DSM 17950 / CIP 109463 / Et1/99) OX=465817 GN=queF; PE = 3 SV=1
MPTYDNHHALKGLTLGQPTEYHDTYQPALLQAVPRRLNREPLGLYPDSLPFGGADIWTLYELSWLNSKGVPQVAVGEVVLDASSINLIESKSFKLYLNSFNQTKFANWGEVRQILERDLSACAAGKVSVALFRLHEIEGQPVGHFDGYCIDEQDIVIDSYAFDAGYLHNAVGNEIVEEQLVSHLLKSNCLITNQPDWGTVQISYRGPRIQREALLRYLVSFRQHNEFHEQCVERIFSDILRYCQPESLSVYARYTRRGGLDINPWRSNTHFTPGRSRLVRQ

SEQ ID NO: 45933 - protein, 281 aa, Erwinia tracheiphila
  REGION 1..281: note = tr|A0A0M2K7L9|A0A0M2K7L9_9GAMM NADPH-dependent 7-cyano-7-deazaguanine reductase OS=Erwinia tracheiphila; OX = 65700 GN=queF PE=3 SV=1
MSLKDSHQVLSSLTLGKPTQYHDNYQPSLLQAVPRSMNREPLGLFPENLPFHGADIWTLYELSWLNAKGLPQVAVGEVTLEASSINLIESKSFKLYLNSFNQTRFASWEDVRQALERDLSHCAQGKVSVALFRLQELEGQPVSHFDGKCIDEQDIEIDSYAFSTDWLSKATQSYKVEEKLVSHLLKSNCLITHQPDWGSVQINYRGPRICHEALLRYLISFRQHNEFHEQCVERIFNDILHFCQPENLSIYARYTRRGGLDINPWRSNVPFIPARSRLVRQ

SEQ ID NO: 45934 - protein, 281 aa, Erwinia tracheiphila
  REGION 1..281: note = tr|A0A345CTI1|A0A345CTI1_9GAMM NADPH-dependent 7-cyano-7-deazaguanine reductase OS=Erwinia tracheiphila; OX = 65700 GN=queF PE=3 SV=1
MSLKDSHQVLSSLTLGKPTQYHDNYQPSLLQAIPRSMNREPLGLFPENLPFHGADIWTLYELSWLNAKGLPQVAVGEVTLEASSINLIESKSFKLYLNSFNQTRFASWEDVRQALERDLSHCAQGKVSVALFRLQELEGQPVSHFDGKCIDEQDIEIDSYAFSTDWLSKATQSYKVEEKLVSHLLKSNCLITHQPDWGSVQINYRGPRICHEALLRYLISFRQHNEFHEQCVERIFNDILHFCQPENLSIYARYTRRGGLDINPWRSNVPFIPARSRLVRQ

SEQ ID NO: 45935 - protein, 281 aa, Erwinia typographi
  REGION 1..281: note = tr|A0A0A3Z2E7|A0A0A3Z2E7_9GAMM NADPH-dependent 7-cyano-7-deazaguanine reductase OS=Erwinia typographi; OX = 371042 GN=queF PE=3 SV=1
MSSKDPHQALSNLTLGKPTEYHDKYQPSLLQAVPRSMNREPLGLYPHSLPFHGADIWTLYELSWLNQKGLPQVALGEVILNADSVNLIESKSFKLYLNSFNQTKFADWGEVRAVLERDLSACAQGEVSVALFRLQEVEGQPIGHFAGYCIDEQDIDIDNYRFTTDYLEQATQPDIVEEQLVSHLLKSNCLITHQPDWGSVQISYRGPRIQREALLRYLVSFRHHNEFHEQCVERIFNDILRFCRPEQLSVYARYTRRGGLDINPWRSNGQFRPGHSRLVRQ

SEQ ID NO: 45936 - protein, 158 aa, unidentified; identical to SEQ ID NO: 45433
  source 1..158: note = Erysipelatoclostridium ramosum
  REGION 1..158: note = tr|A0A3E3AIG8|A0A3E3AIG8_9FIRM NADPH-dependent 7-cyano-7-deazaguanine reductase OS=Erysipelatoclostridium ramosum OX=1547 GN=queF PE=3 SV=1

SEQ ID NO: 45937 - protein, 158 aa, unidentified; identical to SEQ ID NO: 45433
  source 1..158: note = Erysipelatoclostridium ramosum
  REGION 1..158: note = tr|B0N7Y2|B0N7Y2_9FIRM NADPH-dependent 7-cyano-7-deazaguanine reductase OS=Erysipelatoclostridium ramosum DSM 1402 OX=445974 GN=queF PE=3 SV=1

SEQ ID NO: 45938 - protein, 157 aa, unidentified
  source 1..157: note = Erysipelatoclostridium sp.
  REGION 1..157: note = tr|A0A1Y4MXW6|A0A1Y4MXW6_9FIRM NADPH-dependent 7-cyano-7-deazaguanine reductase OS=Erysipelatoclostridium sp. An173 OX=1965571 GN=queF PE=3 SV=1
MDNLTLLGSKNTEYKDDYAPEVLETFDNKHPDNDYFVKFNCPEFTSLCPITGQPDFATIYISYVPNIKMVESKSLKLYLFSFRNHGDFHEDCMNIIMKDLIKLLDPKYIEVWGKFTPRGGISIDPYCNYGKPGTKWEDIAWNRLANHDLYPEKIDNR

SEQ ID NO: 45939 - protein, 157 aa, unidentified; identical to SEQ ID NO: 45938
  source 1..157: note = Erysipelatoclostridium sp.
  REGION 1..157: note = tr|A0A1Y4QQH1|A0A1Y4QQH1_9FIRM NADPH-dependent 7-cyano-7-deazaguanine reductase OS=Erysipelatoclostridium sp. An15 OX=1965566 GN=queF PE=3 SV=1

SEQ ID NO: 45940 - protein, 157 aa, unidentified
  source 1..157: note = Erysipelotrichaceae bacterium
  REGION 1..157: note = tr|A0A3G9JKT3|A0A3G9JKT3_9FIRM NADPH-dependent 7-cyano-7-deazaguanine reductase OS=Erysipelotrichaceae bacterium SG0102 OX=2487118 GN=queF PE=3 SV=1
MSTQLKALGAKTQYPTDYDPHVLETFDNKHPEHDYFVKFNCPEFTSLCPITGQPDFATIYISYVPSQKMVESKSLKLYLFSFRNHGAFHEDCTNIIMNDLIALMDPKYIEVWAKFTPRGGLSIDPYCNYGKPGTRWQEAAWERLKNHDLYPEKIDNR

SEQ ID NO: 45941 - protein, 160 aa, unidentified
  source 1..160: note = Erysipelotrichaceae bacterium
  REGION 1..160: note = tr|A0A3D2W9J9|A0A3D2W9J9_9FIRM NADPH-dependent 7-cyano-7-deazaguanine reductase OS=Erysipelotrichaceae bacterium OX=2049044 GN=queF PE=3 SV=1
MREKEGLTKLGSAGTKYSTDYDPSVLETFINKHQDNDYWVKFNCPEFTSLCPITGQPDFATVYISYVPDVKMVESKSLKLYLFSFRNHGDFHEDCVNVIMKDLIRLMDPKYIEVWGKFLPRGGISIDPYCNYGRPGTKWEVIAEDRLAKHDLYPETINNR

SEQ ID NO: 45942 - protein, 155 aa, unidentified
  source 1..155: note = Erythrobacter aquimixticola
  REGION 1..155: note = tr|A0A419RT69|A0A419RT69_9SPHN NADPH-dependent 7-cyano-7-deazaguanine reductase OS=Erythrobacter aquimixticola OX=1958945 GN=queF PE=3 SV=1
MSDTDTSGQPKFLGQQTALPASPDDATLDYVPNPRTGELFLVRFAAPEFTSLCPVTGAPDFAHLVIDYAPGQTIVESKSLKLFLGSFRNHNGFHEDVTVGIGQRLFSEMQPKWLRIGGYWYPRGGIPIDVFWQSGAPPEGLWLPDQGVAPYRGRG

SEQ ID NO: 45943 - protein, 187 aa, unidentified
  source 1..187: note = Erythrobacter atlanticus
  REGION 1..187: note = tr|A0A0H4VI49|A0A0H4VI49_9SPHN NADPH-dependent 7-cyano-7-deazaguanine reductase OS=Erythrobacter atlanticus OX=1648404 GN=queF PE=3 SV=2
MPELRNTNEPAWKAQPPYDGLCRRALRAIRLHMTNTQEPAQPMHLGKQTGLPASPEEAVLDYVPNPRAGAIYMVRFAAPEFTSLCPVTGQPDFAHLVIDYAPGETIVESKSLKLFLGAFRNHNGFHEDVTVGIGQRLFEEMAPRWLRIGGYWYPRGGIPIDVFWQSGAAPEGLWLPDQGVAPYRGRG

SEQ ID NO: 45944 - protein, 152 aa, Erythrobacter citreus
  REGION 1..152: note = tr|A0A0L1KEB1|A0A0L1KEB1_9SPHN NADPH-dependent 7-cyano-7-deazaguanine reductase OS=Erythrobacter citreus LAMA 915 OX=1306953 GN=queF PE=3 SV=1
MSDTPAPKFLGANTALPASPEEAELDYVPNPRAGQLYMVRFAAPEFTSLCPVTGQPDFAHLVIDYAPGETIVESKSLKLFLGSFRNHCGFHEDVTVGIGQRLFYEMQPQWLRIGGYWYPRGGIPIDVFWQSGAPPAALWLPDQGVSAYRGRG

SEQ ID NO: 45945 - protein, 152 aa, Erythrobacter flavus
  REGION 1..152: note = tr|A0A222ET36|A0A222ET36_9SPHN NADPH-dependent 7-cyano-7-deazaguanine reductase OS=Erythrobacter flavus; OX = 192812 GN=queF PE=3 SV=1
MSDTPAPKFLGANTALPASPEEAELDYVPNPRAEQLYMVRFAAPEFTSLCPVTGQPDFAHVVIDYAPGETIVESKSLKLFLGSFRNHCGFHEDVTVGIGQRLFDEMKPRWLRIGGYWYPRGGIPIDVFWQSGPPPEGLWLPDQGVASYRGRG

SEQ ID NO: 45946 - protein, 155 aa, Erythrobacter gangjinensis
  REGION 1..155: note = tr|A0A0G9MVX1|A0A0G9MVX1_9SPHN NADPH-dependent 7-cyano-7-deazaguanine reductase OS=Erythrobacter gangjinensis OX=502682 GN=queF PE=3 SV=1
MSDDQKTTNPLHLGQTSSLPASPEEAVLDYVPNPRAGTTYLVRFSAPEFTSLCPVTSAPDFAHLVIDYAPAETIVESKSLKLFLGSFRNHNGFHEDVTVGIGQRLFDEMKPQWLRIGGYWYPRGGIPIDVFWQSGAPPADLWLPDQGVQGYRGRG

SEQ ID NO: 45947 - protein, 160 aa, Erythrobacter litoralis
  REGION 1..160: note = tr|Q2NCW5|Q2NCW5_ERYLH NADPH-dependent 7-cyano-7-deazaguanine reductase OS=Erythrobacter litoralis (strain HTCC2594) OX=314225 GN=queF PE=3 SV=1
MRGMSDTPTPAEGAPQFLGKQTALPASPEDAVLDYVPNPRPGALYLVRFAAPEFTSLCPVTGAPDFAHLVIDYAPGDTVVESKSLKLFLGSFRNHNGFHEDVTVGIGQRLNEEMRPRWLRIGGYWYPRGGIPIDVFWQSGPSPEGLWVPDQGVAGYRGRG

SEQ ID NO: 45948 - protein, 153 aa, Erythrobacter litoralis
  REGION 1..153: note = tr|A0A074MIW7|A0A074MIW7_9SPHN NADPH-dependent 7-cyano-7-deazaguanine reductase OS=Erythrobacter litoralis OX=39960 GN=queF PE=3 SV=1
METTQSGPAFLGKDTPLPASPEEAQLDYVPNPRPGTLYLVRFAAPEFTSLCPVTSQPDFAHLVIDYAPGETIVESKSLKLFLGSFRNHNGFHEDVTVGIGQRLAEEMKPRWLRIGGYWYPRGGIPIDVFWQTGKPPEELWLPDQGVAPYRGRG

SEQ ID NO: 45949 - protein, 157 aa, Erythrobacter longus
  REGION 1..157: note = tr|A0A074MCD8|A0A074MCD8_ERYLO NADPH-dependent 7-cyano-7-deazaguanine reductase OS=Erythrobacter longus; OX = 1044 GN=queF PE=3 SV=1
METTPDSSANAPAFLGKQTDLPQSPEEAVLDYVSNPRAGSLYLVRFVSPEFTSLCPVTNQPDFAHIVIDYAPQETIVESKSLKLFLGSFRNHNGFHEDVTVGIGQRLAEEMKPKWLRIGGYWYPRGGIPIDVFWQTGAPPADLWLPDQGVAPYRGRG

SEQ ID NO: 45950 - protein, 155 aa, unidentified
  source 1..155: note = Erythrobacter luteus
  REGION 1..155: note = tr|A0A0G9MT35|A0A0G9MT35_9SPHN NADPH-dependent 7-cyano-7-deazaguanine reductase OS=Erythrobacter luteus; OX = 1581420 GN=queF PE=3 SV=1
MTDAPAPPAPLHLGQTSALPASPEEAVLDYVPNPRSGSLYLVRFAVPEFTSLCPVTGQPDFAHLVIDYAPGETIVESKSLKLFLGSFRNHCGFHEDVTVGIGQRLFAEMAPRWLRIGGYWYPRGGIPIDVFWQSGASPEGLWVPDQGVASYRGRG

SEQ ID NO: 45951 - protein, 159 aa, unidentified
  source 1..159: note = Erythrobacter lutimaris
  REGION 1..159: note = tr|A0A395LMH9|A0A395LMH9_9SPHN NADPH-dependent 7-cyano-7-deazaguanine reductase OS=Erythrobacter lutimaris OX=1538146 GN=queF PE=3 SV=1
MSDTPDQEAAAGAPRFLGQSSPLPASPQEAALDYVPNPRTGSLYTVRFSAPEFTSLCPVTGQPDFAHLVIDYAPGETIVESKSLKLFLGSFRNHCGFHEDVTVGIGQRLFDEMAPKWLRIGGYWYPRGGIPIDVFWQSGPVPEGLWVPEQGVQNYRGRG

SEQ ID NO: 45952 - protein, 159 aa, unidentified
  source 1..159: note = Erythrobacter marinus
  REGION 1..159: note = tr|A0A0H0XQA1|A0A0H0XQA1_9SPHN NADPH-dependent 7-cyano-7-deazaguanine reductase OS=Erythrobacter marinus; OX = 874156 GN=queF PE=3 SV=1
MNDTQNTKLQQGQPQFLGQQTPLPASPEEAVLDYVPNPRAGALYLVRFAAPEFTSLCPVTGAPDFAHLVIDYAPGETIVESKSLKLFLGAFRNHNGFHEDVTVGIGQRLFAEMQPRWLRIGGYWYPRGGIPIDVFWQSGAPPAGLWLPDQGVAPYRGRG

SEQ ID NO: 45953 - protein, 155 aa, Erythrobacter nanhaisediminis
  REGION 1..155: note = tr|A0A1I5PEJ6|A0A1I5PEJ6_9SPHN NADPH-dependent 7-cyano-7-deazaguanine reductase OS=Erythrobacter nanhaisediminis OX=604088 GN=queF PE=3 SV=1
MRGMSDTPTPKFLGENSPLPTSPEEAELDYVPNPRAGQLYLVRFAAPEFTSLCPVTGQPDFAHLVIDYAPGETIVESKSLKLFLGSFRNHNGFHEDVTVGIGQRLFDEMKPRWLRIGGYWYPRGGIPIDVFWQSGAPPADLWLPDQGVSSYRGRG

SEQ ID NO: 45954 - protein, 157 aa, Erythrobacter sp.
  REGION 1..157: note = tr|A0A1E4AWU6|A0A1E4AWU6_9SPHN NADPH-dependent 7-cyano-7-deazaguanine reductase OS=Erythrobacter sp. SCN 62-14 OX=1660099 GN=queF PE=3 SV=1
MTDTPDTPALNPAFLGKDSPLPRSPEEAVLDYVPNPRPGALFLVRFVAPEFTSLCPVTDQPDFAHLVIDYAPGETIVESKSLKLFLGSFRNHNGFHEDVTVGIGQRLAEEMQPRWLRIGGYWYPRGGIPIDVFWQTGAAPEGLWVPDQGVAPYRGRG

SEQ ID NO: 45955 - protein, 157 aa, Erythrobacter sp.
  REGION 1..157: note = tr|A0A2Z4JZD7|A0A2Z4JZD7_9SPHN NADPH-dependent 7-cyano-7-deazaguanine reductase OS=Erythrobacter sp. KY5; OX = 2011159 GN=queF PE=3 SV=1
MESTPENPRGAPAFLGKDTPLPASPEEAQLDYVPNPRAGSLFLVRFAAPEFTSLCPVTSQPDFAHLVIDYAPGETIVESKSLKLFLGSFRNHNGFHEDVTVGIGQRLFEEMNPKWLRIGGYWYPRGGIPIDVFWQSGAPPEGLWLPDQGVAPYRGRG

SEQ ID NO: 45956 - protein, 152 aa, unidentified
  source 1..152: note = Erythrobacter xanthus
  REGION 1..152: note = tr|A0A3A1P4K5|A0A3A1P4K5_9SPHN NADPH-dependent 7-cyano-7-deazaguanine reductase OS=Erythrobacter xanthus; OX = 1784712 GN=queF PE=3 SV=1
MSDNATPLHLGQTSSLPASPEEAVLDYVPNPRPQALYMVRFAAPEFTSLCPVTGQPDFAHLVIDYAPGETIVESKSLKLFLGSFRNHCGFHEDVTVGIGERLFNEMAPKWLRIGGYWYPRGGIPIDVFWQSGTPPEGLFLPDQGVAPYRGRG

SEQ ID NO: 45957 - protein, 155 aa, unidentified
  source 1..155: note = Erythrobacter zhengii
  REGION 1..155: note = tr|A0A418NUX7|A0A418NUX7_9SPHN NADPH-dependent 7-cyano-7-deazaguanine reductase OS=Erythrobacter zhengii; OX = 2307003 GN=queF PE=3 SV=1
MSDTDKPVSPLHLGQTSALPASPEEAVLDYVSNPREGALYLVRFAAPEFTSLCPVTGQPDFAHLVIDYAPGKTIVESKSLKLFLGAFRNHDGFHEDVTVGIGQRLFAEMEPQWLRIGGYWYPRGGIPIDVFWQSGKPPEGLWLPEQGVPSYRGRG

SEQ ID NO: 45958 - protein, 152 aa, unidentified
  source 1..152: note = Erythrobacteraceae bacterium
  REGION 1..152: note = tr|A0A2D6NMG9|A0A2D6NMG9_9SPHN NADPH-dependent 7-cyano-7-deazaguanine reductase OS=Erythrobacteraceae bacterium OX=2026738 GN=queF PE=3 SV=1
  VARIANT 33: note = Xaa can be any naturally occurring amino acid
  VARIANT 41: note = Xaa can be any naturally occurring amino acid
MSDTPSPKFLGVSTGLPTSPDEAELDYVANPRXGQLYLVRXAAPEFTSLCPVTGQPDFAHIVIDYAPGETIVESKSLKLFLGSFRNHCGFHEDVTVGIGQRLFDEMKPQWLRIGGYWYPRGGIPIDVFWQSGAPPEALWLPDQGVPSYRGRG

SEQ ID NO: 45959 - protein, 150 aa, unidentified
  source 1..150: note = Erythrobacteraceae bacterium
  REGION 1..150: note = tr|A0A0N8K710|A0A0N8K710_9SPHN NADPH-dependent 7-cyano-7-deazaguanine reductase OS=Erythrobacteraceae bacterium HL-111 OX=1666908 GN=queF2 PE=3 SV=1
METTPAFLGKDTPLPASPGEARLDYVPNPRPGTLYLVRFAAPEFTSLCPVTSQPDFAHLVIDYAPGETIVESKSLKLFLGSFRNHNGFHEDVTVGIGQRLAGEMEPRWLRIGGYWYPRGGIPIDVFWQTGAPPEGLWLPDQGVASYRGRG

SEQ ID NO: 45960 - protein, 282 aa, Escherichia albertii
  REGION 1..282: note = tr|A0A1X3JQX9|A0A1X3JQX9_9ESCH NADPH-dependent 7-cyano-7-deazaguanine reductase OS=Escherichia albertii B156 OX=550693 GN=queF PE=3 SV=1
MSSYTNHQALAGLTLGKSTDYRDTYDASLLQGVPRSLNRDPLGLKADNLPFHGADIWTLYELSWLNAKGLPQVAVGHVELDYTSVNLIESKSFKLYLNSFNQTRFNNWDEVRQTLERDLSACAQGAVSVALYRLDELEGQPIGHFNGICIDDQDIAIDNYEFTTDYLKDAASGENVVEETLVSHLLKSNCLITHQPDWGSIQIQYRGRKIDREKLLRYLVSFRHHNEFHEQCVERIFNDLLRFCQPEKLSVYARYTRRGGLDINPWRSNTDFVPSVTRLVRQ

SEQ ID NO: 45961 - protein, 282 aa, Escherichia albertii; identical to SEQ ID NO: 45960
  REGION 1..282: note = tr|A0A3W6DMF3|A0A3W6DMF3_9ESCH NADPH-dependent 7-cyano-7-deazaguanine reductase OS=Escherichia albertii; OX = 208962 GN=queF PE=3 SV=1

SEQ ID NO: 45962 - protein, 282 aa, Escherichia fergusonii
  REGION 1..282: note = tr|F0JRM8|F0JRM8_ESCFE NADPH-dependent 7-cyano-7-deazaguanine reductase OS=Escherichia fergusonii ECD227 OX=981367 GN=queF PE=3 SV=1
MSSYENHQALHSLTLGKSTDYRDTYDASLLQGVPRSLNRDPLGLTADNLPFHGADIWTLYELSWLNAKGLPQVAVGHVELDYTSVNLIESKSFKLYLNSFNQTRFDSWEDVRQTLERDLRACAQGEVSVALYQLDELEGQPIAHLHGTCIDNQDIEIDHYDFNADYLQNATSGEKVVEETLVSHLLKSNCLITHQPDWGSIQIQYRGRKIDREKLLRYLVSFRHHNEFHEQCVERIFSDILRLCQPEELSVYARYTRRGGLDINPWRSNCNFQPSTGRLVRQ

SEQ ID NO: 45963 - protein, 282 aa, Escherichia fergusonii
  REGION 1..282: note = tr|A0A564V335|A0A564V335_ESCFE NADPH-dependent 7-cyano-7-deazaguanine reductase OS=Escherichia fergusonii; OX = 564 GN=queF PE=3 SV=1
MSSYANHQALAGLTLGKSTDYRDTYDASLLQGVPRSLNRDPLGLKADNLPFHGTDIWTLYELSWLNAKGLPQVAVGHVELDYTSVNLIESKSFKLYLNSFNQTRFNNWDEVRQTLERDLSTCAQGKISVALYRLDELEGQPIGHFNGTCIDDQDITIDNYEFTTDYLENATCGEKVVEETLVSHLLKSNCLITHQPDWGSIQIQYRGRQIDREKLLRYLVSFRHHNEFHEQCVERIFNDLLRFCQPEKLSVYARYTRRGGLDINPWRSNSDFVPSTTRLVRQ

SEQ ID NO: 45964 - protein, 282 aa, unidentified
  source 1..282: note = Escherichia marmotae
  REGION 1..282: note = tr|A0A2B7M8K8|A0A2B7M8K8_9ESCH NADPH-dependent 7-cyano-7-deazaguanine reductase OS=Escherichia marmotae; OX = 1499973 GN=queF PE=3 SV=1
MSSYANHQALAGLTLGKSTDYRDTYDASLLQGVPRSLNRDPLGLKADNLPFHGADIWTLYELSWLNAKGLPQVAVGHVELDYTSVNLIESKSFKLYLNSFNQTRFNNWEEVRQTLERDLSTCAQGKVSVALYRLDELEGQPMGHFNGTCIDEQDIAIDNYEFTTDYLENAASGEKVVEETLVSHLLKSNCLITHQPDWGSIQIQYRGHKIDREKLLRYLVSFRHHNEFHEQCVERIFNDLLRFCQPEKLSVYARYTRRGGLDINPWRSNSDFVPSTTRLVRQ

SEQ ID NO: 45965 - protein, 282 aa, Escherichia sp.
  REGION 1..282: note = tr|A0A2S4QW53|A0A2S4QW53_9ESCH NADPH-dependent 7-cyano-7-deazaguanine reductase OS=Escherichia sp. ESNIH1; OX = 1985876 GN=queF PE=3 SV=1
MSSSYDNHQALAGLTLGKTTRYQDIYDATLLQGVPRSLNRDPLGLHADSLPFHGGDIWTLYELSWLNANGLPQVAVGHVELDYASVNLVESKSFKLYLNSFNQTRFSSWEEVRATLERDLSACAQGEVSVMLYALDEIEGQPIAHFSGKCIDNQDIVIDDYQFNADYLQHAAGGSVVEETLVSHLLKSNCLITHQPDWGSVQIQYRGPQIDREKLLRYLVSFRHHNEFHEQCVERIFNDLLRFCQPETLSVYARYTRRGGLDINPWRSNTDFQPATGRLVRQ

SEQ ID NO: 45966 - protein, 282 aa, Escherichia sp.
  REGION 1..282: note = tr|A0A4Q9JJR9|A0A4Q9JJR9_9ESCH NADPH-dependent 7-cyano-7-deazaguanine reductase OS=Escherichia sp. E10V4; OX = 2478971 GN=queF PE=3 SV=1
MSSYANHQALAGLTLGKSTDYRDTYDASLLQGVPRSLNRDPLGLKADNLPFHGTDIWTLYELSWLNAKGLPQVAVGHVELDYTSVNLIESKSFKLYLNSFNQTRFNNWDEVRQTLERDLSTCAQGNVSVALYRLDELEGQPVGHFNGTCIDDQDIAIDNYEFTTDYLENAISGEKVVEETLVSHLLKSNCLITHQPDWGSIQIQYRGRKIDREKLLRYLVSFRHHNEFHEQCVERIFNDLLRFCQPEKLSVYARYTRRGGLDINPWRSNCDFVPSTTRLARQ

SEQ ID NO: 45967 - protein, 274 aa, unidentified
  source 1..274: note = Estrella lausannensis
  REGION 1..274: note = tr|A0A0H5DS27|A0A0H5DS27_9BACT NADPH-dependent 7-cyano-7-deazaguanine reductase OS=Estrella lausannensis; OX = 483423 GN=queF PE=3 SV=1
MDHGLKTAPLGKKTDYVEEYCPELLFPVERKLARDLIGLQDANLPFDGFDIWNGMELSWLGPKGKPEIAIAVFTFPCASPHIVESKSFKLYLNSFNQSIFPSYEAVREVMVRDLSKAVGASVQVSLTPAHKARDQLAYELPGVCLDSLDISINDYEFNPNHLKAEGAHIDETVHSHLLKSNCLATGQPDWGSLLIRYKGPKIDHEGLLKYIISFRRHSGFAEHCVERVFFDIQERCRPDSLTVYARYTRRGGLDINPFRSNFETEADNARQIRQ

SEQ ID NO: 45968 - protein, 165 aa, unidentified
  source 1..165: note = Eubacteriaceae bacterium
  REGION 1..165: note = tr|A0A143Y086|A0A143Y086_9FIRM NADPH-dependent 7-cyano-7-deazaguanine reductase OS=Eubacteriaceae bacterium CHKCI004 OX=1780380 GN=queF PE=3 SV=1
MSTRTKEELSGVSLLGNQGTKYPQDYAPEVLETFINKHQDHDYFVKFNCPEFTSLCPMTGQPDFATIYISYVPDVRMVESKSLKLYLFSFRNHGDFHEDCVNIIMKDLIRVMDPKYIEVWGKFTPRGGISIDPYTNYGKPGTRWEEVAAYRLERHDLYPEKVDNR

SEQ ID NO: 45969 - protein, 165 aa, unidentified
  source 1..165: note = Eubacteriaceae bacterium
  REGION 1..165: note = tr|A0A425W6E3|A0A425W6E3_9FIRM NADPH-dependent 7-cyano-7-deazaguanine reductase OS=Eubacteriaceae bacterium OX=2049045 GN=queF PE=3 SV=1
MNDQRDKKKEHLTKLGSAGTVYPTDYAPEMLETFENKHPDHDYFVKFNCPEFTSLCPITGQPDFGNVVIAYVPDKKMVESKSLKLYLFSFREHGAFHEDCMNTIMGDLIALMDPKYIEVWGRFMPRGGISIDPYCNYGRPGTKWEDAAWQRLSHHDMNPEAVDNR

SEQ ID NO: 45970 - protein, 163 aa, unidentified
  source 1..163: note = [Eubacterium] cellulosolvens
  REGION 1..163: note = tr|I5AU68|I5AU68_EUBCE NADPH-dependent 7-cyano-7-deazaguanine reductase OS=[Eubacterium] cellulosolvens 6 OX=633697 GN=queF PE=3 SV=1
MSDAREKEDLTLLGNRNVKYATDYDPGVLETFVNKHPDHDYFVKFNCPEFTSLCPITGQPDFATITISYVPQEKMVESKSLKLYLFSFRNHGDFHEDCVNIIMEDLIRLMDPKYIEVWGKFLPRGGISIDPYCNYGKSGTKWEKIAEDRLAWHDMNPEKIDNR

SEQ ID NO: 45971 - protein, 165 aa, unidentified; identical to SEQ ID NO: 44648
  source 1..165: note = [Eubacterium] eligens
  REGION 1..165: note = tr|A0A174YJ14|A0A174YJ14_9FIRM NADPH-dependent 7-cyano-7-deazaguanine reductase OS=[Eubacterium] eligens; OX = 39485 GN=queF_2 PE=3 SV=1

SEQ ID NO: 45972 - protein, 160 aa, unidentified
  source 1..160: note = [Eubacterium] eligens
  REGION 1..160: note = tr|A0A174ZPJ2|A0A174ZPJ2_9FIRM NADPH-dependent 7-cyano-7-deazaguanine reductase OS=[Eubacterium] eligens; OX = 39485 GN=queF PE=3 SV=1
MREKENLTLLGNQQNNYETDYNPGLLETFVNKHPENDYFVKFNCPEFTSLCPITGQPDFANIIISYVPGERMVESKSLKLYLFSFRNHGDFHEDCVNVIMKDLIKLMEPKYIEVWGKFTPRGGISIDPYCNYGKPGTKWEDVAFNRMANHDMYPEKVDNR

SEQ ID NO: 45973 - protein, 160 aa, Eubacterium eligens
  REGION 1..160: note = tr|C4Z7K3|C4Z7K3_EUBE2 NADPH-dependent 7-cyano-7-deazaguanine reductase OS=Eubacterium eligens (strain ATCC 27750 / VPI C15-48) OX=515620 GN=queF PE=3; SV = 1
MREKENLTLLGNQQNNYETDYNPGLLETFVNKHPENDYFVKFNCPEFTSLCPITGQPDFANIIISYVPGERMVESKSLKLYLFSFRNHGDFHEDCVNVIMKDLITLMEPKYIEVWGKFTPRGGISIDPYCNYGKPGTKWEDVAFNRMANHDMYPEKVDNR

SEQ ID NO: 45974 - protein, 160 aa, Eubacterium eligens; identical to SEQ ID NO: 45972
  REGION 1..160: note = tr|R6AD47|R6AD47_9FIRM NADPH-dependent 7-cyano-7-deazaguanine reductase OS=Eubacterium eligens CAG:72 OX=1263077 GN=queF PE=3 SV=1

SEQ ID NO: 45975 - protein, 164 aa, Eubacterium hallii
  REGION 1..164: note = tr|R6GX71|R6GX71_9FIRM NADPH-dependent 7-cyano-7-deazaguanine reductase OS=Eubacterium hallii CAG:12 OX=1263078 GN=queF PE=3 SV=1
MSREKEELQGVTLLGNQKTKYPQDYAPEMLETFINKHQDHDYFVKFNCPEFTSLCPMTGQPDFATIYISYVPDVKMVESKSLKLYLFSFRNHGDFHEDCVNIIMKDLIKLMDPKYIEVWGKFTPRGGISIDPYTNYGKQGTMWEQVATDRLVHHDLYPEKVDNR

SEQ ID NO: 45976 - protein, 159 aa, Eubacterium oxidoreducens
  REGION 1..159: note = tr|A0A1G6A5E9|A0A1G6A5E9_EUBOX NADPH-dependent 7-cyano-7-deazaguanine reductase OS=Eubacterium oxidoreducens OX=1732 GN=queF PE=3 SV=1
MRENEHLTKLGSKTKYSMDYDPDVLECFENKHPGNDYFVKFNCPEFTSLCPITGQPDFGTVYISYVPSEKMVESKSLKLYLFSFRNHGDFHEDCMNIIMKDLIKLMDPKYIEVWGKFLPRGGLSIDPYCNYGKPGTKWEQVAWERLTHHDMNPERVDNR

SEQ ID NO: 45977 - protein, 156 aa, Eubacterium plexicaudatum; identical to SEQ ID NO: 45768
  REGION 1..156: note = tr|N2ATY4|N2ATY4_9FIRM NADPH-dependent 7-cyano-7-deazaguanine reductase OS=Eubacterium plexicaudatum ASF492 OX=1235802 GN=queF PE=3 SV=1

SEQ ID NO: 45978 - protein, 160 aa, Eubacterium pyruvativorans
  REGION 1..160: note = tr|A0A1I7FDR9|A0A1I7FDR9_9FIRM NADPH-dependent 7-cyano-7-deazaguanine reductase OS=Eubacterium pyruvativorans OX=155865 GN=queF PE=3 SV=1
MSRTKEELEGVTLLGNQHTRYSYDYEPDLLERFPNKHPYRDYMVTLNCPEFTTLCPKTGQPDFGKLVIRYIPDGYLVESKSLKLYLFSFRNHGDFHEDCCNIILNDLVKLMDPKFAEVRGIFRPRGGISIWPTAVYGRPGTKYEEMAEQRLFAETEDRSF

SEQ ID NO: 45979 - protein, 165 aa, Eubacterium ramulus
  REGION 1..165: note = tr|A0A2V1JXH4|A0A2V1JXH4_EUBRA NADPH-dependent 7-cyano-7-deazaguanine reductase OS=Eubacterium ramulus; OX = 39490 GN=queF PE=3 SV=1
MSGRSKEETAGVSLLGNQNVRYPDNYAPEVLETFVNKHPGNDYFVKFNCPEFTSLCPITGQPDFATITISYVPGERMVESKSLKLYLFSFRNHGDFHEDCVNVIMKDLIKLMNPKYIEVWGKFTPRGGISIDPYCNYGKPGTKWEDVAWNRMANHDLYPEKVDNR

SEQ ID NO: 45980 - protein, 196 aa, Eubacterium ramulus
  REGION 1..196: note = tr|U2R981|U2R981_EUBRA NADPH-dependent 7-cyano-7-deazaguanine reductase OS=Eubacterium ramulus ATCC 29099 OX=1256908 GN=queF PE=3 SV=1
MQICRDVQTDGKTERTVAICKRPIEKRREGTMTGRSKEETAGVSLLGNQNVRYPDDYAPEVLETFVNKHPGNDYFVKFNCPEFTSLCPITGQPDFATITISYVPGERMVESKSLKLYLFSFRNHGDFHEDCVNVIMKDLIKLMDPKYIEVWGKFTPRGGISIDPYCNYGKAGTKWEEVAWNRLTNHDLYPEKVDNR

SEQ ID NO: 45981 - protein, 164 aa, Eubacterium ruminantium
  REGION 1..164: note = tr|A0A1H5YL55|A0A1H5YL55_9FIRM NADPH-dependent 7-cyano-7-deazaguanine reductase OS=Eubacterium ruminantium OX=42322 GN=queF PE=3 SV=1
MSRNEEEREGISLLGQNGVKYPTDYAPEMLETFVNKHQDNDYFVKFNCPEFTSLCPITGQPDFATIYISYVPDVKMVESKSLKLYLFSFRNHGDFHEDCVNKIMKDLIKLMDPKYIEVWGKFTPRGGISIDPYCNYGRPGTKWENVAWERLTQHDMYPEKVDNR

SEQ ID NO: 45982 - protein, 164 aa, Eubacterium ruminantium
  REGION 1..164: note = tr|A0A1T4K7Z1|A0A1T4K7Z1_9FIRM NADPH-dependent 7-cyano-7-deazaguanine reductase OS=Eubacterium ruminantium OX=42322 GN=queF PE=3 SV=1
MSRNEKETEGISLLGNQGVKYPSGYAPQVLETFVNKHQENDYFVKFNCPEFTSLCPITGQPDFATIYISYVPDVKMVESKSLKLYLFSFRNHGDFHEDCINTIMKDLIKLMDPKYIEVWGKFTPRGGISIDPYCNYGRPGTKWENVAWDRLAQHDMYPEKVDNR

SEQ ID NO: 45983 - protein, 165 aa, Eubacterium sp.
  REGION 1..165: note = tr|A0A1Y4VHW5|A0A1Y4VHW5_9FIRM NADPH-dependent 7-cyano-7-deazaguanine reductase OS=Eubacterium sp. An11; OX = 1965542 GN=queF PE=3 SV=1
MSTRTKEELSGVSLLGNQGTKYPTDYAPEMLETFINKHQDHDYFVKFNCPEFTSLCPMTGQPDFATIYISYVPDVRMVESKSLKLYLFSFRNHGDFHEDCVNIIMKDLIRVMDPKYIEVWGKFTPRGGISIDPYTNYGRPGTRWEEVAAYRLERHDLYPEKVDNR

SEQ ID NO: 45984 - protein, 160 aa, Eubacterium sp.; identical to SEQ ID NO: 45973
  REGION 1..160: note = tr|A0A349ARG9|A0A349ARG9_9FIRM NADPH-dependent 7-cyano-7-deazaguanine reductase OS=Eubacterium sp.; OX = 142586 GN=queF PE=3 SV=1

SEQ ID NO: 45985 - protein, 165 aa, Eubacterium ventriosum
  REGION 1..165: note = tr|A0A413T2I4|A0A413T2I4_9FIRM NADPH-dependent 7-cyano-7-deazaguanine reductase OS=Eubacterium ventriosum; OX = 39496 GN=queF PE=3 SV=1
MTGRSKEETVDITLLGNQKTQYPCDYAPEMLETFENKHQGNDYFVKFNCPEFTSLCPITGQPDFATVTISYVPNIKMVESKSLKLYLFSFRNHGDFHEDCMNIIMKDLIKLMDPKYIEVWGKFTPRGGISIDPYCNYGKPGTKWEEIAFNRMANHDMYPEKVDNR

SEQ ID NO: 45986 - protein, 165 aa, Eubacterium ventriosum; identical to SEQ ID NO: 44648
  REGION 1..165: note = tr|A0A413R5N7|A0A413R5N7_9FIRM NADPH-dependent 7-cyano-7-deazaguanine reductase OS=Eubacterium ventriosum; OX = 39496 GN=queF PE=3 SV=1

SEQ ID NO: 45987 - protein, 134 aa, unidentified
  source 1..134: note = Euhalothece natronophila
  REGION 1..134: note = tr|A0A5B8NK57|A0A5B8NK57_9CHRO NADPH-dependent 7-cyano-7-deazaguanine reductase OS=Euhalothece natronophila Z-M001 OX=522448 GN=queF PE=3 SV=1
MVEEATNQSEMKYGEREIAEGELITFPNPRPGRRYNVDINLPEFTCKCPFSGYPDFATIKIRYMPDQSVVELKAIKLYINSYRDRYISHEEAVNQILDDFVAACNPLEVTVTGDFSPRGNVHTVVEVHHKQPRV

SEQ ID NO: 45988 - protein, 134 aa, unidentified; identical to SEQ ID NO: 45568
  source 1..134: note = Euhalothece sp.
  REGION 1..134: note = tr|A0A2K3AKS7|A0A2K3AKS7_9CHRO NADPH-dependent 7-cyano-7-deazaguanine reductase OS=Euhalothece sp. KZN 001 OX=1884791 GN=queF PE=3 SV=1

SEQ ID NO: 45989 - protein, 281 aa, Ewingella americana
  REGION 1..281: note = tr|A0A085G5Y4|A0A085G5Y4_9GAMM NADPH-dependent 7-cyano-7-deazaguanine reductase OS=Ewingella americana ATCC 33852 OX=910964 GN=queF PE=3 SV=1
MSLYQDNPALSQLTLGKSTPYRDQYDASLLQAVPRSMNREPLGLFPDTLPFHGADIWTLYELSWLNDKGLPQVAVGEISLNANSINLIESKSFKLYLNSFNQTKFASWDKVLETLTHDLSACAEGDVSVTLTRLEEVEGSPVGRFTGECIDNQDITIDNYEFSTDYLANAAGDEIVEESLVSHLLKSNCLITHQPDWGSVQIQYRGPKINREALLRYLVSFRNHNEFHEQCVERIFNDIMHFCAPETLAVYARYTRRGGLDINPWRSNFPFTPATARLVRQ

SEQ ID NO: 45990 - protein, 281 aa, Ewingella americana
  REGION 1..281: note = tr|A0A502GG15|A0A502GG15_9GAMM NADPH-dependent 7-cyano-7-deazaguanine reductase OS=Ewingella americana; OX = 41202 GN=queF PE=3 SV=1
MSSYQDNPALSQLTLGKATPYRDHYDASLLQAVPRSMNREPLGLYPDALPFHGADIWTLYELSWLNAKGLPQVAVGEISLNADSINLIESKSFKLYLNSFNQTKFDSWDSVLATLTRDLSKCAEGDVTVSLSHLGDVEGSTIGHFDGQCIDDQDIEINNYEFSTDYLAGAAGDDIVEESLVSHLLKSNCLITHQPDWGSVQIQYRGPKIDREALLRYLISFRNHNEFHEQCVERIFNDLLQFCAPEALAVYARYTRRGGLDINPWRSNFPFTPATTRLVRQ

SEQ ID NO: 45991 - protein, 162 aa, Exiguobacterium antarcticum
  REGION 1..162: note = tr|K0ADX3|K0ADX3_EXIAB NADPH-dependent 7-cyano-7-deazaguanine reductase OS=Exiguobacterium antarcticum (strain B7) OX=1087448 GN=queF PE=3 SV=1
MRPEDLNDLSLLGQKSVPYIFEYQPEVLEAFPNRHPENDYFVKFNAPEFTSLCPITNQPDFATIYISYIPDEKLVESKSLKLYLFSFRNHGDFHENCINVIGKDLVKLMEPRYLEVWGKFTPRGGISIDPYYNYGKPDTKYEQMAEHRLFNHDLYPETIDNR

SEQ ID NO: 45992 - protein, 162 aa, Exiguobacterium aurantiacum
  REGION 1..162: note = tr|A0A377FXC4|A0A377FXC4_9BACL NADPH-dependent 7-cyano-7-deazaguanine reductase OS=Exiguobacterium aurantiacum OX=33987 GN=queF PE=3 SV=1
MRPEDLQDLSLLGQKSVPYIFEYAPDVLEAFPNRHPENDYFVKFNAPEFTSLCPITNQPDFATIYISYIPDEKLVESKSLKLYLFSFRNHGDFHENCINVIGKDLVKLMEPRYLEVWGKFTPRGGISIDPYYNYGKPGTKYEKMAEHRLFNHDLYPETVDNR

SEQ ID NO: 45993 - protein, 162 aa, unidentified
  source 1..162: note = Exiguobacterium chiriqhucha
  REGION 1..162: note = tr|U1LU15|U1LU15_9BACL NADPH-dependent 7-cyano-7-deazaguanine reductase OS=Exiguobacterium chiriqhucha RW-2 OX=1345023 GN=queF PE=3 SV=1
MRPEDLQDLSLLGQKSVPYIFEYAPDVLEAFPNRHPENDYFVKFNAPEFTSLCPITNQPDFATIYISYIPDEKLVESKSLKLYLFSFRNHGDFHENCINVIGKDLVKLMEPRYLEVWGKFTPRGGISIDPYYNYGKPGTKYERMAEHRLFNHDLYPETVDNR

SEQ ID NO: 45994 - protein, 162 aa, unidentified
  source 1..162: note = Exiguobacterium enclense
  REGION 1..162: note = tr|A0A0V8GE11|A0A0V8GE11_9BACL NADPH-dependent 7-cyano-7-deazaguanine reductase OS=Exiguobacterium enclense OX=1017277 GN=queF PE=3 SV=1
MRPEDLNDLSLLGQKAVPYIFEYQPEVLEAFPNRHPENDYFVKFNAPEFTSLCPITNQPDFATIYISYIPDEKLVESKSLKLYLFSFRNHGDFHENCINVIGKDLVKLMEPRYLEVWGKFTPRGGISIDPYYNYGKPGTKYEQMAEHRLFNHDLYPETIDNR

SEQ ID NO: 45995 - protein, 162 aa, Exiguobacterium mexicanum; identical to SEQ ID NO: 45993
  REGION 1..162: note = tr|A0A099DFI3|A0A099DFI3_9BACL NADPH-dependent 7-cyano-7-deazaguanine reductase OS=Exiguobacterium mexicanum OX=340146 GN=queF PE=3 SV=1

SEQ ID NO: 45996 - protein, 162 aa, Exiguobacterium sibiricum
  REGION 1..162: note = sp|B1YFM9|QUEF_EXIS2 NADPH-dependent 7-cyano-7-deazaguanine reductase OS=Exiguobacterium sibiricum (strain DSM 17290 / JCM 13490 / 255-15); OX = 262543 GN=queF PE=3 SV= 1
MRPEDLNDLSLLGQKSVPYIFEYQPEVLEAFPNRHPENDYFVKFNAPEFTSLCPITNQPDFATIYISYIPDEKLVESKSLKLYLFSFRNHGDFHENCINVIGKDLVKLMEPRYLEVWGKFTPRGGISIDPYYNYGKPGTKYEQMAEHRLFNHDLYPETIDNR

SEQ ID NO: 45997 - protein, 162 aa, Exiguobacterium sp.
  REGION 1..162: note = tr|A0A031IBP6|A0A031IBP6_9BACL NADPH-dependent 7-cyano-7-deazaguanine reductase OS=Exiguobacterium sp. RIT341 OX=1470592 GN=queF PE=3 SV=1
MRPEDLNDLSLLGQKAVPYIFEYQPEVLEAFPNRHPENDYFVKFNAPEFTSLCPITNQPDFATIYISYIPDEKLVESKSLKLYLFSFRNHGDFHENCINVIGKDLVKLMEPRYLEVWGKFTPRGGISIDPYYNYGKPGTKYERMAEHRLFNHDLYPETVDNR

SEQ ID NO: 45998 - protein, 162 aa, Exiguobacterium sp.
  REGION 1..162: note = sp|C4L0V1|QUEF_EXISA NADPH-dependent 7-cyano-7-deazaguanine reductase OS=Exiguobacterium sp. (strain ATCC BAA-1283 / AT1b) OX=360911 GN=queF PE=3 SV=1
MRPEDLQDLSLLGQKSVPYIFEYTPDVLEAFPNRHPENDYFVKFNAPEFTSLCPITNQPDFATIYISYIPDEKLVESKSLKLYLFSFRNHGDFHENCINVIGKDLVKLMEPRYLEVWGKFTPRGGISIDPYYNYGKPGTKYEKMAEHRLFNHDLYPETVDNR

SEQ ID NO: 45999 - protein, 290 aa, unidentified
  source 1..290: note = Extensimonas vulgaris
  REGION 1..290: note = tr|A0A369AS36|A0A369AS36_9BURK NADPH-dependent 7-cyano-7-deazaguanine reductase OS=Extensimonas vulgaris; OX = 1031594 GN=queF PE=3 SV=1
MSINAPSPDPSPQHSPLGKAVAYADQYDPALLFPIARAAQRAELGITAAPPFFGADLWTAYELSWLNLRGKPQVALAHLTVPCETPHIVESKSLKLYLGSFSQTRFADAAEVQSRIRADLAAALWRGAAAPGSIGVKLLLPEQFDQQAIHELDGLNLDRLDVECTHYQPAPELLTVQQDAPPVHGEVLTSRLLKSNCPVTGQPDWGSVQVRYSGAPIHQEGLLRYLVSFRQHSGFHEHCVERIFMDLWTRCRPTQLTVYARYTRRGGLDINPWRTSHPQQPPANVRTARQ

SEQ ID NO: 46000 - protein, 165 aa, Falsibacillus pallidus
  REGION 1..165: note = tr|A0A370GG39|A0A370GG39_9BACI NADPH-dependent 7-cyano-7-deazaguanine reductase OS=Falsibacillus pallidus; OX = 493781 GN=queF PE=3 SV=1
MSGRKDEELQDVTLLGNQGTNYLFEYSPDILETFDNKHQNRDYFVKFNCPEFTSLCPKTGQPDFATIYISYIPEVKMVESKSLKLYLFSFRNHGDFHEDCMNIIMNDLIELMDPRYIEVWGKFTPRGGISIDPYTNYGRPGTKYEKMAEYRMMNHDLYPETIDNR

SEQ ID NO: 46001 - protein, 165 aa, Falsibacillus sp.
  REGION 1..165: note = tr|A0A3L7JQK4|A0A3L7JQK4_9BACI NADPH-dependent 7-cyano-7-deazaguanine reductase OS=Falsibacillus sp. GY 10110 OX=2478915 GN=queF PE=3 SV=1
MTGRKDEELQDISLLGNQGTNYLFEYSPDILEAFDNKHPNRDYFVKFNCPEFTSLCPKTGQPDFATIYISYIPDQKMVESKSLKLYLFSFRNHGDFHEDCMNIIMNDLIELMDPRYIEVWGKFTPRGGISIDPYTNYGRPGTKYEEMAQYRMMNHDLYPETIDNR

SEQ ID NO: 46002 - protein, 155 aa, unidentified
  source 1..155: note = Falsochrobactrum ovis
  REGION 1..155: note = tr|A0A364JXZ3|A0A364JXZ3_9RHIZ NADPH-dependent 7-cyano-7-deazaguanine reductase OS=Falsochrobactrum ovis; OX = 1293442 GN=queF PE=3 SV=1
MSDKSKYSDLIQLGSNTPIPLSPDQAKLERVANSQLDTLYCVRFTAPEFTTLCPMTGQPDFAHLVIDYVPAEWLIESKSLKLFLFSFRNHGSFHEDCTVSIGKTLVNFLQPHWLRIGGYWYPRGGIPIDIFYQTDVAPQGVWIPDQAVPNYRGRG

SEQ ID NO: 46003 - protein, 155 aa, unidentified
  source 1..155: note = Falsochrobactrum sp.
  REGION 1..155: note = tr|A0A316JF72|A0A316JF72_9RHIZ NADPH-dependent 7-cyano-7-deazaguanine reductase OS=Falsochrobactrum sp. HN4 OX=2201899 GN=queF PE=3 SV=1
MTEKTIYSDLKQLGSNTTVPQSPEEAILERVSNPQSGTPYCIRFTAPEFTSLCPMTGQPDFAHLVIDYIPSDWLVESKSLKLFLFSFRNHGAFHEDCTVSIGKRLVELLDPQWLRIGGYWYPRGGIPIDVFYQTGAAPQDVWIPEQAVPNYRGRG

SEQ ID NO: 46004 - protein, 152 aa, unidentified
  source 1..152: note = Fermentimonas caenicola
  REGION 1..152: note = tr|A0A098C1V1|A0A098C1V1_9PORP NADPH-dependent 7-cyano-7-deazaguanine reductase OS=Fermentimonas caenicola OX=1562970 GN=queF PE=3 SV=1
MEIKGLSHLGGKTEYKQDYAPEMLEAFENKHQGNDYWVTFDCPEFTSLCPITGQPDFATIRIDYIPDVKMVESKSLKLYLFSFRNHGAFHEDCINIIMKDLINLMNPKYIEVTGIFTPRGGISIYPYANWGREGTKYEKMAEERLLNHSIPL

SEQ ID NO: 46005 - protein, 174 aa, Ferrimicrobium acidiphilum
  REGION 1..174: note = tr|A0A0D8FRC6|A0A0D8FRC6_9ACTN NADPH-dependent 7-cyano-7-deazaguanine reductase OS=Ferrimicrobium acidiphilum DSM 19497 OX=1121877 GN=queF PE=3 SV=1
MPTTRVSPTLNIRTTANKGCRTTVTDGLTQLGSSTSYRYEDPNPAMLEAFPNPSPGTDFVIRLLANEFTSLCPITGQPDYGSLVIDYIPDELCVESKSLKLYLVSYRNHGSFHESCVNTIADDLFALLSPKFLRVFGDFNPRGGIAIKPMVERIGPTTKRSDALELIASYLQVA

SEQ ID NO: 46006 - protein, 285 aa, Ferrimonas balearica
  REGION 1..285: note = tr|E1STK8|E1STK8_FERBD NADPH-dependent 7-cyano-7-deazaguanine reductase OS=Ferrimonas balearica (strain DSM 9799 / CCM 4581 / PAT) OX=550540 GN=queF PE=3; SV = 1
MSHHDPYAGADALKGLTLGQKTEYQDQYDPSLLQPVPRSLNRDAIGLTDALPFSGADIWTGYELSWLNAKGKPMVAIAQFVLPATSANLVESKSFKLYLNSFNQTRIDSVEQLQQTLAADLSACAEGDVQVSLVLPSEFRHQPLAELEGELIDDLDIEIADYSFEPEHLAGAADADGEVVEETLRSDLLKSNCLITSQPDWGSVQIRYRGPKINHEALLRYLISFRRHNEFHEQCVERIFMDLKRFCFCQQLTVYARYTRRGGLDINPFRSDFEALPDNVRLARQ

SEQ ID NO: 46007 - protein, 283 aa, Ferrimonas marina
  REGION 1..283: note = tr|A0A1M5YG45|A0A1M5YG45_9GAMM NADPH-dependent 7-cyano-7-deazaguanine reductase OS=Ferrimonas marina; OX = 299255 GN=queF PE=3 SV=1
MSHHDPYQGADALSGLTLGQATQYVDQYDPSLLQAVPRSLNRDAIELTEALPFDGADLWTGYELSWLNAKGKPQVAIAQFALPASSRNLVESKSFKLYLNSFNQTRVESVEALTQMLQRDLSACADGHVEVVLVLPKTFRQQPVVELEGECIDELDIEVDNFDFNPGLLEGAATGPVVEETLRSDLLKSNCLITSQPDWGSVQIRYRGAQIDREALLRYLISFRQHNEFHEQCVERIFMDLKRYCQCEALTVYARYTRRGGLDINPFRSDFEPVPDNDRLARQ

SEQ ID NO: 46008 - protein, 284 aa, unidentified
  source 1..284: note = Ferrimonas sediminum
  REGION 1..284: note = tr|A0A1G8LNZ9|A0A1G8LNZ9_9GAMM NADPH-dependent 7-cyano-7-deazaguanine reductase OS=Ferrimonas sediminum; OX = 718193 GN=queF PE=3 SV=1
MTDHHDPYQGADALSGLTLGQQTQYQDQYAPELLQGVPRQLNRDAIGLGDALPFTGADIWTGFELSWLNAKGKPMVAIAHFALPVSSANLVESKSFKLYLNSFNQTRFDSVDAVRDALARDLSQCAQGEVSVNIVLPDAFAAEPLVELEGELIDDLDISIDDYQFNPDYLSGAAGDDVVEETLRSNLLKSNCLITSQPDWGSVQIRYKGGRIDREKLLRYLISFRRHNEFHEQCVERIFMDLKRYCGCQQLTVYARYTRRGGLDINPFRSDFEALPANHRLARQ

SEQ ID NO: 46009 - protein, 284 aa, Ferrimonas sp.
  REGION 1..284: note = tr|A0A4U1BFL8|A0A4U1BFL8_9GAMM NADPH-dependent 7-cyano-7-deazaguanine reductase OS=Ferrimonas sp. IMCC35001 OX=2569538 GN=queF PE=3 SV=1
MTDHHDPYQGAEALEGLTLGHQTQYQDHYAPELLQGVPRQLNRDAIGLGDELPFDGADVWTGFELSWLNARGKPMVAIAHFALPVTSGNLVESKSFKLYLNSFNQTKFNSVEAVQQALAKDLSQCAQGEVSVRILLPAEFEQERVAEFDGELIDDLDIAIDDYRFNPDYLEGAASGEVVEETLRSNLLKSNCLITSQPDWGSVQIRYRGKAIDREKLLRYLISFRRHNEFHEQCVERIFMDLKRYCGCERLTVYARYTRRGGLDINPFRSDFEPLPANVRLARQ

SEQ ID NO: 46010 - protein, 284 aa, Ferrimonas sp.
  REGION 1..284: note = tr|A0A4U1BFX6|A0A4U1BFX6_9GAMM NADPH-dependent 7-cyano-7-deazaguanine reductase OS=Ferrimonas sp. IMCC35002 OX=2569539 GN=queF PE=3 SV=1
MTDHHDPYHGADALKGLTLGQQTQYQDQYAPELLQGVPRQLNRDAIKLPEPLPFSGADIWTGFELSWLNGKGKPMVAVAEFRLPATSANLVESKSFKLYLNSFNQTRFDTPEAIRETLAKDLSHCAQGEVEVSLILPNAFADERITEFDGELIDDLDISIDDYEFNPDYLDGAADGELVEETLRSNLLKSNCLITSQPDWGSVLIRYKGKRINREKLLRYLISFRRHNEFHEQCVERIFMDLKRYCGVEQLTVYARYTRRGGLDINPFRSDFESLPANVRLARQ

SEQ ID NO: 46011 - protein, 139 aa, unidentified
  source 1..139: note = Ferriphaselus amnicola
  REGION 1..139: note = tr|A0A2Z6GEM0|A0A2Z6GEM0_9PROT NADPH-dependent 7-cyano-7-deazaguanine reductase OS=Ferriphaselus amnicola; OX = 1188319 GN=queF PE=3 SV=1
MSTQPSKSLETFPNPHPNRDYHIHMEIPEFTCLCPKTGQPDFATLILDYIADQQCVELKSLKMYMWSFRNEGCFHEDVTNRILNDLVAATDPKFMRLTAKFYVRGGIFTNVVAEHRKQGWQPAPYVELSQFSTQSNTRG

SEQ ID NO: 46012 - protein, 160 aa, Ferrithrix thermotolerans
  REGION 1..160: note = tr|A0A1M4SEW6|A0A1M4SEW6_9ACTN NADPH-dependent 7-cyano-7-deazaguanine reductase OS=Ferrithrix thermotolerans DSM 19514 OX=1121881 GN=queF PE=3 SV=1
MVRDSLTHLGSGESSYRYDSPSRDIMDVFSSPRPGRDFVIALECMEFTSLCPITGQPDYGEIDVVYVPDQLCIESKSLKLYLGAYRNHGAFHEDCVNSILDDIVAVCAPVFIRVIGDFNARGGIAIKPVAVNWGEDIDENRRGDVMEIVRSYDRFSRSKR

SEQ ID NO: 46013 - protein, 166 aa, unidentified
  source 1..166: note = Ferrovibrio sp.
  REGION 1..166: note = tr|A0A2M8TZP3|A0A2M8TZP3_9PROT NADPH-dependent 7-cyano-7-deazaguanine reductase OS=Ferrovibrio sp.; OX = 1917215 GN=queF PE=3 SV=1
MKRTAKTPGKTASSASVTKGLTQLGHSAAQPQSPDEAKLETVPNPQPGTTYLIRFTQPEFTSLCPMTGQPDFAHLVIDYVPNRQIVESKSLKLFLNSFRNHGAFHEDCTIGIARRLVAAMKPRWLRIGGYWYPRGGMPIDVFWQTGKPPADLWLPDQGVASYRGRG

SEQ ID NO: 46014 - protein, 166 aa, unidentified
  source 1..166: note = Ferrovibrio sp.
  REGION 1..166: note = tr|A0A516H542|A0A516H542_9PROT NADPH-dependent 7-cyano-7-deazaguanine reductase OS=Ferrovibrio sp. K5; OX = 2594003 GN=queF PE=3 SV=1
MKRTAKTTRKTASSASITQGLTQLGQNATQPQSPDEASLETVPNPQPGTTYLIRFTQPEFTSLCPMTGQPDFAHLVIDYVPNRQIVESKSLKLFLNSFRNHGAFHEDCTISIAKRLIAAMKPRWLRIGGYWYPRGGMPIDVFWQTGKPPADLWLPDQGVANYRGRG

SEQ ID NO: 46015 - protein, 142 aa, unidentified
  source 1..142: note = Ferrovum sp.
  REGION 1..142: note = tr|A0A0R0LLM8|A0A0R0LLM8_9PROT NADPH-dependent 7-cyano-7-deazaguanine reductase OS=Ferrovum sp. JA12; OX = 1356299 GN=queF PE=3 SV=1
MANEPSKQLDTFVNPSPERDYLIHMEIPEFTCLCPKTGQPDFAWFTLDYVPDQKNVELKSLKLYMWSYRNEGAFHEAVTNKILSDLVNTCQPRFMRLLARWYVRGGIYTHVVVEHTKEGWIPKVTIPPLAFSQETPLTHTFG

SEQ ID NO: 46016 - protein, 142 aa, unidentified
  source 1..142: note = Ferrovum sp.
  REGION 1..142: note = tr|A0A149VZE2|A0A149VZE2_9PROT NADPH-dependent 7-cyano-7-deazaguanine reductase OS=Ferrovum sp. Z-31; OX = 1789004 GN=queF PE=3 SV=1
MPAQPSRTLETFPNPSPERDYLIHMELPEFTCLCPKTGQPDFAWLSLDYVPDQTNVELKSLKLYLWSFRNEGAFHEAVTQRILDDLVAATQPRFLRLLSRWNVRGGIFTHVLSEHRQEGWQPRCSLPPVHFAGATPWAPPLA

SEQ ID NO: 46017 - protein, 132 aa, Fervidicola ferrireducens
  REGION 1..132: note = tr|A0A140L858|A0A140L858_9THEO NADPH-dependent 7-cyano-7-deazaguanine reductase OS=Fervidicola ferrireducens OX=520764 GN=queF PE=3 SV=1
MDKYGKRRFDIYGYEKIDTEVLEAIEYEYPGRDTVIEYITEEFSSVCPWTGLPDNARLTIRYIPGEKLVELKSLKYYLTSYRNIGILQEHAVNRILDDLVKLLEPKYMEVIGEFLARGGISTRVVAKYGTMQ

SEQ ID NO: 46018 - protein, 158 aa, Fibrobacter sp.
  REGION 1..158: note = tr|A0A1X7K894|A0A1X7K894_9BACT NADPH-dependent 7-cyano-7-deazaguanine reductase OS=Fibrobacter sp. UWB13; OX = 1896204 GN=queF PE=3 SV=1
MRSEAELEGVTLLGNNKTQYKTTYSPEVLEKFPNKHPGNDYMVTFNCPEFTSLCPKTGQPDFAEIKINYIPDQYLVESKSLKLYMFSFRNHGDFHEDCVNIIMKDLVKLLDPKYIEVEGIFMPRGGISLYPFANYGKPGTEFEAIAKTRLFAAIDRRK

SEQ ID NO: 46019 - protein, 158 aa, Fibrobacter sp.
  REGION 1..158: note = tr|A0A254STC6|A0A254STC6_9BACT NADPH-dependent 7-cyano-7-deazaguanine reductase OS=Fibrobacter sp. UWB1; OX = 1964355 GN=queF PE=3 SV=1
MRSEAELEGVTLLGNNKTQYKTTYSPEVLEKFPNKHPGNDYMVTFNCPEFTSLCPKTGQPDFAEIKINYIPDQYLVESKSLKLYMFSFRNHGDFHEDCVNIIMKDLVKLLDPKYIEVEGLFMPRGGISLYPFANYGKPGTEFETLAKTRLFAAIDRRR

SEQ ID NO: 46020 - protein, 158 aa, Fibrobacter succinogenes; identical to SEQ ID NO: 46018
  REGION 1..158: note = tr|A0A380S882|A0A380S882_FIBSU NADPH-dependent 7-cyano-7-deazaguanine reductase OS=Fibrobacter succinogenes OX=833 GN=queF PE=3 SV=1

SEQ ID NO: 46021 - protein, 136 aa, unidentified
  source 1..136: note = Fibrobacteres bacterium
  REGION 1..136: note = tr|A0A3C0PJG6|A0A3C0PJG6_9BACT NADPH-dependent 7-cyano-7-deazaguanine reductase OS=Fibrobacteres bacterium OX=2052160 GN=queF PE=3 SV=1
MLPAIETFPCPNQDKWQDTGVIRIIFPEFTCLCPKTGYPDFASIDLYYLPDKLCLELKSWKLYLNAFRMIGTFHETVTSFLFNEIKTRLSPKWALLAGDFFPRGNVNTTVVFETDSPRPKNADVLIKNYRPHCRTY

SEQ ID NO: 46022 - protein, 139 aa, unidentified
  source 1..139: note = Fictibacillus aquaticus
  REGION 1..139: note = tr|A0A235FA78|A0A235FA78_9BACI NADPH-dependent 7-cyano-7-deazaguanine reductase OS=Fictibacillus aquaticus OX=2021314 GN=queF PE=3 SV=1
MAKVEVNHSKYEGIRFDIQDENVILVDILETIPYEYIGKDTLVTIPTTEFTSVCPWSGLPDFADIIISYIPTEELVEMKSLKYYLTSYRNVGIYQEHATNKIMEDLARLLKPKYLKVTGNWNARGGLGTEVVCEYKAGE

SEQ ID NO: 46023 - protein, 141 aa, unidentified
  source 1..141: note = Fictibacillus arsenicus
  REGION 1..141: note = tr|A0A1B1Z7B8|A0A1B1Z7B8_9BACI NADPH-dependent 7-cyano-7-deazaguanine reductase OS=Fictibacillus arsenicus OX=255247 GN=queF PE=3 SV=1
MAKVEVNHSKYEGIRFDIQDENVILVDILETIPFEYAGKETMVTIPTTEFTSVCPWSGLPDFADIIISYIPNKDLVEMKSLKYYLTSYRNVGIYQEHATNRIKEDLVELLKPKYLKVTGNWNARGGLGTEVVVEYKEDSSN

SEQ ID NO: 46024 - protein, 141 aa, unidentified
  source 1..141: note = Fictibacillus arsenicus
  REGION 1..141: note = tr|A0A1V3GAP7|A0A1V3GAP7_9BACI NADPH-dependent 7-cyano-7-deazaguanine reductase OS=Fictibacillus arsenicus OX=255247 GN=queF PE=3 SV=1
MAKVEVNHSKYEGIRFDIQDENVILVDILETIPFEYEGKETMVTIPTTEFTSVCPWSGLPDFADIIISYIPNKDLVEMKSLKYYLTSYRNVGIYQEHATNRIKEDLVELLKPKYLKVTGNWNARGGLGTEVVVEYKEDSSN

SEQ ID NO: 46025 - protein, 138 aa, unidentified
  source 1..138: note = Fictibacillus enclensis
  REGION 1..138: note = tr|A0A0V8J8W0|A0A0V8J8W0_9BACI NADPH-dependent 7-cyano-7-deazaguanine reductase OS=Fictibacillus enclensis OX=1017270 GN=queF PE=3 SV=1
MAKVEVNHQKYEGIRFDIEDESVILVDILETIPYEYVGKDTMVTIPTTEFTSVCPWSGLPDFADIIISYIPNEDLVEMKSLKYYLTSYRNVGIYQEHATNKIKEDLVNLLKPKYLKIVATWNARGGLGTEVVVEYKQD

SEQ ID NO: 46026 - protein, 138 aa, unidentified
  source 1..138: note = Fictibacillus macauensis
  REGION 1..138: note = tr|I8AJ39|I8AJ39_9BACI NADPH-dependent 7-cyano-7-deazaguanine reductase OS=Fictibacillus macauensis ZFHKF-1 OX=1196324 GN=queF PE=3 SV=1
MAKVEVNHQKYEGIRFDIEDESVILVDILETIPYEYVGKDTLVTIPTTEFTSVCPWSGLPDFADIIISYIPSEELVEMKSLKYYLTSYRNVGIYQEHATNRMLDDLVQLLKPKHMKITATWNARGGLGTEVVAEYNRD

SEQ ID NO: 46027 - protein, 141 aa, unidentified
  source 1..141: note = Fictibacillus phosphorivorans
  REGION 1..141: note = tr|A0A163Q646|A0A163Q646_9BACI NADPH-dependent 7-cyano-7-deazaguanine reductase OS=Fictibacillus phosphorivorans OX=1221500 GN=queF PE=3 SV=1
MAKVEVNHSKYEGIRFDIQDENVILVDILETIPYEYVGKDTLVTIPTTEFTSVCPWSGLPDFADIIISYIPNEDLVEMKSLKYYLTSYRNVGIYQEHATNRIMEDLAKLLKPKYLKVTGNWNARGGLGTEVVVEYKEDSSK

SEQ ID NO: 46028 - protein, 141 aa, unidentified
  source 1..141: note = Fictibacillus phosphorivorans
  REGION 1..141: note = tr|A0A160IP64|A0A160IP64_9BACI NADPH-dependent 7-cyano-7-deazaguanine reductase OS=Fictibacillus phosphorivorans OX=1221500 GN=queF PE=3 SV=1
MAKVEVNHSKYEGIRFDIQDENVILVDILETIPYEYVGKDTMVTIPTTEFTSVCPWSGLPDFADIIISYIPNEDLVEMKSLKYYLTSYRNVGIYQEHATNRILEDLVKLLKPKYIKVVGNWNARGGLGTEVVVEYKEENSK

SEQ ID NO: 46029 - protein, 138 aa, unidentified
  source 1..138: note = Fictibacillus solisalsi
  REGION 1..138: note = tr|A0A1G9X240|A0A1G9X240_9BACI NADPH-dependent 7-cyano-7-deazaguanine reductase OS=Fictibacillus solisalsi OX=459525 GN=queF PE=3 SV=1
MAKVEVNHQKYEGIRFDIEDESVILVDILETIPYEYVGKDTLVTIPTTEFTSVCPWSGLPDFADIIISYIPNEDLVEMKSLKYYLTSYRNVGIYQEHATNKIKEDLVDLLKPKYLKIVATWNARGGLGTEVVVEYKQD

SEQ ID NO: 46030 - protein, 138 aa, unidentified; identical to SEQ ID NO: 46025
  source 1..138: note = Fictibacillus sp.
  REGION 1..138: note = tr|A0A4Q2HYR3|A0A4Q2HYR3_9BACI NADPH-dependent 7-cyano-7-deazaguanine reductase OS=Fictibacillus sp. S7; OX = 2212476 GN=queF PE=3 SV=1

SEQ ID NO: 46031 - protein, 141 aa, unidentified
  source 1..141: note = Fictibacillus sp.
  REGION 1..141: note = tr|A0A4Q7QUA3|A0A4Q7QUA3_9BACI NADPH-dependent 7-cyano-7-deazaguanine reductase OS=Fictibacillus sp. BK138 OX=2512121 GN=queF PE=3 SV=1
MAKVEVNHSKYEGIRFDIQDENVILVDILETIPFEYEGKETMVTIPTTEFTSVCPWSGLPDFADIIISYIPNKDLVEMKSLKYYLTSYRNVGIYQEHATNRIKEDLVELLKPKYLKVTGNWNARGGLGTEVVVEYKEDSIN

SEQ ID NO: 46032 - protein, 142 aa, unidentified
  source 1..142: note = Unknown
  REGION 1..142: note = tr|A0A2T1CDR3|A0A2T1CDR3_9CYAN NADPH-dependent 7-cyano-7-deazaguanine reductase OS=filamentous cyanobacterium CCP2 OX=2107700 GN=queF PE=3 SV=1
MQAERSTSPQTETTEMKYGERHISEGKLITFPNPRLGRRYTIDITLPEFTCKCPFSGYPDFATIHIQYVPNEKVVELKAIKLYINSYRDRYISHEESVNQILDDFVAACDPLEATIKGDFSPRGNVHTVVEVHHQKSASPEK

SEQ ID NO: 46033 - protein, 143 aa, unidentified
  source 1..143: note = Unknown
  REGION 1..143: note = tr|A0A2P8VWG7|A0A2P8VWG7_9CYAN NADPH-dependent 7-cyano-7-deazaguanine reductase OS=filamentous cyanobacterium CCT1 OX=2107702 GN=queF PE=3 SV=1
MTTASAPSTQYGDRAILQAAVEPLEKWPNPSENVYTIHLEHPEFTALCPRSGYPDFGTIVVDYCPGPWVVELKAFKLYINSFRDQRVSHEMVANAIADRLWEELEPRGLRVIGDYTRRGGVKTVITVKKGDCSTFEPYTANVL

SEQ ID NO: 46034 - protein, 165 aa, Filibacter sp.
  REGION 1..165: note = tr|A0A3P5XDB8|A0A3P5XDB8_9BACL NADPH-dependent 7-cyano-7-deazaguanine reductase OS=Filibacter sp. TB-66; OX = 2483811 GN=queF PE=3 SV=1
MTGRDEATLTDLTLLGNQNTKYLFEYSPDVLEAIDNLHMNRDYFVKFNCPEFTSLCPQTGQPDFATMYISFIPDKKLVESKALKLYLFSFRNHGDFHEDCVNIIMNDLIELLDPRYIEVWGKFTPRGGLSIDPYCNYGQPGTKFEQMADHRLMNHDLYPEKIDNR

SEQ ID NO: 46035 - protein, 135 aa, Filobacillus milosensis
  REGION 1..135: note = tr|A0A4Y8IRQ9|A0A4Y8IRQ9_9BACI NADPH-dependent 7-cyano-7-deazaguanine reductase OS=Filobacillus milosensis OX=94137 GN=queF PE=3 SV=1
MSENYYLPRSGPMPRPNSVEEGREILKNEAFDAPNVQSITFNALEFTAVCPKTGQPDFGRVEITYTPKNKCIESKSLKFYLWSFRDQGAFCESLAAQIADDIVFAIEPLNVEVTVYQSARGGIELTTKAVRDNDE

SEQ ID NO: 46036 - protein, 153 aa, Filomicrobium sp.
  REGION 1..153: note = tr|A0A2D7FEZ3|A0A2D7FEZ3_9RHIZ NADPH-dependent 7-cyano-7-deazaguanine reductase OS=Filomicrobium sp.; OX = 2024831 GN=queF PE=3 SV=1
  VARIANT 107..108: note = Xaa can be any naturally occurring amino acid
  VARIANT 147: note = Xaa can be any naturally occurring amino acid
MADNTSYLAHLGTPSEIPGSPEEASLDRVPNPHPDAHYVARFTVPEFTSICPVTSQPDFAHLVIDYVPNQWLVESKSLKLYLTSFRNHGAFHEDCTVAIGMLLKSLXXPHFIRIGGYWYPRGGIPIDVFWQAGKCPDDVWLPDQGVXPYRGRG

SEQ ID NO: 46037 - protein, 124 aa, unidentified
  source 1..124: note = Fimbriiglobus ruber
  REGION 1..124: note = tr|A0A225DNE1|A0A225DNE1_9BACT NADPH-dependent 7-cyano-7-deazaguanine reductase OS=Fimbriiglobus ruber; OX = 1908690 GN=queF PE=3 SV=1
MEFTETPAADQLETFPNPRPGRDFTIEIVCPEFTSVCPKTGQPDFGTITFSYTPGDTCVELKSLKLYLQRFRNQGIFYEQVTNQLLDDFVAACKPVRCKVVSAWTPRGGITTNVTCTYVAEKAA

SEQ ID NO: 46038 - protein, 114 aa, unidentified
  source 1..114: note = Fimbriimonas ginsengisoli
  REGION 1..114: note = tr|A0A068NQ08|A0A068NQ08_9BACT NADPH-dependent 7-cyano-7-deazaguanine reductase OS=Fimbriimonas ginsengisoli Gsoil 348 OX=661478 GN=queF PE=3 SV=1
MPEIEVFPNPAAQRDYLIKHVCPEFTSVCPKTGQPDFATIELEYIPDESCIELKSLKLYYYSFRNEGIYYEAVTNRLLDELVEACKPRWMRVTGIFNVRGGISSVVAAETGPRS

SEQ ID NO: 46039 - protein, 156 aa, unidentified
  source 1..156: note = Firmicutes bacterium
  REGION 1..156: note = tr|A0A373PX59|A0A373PX59_9FIRM NADPH-dependent 7-cyano-7-deazaguanine reductase OS=Firmicutes bacterium AM55-24TS OX=2292896 GN=queF PE=3 SV=1
MPRNKEETEGLSLLGNKKTVYKDTYAPEVLETFVNKHQGNDYMVTFDCPEFTSLCPITGQPDFAKITINYIPNVKMVESKSLKLYLFSFRNQGDFHEDCINIIMKDLVKLMEPKYLEVKGIFTPRGGISIYPFANYGQPGTKYEKIAENRLFDSLK

SEQ ID NO: 46040 - protein, 156 aa, unidentified; identical to SEQ ID NO: 46039
  source 1..156: note = Firmicutes bacterium
  REGION 1..156: note = tr|A0A416CVY1|A0A416CVY1_9FIRM NADPH-dependent 7-cyano-7-deazaguanine reductase OS=Firmicutes bacterium AF36-3BH OX=2292889 GN=queF PE=3 SV=1

SEQ ID NO: 46041 - protein, 137 aa, Fischerella major
  REGION 1..137: note = tr|A0A1U7GUS3|A0A1U7GUS3_9CYAN NADPH-dependent 7-cyano-7-deazaguanine reductase OS=Fischerella major NIES-592 OX=210994 GN=queF PE=3 SV=1
MSNSLSESVSQPSQEMKYGEREIAEGKLITFPNPRVGRRYNIDITLPEFTCKCPFSGYPDFATIHITYIPDQQVVELKALKLYINSYRDRYISHEESANQILDDFVAACDPLEITLKADFAPRGNVHTVIEVHHKKQ

SEQ ID NO: 46042 - protein, 137 aa, unidentified
  source 1..137: note = Fischerella muscicola
  REGION 1..137: note = tr|A0A2N6K905|A0A2N6K905_FISMU NADPH-dependent 7-cyano-7-deazaguanine reductase OS=Fischerella muscicola CCMEE 5323 OX=2019572 GN=queF PE=3 SV=1
MSNSLSESVSQPSPEIKYGEREIAEGKLITFPNPRVGRRYNIDITLPEFTCKCPFSGYPDFATIHITYIPDQQVVELKALKLYINSYRDRYISHEESANQILDDFVAACDPLEITVKADFAPRGNVHTVIEVHHKKQ

SEQ ID NO: 46043 - protein, 140 aa, Fischerella sp.
  REGION 1..140: note = tr|A0A1Z4TRZ5|A0A1Z4TRZ5_9CYAN NADPH-dependent 7-cyano-7-deazaguanine reductase OS=Fischerella sp. NIES-4106 OX=2005456 GN=queF PE=3 SV=1
MSNSLSESVSQPSQEIKYGEREIAEGQLITFPNPRIGRRYNIDITLPEFTCKCPFSGYPDFATIHINYIPDQLVVELKAIKLYINSYRDRYISHEESANQILDDFVAACDPLEITLKADFAPRGNVHTVIEVRHVKSKDQ

SEQ ID NO: 46044 - protein, 137 aa, Fischerella sp.; identical to SEQ ID NO: 46041
  REGION 1..137: note = tr|A0A0S3TUI4|A0A0S3TUI4_9CYAN NADPH-dependent 7-cyano-7-deazaguanine reductase OS=Fischerella sp. NIES-3754 OX=1752063 GN=queF PE=3 SV=1

SEQ ID NO: 46045 - protein, 137 aa, Fischerella thermalis; identical to SEQ ID NO: 46041
  REGION 1..137: note = tr|G6FZQ0|G6FZQ0_9CYAN NADPH-dependent 7-cyano-7-deazaguanine reductase OS=Fischerella thermalis; OX = 372787 GN=queF PE=3 SV=1

SEQ ID NO: 46046 - protein, 136 aa, Fischerella thermalis
  REGION 1..136: note = tr|A0A2N6M3T9|A0A2N6M3T9_9CYAN NADPH-dependent 7-cyano-7-deazaguanine reductase OS=Fischerella thermalis CCMEE 5205 OX=2019671 GN=queF PE=3 SV=1
MSNSLSESVSQPSQEMKYGEREIAEGKLITFPNPRVGRRYNIDITLPEFTCKCPFSGYPDFATIHITYIPDQQVVELKALKLYINSYRDRYISHEESANQILDDFVAACDPLEITLKADFAPRGNVHTVIEVHHKK

SEQ ID NO: 46047 - protein, 140 aa, unidentified
  source 1..140: note = Flammeovirgaceae bacterium
  REGION 1..140: note = tr|A0A2E0FCD4|A0A2E0FCD4_9BACT NADPH-dependent 7-cyano-7-deazaguanine reductase OS=Flammeovirgaceae bacterium OX=2026740 GN=queF PE=3 SV=1
MKLKSNIIDPYLGQEAEGKKFKFESVDKIEVKELKVFLFDNKEECIKITSKEFIAVCPFSGLPDIARLKIEYYPEGGLAIELKSLKYYLVSFKNVGIYQEEVTSRIFKDLKKILKTQKIRVTTKYNVRGGLYTTCKLGNI

SEQ ID NO: 46048 - protein, 136 aa, unidentified
  source 1..136: note = Flammeovirgaceae bacterium
  REGION 1..136: note = tr|A0A424PCX2|A0A424PCX2_9BACT NADPH-dependent 7-cyano-7-deazaguanine reductase OS=Flammeovirgaceae bacterium TMED290 OX=1986700 GN=queF PE=3 SV=1
MKKTYKDIESNLLKAIPNPDKKTYEIKIKQPELTFLGVYDQPDFASLYILFYPNKTIIELKSLKMYLQQYRDLIISYERLINVLYDDILKVYKPKRLRVVLDCNPRGGISSRLTQDSDWKSLGGKEEYKNYNEDVW

SEQ ID NO: 46049 - protein, 166 aa, unidentified
  source 1..166: note = Flavisolibacter tropicus
  REGION 1..166: note = tr|A0A172TVN7|A0A172TVN7_9BACT NADPH-dependent 7-cyano-7-deazaguanine reductase OS=Flavisolibacter tropicus OX=1492898 GN=queF PE=3 SV=1
METKTPNKLKEQLEATYKQALEHTTKALDYMAEFGIKPDGKFGLFMPPDTRQKEIHRLPYPHTAKQVVVYETETGEFSALCPFSGLPDFGVLRIEYVPGSNILELKSLKYYILSWRNIGIAQEDVTAYIYEDLKAALGDPQYLLVTTVYNVRGGINTTCAIDSRKQ

SEQ ID NO: 46050 - protein, 141 aa, unidentified
  source 1..141: note = Flavobacteriaceae bacterium
  REGION 1..141: note = tr|A0A2E6LJU4|A0A2E6LJU4_9FLAO NADPH-dependent 7-cyano-7-deazaguanine reductase OS=Flavobacteriaceae bacterium OX=1871037 GN=queF PE=3 SV=1
MKNKKMKKTFKNVDISLLKSLPNPAQKAYEIKLKQPELTFLGVYEQPDFASLYLLFYPDKKIIELKSFKLYLQQYRNLIISYERLINILYDDIKTVYKPKRLRIILDCNPRGGISSRLTQDSDWKSLGGKEEYKSYNEDIW

SEQ ID NO: 46051 - protein, 136 aa, unidentified
  source 1..136: note = Flavobacteriaceae bacterium
  REGION 1..136: note = tr|A0A2E5YZ63|A0A2E5YZ63_9FLAO NADPH-dependent 7-cyano-7-deazaguanine reductase OS=Flavobacteriaceae bacterium OX=1871037 GN=queF PE=3 SV=1
MKKTFKSVDISLLKFLPNPSQKAYEIKLKQPELTFLGVYEQPDFASLYLLFYPDKKIIELKSFKLYLQQYRDMIISYERLINILYDDIKKVYSPKRLRIILDCNPRGGISSRLTQDSDWKSLGGKEEYKNYNEDTW

SEQ ID NO: 46052 - protein, 147 aa, unidentified
  source 1..147: note = Flavobacteriales bacterium
  REGION 1..147: note = tr|A0A2A4PKR6|A0A2A4PKR6_9FLAO 7-cyano-7-deazaguanine reductase OS=Flavobacteriales bacterium OX=2021391 GN=COB88_10880 PE=4 SV=1
  VARIANT 70: note = Xaa can be any naturally occurring amino acid
  VARIANT 142: note = Xaa can be any naturally occurring amino acid
MSSKKPYEQIDKSILKAIPNPSKGAYEIKIKIPEFTFLGVSSQPDFATMYLTFYPTDKVIELKSVKEYVXQLRNIIVSYERLINIFYDHLMEVYKPDRMRIVMICNPRGGISSKLTIDSDWLARGGSEKYKDWASGGSAEDXWDVLM

SEQ ID NO: 46053 - protein, 145 aa, unidentified
  source 1..145: note = Flavobacteriales bacterium
  REGION 1..145: note = tr|A0A2A5GC46|A0A2A5GC46_9FLAO 7-cyano-7-deazaguanine reductase OS=Flavobacteriales bacterium OX=2021391 GN=COA57_00745 PE=4 SV=1
MPEKKLYQAIDKSILRAIPNPSKGAYEIKIKIPEFTFLGVQAQPDFAAVYLTFYPKKKIIELKSLKMYSYHLRNIIVSYERLTNIMYDHLMEVYEPERMRIVMICNPRGGISSKLTIDSDWKVRGGKEQFKDWVGNQEDEWEVLM

SEQ ID NO: 46054 - protein, 165 aa, unidentified
  source 1..165: note = [Flavobacterium] thermophilum
  REGION 1..165: note = tr|A0A377FY90|A0A377FY90_9BACL NADPH-dependent 7-cyano-7-deazaguanine reductase OS=[Flavobacterium] thermophilum OX=1414643 GN=queF PE=3 SV=1
MAGRKEEELKDLTLLGNQGTTYSFTYNPHLLEVFDNKHPDRDYFVKFNCPEFTTLCPKTGQPDFATIYISYIPDKKCVESKSLKLYLFSFRNHGDFHEDCVNIIMNDLIKVMEPRYIEVWGKFTPRGGISIDPYCNWGRPGTKYEKMAEYRLLNHDLYPEKVDNR

SEQ ID NO: 46055 - protein, 416 aa, Fluoribacter bozemanae
  REGION 1..416: note = tr|A0A0W0RVM0|A0A0W0RVM0_FLUBO NADPH-dependent 7-cyano-7-deazaguanine reductase OS=Fluoribacter bozemanae; OX = 447 GN=queF PE=3 SV=1
MKYYQIKEISQMTSLTIRSLQYYDEIGLLKPTKRSMSGYRLYSETDLIRLQQIITLKFLGFSLSTIKKIMENPHFDVMTSIGIQACELTEKAARINEAASLLTYISSQMEMNQPVNWKSTAKIIEILELNTMNDQVLQKYQSEAEQSELGKKSAYDEMYNPDRLYPIPRAGKRQEIGVDPVQLPFYGFDCWNHYEVSWLNAKGKPMVAIAELFYDCSSPNLIESKSLKLYFNSFNNTRIQSVRELENTIKKDLQERVGAEVWVHVHLLDATSQFAIQQPLIGELLDNLDIECSVYLVEPSFLTVSDEIVEETLFSNLLKSNCLVTNQPDWGSVHITYKGKKINREGLLKYLVSYRNHNEFHEQCIERIFVDIMNYCKPEKLTVYGRYTRRGGLDINPYRSTEKSSFSGKNLRLVRQ

SEQ ID NO: 46056 - protein, 372 aa, Fluoribacter dumoffii
  REGION 1..372: note = tr|A0A377GEE0|A0A377GEE0_9GAMM NADPH-dependent 7-cyano-7-deazaguanine reductase OS=Fluoribacter dumoffii; OX = 463 GN=queF PE=3 SV=1
MDLVRLQQITSLKFLGFTLSAIKKIMERPGFDVMTSIGIQARELTEKAAQIKEAASLLTYISSQLEMNQPVNWKSTAKIIEILELNTMNDQILQKYQSEAEKSELGKKSAYDERYNPNRLYPIPRAGKRQEIGVDPNQLPFHGFDCWNHYEVSWLNAKGKPMVAIAELFYDCKSPYLIESKSLKLYFNSFNNTRIGSISELENTIKQDLQERVGAEVWVAIHPLDSANPFSIQTSWEGDCLDHLDVECSVYLVEPSFLSVGEEEVEELLHSNLLKSNCLVTNQPDWGSVQIAYKGKKINREGLLKYLVSYRNHNEFHEQCIERIFVDILNYCKPEKLTVYGRYTRRGGLDINPYRSTEKSPFEGKNLRLIRQ

SEQ ID NO: 46057 - protein, 416 aa, Fluoribacter gormanii
  REGION 1..416: note = tr|A0A377GNL4|A0A377GNL4_9GAMM NADPH-dependent 7-cyano-7-deazaguanine reductase OS=Fluoribacter gormanii; OX = 464 GN=queF PE=3 SV=1
MKYYQIKEISQMTSLTVRSLQYYDDIGLLKPTKRSISGYRLYSEMDLIRLQQITTLKFLGFSLSTIKMIIENPNFDVMASIGIQARELTEKAARINEAASLLTYISSQMEVNQPVNWKSTAKIIEILELNTMNDQVLQKYHSEAAKSELGKKSAYDDTYNPDRLYPIPRAGKRQEIGVDPMQLPFYGFDCWNHYEVSWLNNKGKPMIAIAELFYDCSSPNLIESKSLKLYFNSFNNTRIQNVDELENTIKIDLQARVGAEVWVKLHLLDTAYQFVVQQSLTGESLDHLDIECSVYLVEPSFLSTSDEVVEEQLFSNLLKSNCLVTNQPDWGSVQISYKGKKINREGLLKYLVSFRNHNEFHEQCIERIFVDIMNYCKPEQLTVYGRYTRRGGLDINPYRSTEKTSFTDKNLRLVRQ

SEQ ID NO: 46058 - protein, 273 aa, unidentified
  source 1..273: note = Fluviicoccus keumensis
  REGION 1..273: note = tr|A0A4Q7Z661|A0A4Q7Z661_9GAMM NADPH-dependent 7-cyano-7-deazaguanine reductase OS=Fluviicoccus keumensis; OX = 1435465 GN=queF PE=3 SV=1
MAWYEKTQLGVKTDYIHAYDPGLLCPLERREGREALELTGAPLPFHGVDIWHNYEVSWLDPHGKPQVAIARITVPADSPCLIESKSMKLYFNSLNQHRFADRQAVIDCAAADLSHSAGASVRVELLPVNAACSLTTLEGTCLDDLPLEDCDFTPNPGHLKADQAEHVEETLHSNLLRSNCPVTGQPDWGSVQIRYSGPKINREGLLRYLISFREHNDFHEQCVERIYRDILRHCTPEQLTVFACYTRRGGLDINPWRSNAEALPDRLPRLSRQ

SEQ ID NO: 46059 - protein, 165 aa, Fontibacillus panacisegetis
  REGION 1..165: note = tr|A0A1G7Q079|A0A1G7Q079_9BACL NADPH-dependent 7-cyano-7-deazaguanine reductase OS=Fontibacillus panacisegetis OX=670482 GN=queF PE=3 SV=1
MAGRQSDEMQNVTLLGNQGVKYPVTYAPQLLESFENKHPYRDYFVKFNCPEFTSLCPITGQPDFATIYISYIPDILMVESKSLKLYLFSFRNHGDFHEDCVNIIMNDLIKLMNPKYIEVWGKFTPRGGISIDPYCNYGRPGTKYETMAEHRLLNHDMYPEKIDNR

SEQ ID NO: 46060 - protein, 165 aa, unidentified
  source 1..165: note = Fontibacillus phaseoli
  REGION 1..165: note = tr|A0A369BFN8|A0A369BFN8_9BACL NADPH-dependent 7-cyano-7-deazaguanine reductase OS=Fontibacillus phaseoli; OX = 1416533 GN=queF PE=3 SV=1
MSGRQQQEMQNVTLLGHQGVKYPMTYTPEILESFDNKHPYRDYFVKFNCPEFTSLCPITGQPDFATIYVSYIPDIKMVESKSLKLYLFSFRNHGDFHEDCVNIIMNDLIQLMDPKYIEVWGKFTPRGGISIDPYCNYGRPGTKYEAMAEHRLLNHDMYPEKVDNR

SEQ ID NO: 46061 - protein, 165 aa, unidentified
  source 1..165: note = Fonticella tunisiensis
  REGION 1..165: note = tr|A0A4R7KPQ1|A0A4R7KPQ1_9CLOT NADPH-dependent 7-cyano-7-deazaguanine reductase OS=Fonticella tunisiensis; OX = 1096341 GN=queF PE=3 SV=1
MSGRTDKELEGVTLLGEKGTKYKYDYDPSVLETFVNKHQDNDYFVKFNCPEFTSLCPKTGQPDFATIYISYVPDKLMVESKSLKLYLFSFRNHGDFHEDCVNIIMKDLIKLLAPKYIEVWGKFTPRGGISIDPYCNYGKEGTKWKEVAEKRLFYHDMYPERIDNR

SEQ ID NO: 46062 - protein, 140 aa, unidentified
  source 1..140: note = Fontimonas thermophila
  REGION 1..140: note = tr|A0A1I2HZI6|A0A1I2HZI6_9GAMM NADPH-dependent 7-cyano-7-deazaguanine reductase OS=Fontimonas thermophila; OX = 1076937 GN=queF PE=3 SV=1
MSTQPSKTLETFPNPAPQRDYAIRMRIPEFTCLCPKTGQPDFGTLYLEYVADQACVELKSLKLYVWSFRNEGAFHEAVTNRILDDLVAATQPRFMRLTAVFNVRGGIYTHVSAEYRRPGWTGTLPPPAWHVDPTGQGQTP

SEQ ID NO: 46063 - protein, 275 aa, Formivibrio citricus
  REGION 1..275: note = tr|A0A1I4Y329|A0A1I4Y329_9NEIS NADPH-dependent 7-cyano-7-deazaguanine reductase OS=Formivibrio citricus; OX = 83765 GN=queF PE=3 SV=1
MSEAHLSPLGKAVAYQAEYDPGLLFPIPRIGKREEIGVPAALPFMGVDIWNAYELSWLNPRGKPQVALASFMFPADSPNIVESKSFKLYLNSFNQTRLENETELKNRLTRDLSTAAGSPVHVEITGVERFGSQRFAELGGYCIDNLDIEVDTYSLVPELLRCDADPAPIEETLASNLLKSNCLVTGQPDWASVQIRYFGRAINRESLLRYLISFREHNEFHEQCVERIFMDILRTCQPMKLAVYARYTRRGGLDINPWRSNFSTSLPANLRTARQ

SEQ ID NO: 46064 - protein, 302 aa, unidentified
  source 1..302: note = Francisella adeliensis
  REGION 1..302: note = tr|A0A2Z4XWP7|A0A2Z4XWP7_9GAMM QueF_N domain-containing protein OS=Francisella adeliensis; OX = 2007306 GN=CDH04_00775 PE=4 SV=1
MKNTNEIAAKFLGKDSLNNKMASYIAPENIDNSLLVAIPRSLNRESHGIDQNLFKGFDVWNCYELSTINAKGKPFVGIMKIFFPADSINIVESKSLKLYLNSFNLCKLKGVTKEDLIYELENIITKDLQLKIDEKNIKVKIYDVNIPNLIEIPISHCDFKNIDDLDIEIDQSSNHSLVIQHYEEVQTLRIHSALLRSNCRVTNQPDWGDVYIHIKGKKLPTEESLLRHITSMRKEQHFHEEISESIYHNIYTKFEPQELLVQCLYTRRGGIDINPIRYTKNIVNDKMLKYFSNENIYKTNRQ

SEQ ID NO: 46065 - protein, 155 aa, Francisella sp.
  REGION 1..155: note = tr|A0A2W6S042|A0A2W6S042_9GAMM NADPH-dependent 7-cyano-7-deazaguanine reductase OS=Francisella sp.; OX = 2047875 GN=queF PE=3 SV=1
MTQRNQTNLTLLGSKHTHYPEHYDPDLLEVFNNPHLHHDYWVNFDCPEFTTLCPITGQPDFATILINYIPNLKMVESKSLKLYLFSYRNHRGFHEDEVNQIMLDLWQKMQPKYIEVLGLFTPRGGIAIRPFVNYAIQEDRWQQLTKKRFEDFSLI

SEQ ID NO: 46066 - protein, 280 aa, unidentified
  source 1..280: note = Franconibacter pulveris
  REGION 1..280: note = tr|A0A0J8YAG8|A0A0J8YAG8_9ENTR NADPH-dependent 7-cyano-7-deazaguanine reductase OS=Franconibacter pulveris OX=435910 GN=queF PE=3 SV=1
MSYENHQALSGLTLGKTTDYRDEYDAALLQPVPRSLNRDPLGLSAESLPFHGADIWTLYELSWLNQNGLPQVAVGEVSLDARSRNLVESKSFKLYLNSFNQTRFSSWEKVRETLQRDLTACAEGDVEVRLYRLSELEGEPVAHFHGECIDEQDISIDNYEFDANYLKGAAGEKIVEETLVSHLLKSNCLITNQPDWGSVQISYRGPQLDREKLLRYLVSFRHHNEFHEQCVERIFNDIQRFCGPEKLSVYARYTRRGGLDINPWRANTVFHPATGRLVRQ

SEQ ID NO: 46067 - protein, 123 aa, unidentified
  source 1..123: note = Frankia casuarinae
  REGION 1..123: note = tr|A0A1X1PTL9|A0A1X1PTL9_FRACC NADPH-dependent 7-cyano-7-deazaguanine reductase OS=Frankia casuarinae (strain DSM 45818 / CECT 9043 / CcI3) OX=106370 GN=queF; PE = 3 SV =1
MTKLGNPEAKADRSLETFPIDDTSQEIRIDCREFTCRCPITGQPDWATIRIDYRPGGRGLETKSLKLYLETFREEGIFHEHLATLIRDDLVAALAPVQLTVTVNFNARGGIALAASSTYRREA

SEQ ID NO: 46068 - protein, 125 aa, unidentified
  source 1..125: note = Frankia casuarinae
  REGION 1..125: note = sp|Q2J7K4|QUEF_FRACC NADPH-dependent 7-cyano-7-deazaguanine reductase OS=Frankia casuarinae (strain DSM 45818 / CECT 9043 / CcI3) OX=106370 GN=queF; PE = 3 SV=1
MALTKLGNPEAKADRSLETFPIDDTSQEIRIDCREFTCRCPITGQPDWATIRIDYRPGGRGLETKSLKLYLETFREEGIFHEHLATLIRDDLVAALAPVQLTVTVNFNARGGIALAASSTYRREA

SEQ ID NO: 46069 - protein, 109 aa, Frankia sp.
  REGION 1..109: note = tr|A0A4Y8LSW6|A0A4Y8LSW6_9ACTN NADPH-dependent 7-cyano-7-deazaguanine reductase OS=Frankia sp. B2; OX = 2541730 GN=queF PE=3 SV=1
METFPIDDTSQEIRIDCREFTCRCPITGQPDWATIRIDYRPGGRGLETKSLKLYLETFREEGIFHEHLATLIRDDLVAALAPVQLTVTVNFNARGGIALAASSTYRREA

SEQ ID NO: 46070 - protein, 125 aa, Frankia sp.; identical to SEQ ID NO: 46068
  REGION 1..125: note = tr|A0A062WV18|A0A062WV18_9ACTN NADPH-dependent 7-cyano-7-deazaguanine reductase OS=Frankia sp. BMG5.23; OX = 683305 GN=queF PE=3 SV=1

SEQ ID NO: 46071 - protein, 277 aa, Frateuria aurantia
  REGION 1..277: note = tr|H8L240|H8L240_FRAAD NADPH-dependent 7-cyano-7-deazaguanine reductase OS=Frateuria aurantia (strain ATCC 33424 / DSM 6220 / NBRC 3245 / NCIMB 13370); OX = 767434 GN=q ueF PE=3 SV=1
MTTPDHSPLGKATVYASHYDAGLLFPIPRQANRGQFGLGEGPLPFNGVDIWNAYELSWLNARGLPQVGLAEFRVPADSPNIIESKSFKLYLNGFSQEVFDSPDALAAVLGRDLGAAAGAPVKVSLRPARSDQVRLQDLEGQLIDKLEVSIDSYGPPDASLLKLQDASAGAAIEETLVSDLLRSNCPVTGQPDWGTLQIRYHGAPIDHASVVRYLVSFREHSDFHEHCVERIWLDLQQQCRPRSLSVYARYTRRGGLDINPYRSSGTETAPDIRTARQ

SEQ ID NO: 46072 - protein, 273 aa, Frateuria sp.
  REGION 1..273: note = tr|A0A0Q9QH18|A0A0Q9QH18_9GAMM NADPH-dependent 7-cyano-7-deazaguanine reductase OS=Frateuria sp. Soil773; OX = 1736407 GN=queF PE=3 SV=1
MSTPEHSPLGKSTIYADRYDPSLLFPIPRSGKRAEIGVGEPLPFHGVDIWNAYELSWLDPRGKPVVALAEFRVPAQSPNIIESKSFKLYLNGFAQERLAGADALAAILARDLSAAAGAAVGVRLSDASARAHAVTDLEGELLDTQSLDIDDYGPPEAGYLQAGGDIVDEALVSHLLRSNCPVTGQPDWGSVQIRYRGPAIDRAGLLRYLVSFRNHNEFHEQCVERIYVDVMARCAPQRLGVYARYTRRGGLDINPFRASEAPQDVPNPRGARQ

SEQ ID NO: 46073 - protein, 274 aa, Frateuria terrea
  REGION 1..274: note = tr|A0A1H6XA37|A0A1H6XA37_9GAMM NADPH-dependent 7-cyano-7-deazaguanine reductase OS=Frateuria terrea; OX = 529704 GN=queF PE=3 SV=1
MSTPEHSPLGKTTVYAGRYDPALLFPIPREQKRVEIGVMEPLPFHGVDIWNAYELSWLDARGKPQVALAEFRVPAHSPNIIESKSFKLYLNGFSQERIASDALQEALARDLAAAAGAPVTVTLSAPSAQGHAITDLPGALLDELPLEVDDYGPPKAGYLSANHHAAPVEEILLSNLLRSNCPVTGQPDWGTVQIAYRGAPVDHAGLLRYLISFRTHNEFHEQCVERIFVDLMARCAPERLTVYARYTRRGGLDINPFRSTDPAAVPGNPRGPRQ

SEQ ID NO: 46074 - protein, 279 aa, unidentified
  source 1..279: note = Frederiksenia canicola
  REGION 1..279: note = tr|A0A3N4XIN5|A0A3N4XIN5_9PAST NADPH-dependent 7-cyano-7-deazaguanine reductase OS=Frederiksenia canicola; OX = 123824 GN=queF PE=3 SV=1
MTYQHQSLNVLKLGQQTQYAEHYDASLLQGVPRQLNRDQLGITHHQPFSIGVDLWTAYEISWLNDKGVPQVAIADVKLDFQSENLIESKSFKLYLNSFNQTKFADLETVRQTIENDLQQCAKGKVSVQLNTLDHYYQHAIATFKGTCIDQQDIEIHDYAFNPNILTNCASGEVVEEYLVSHLLKSNCLITQQPDWGSVQIHYVGKRLDQEKLLRYLVSFRQHNEFHEQCVERIFCDLMQFASPEKLTVYARYTRRGGLDINPFRSNFEQIAENARLARQ

SEQ ID NO: 46075 - protein, 134 aa, unidentified
  source 1..134: note = Fremyella diplosiphon
  REGION 1..134: note = tr|A0A1Z4MMF6|A0A1Z4MMF6_MICDP NADPH-dependent 7-cyano-7-deazaguanine reductase OS=Fremyella diplosiphon NIES-3275 OX=1973485 GN=queF PE=3 SV=1
MTNNTTEIKYGEREIAEGQLITFPNPRVGRKYDISITLPEFTCKCPFSGYPDFATIYISYVPDERVVELKALKLYINSYRDRYISHEESANQILDDFVAACDPLEATVKADFTPRGNVHTVVEVRHQKQQNNIF

SEQ ID NO: 46076 - protein, 159 aa, unidentified
  source 1..159: note = Frischella perrara
  REGION 1..159: note = tr|A0A318N3N3|A0A318N3N3_FRIPE NADPH-dependent 7-cyano-7-deazaguanine reductase OS=Frischella perrara; OX = 1267021 GN=queF PE=3 SV=1
MTNSNLTLLGDQSIRYPQDYAPEILEVFDNKHLDNDYFVKFNCPEFTSLCPITGQPDFATIYISYVPHIKMVESKSLKLYLFSFRNRGDFHEDCINIIMKDLIKLMDPKYIEVWGKFTPRGGISIDPYANYGKPNTKWQEIAFNRLANHDLYPEKIDNR

SEQ ID NO: 46077 - protein, 159 aa, unidentified
  source 1..159: note = Frischella perrara
  REGION 1..159: note = tr|A0A0A7RZD4|A0A0A7RZD4_FRIPE NADPH-dependent 7-cyano-7-deazaguanine reductase OS=Frischella perrara; OX = 1267021 GN=queF PE=3 SV=1
MTNSNLTLLGDQSIRYPQDYAPGILEVFDNKHLDNDYFVKFNCPEFTSLCPITGQPDFATIYISYVPHIKMVESKSLKLYLFSFRNRGDFHEDCINIIMKDLIKLMDPKYIEVWGKFTPRGGISIDPYANYGKPNTKWQEIAFNRLANHDLYPEKIDNR

SEQ ID NO: 46078 - protein, 120 aa, unidentified
  source 1..120: note = Fuerstia marisgermanicae
  REGION 1..120: note = tr|A0A1P8WBM2|A0A1P8WBM2_9PLAN NADPH-dependent 7-cyano-7-deazaguanine reductase OS=Fuerstia marisgermanicae OX=1891926 GN=queF PE=3 SV=1
MAEPSPETLETFENPFPERNYLIETVAPEFTSLCPKTGHPDFGTLTITYIADKLCYELKSLKLYLQEFRNHGAFYEKVTNTILDDLVAVTSPRWMKIEAAFTPRGGIRTTVIVEHGKKPE

SEQ ID NO: 46079 - protein, 153 aa, unidentified
  source 1..153: note = Fulvimarina manganoxydans
  REGION 1..153: note = tr|A0A1W2DSV7|A0A1W2DSV7_9RHIZ NADPH-dependent 7-cyano-7-deazaguanine reductase OS=Fulvimarina manganoxydans OX=937218 GN=queF PE=3 SV=1
MTDTTDLSQLGRESRPAASPEEAVLETVPYTRREGPPAIVRFTCPEFTSLCPVTGQPDFAHIVIDYAPDARLVESKSLKLFLTSFRNHGAFHEDCTVMIARRVVQATKPLWLRIGGYWYPRGGIPIDVFWQTGPAPDGCFLPDQGVPPYRGRG

SEQ ID NO: 46080 - protein, 153 aa, Fulvimarina pelagi
  REGION 1..153: note = tr|Q0G302|Q0G302_9RHIZ NADPH-dependent 7-cyano-7-deazaguanine reductase OS=Fulvimarina pelagi HTCC2506 OX=314231 GN=queF PE=3 SV=1
MTDTRYLSQLGRHTDTPQSPEEATLETVPFETGDEMPPVVRFTCPEFTSLCPVTGQPDFAHLVIDYVPEKRLVESKSLKLFLTSFRNHGSFHESCTMMVAKRIVEATQPRWLRIGGYWYPRGGIPIDVFWQTGSAPEGIFLPDQGVPPYRGRG

SEQ ID NO: 46081 - protein, 153 aa, Fulvimarina pelagi; identical to SEQ ID NO: 46080
  REGION 1..153: note = tr|A0A0N7KYY3|A0A0N7KYY3_9RHIZ NADPH-dependent 7-cyano-7-deazaguanine reductase OS=Fulvimarina pelagi; OX = 217511 GN=queF PE=3 SV=1

SEQ ID NO: 46082 - protein, 153 aa, Fulvimarina sp.
  REGION 1..153: note = tr|A0A371X499|A0A371X499_9RHIZ NADPH-dependent 7-cyano-7-deazaguanine reductase OS=Fulvimarina sp. 85; OX = 2293836 GN=queF PE=3 SV=1
MTDTGDLSQLGRQAETPASPEEAVLETVPYAGSEGPPTLVRFTCPEFTSLCPVTGQPDFAHLVIDYVPDARLVESKSLKLFLTSFRNHGAFHESCTVMVAKRITEATRPKWLRIGGYWYPRGGIPIDVFWQTGPAPEDLFLPDQGVPTYRGRG

SEQ ID NO: 46083 - protein, 152 aa, Fulvimarina sp.
  REGION 1..152: note = tr|A0A2E1HK35|A0A2E1HK35_9RHIZ NADPH-dependent 7-cyano-7-deazaguanine reductase OS=Fulvimarina sp.; OX = 1969479 GN=queF PE=3 SV=1
MSHQDLSQLGRDARPAASPEEATLETVPYARGDGPPAIVRFTCPEFTSLCPVTGQPDFAHIVIDYAPDARLVESKSLKLFLTSFRNHGAFHEDCTVMIARRVIDVTQPLWLRIGGYWYPRGGIPIDVFWQSGPVPDGVYLPDQGVPPYRGRG

SEQ ID NO: 46084 - protein, 275 aa, Fulvimonas soli
  REGION 1..275: note = tr|A0A316IGS9|A0A316IGS9_9GAMM NADPH-dependent 7-cyano-7-deazaguanine reductase OS=Fulvimonas soli; OX = 155197 GN=queF PE=3 SV=1
MSTPEHSPLGKATVYADRYDPALLFPIPRAPKRAELGLHGALPFRGVDVWNAYELSWLDARGKPRVALAEFRVPADSPNIVESKSFKLYLNGFAQERVADEEALAATLARDLSAAAGAPVGVALHAPSARGLPFADLDGDSIDALELDLDDYGPPKAGHLRADASAAEVEETLVSDLLRSNCPVTGQPDWGSVQIRYRGAPIDRAGLLRYLVSFRTHSEFHEQCVERIFVDVMARCAPRELSVYARYTRRGGLDINPFRSTDPQAAPGNPRGARQ

SEQ ID NO: 46085 - protein, 160 aa, Fusobacterium equinum
  REGION 1..160: note = tr|A0A133N8C4|A0A133N8C4_9FUSO NADPH-dependent 7-cyano-7-deazaguanine reductase OS=Fusobacterium equinum; OX = 134605 GN=queF PE=3 SV=1
MRETENLSLLGNQNTKYPQDYAPEMLETFENKHPDNDYFVKFNCPEFTSLCPITGQPDFANIVISYVPNIKMVESKSLKLYLFSFRNHGDFHEDCMNIIMKDLIKLMNPKYIEVWGKFTPRGGISIDPYCNYGQKGTKWEEIAFHRMANHDMYPEKVDNR

SEQ ID NO: 46086 - protein, 160 aa, Fusobacterium gonidiaformans; identical to SEQ ID NO: 46085
  REGION 1..160: note = tr|E5BED8|E5BED8_9FUSO NADPH-dependent 7-cyano-7-deazaguanine reductase OS=Fusobacterium gonidiaformans 3-1-5R OX=469605 GN=queF PE=3 SV=1

SEQ ID NO: 46087 - protein, 160 aa, Fusobacterium mortiferum
  REGION 1..160: note = tr|C3WEF9|C3WEF9_FUSMR NADPH-dependent 7-cyano-7-deazaguanine reductase OS=Fusobacterium mortiferum ATCC 9817 OX=469616 GN=queF PE=3 SV=1
MRDLKDLTLLGNQGVKYPDNYAPEILETFDNKHPENDYFVKFNCPEFTSLCPITGQPDFANIIISYVPNIKMVESKSLKLYLFSFRNHGDFHEDCVNIIMKDLIRLMDPKYIEVWGKFTPRGGISIDPYCNYGKKGSKWEEIALNRLANHDMYPEKVDNR

SEQ ID NO: 46088 - protein, 160 aa, Fusobacterium mortiferum; identical to SEQ ID NO: 46087
  REGION 1..160: note = tr|A0A414PUK5|A0A414PUK5_FUSMR NADPH-dependent 7-cyano-7-deazaguanine reductase OS=Fusobacterium mortiferum OX=850 GN=queF PE=3 SV=1

SEQ ID NO: 46089 - protein, 160 aa, Fusobacterium necrogenes
  REGION 1..160: note = tr|A0A377GWQ1|A0A377GWQ1_9FUSO NADPH-dependent 7-cyano-7-deazaguanine reductase OS=Fusobacterium necrogenes OX=858 GN=queF PE=3 SV=1
MRDLKDLTLLGNQGVKYPDNYAPEILETFDNKHPENDYFVKFNCPEFTSLCPITGQPDFANIIISYVPNIKMVESKSLKLYLFSFRNHGNFHEDCVNIIMKDLIKLMDPKYIEVWGKFTPRGGISIDPYCNYGKKGSKWEEIALNRLANHDMYPEKVDNR

SEQ ID NO: 46090 - protein, 160 aa, Fusobacterium necrophorum
  REGION 1..160: note = tr|J6GSG9|J6GSG9_9FUSO NADPH-dependent 7-cyano-7-deazaguanine reductase OS=Fusobacterium necrophorum subsp. funduliforme Fnf 1007 OX=1161424; GN = queF PE=3 SV=1
MKENKNLTLLGNQNTKYPQDYAPEILETFENKHPDHDYFVKFNCPEFTSLCPITGQPDFANIIISYVPNVKMVESKSLKLYLFSFRNHGDFHEDCMNIIMKDLIRVMDPKYIEVWGKFTPRGGISIDPYCNYGKKGTKWEEIALHRMANHDMYPEKVDNR

SEQ ID NO: 46091 - protein, 160 aa, Fusobacterium necrophorum
  REGION 1..160: note = tr|A0A162ILB5|A0A162ILB5_9FUSO NADPH-dependent 7-cyano-7-deazaguanine reductase OS=Fusobacterium necrophorum subsp. funduliforme OX=143387 GN=queF PE=3 SV=1
MKENKNLTLLGNQNTKYPQDYAPEILETFENKHPDHDYFVKFNCPEFTSLCPITGQPDFANIVISYVPNVKMVESKSLKLYLFSFRNHGDFHEDCMNIIMKDLIRVMDPKYIEVWGKFTPRGGISIDPYCNYGKKGTKWEEIALHRMANHDMYPEKVDNR

SEQ ID NO: 46092 - protein, 296 aa, Fusobacterium sp.
  REGION 1..296: note = tr|R7J9P8|R7J9P8_9FUSO GTP cyclohydrolase I/Nitrile oxidoreductase OS=Fusobacterium sp. CAG:439 OX=1262899; GN = BN657_02162 PE=4 SV=1
MNRTDEIAATHLGKKSEGSETYNPSLLVAIPRFENRKQYNIQNNNLPFEGWDVWHAYEFSAMTENGIPVTRLMKLKYNCTSEFLVESKSLKLYLNSFNMTKFGNTITECLEICKKTIEKDLSEKLETEVTVNFIENKAERFEIFTNFENIMNSVDEKTLKVEKFKEAPELLQTEETEKEQTYHLMFDSLRSNCRVTHQPDFGDLYLYYRSKKHILEDSIVKYLSSFRSEYHFHEECCEMIYKRLLDLLDSGDELFVCALYTRRGGIDICPVRTNCILDDALKLIDLTKFARGSIKQ

SEQ ID NO: 46093 - protein, 301 aa, Fusobacterium sp.
  REGION 1..301: note = tr|R7LXS7|R7LXS7_9FUSO GTP cyclohydrolase I/Nitrile oxidoreductase OS=Fusobacterium sp. CAG:815 OX=1262901; GN = BN791_01029 PE=4 SV=1
MQTNQTEEIAAKFLGKRTDGSETYDPSLLVAVPRFENRQQYNIDNNNLPFVGWDIWHAYEFSAMTQNGIPVTRLLKIKYNCTSEFIVESKSLKLYLNSFNMTRLGITIDECLSKCKDFIEQDLSKKLNTEVQVNFLDNNSPKINIFNNFDNLIEFIDQKATIIEKFKEAPELIEADETTTPQKHYLMFDSLRSNCRVTHQPDFGDVFIYYKSNKHIKEESLIKYLISFRSEYHFHEECCEMIYKRLLDKLNKGDELFVCALYTRRGGIDICPARWSKNCTVEDAYNLLDLTQYARNNFKQG

SEQ ID NO: 46094 - protein, 283 aa, Gallaecimonas pentaromativorans
  REGION 1..283: note = tr|A0A3N1PAS3|A0A3N1PAS3_9GAMM NADPH-dependent 7-cyano-7-deazaguanine reductase OS=Gallaecimonas pentaromativorans OX=584787 GN=queF PE=3 SV=1
MPKNSLYDGAHELADLPLGKTSQYQDQYDPSQLRAVPRSLNRDSLALGDALPFVGEDIWNGYELSWLNAKGKPVVALAQFRFPATSPNLVESKSFKLYLNSFNQTRFESADALKAALEADLSATAGGKASVSLYGPADLAAMPLADLDGQCLDELDIEVDDYHFNPDILDGLGGAEQVEEKLVSHLLKSNCLITSQPDWGSVQIHYRGPKIDREKLLRYLISFRQHNEFHEQCVERIYMDLSRRLAPEFLLVSARYTRRGGLDINPWRASEPVLMSNPRLPRQ

SEQ ID NO: 46095 - protein, 283 aa, unidentified
  source 1..283: note = Gallaecimonas xiamenensis
  REGION 1..283: note = tr|K2JUJ5|K2JUJ5_9GAMM NADPH-dependent 7-cyano-7-deazaguanine reductase OS=Gallaecimonas xiamenensis 3-C-1 OX=745411 GN=queF PE=3 SV=1
MPKNSLYHGAKELADLPLGKTTAYQDQYDPGQLHAVPRSLNRDSLDLGDSLPFVGEDIWNGYELSWLNAKGKPVVALAQFRFPASSPNLVESKSFKLYLNSFNQSRFDSLEAVKAALEKDLSATAGGQALVSLYGPGDVGAMPLAALEGHCIDDLDIEVSDYQFDPALLDGLGGQEQVEEKLVSHLLKSNCLITSQPDWGSLQIHYRGPKIDREKLLRYLISFRQHNEFHEQCVERIYWDLWQRLKPDFLMVYARYTRRGGLDINPWRASSDMAVANPRLPRQ

SEQ ID NO: 46096 - protein, 281 aa, Gallibacterium anatis
  REGION 1..281: note = tr|A0A0A2Z6E1|A0A0A2Z6E1_9PAST NADPH-dependent 7-cyano-7-deazaguanine reductase OS=Gallibacterium anatis; OX = 750 GN=queF PE=3 SV=1
MDYQDESLTQLTLGKKIAYATHYQPALLQAVPRKLNREQLGILSQQPFTQGADIWTLYEISWLNKNGVPQVAIADVVLDCNSENLIESKSFKLYLNSFNQTHFAEKQQVETTIQQDLQQCANGKVKVTLHDLQYYQQQQIAHFTGICIDQQDIVIDNYQFNADLLQNCVDDHSEKVEQTLVSHLLKSNCLITQQPDWGSVQIHYIGRAINQEKLLRYLISFRQHNEFHEQCVERIFCDLMHYAKPEKLTVYARYTRRGGLDINPFRSNFEYIPANLRLARQ

SEQ ID NO: 46097 - protein, 282 aa, Gallibacterium anatis
  REGION 1..282: note = tr|F4HA72|F4HA72_GALAU NADPH-dependent 7-cyano-7-deazaguanine reductase OS=Gallibacterium anatis (strain UMN179) OX=1005058 GN=queF PE=3 SV=1
MIDYQDESLTQLTLGKKIAYATHYQPALLQAVPRKLNREQLGILSQQPFTQGADIWTLYEISWLNKNGVPQVAIADVVLDCNSENLIESKSFKLYLNSFNQTHFADKQQVETTIQQDLQQCANGKVKVTLHDLQYYQQQQIAHFAGICIDQQDIVIDNYQFNADLLQNCVDDHSEKVEQTLVSHLLKSNCLITQQPDWGSVQIHYIGRAINQEKLLRYLISFRQHNEFHEQCVERIFCDLMHYAKPEKLTVYARYTRRGGLDINPFRSNFEHIPANLRLARQ

SEQ ID NO: 46098 - protein, 281 aa, unidentified
  source 1..281: note = Gallibacterium genomosp.
  REGION 1..281: note = tr|A0A1A7PCE5|A0A1A7PCE5_9PAST NADPH-dependent 7-cyano-7-deazaguanine reductase OS=Gallibacterium genomosp. 1 OX=155515 GN=queF PE=3 SV=1
MDYQDESLIKLTLGKKTTYATDYRPSLLQAVPRKLNREQLGILSQQPFTQGADIWTLYEISWLNKNGVPQVAIADVVLDCNSENLIESKSFKLYLNSFNQTHFADKQQVETTIQQDLQQCANGKVKVTLHDLQYYQQQKIAYLEGICIDQLDIVIDNYQFNADLLQNCVDNNSEKVEQTLVSHLLKSNCLITQQPDWGSIQIHYVGREINQEKLLRYLISFRQHNEFHEQCVERIFCDLMYYAKPEKLTVYARYTRRGGLDINPFRSNFEQIPANLRLARQ

SEQ ID NO: 46099 - protein, 281 aa, unidentified; identical to SEQ ID NO: 46098
  source 1..281: note = Gallibacterium genomosp.
  REGION 1..281: note = tr|A0A0A2XE72|A0A0A2XE72_9PAST NADPH-dependent 7-cyano-7-deazaguanine reductase OS=Gallibacterium genomosp. 2 OX=155517 GN=queF PE=3 SV=1

SEQ ID NO: 46100 - protein, 282 aa, Gallibacterium salpingitidis
  REGION 1..282: note = tr|A0A1A7NTI2|A0A1A7NTI2_9PAST NADPH-dependent 7-cyano-7-deazaguanine reductase OS=Gallibacterium salpingitidis OX=505341 GN=queF PE=3 SV=1
MTTYADASLSALTLGKKTAYAEHYQPTLLQAVPRHLNRQQLGITEQQPFSQGADIWTLYELSWLNHKGVPQVAIADVYLDFRSENLIESKSFKLYLNSFNQTRFATVEEVQQTIQKDLTQCAKGEVQVVLHSLDEYQQQPIAHFAGICIDQQDIEIDNYQFNPELLTNCADQQSEVIEQTLVSHLLKSNCLITQQPDWGSVQIHYVGKPIDQEKLLRYLISFRQHNEFHEQCVERIYCDLMRFAQPEKLTVYARYTRRGGLDINPFRSNFETLPANLRLARQ

SEQ ID NO: 46101 - protein, 139 aa, unidentified
  source 1..139: note = Gallionella capsiferriformans
  REGION 1..139: note = tr|D9SGR4|D9SGR4_GALCS NADPH-dependent 7-cyano-7-deazaguanine reductase OS=Gallionella capsiferriformans (strain ES-2) OX=395494 GN=queF PE=3 SV=1
MTTQPTKALETFPNPNPSRDYHIHMEIPEFTCLCPKTGQPDFATLVLDYIADQQCVELKSLKLYMWSFREEGHFHEDVTNRILDDLIKATQPRFMRLTAKFYVRGGIFTNVVAEHRKDNWMPAPFVELSQFGSQSNTRG

SEQ ID NO: 46102 - protein, 139 aa, Gallionella sp.
  REGION 1..139: note = tr|A0A3D2H5W1|A0A3D2H5W1_9PROT NADPH-dependent 7-cyano-7-deazaguanine reductase OS=Gallionella sp.; OX = 2052161 GN=queF PE=3 SV=1
MTTQPTKALETFPNPNPSRDYHIHMEIPEFTCLCPKTGQPDFATLILDYIADQDCVELKSLKLYMWSFREEGHFHEDVTNRILNDLIAATNPRFMRLTAKFYVRGGIFTNVVAEHRKTGWQPAPFVELTQFGSQSNTRG

SEQ ID NO: 46103 - protein, 139 aa, Gallionella sp.
  REGION 1..139: note = tr|A0A522XA67|A0A522XA67_9PROT NADPH-dependent 7-cyano-7-deazaguanine reductase OS=Gallionella sp.; OX = 2052161 GN=queF PE=3 SV=1
MSTQPAKTLETFPNPNPGRDYHIHMEIPEFTCLCPKTGQPDFATLILDYIADEKCVELKSLKLYMWSFRNEGHFHEDVTNRILDDLVAATGPRFMRLTAKFYVRGGIFTNVVAEHRKQGWQPAPFVDLSQFGMQSNVRG

SEQ ID NO: 46104 - protein, 139 aa, unidentified
  source 1..139: note = Gallionellaceae bacterium
  REGION 1..139: note = tr|A0A1J4TKI5|A0A1J4TKI5_9PROT NADPH-dependent 7-cyano-7-deazaguanine reductase OS=Gallionellaceae bacterium CG1_02_60_325 OX=1805162 GN=queF PE=3 SV=1
MSTRPAKTLETFPNPKPGRDYHIHMEIPEFTCLCPKTGQPDFATLTLDYIADQYCVELKSLKLYIWSFREEGHFHEDVTNRILDDLVAATQPRFMRLTAKFYVRGGIFTNVVAEHRKDGWQPAPFVELSAFSGQSNTRG

SEQ ID NO: 46105 - protein, 122 aa, unidentified
  source 1..122: note = Gallionellaceae bacterium
  REGION 1..122: note = tr|A0A2H9MB30|A0A2H9MB30_9PROT NADPH-dependent 7-cyano-7-deazaguanine reductase (Fragment); OS = Gallionellaceae bacterium CG02_land_8_20_14_3_00_60_115; OX = 1974011 GN=C OS20_02345 PE=3 SV=1
MSTRPAKTLETFPNPKPGRDYHIHMEIPEFTCLCPKTGQPDFATLTLDYIADQYCVELKSLKLYIWSFREEGHFHEDVTNRILDDLVAATQPRFMRLTAKFYVRGGIFTNVVAEHRKDGWQP

SEQ ID NO: 46106 - protein, 140 aa, unidentified
  source 1..140: note = Gallionellales bacterium
  REGION 1..140: note = tr|A0A2M7C0M7|A0A2M7C0M7_9PROT NADPH-dependent 7-cyano-7-deazaguanine reductase OS=Gallionellales bacterium CG03_land_8_20_14_0_80_55_15 OX=1974017 GN=queF; PE = 3 SV=1
MTTQPGKTLETFPNPKPLRDYHIHMEIPEFTCLCPKTGQPDFATLELDYIADQHCVELKSLKLYMWSFREEGHFHEDMTNLILDDLVAATQPRFMRLTSKFYVRGGIFTNVIAEHRKEGWQPAPFVELSRFSSQSNTRGA

SEQ ID NO: 46107 - protein, 140 aa, unidentified
  source 1..140: note = Gallionellales bacterium
  REGION 1..140: note = tr|A0A2M8DVQ9|A0A2M8DVQ9_9PROT NADPH-dependent 7-cyano-7-deazaguanine reductase OS=Gallionellales bacterium CG_4_9_14_0_8_um_filter_55_61 OX=1974015 GN=queF; PE = 3 SV= 1
MTTQPGKTLETFPNPKPLRDYHIHMEIPEFTCLCPKTGQPDFATLVLDYIADQHCVELKSLKLYMWSYREEGHFHEDMTNLILDDLVAATQPRFMRLTSKFYVRGGIFTNVIAEHRKEGWQPAPFVELSRFSSQSNTRGA

SEQ ID NO: 46108 - protein, 305 aa, unidentified
  source 1..305: note = Unknown
  REGION 1..305: note = tr|E1VNZ5|E1VNZ5_9GAMM NADPH-dependent 7-cyano-7-deazaguanine reductase OS=gamma proteobacterium HdN1 OX=83406 GN=queF PE=3 SV=1
MSTPKELSIDHGPLGEKSAYPERYSPSVLHPIPRALGREALGIGNVLPFAGEDLWNAWEVSWLDAYGKPMVALLELRVPCTSPNIVESKSLKLYLGSFNQERFASAAEVEQRISQDLTRLVGAPVLATLEFLHHARGSRFAVSAGSSCSLSDVEGRHQARGSRFAVSAPLGECIDDTPLYEPSFAVSSQLLQCEMGEVREETLHSHLLRSNCPVTGQPDWATLIVRYRGQPIQRQALLSYIVSYRNHNDFHEQCVERIFMDLMQRCQPERLFVYARYTRRGGIDINPVRSNDEALEVNNLRLLRQ

SEQ ID NO: 46109 - protein, 129 aa, unidentified
  source 1..129: note = Unknown
  REGION 1..129: note = tr|A0A2T6MVW5|A0A2T6MVW5_9GAMM NADPH-dependent 7-cyano-7-deazaguanine reductase OS=gamma proteobacterium symbiont of Ctena orbiculata OX=1968598 GN=queF PE=3 SV=1
MPSQPSKALETFDNPQPERDYTIRIRIPEFTCLCPKTGQPDFAEMTLEYVPDKRCVELKALKLYVWSFRDQGAFHEAVTNEILSDLVSATQPRFMRLTAEFNVRGGIYTTVVAEHRAENWSPPSAVSLP

SEQ ID NO: 46110 - protein, 281 aa, unidentified
  source 1..281: note = Gammaproteobacteria bacterium
  REGION 1..281: note = tr|A0A1G0G8L4|A0A1G0G8L4_9GAMM NADPH-dependent 7-cyano-7-deazaguanine reductase OS=Gammaproteobacteria bacterium RIFCSPHIGHO2_02_FULL_39_13 OX=1798270 GN=queF; PE = 3 S V=1
MHITHTSPKHSTLGKKTDYKTQYDASLLFPIARENRRGTIGITNTLPFFGFDIWNHYEVSWLNQKGKPIVAIAHIIYPAASKNIIESKSLKLYFNSFNNTCFESLASVKKTIERDLLESLETELIAVTITPTAVFSEEKLQSHLNGIGLDELDIDFDIYRNDPTLLMTENEWVEETLYSDLLRSNCLITNQPDWCSVQINYKGKKINHAGLLRYLVSFRNDNEFHEHCIEKIFMHIMQRCNPTELTVYGRSTRRGGLDINSYRSTKPVKIDEIRNIRLCRQ

SEQ ID NO: 46111 - protein, 273 aa, unidentified
  source 1..273: note = Gammaproteobacteria bacterium
  REGION 1..273: note = tr|A0A1G0IXY4|A0A1G0IXY4_9GAMM NADPH-dependent 7-cyano-7-deazaguanine reductase OS=Gammaproteobacteria bacterium RIFCSPLOWO2_02_FULL_38_11 OX=1798293 GN=queF; PE = 3 SV =1
MLKNSELGKKTKYESSYNPHLLFPIARQGKRNEIGISDDLPFVGFDLWNHYEVSWLNEKGKPIVAIAEIIYPCESPFIIESKSKKLYFNSLNNTKFKNTAALQVLFEKDLSEKAGANVKVKITELNKIKEGKTYPGIEGVCLDELDVSCSVYTVDASFLVTESIFTEEILFSNLLKSNCLVTHQPDWASVQIAYKGEKINHEGLLKYLISFRNHNEFHEQCIERIFMDMMKQCQPQELSVYGRYTRRGGLDINVYRGTKNRDLVVSNQRLVRQ

SEQ ID NO: 46112 - protein, 139 aa, unidentified
  source 1..139: note = Geitlerinema sp.
  REGION 1..139: note = tr|K9S9G5|K9S9G5_9CYAN NADPH-dependent 7-cyano-7-deazaguanine reductase OS=Geitlerinema sp. PCC 7407 OX=1173025 GN=queF PE=3 SV=1
MQSEQLAENSTATSETSGVKYGERAIAEGELITFPNPRVGRRYNVNVTLPEFTCKCPFSGYPDFATIHITYVPDERVVELKALKLYINSYRDRYISHEESVNQILDDFVAACDPLEVHIKGDFSPRGNVHTVIEVTHKK

SEQ ID NO: 46113 - protein, 133 aa, unidentified
  source 1..133: note = Geminocystis sp.
  REGION 1..133: note = tr|A0A0D6ARA0|A0A0D6ARA0_9CHRO NADPH-dependent 7-cyano-7-deazaguanine reductase OS=Geminocystis sp. NIES-3709 OX=1617448 GN=queF PE=3 SV=1
MSENKFSEVKYGERAIEDGNLITFPNPRPGRVYDVSITLPEFTCKCPFSGYPDFATIYINYSPDEKVVELKAIKLYINSYRDRYISHEESVNQILDDFVEACDPLSITVKGDFYPRGNVHTVIEVKHNKALSF

SEQ ID NO: 46114 - protein, 131 aa, unidentified
  source 1..131: note = Geminocystis sp.
  REGION 1..131: note = tr|A0A0D6AFF8|A0A0D6AFF8_9CHRO NADPH-dependent 7-cyano-7-deazaguanine reductase OS=Geminocystis sp. NIES-3708 OX=1615909 GN=queF PE=3 SV=1
MSENQFSEVKYGERAIEEGSLITFANPRPGRVYNVSITLPEFTCKCPFSGYPDFATIYINYSPDEKVVELKAIKLYINSYRDRYISHEESINQILDDFVSACDPLSITVKGDFYPRGNVHTVIEVKHDKNK

SEQ ID NO: 46115 - protein, 121 aa, Gemmata obscuriglobus
  REGION 1..121: note = tr|A0A2Z3HLV5|A0A2Z3HLV5_9BACT NADPH-dependent 7-cyano-7-deazaguanine reductase OS=Gemmata obscuriglobus; OX = 114 GN=queF PE=3 SV=1
MTETPSVEQLETFPNPRPGREFAVEIVCPEFTSVCPKTGQPDFGTITFTYTPAETCVELKSLKLYLQRFRNQGIFYEQVTNRLLDDFVAACNPVRCKVVSVWTPRGGISTTVTCNFEAQKS

SEQ ID NO: 46116 - protein, 125 aa, Gemmata sp.
  REGION 1..125: note = tr|A0A142X746|A0A142X746_9BACT NADPH-dependent 7-cyano-7-deazaguanine reductase OS=Gemmata sp. SH-PL17; OX = 1630693 GN=queF PE=3 SV=1
MELTETPSVEQLETFPNPRPGREFSIEIVCPEFTSVCPKTGQPDFGTITFTYTPGDTCVELKSLKLYLQRFRNQGIFYEQVTNRLLDDFVAACKPVRCKVVSVWTPRGGITTTVTCVHEANERPA

SEQ ID NO: 46117 - protein, 126 aa, unidentified
  source 1..126: note = Gemmataceae bacterium
  REGION 1..126: note = tr|A0A5C1A8A0|A0A5C1A8A0_9BACT NADPH-dependent 7-cyano-7-deazaguanine reductase OS=Gemmataceae bacterium PX52 OX=2598579 GN=queF PE=3 SV=1
MDFTETPSADQLETFPNPKPGRDYSIEIICPEFTSVCPKTGQPDYGTIVFTYTPGEKCVELKSLKLYLQRFRNQGIFYEQVTNRLLDDFVEASQPVRCVVVSKWTPRGGISTNVTASYTAEQTRPG

SEQ ID NO: 46118 - protein, 123 aa, unidentified
  source 1..123: note = Gemmataceae bacterium
  REGION 1..123: note = tr|A0A4V6M0V4|A0A4V6M0V4_9BACT NADPH-dependent 7-cyano-7-deazaguanine reductase OS=Gemmataceae bacterium; OX = 2052164 GN=queF PE=3 SV=1
MAPTETPSASQLETFPNPRPERDFTIEIVCPEFTSVCPKTGQPDFGTITFTYTPAASCVELKSLKLYLQQYRTRGIFYEQVTNQLLDDFVAACRPRRCQVVSVWTPRGGISTNVTCVYEAAAG

SEQ ID NO: 46119 - protein, 132 aa, unidentified
  source 1..132: note = Gemmatimonadaceae bacterium
  REGION 1..132: note = tr|A0A1V4RKU8|A0A1V4RKU8_9BACT NADPH-dependent 7-cyano-7-deazaguanine reductase OS=Gemmatimonadaceae bacterium 4484_173 OX=1956166 GN=queF PE=3 SV=1
MTNDLNELSLLGRSTDEFRGLEAFPNRNLQRDYTVTLSTDEFTCVCPKTGQPDFATVTITYIPDKRIVESKSLKLYFQTYRNRGVFHEHVTNMILDDLVEAIHPRWCRVQADFGVRGGISITVEAEYTGDRD

SEQ ID NO: 46120 - protein, 118 aa, unidentified
  source 1..118: note = Gemmatimonadaceae bacterium
  REGION 1..118: note = tr|A0A2E8H4Z7|A0A2E8H4Z7_9BACT NADPH-dependent 7-cyano-7-deazaguanine reductase OS=Gemmatimonadaceae bacterium OX=2026741 GN=queF PE=3 SV=1
MSDTPEELLEHFPNPNPGREFTIDIDCPEFTSVCPKTGHPDFGTIHITYVPDERCIELKSLKLYLQSYRQRGIFYEAATNVILDHLVTACAPRRMTVTGDFSARGGITTKVTAAYPAP

SEQ ID NO: 46121 - protein, 130 aa, unidentified
  source 1..130: note = Gemmatimonadales bacterium
  REGION 1..130: note = tr|A0A524H0G4|A0A524H0G4_9BACT NADPH-dependent 7-cyano-7-deazaguanine reductase OS=Gemmatimonadales bacterium OX=2448054 GN=queF PE=3 SV=1
MATPDGRSLPFVGPEHVNVAVLETFPYDGPAQEIVTTTDEFSAVCPYSGLPDFATLTVMYVPGESCIELKSLKYYVTSYRSVGIYQEHATAKIAEDLFTVLTPRSLTVQTEYNVRGGFLTTCSVTLPTPG

SEQ ID NO: 46122 - protein, 135 aa, unidentified
  source 1..135: note = Gemmatimonadetes bacterium
  REGION 1..135: note = tr|A0A2V7QQ46|A0A2V7QQ46_9BACT NADPH-dependent 7-cyano-7-deazaguanine reductase OS=Gemmatimonadetes bacterium OX=2026742 GN=queF PE=3 SV=1
MTSQPPRLPRTGPLPRPSSPTEAREYLKAEAFPAPDVRTVTLTATEFTSICPRTGQPDFGSVTIEYTPGERCLESKALKYYLWSYRDEGAFCESLAARIADDIVYAIRPRTLSVHVNQNVRGGIALVALAVREGT

SEQ ID NO: 46123 - protein, 122 aa, unidentified
  source 1..122: note = Gemmatimonadetes bacterium
  REGION 1..122: note = tr|A0A1Q7AC81|A0A1Q7AC81_9BACT NADPH-dependent 7-cyano-7-deazaguanine reductase OS=Gemmatimonadetes bacterium 13_2_20CM_2_69_23 OX=1805204 GN=queF PE=3 SV=1
MRSRPSKRLQTFPNPAPGRDYRIHMEISEFTCVCPMTGQPDFGTLLLEYVPDRTCVELKSLKLYIWSYRDQGAFHEAVTNAILDDLVAATKPRYLRLEARFNVRGGIHTSVVAEHRKRGWKA

SEQ ID NO: 46124 - protein, 131 aa, Gemmatimonas aurantiaca
  REGION 1..131: note = tr|A0A3D4VEB1|A0A3D4VEB1_9BACT NADPH-dependent 7-cyano-7-deazaguanine reductase OS=Gemmatimonas aurantiaca OX=173480 GN=queF PE=3 SV=1
MPKPELLEKFPNPYADRDYEIYMETDEFTSLCPLGGVETDAIELKLLEGGAPDFATIRITYTPDVHCVELKSLKLYFWSFRNDGIFYERVVNRILDDLVEAVSPRALTVVGDFKVRGGLKSIITAKYVKGQ

SEQ ID NO: 46125 - protein, 131 aa, Gemmatimonas aurantiaca; identical to SEQ ID NO: 46124
  REGION 1..131: note = tr|C1AEK8|C1AEK8_GEMAT NADPH-dependent 7-cyano-7-deazaguanine reductase OS=Gemmatimonas aurantiaca (strain T-27 / DSM 14586 / JCM 11422 / NBRC 100505) OX=379066 GN=q ueF PE=3 SV=1

SEQ ID NO: 46126 - protein, 130 aa, unidentified
  source 1..130: note = Gemmatimonas phototrophica
  REGION 1..130: note = tr|A0A143BP54|A0A143BP54_9BACT NADPH-dependent 7-cyano-7-deazaguanine reductase OS=Gemmatimonas phototrophica OX=1379270 GN=queF PE=3 SV=1
MPKPQLLETFPNPYADRKYEIYMETNEFTSLCPLGGVETDAAELKLLEGGAPDFATIKITYTPAEKCLELKSLKLYFWSFRNDGIFYERAVNHIMDDLVAACQPHALTVVGDFNVRGGLKSIITASYTRD

SEQ ID NO: 46127 - protein, 134 aa, Gemmatimonas sp.
  REGION 1..134: note = tr|A0A0S8AJ58|A0A0S8AJ58_9BACT NADPH-dependent 7-cyano-7-deazaguanine reductase OS=Gemmatimonas sp. SG8_28 OX=1703357 GN=queF PE=3 SV=1
MTSDANRVPERGPLPKPSGPDEAREYLKASAFPAPDVQTVTMTGTEFTSVCPKTGQPDFGTVTIEYVPDVRCIESRALKYYLWSFRDEPAFVETVAARIADDVVYAIAPRRVTVQVTQNVRGGIAIVATATRGT

SEQ ID NO: 46128 - protein, 134 aa, Gemmatimonas sp.
  REGION 1..134: note = tr|A0A0S7ZJC3|A0A0S7ZJC3_9BACT NADPH-dependent 7-cyano-7-deazaguanine reductase OS=Gemmatimonas sp. SG8_17 OX=1703355 GN=queF PE=3 SV=1
MTKKDIPLSGPLPTPSNPGEAREVLKASAFEAPDVQSITMEATEFTALCPRTGQPDFGTVTIEYIPADLCIESKSLKYYLWSYRNEGVFCESIAAQIAEDVMYAVRPKAVEVEVTQNIRGGIGIVARAVRGGFE

SEQ ID NO: 46129 - protein, 131 aa, unidentified
  source 1..131: note = Gemmatirosa kalamazoonesis
  REGION 1..131: note = tr|W0RDM8|W0RDM8_9BACT NADPH-dependent 7-cyano-7-deazaguanine reductase OS=Gemmatirosa kalamazoonesis OX=861299 GN=queF PE=3 SV=1
MPKPEILETFPNPYPDRDYDIYMESAEFTSLCPLGGIEGDATDLKALEGGAPDFATIRIRYVPAEVCVELKSLKLYLWSFRNDGIFYERAVNRILDDLAAAVQPKRMEVTGDFNVRGGIKSVITARWPLER

SEQ ID NO: 46130 - protein, 154 aa, Gemmobacter aquatilis
  REGION 1..154: note = tr|A0A1H8L4Z7|A0A1H8L4Z7_9RHOB NADPH-dependent 7-cyano-7-deazaguanine reductase OS=Gemmobacter aquatilis; OX = 933059 GN=queF PE=3 SV=1
MSETIYSGLQQLGSPTSMPASPEAAVLEKVANPQAGQRYVVRFTAPEFTSLCPMTGQPDFAHLVIDYIPRDWLVESKSLKLFLFSFRNHGAFHEDCTVSIARRLVDLLQPEWLRIGGYWYPRGGIPIDVFWQSGAAPADVWIPDQGVPPYRGRG

SEQ ID NO: 46131 - protein, 114 aa, Geobacillus galactosidasius
  REGION 1..114: note = tr|A0A226QS01|A0A226QS01_9BACI NADPH-dependent 7-cyano-7-deazaguanine reductase OS=Geobacillus galactosidasius OX=883812 GN=queF PE=3 SV=1
MLKQRPKTGQPDFATIYISYIPDKKCVESKSLKLYLFSFRNHGDFHEDCVNIIMNDLIKVMEPRYIEVWGKFTPRGGISIDPYCNWGRPGTKYEKMAEYRLMNHDLYPEKVDNR

SEQ ID NO: 46132 - protein, 165 aa, Geobacillus kaustophilus; identical to SEQ ID NO: 44028
  REGION 1..165: note = sp|Q5L1B7|QUEF_GEOKA NADPH-dependent 7-cyano-7-deazaguanine reductase OS=Geobacillus kaustophilus (strain HTA426) OX=235909 GN=queF PE=1 SV=1

SEQ ID NO: 46133 - protein, 165 aa, Geobacillus kaustophilus; identical to SEQ ID NO: 44028
  REGION 1..165: note = tr|U2Y288|U2Y288_GEOKU NADPH-dependent 7-cyano-7-deazaguanine reductase OS=Geobacillus kaustophilus GBlys OX=1337888 GN=queF PE=3 SV=1

SEQ ID NO: 46134 - protein, 165 aa, Geobacillus lituanicus
  REGION 1..165: note = tr|A0A223DZ16|A0A223DZ16_9BACI NADPH-dependent 7-cyano-7-deazaguanine reductase OS=Geobacillus lituanicus; OX = 169283 GN=queF PE=3 SV=1
MAGRKEEELKDLTLLGRQGTTYSFTYNPHLLEVFDNKHPDRDYFVKFNCPEFTSLCPKTGQPDFATIYISYIPDKKCVESKSLKLYLFSFRNHGDFHEDCVNIIMNDLIKVMEPRYIEVWGKFTPRGGISIDPYCNWGRPGTKYEKMAEYRLLNHDLYPEKVDNR

SEQ ID NO: 46135 - protein, 165 aa, unidentified; identical to SEQ ID NO: 44028
  source 1..165: note = Geobacillus proteiniphilus
  REGION 1..165: note = tr|A0A1Q5T7S5|A0A1Q5T7S5_9BACI NADPH-dependent 7-cyano-7-deazaguanine reductase OS=Geobacillus proteiniphilus OX=860353 GN=queF PE=3 SV=1

SEQ ID NO: 46136 - protein, 165 aa, Geobacillus sp.
  REGION 1..165: note = tr|L7ZXI7|L7ZXI7_9BACI NADPH-dependent 7-cyano-7-deazaguanine reductase OS=Geobacillus sp. GHH01; OX = 1233873 GN=queF PE=3 SV=1
MAGRKEEELKDLTLLGNQGTTYSFTYNPNLLEVFDNKHPDRDYFVKFNCPEFTSLCPKTGQPDFATIYISYIPDKKCVESKSLKLYLFSFRNHGDFHEDCVNIIMNDLIKVMEPRYIEVWGKFTPRGGISIDPYCNWGRPGTKYEKIAEYRLLNHDLYPEKVDNR

SEQ ID NO: 46137 - protein, 165 aa, Geobacillus sp.
  REGION 1..165: note = tr|A0A4V1NUI5|A0A4V1NUI5_9BACI NADPH-dependent 7-cyano-7-deazaguanine reductase OS=Geobacillus sp. PK12; OX = 2508525 GN=queF PE=3 SV=1
MAGRKEEELKDLTLLGHQGTTYSFTYNPNLLEVFDNKHPDRDYFVKFNCPEFTSLCPKTGQPDFATIYISYIPDKKCVESKSLKLYLFSFRNHGDFHEDCVNIIMNDLIKVMEPRYIEVWGKFTPRGGISIDPYCNWGRPGTKYEKIAEYRLLNHDLYPEKVDNR

SEQ ID NO: 46138 - protein, 165 aa, Geobacillus stearothermophilus
  REGION 1..165: note = tr|A0A0K9HJ92|A0A0K9HJ92_GEOSE NADPH-dependent 7-cyano-7-deazaguanine reductase OS=Geobacillus stearothermophilus OX=1422 GN=queF PE=3 SV=1
MAGRKEEELKDLTLLGHQGTTYSFTYNPNLLEVFDNKHPDRDYFVKFNCPEFTSLCPKTGQPDFATIYISYIPDKKCVESKSLKLYLFSFRNHGDFHEDCVNIIMNDLIKVMEPRYIEVWGKFTPRGGISIDPYCNWGRPGTKYEKMAEYRLLNHDLYPEKVDNR

SEQ ID NO: 46139 - protein, 165 aa, Geobacillus stearothermophilus
  REGION 1..165: note = tr|A0A0K2HB46|A0A0K2HB46_GEOSE NADPH-dependent 7-cyano-7-deazaguanine reductase OS=Geobacillus stearothermophilus 10 OX=272567 GN=queF PE=3 SV=1
MAGRKEEELKDLTLLGNQGTTYSFTYNPNLLEVFDNKHPDRDYFVKFNCPEFTTLCPKTGQPDFATIYITYIPDKKCVESKSLKLYLFSFRNHGDFHEDCVNIIMNDLIKVMEPRYIEVWGKFTPRGGISIDPYCNWGRPGTKYEKMAEYRLLNHDLYPEKVDNR

SEQ ID NO: 46140 - protein, 165 aa, Geobacillus thermocatenulatus; identical to SEQ ID NO: 46138
  REGION 1..165: note = tr|A0A226Q2G6|A0A226Q2G6_9BACI NADPH-dependent 7-cyano-7-deazaguanine reductase OS=Geobacillus thermocatenulatus OX=33938 GN=queF PE=3 SV=1

SEQ ID NO: 46141 - protein, 165 aa, Geobacillus thermodenitrificans
  REGION 1..165: note = tr|A0A1W6VPR7|A0A1W6VPR7_GEOTD NADPH-dependent 7-cyano-7-deazaguanine reductase OS=Geobacillus thermodenitrificans OX=33940 GN=queF PE=3 SV=1
MNGRKDEELKDLTLLGNQGTTYSFTYDPNLLEVFDNKHPDRDYFVKFNCPEFTSLCPKTRQPDFATIYISYIPDKKCVESKSLKLYLFSFRNHGDFHEDCVNIIMNDLINVMEPRYIEVWGKFTPRGGISIDPYCNWGRPGTKYEKMAEYRLLNHDLYPEKIDNR

SEQ ID NO: 46142 - protein, 165 aa, Geobacillus thermodenitrificans; identical to SEQ ID NO: 46141
  REGION 1..165: note = sp|A4ILP0|QUEF_GEOTN NADPH-dependent 7-cyano-7-deazaguanine reductase OS=Geobacillus thermodenitrificans (strain NG80-2) OX=420246 GN=queF PE=3; SV = 1

SEQ ID NO: 46143 - protein, 165 aa, Geobacillus thermoleovorans; identical to SEQ ID NO: 44028
  REGION 1..165: note = tr|G8MYT1|G8MYT1_GEOTH NADPH-dependent 7-cyano-7-deazaguanine reductase OS=Geobacillus thermoleovorans CCB_US3_UF5 OX=1111068 GN=queF PE=3 SV=1

SEQ ID NO: 46144 - protein, 165 aa, Geobacillus thermoleovorans; identical to SEQ ID NO: 44028
  REGION 1..165: note = tr|A0A098L5X3|A0A098L5X3_GEOTH NADPH-dependent 7-cyano-7-deazaguanine reductase OS=Geobacillus thermoleovorans B23 OX=1406857 GN=queF PE=3 SV=1

SEQ ID NO: 46145 - protein, 165 aa, unidentified; identical to SEQ ID NO: 46136
  source 1..165: note = Geobacillus zalihae
  REGION 1..165: note = tr|A0A1V9CQG0|A0A1V9CQG0_9BACI NADPH-dependent 7-cyano-7-deazaguanine reductase OS=Geobacillus zalihae; OX = 213419 GN=queF PE=3 SV=1

SEQ ID NO: 46146 - protein, 142 aa, Geobacter argillaceus
  REGION 1..142: note = tr|A0A562VNV4|A0A562VNV4_9DELT NADPH-dependent 7-cyano-7-deazaguanine reductase OS=Geobacter argillaceus; OX = 345631 GN=queF PE=3 SV=1
MELHDNLKSLGQGATHYRYDQPDAGLLESFPNPFAMPERNPAGAVGTIHIECPEFTSLCPLTGQPDFARIVIDYQPDQHCVESKSLKLYLGSFRMHGEFHESCVNRICNDLVRLLDPVWLTVRGEFTPRGGIPFWPTAEYRR

SEQ ID NO: 46147 - protein, 144 aa, Geobacter lovleyi
  REGION 1..144: note = tr|B3E3W5|B3E3W5_GEOLS NADPH-dependent 7-cyano-7-deazaguanine reductase OS=Geobacter lovleyi (strain ATCC BAA-1151 / DSM 17278 / SZ) OX=398767 GN=queF; PE = 3 SV=1
MKLHEGLKTLGEGKATTYSYDAPDAGLLEWFPSPYVDPELNPCGCTGTLHISCPEFTCLCPMTGQPDFGTIIIDYQPDQRCVESKSLKLYLGSFRMHGEFHEAGVNRICNDLVKLLDPVWLTVKGEFTPRGGIPFWPTAEYRKG

SEQ ID NO: 46148 - protein, 144 aa, Geobacter sp.
  REGION 1..144: note = tr|A0A399I5Q0|A0A399I5Q0_9DELT NADPH-dependent 7-cyano-7-deazaguanine reductase OS=Geobacter sp. OX=46610; GN = queF PE=3 SV=1
MKLHEDLKALGTGGKTTYTYDHPDAGLLEAFPSPFAEPVLNPAGVIGTIHIECPEFTCLCPMTGQPDFAKIVIDYQPDRLCVESKSLKLYLGSFRMHGEFHEAGVNRICNDLVKLLDPLHVTVRGEFTPRGGIPFWPTAEYRKK

SEQ ID NO: 46149 - protein, 143 aa, Geobacter sp.
  REGION 1..143: note = tr|A0A5C1M9N7|A0A5C1M9N7_9DELT NADPH-dependent 7-cyano-7-deazaguanine reductase OS=Geobacter sp. FeAm09; OX = 2597769 GN=queF PE=3 SV=1
MALHENLKSLGAGATAYRYDRPDAGLLESFPSPFAQPDMNPAGAVGTLHIECPEFTCLCPMTGQPDFAKIVIDYQPDRLCVESKSLKLYLGSFRMHGEFHEASVNRICNDLVKLLEPAWLTVRGEFTPRGGIPFWPTAEYRKE

SEQ ID NO: 46150 - protein, 144 aa, Geobacter thiogenes
  REGION 1..144: note = tr|A0A1T4Q844|A0A1T4Q844_9DELT NADPH-dependent 7-cyano-7-deazaguanine reductase OS=Geobacter thiogenes; OX = 115783 GN=queF PE=3 SV=1
MELHEGLKTLGEGKATTYCYDAPDAGLLEWFPSPYANPELNPCGCTGTLHISCPEFTCLCPMTGQPDFGTIIIDYQPDQRCVESKSLKLYLGSFRMHGEFHEAGVNRICNDLVKLMDPVWLRVKGEFTPRGGIPFWPTAEYRKA

SEQ ID NO: 46151 - protein, 143 aa, unidentified
  source 1..143: note = Geobacteraceae bacterium
  REGION 1..143: note = tr|A0A1G0LBX2|A0A1G0LBX2_9DELT NADPH-dependent 7-cyano-7-deazaguanine reductase OS=Geobacteraceae bacterium GWB2_52_12 OX=1798314 GN=queF PE=3 SV=1
MALHEQLKSLGSSETTYRYDKPDAGLLESFPNPFAREELNPAGAVGPIHIECPEFTSLCPLTGQPDFAKIVIDYQPDQLCVESKSLKLYLGSFRMHGEFHESCVNRICNDLVKLLEPVWMTVRGEFTPRGGIPFWPTAEYRKK

SEQ ID NO: 46152 - protein, 144 aa, unidentified
  source 1..144: note = Geobacteraceae bacterium
  REGION 1..144: note = tr|A0A1G0LYI2|A0A1G0LYI2_9DELT NADPH-dependent 7-cyano-7-deazaguanine reductase OS=Geobacteraceae bacterium GWC2_55_20 OX=1798317 GN=queF PE=3 SV=1
MELHEQLKSLGAGVTSYCYDKPDSALLEAFPSPFAQPEMNRVGAVGTLHIECPEFTCLCPMTGQPDFGKIVIDYQPAALCVESKSLKLYLGSFRMHGEFHEAGVNRICNDLAELLDPVWLTVRGEFTPRGGIPFWPTAEYRKKL

SEQ ID NO: 46153 - protein, 146 aa, Geofilum rubicundum
  REGION 1..146: note = tr|A0A0E9LTL7|A0A0E9LTL7_9BACT NADPH-dependent 7-cyano-7-deazaguanine reductase OS=Geofilum rubicundum JCM 15548 OX=1236989 GN=JCM15548_11052 PE=3 SV=1
MEKKILTYKDIDASLLKSLPNPTGEAYEIKIKIPEFTFLGVKEQPDFADVFLTFYPRKRIIELKSLKQYVYALRNITVSYERLINVFYDHVMEVYEPERVRVVMVFNPRGGISSKLTIDSDWKVRGGDEKFSDWKGNIEDQWSVTL

SEQ ID NO: 46154 - protein, 141 aa, Geofilum rubicundum
  REGION 1..141: note = tr|A0A0E9M1I2|A0A0E9M1I2_9BACT QueF_N domain-containing protein OS=Geofilum rubicundum JCM 15548; OX = 1236989 GN=JCM15548_13767 PE=4 SV=1
MPVAGLLKLSYAADSEFLVESKSLKLYLNGFNMERMGSNASEGIDQILGTIKKDLSALLQTKVNLAFFDGDLKGAEDDFDAFSVLEKHPEVQDLRFTHFSETPSLLIPEENTHGMQKVATHLLRSNCKITHQRLGLSLYPY

SEQ ID NO: 46155 - protein, 169 aa, Geomicrobium sp.
  REGION 1..169: note = tr|A0A061N7E3|A0A061N7E3_9BACL NADPH-dependent 7-cyano-7-deazaguanine reductase OS=Geomicrobium sp. JCM 19055 OX=1460649 GN=queF PE=3 SV=1
MVGRGKEDLPEITQLGNQGTKYSFEYDPGVLETFENNHPTRDYFVKFNTPEFTTLCPITGQPDFATVYISYIPDVKMVESKSLKLYLFSFRNHGDFHEDAMNIIVNDLVELMDPRYIEVWGKFTPRGGISIDPYVNYGKPGTKYEKWQSNDCSTMTCIQKRLQIVKKNR

SEQ ID NO: 46156 - protein, 165 aa, Geomicrobium sp.
  REGION 1..165: note = tr|A0A061NLY8|A0A061NLY8_9BACL NADPH-dependent 7-cyano-7-deazaguanine reductase OS=Geomicrobium sp. JCM 19037 OX=1460634 GN=queF PE=3 SV=1
MAGRGKEDLPEITQLGNQGTAYSFEYDPAVLETFENQHQNRDYFVKFNTPEFTTLCPITGQPDFATLHISYIPDVKMVESKSLKLYLFSFRNHGDFHEDAINIIVNDLVELMDLRYIEVWGKFTPRGGISIDPYVNYGKPGTKFENMAEQRLLYHDLYPETITNR

SEQ ID NO: 46157 - protein, 167 aa, unidentified
  source 1..167: note = Geosporobacter ferrireducens
  REGION 1..167: note = tr|A0A1D8GL87|A0A1D8GL87_9CLOT NADPH-dependent 7-cyano-7-deazaguanine reductase OS=Geosporobacter ferrireducens OX=1424294 GN=queF PE=3 SV=1
MSMDGRTVKELEGVTLLGNQGVKYNYDYDPAVLESFVNKHPDNDYFVKFNCPEFTSLCPKTGQPDFATIYISYVPDNLLVESKSLKLYLLSFRNHGDFHEDCVNIIMKDLIKLLEPKYIEIWGKFTPRGGISIDPFCNYGKKGTKWEKVAEKRLYYHDMYPEKIDNR

SEQ ID NO: 46158 - protein, 276 aa, Geothermobacter ehrlichii
  REGION 1..276: note = tr|A0A5D3WI64|A0A5D3WI64_9DELT NADPH-dependent 7-cyano-7-deazaguanine reductase OS=Geothermobacter ehrlichii OX=213224 GN=queF PE=3 SV=1
MDELEKRLPLGKATSYSTDYDPSLLCPVPRRLKRDEIGLAGELPFTGFDLWNAWELSWLDERGKPVVALGLFRFDCRTPNLVESKSLKLYCNSYNQTRLASMEAARLRIERDLAAAAGGRVEVRLFPPDVSDAFQIQTLPGECIDHLDIDVDRYALDPELLAGAADVGRVVERELHSHLLKSNCLVTGQPDWASVLIRYQGPRIDEEALLRYLISFRQHNEFHEQCVERIFVDLKRFCRPQRLTVHARYTRRGGLDINPFRSDFEQDMPNLRLVRQ

SEQ ID NO: 46159 - protein, 276 aa, Geothermobacter sp.
  REGION 1..276: note = tr|A0A1X0YBD2|A0A1X0YBD2_9DELT NADPH-dependent 7-cyano-7-deazaguanine reductase OS=Geothermobacter sp. EPR-M OX=1969733 GN=queF PE=3 SV=1
MSDLELNLPLGKVSCYADVYDPGLLCPVPRSLKREELGLAEPLPFAGEDLWNAYELSWLNARGKPVVALGEFRFPCDSANLVESKSLKLYLNSFNQTRFDDFGQVRKTITADLSAAAGGTVQVSLEPVAGPGLLSVSTLPGRCIDDLDIAIDDYGLAPELLRGAADDERIVTETLHSHLLKSNCLVTGQPDWGSVLIRYRGPRIDPAALLRYLVSFRRHNEFHEQCVERIFVDLQRFCRPRQLTVYARYTRRGGLDINPFRSNFEVSAENLRLVRQ

SEQ ID NO: 46160 - protein, 276 aa, Geothermobacter sp.
  REGION 1..276: note = tr|A0A2K2H9X9|A0A2K2H9X9_9DELT NADPH-dependent 7-cyano-7-deazaguanine reductase OS=Geothermobacter sp. HR-1 OX=654845 GN=queF PE=3 SV=1
MSDLELNLPLGKVSCYADVYDPGLLCPVPRRLKRDELGLAEPLPFAGEDLWNAYELSWLNARGKPVVALGEFRFPCDSANLVESKSLKLYLNSFNQTRFDDFGQVRKTIAADLSAAAGGTVQVSLAPVTGPGLLPVSALPGRCIDDLDIAIDDYGLAPELLRGAADDGRMVTETLHSHLLKSNCLVTGQPDWGSLLIRYRGPCIDPAALLRYLVSFRQHNEFHEQCVERIFADLQRFCRPQQLTVYARYTRRGGLDINPFRSNFEDSAENLRLVRQ

SEQ ID NO: 46161 - protein, 281 aa, Gibbsiella quercinecans
  REGION 1..281: note = tr|A0A250B3U8|A0A250B3U8_9ENTR NADPH-dependent 7-cyano-7-deazaguanine reductase OS=Gibbsiella quercinecans OX=929813 GN=queF PE=3 SV=1
MSTYQNNQALAGLKLGKPTAYHDQYDATLLQPVPRSLNREPLGLYPQSLPFHGADIWTLYELSWLNDKGLPQVAVGEISLNANSANLIESKSFKLYLNSFNQTRFDNWDAVHSTLQRDLAACAQGEVSVTLFRLEQLAGQPIAMLAGECIDEQDIAIDNYDFNAGYLQGANTGPLVEETLVSNLLKSNCLITNQPDWGSVQIQYRGPQIDRKALLRYLVSFRHHNEFHEQCVERIFNDVLRFCQPEQLSVYARYTRRGGLDINPWRSNTAFTPNAGRLARQ

SEQ ID NO: 46162 - protein, 283 aa, Giesbergeria anulus
  REGION 1..283: note = tr|A0A1H9I922|A0A1H9I922_9BURK NADPH-dependent 7-cyano-7-deazaguanine reductase OS=Giesbergeria anulus; OX = 180197 GN=queF PE=3 SV=1
MSLNIPEHSQLGKASAYTDQYDPSLLFPLPRASKRSEIGITAAPPFFGADLWTAFELSWLNLRGKPQVALAHITVPCETPNLIESKSFKLYLNSLNNTRFADADEVQARIRADVSEAAWRGADRTATVGVKLLLPEVFDREPVHELDGLLLDRLDVECTRYQPAPDLLTAQFDQAPVSEVLVSHLLKSNCLVTGQPDWGSVQIAYSGPQIDQEGLLQYLVSFRNHHEFHEQCVERIFMDIRERCKPIKLTVYARYTRRGGLDINPLRTSHPQALPRNVRTARQ

SEQ ID NO: 46163 - protein, 157 aa, unidentified
  source 1..157: note = Gilliamella apicola
  REGION 1..157: note = tr|A0A242NGI3|A0A242NGI3_9GAMM NADPH-dependent 7-cyano-7-deazaguanine reductase OS=Gilliamella apicola; OX = 1196095 GN=queF PE=3 SV=1
MSNVTLLGDQSVRYPTTYSPEILETFDNKHPGNDYFVKFNCPEFTSLCPITGQPDFATIYISYVPNIKMVESKSLKLYLFSFRNHGDYHEDCINIIMKDLIKLMDPKYIEVWGKFTPRGGISIDPYANYGKADTRWEQIALNRLANHDLYPEKVDNR

SEQ ID NO: 46164 - protein, 157 aa, unidentified; identical to SEQ ID NO: 46163
  source 1..157: note = Gilliamella apicola
  REGION 1..157: note = tr|A0A081Y0T2|A0A081Y0T2_9GAMM NADPH-dependent 7-cyano-7-deazaguanine reductase OS=Gilliamella apicola SCGC AB-598-B02 OX=1445513 GN=queF PE=3 SV=1

SEQ ID NO: 46165 - protein, 157 aa, unidentified
  source 1..157: note = Gilliamella apis
  REGION 1..157: note = tr|A0A2V4DRV4|A0A2V4DRV4_9GAMM NADPH-dependent 7-cyano-7-deazaguanine reductase OS=Gilliamella apis; OX = 1970738 GN=queF PE=3 SV=1
MSNITLLGDQSVRYPTDYCPEILETFDNKHPGNDYFVKFNCPEFTSLCPITGQPDFATIYISYVPNIKMVESKSLKLYLFSFRNHGDYHEDCINIIMKDLIKLMDPKYIEVWGKFTPRGGISIDPYANYGKAGTDWQQIAVNRLANHDLYPEKIDNR

SEQ ID NO: 46166 - protein, 157 aa, unidentified
  source 1..157: note = Gilliamella apis
  REGION 1..157: note = tr|A0A242NV40|A0A242NV40_9GAMM NADPH-dependent 7-cyano-7-deazaguanine reductase OS=Gilliamella apis; OX = 1970738 GN=queF PE=3 SV=1
MSNITLLGDQSVRYPTDYCPEILETFDNKHPENDYFVKFNCPEFTSLCPITGQPDFATIYISYVPNIKMVESKSLKLYLFSFRNHGDYHEDCINIIMKDLIKLMDPKYIEVWGKFTPRGGISIDPYVNYGKAGTDWQQIALNRLANHDLYPEKIDNR

SEQ ID NO: 46167 - protein, 157 aa, unidentified
  source 1..157: note = Gilliamella bombicola
  REGION 1..157: note = tr|A0A1C3YNP3|A0A1C3YNP3_9GAMM NADPH-dependent 7-cyano-7-deazaguanine reductase OS=Gilliamella bombicola; OX = 1798182 GN=queF PE=3 SV=1
MNKITLLGDQSVRYPTTYCPEILETFDNKHPNNDYFVKFNCPEFTSLCPITGQPDFATIYISYVPNIKMVESKSLKLYLFSFRNHGDYHEDCINIIMKDLIKLMDPKYIEVWGKFTPRGGISIDPYANYGKSGTHWQQVAANRLANHDMYPEKVDNR

SEQ ID NO: 46168 - protein, 157 aa, unidentified
  source 1..157: note = Gilliamella intestini
  REGION 1..157: note = tr|A0A1C3YXJ4|A0A1C3YXJ4_9GAMM NADPH-dependent 7-cyano-7-deazaguanine reductase OS=Gilliamella intestini; OX = 1798183 GN=queF PE=3 SV=1
MSKITLLGDQSVRYPTTYCSEILETFDNKHPNNDYFVKFNCPEFTSLCPITGQPDFATIYISYVPNIKMVESKSLKLYLFSFRNHGDYHEDCINIIMKDLIKLMDPKYIEVWGKFTPRGGISIDPYANYGKSGTHWEQVAANRLANHDMYPEKVDNR

SEQ ID NO: 46169 - protein, 157 aa, unidentified
  source 1..157: note = Gilliamella sp.
  REGION 1..157: note = tr|A0A242PF03|A0A242PF03_9GAMM NADPH-dependent 7-cyano-7-deazaguanine reductase OS=Gilliamella sp. N-G2; OX = 1970471 GN=queF PE=3 SV=1
MSNITLLGDQSVRYPTDYCPEILETFDNKHPGNDYFVKFNCPEFTSLCPITGQPDFATIYISYVPNIKMVESKSLKLYLFSFRNHGDYHEDCINIIMKDLIKLMDPKYIEVWGKFTPRGGISIDPYANYGKAGTNWQQIAMNRLANHDLYPEKVDNR

SEQ ID NO: 46170 - protein, 157 aa, unidentified; identical to SEQ ID NO: 46165
  source 1..157: note = Gilliamella sp.
  REGION 1..157: note = tr|A0A242P1R9|A0A242P1R9_9GAMM NADPH-dependent 7-cyano-7-deazaguanine reductase OS=Gilliamella sp. A7; OX = 1970465 GN=queF PE=3 SV=1

SEQ ID NO: 46171 - protein, 121 aa, unidentified
  source 1..121: note = Gimesia maris
  REGION 1..121: note = tr|A0A3D3RB42|A0A3D3RB42_9PLAN NADPH-dependent 7-cyano-7-deazaguanine reductase OS=Gimesia maris OX=122; GN = queF PE=3 SV=1
MSENEASRELLETFENPHPHRDYVMETVCPEFTSVCPKTGQPDYGTLIITYIPDKVCFELKSLKMYLQSYRNVGAFYEDVTNRILDDLVAITDPRWMELRAEFTPRGGISSTVTVSHHKED

SEQ ID NO: 46172 - protein, 121 aa, unidentified; identical to SEQ ID NO: 46171
  source 1..121: note = Gimesia maris
  REGION 1..121: note = tr|A6C8E2|A6C8E2_9PLAN NADPH-dependent 7-cyano-7-deazaguanine reductase OS=Gimesia maris DSM 8797; OX = 344747 GN=queF PE=3 SV=1

SEQ ID NO: 46173 - protein, 124 aa, unidentified
  source 1..124: note = Gimesia sp.
  REGION 1..124: note = tr|A0A2E2C387|A0A2E2C387_9PLAN NADPH-dependent 7-cyano-7-deazaguanine reductase OS=Gimesia sp. OX=2024833; GN = queF PE=3 SV=1
MSDNEASRELLETFENPHPNRDYVMETVCPEFTSVCPKTGQPDFGTLIITYIPDKVCFELKSLKMYLQSYRNVGAFYEDVTNRILDDLVAATDPRWMELRAEFTPRGGISSTVTVSHHKEPSDD

SEQ ID NO: 46174 - protein, 124 aa, unidentified
  source 1..124: note = Gimesia sp.
  REGION 1..124: note = tr|A0A2E7KGR1|A0A2E7KGR1_9PLAN NADPH-dependent 7-cyano-7-deazaguanine reductase OS=Gimesia sp. OX=2024833; GN = queF PE=3 SV=1
MSEADSPRSLLETFENPYHNRDYVMETVCPEFTSVCPKTGQPDFGTLIITYIPDQVCFELKSLKLYLQSYRNVGAFYEDVTNRIMDDLVAVTDPRWLELRAEFTPRGGISSTITVSHHKAGSGE

SEQ ID NO: 46175 - protein, 274 aa, Glaciecola nitratireducens
  REGION 1..274: note = tr|G4QM00|G4QM00_GLANF NADPH-dependent 7-cyano-7-deazaguanine reductase OS=Glaciecola nitratireducens (strain JCM 12485 / KCTC 12276 / FR1064); OX = 1085623 GN=queF PE= 3 SV=1
MDHLSLGKKVEYAQEYDNSLLQGVPRSLSRDSIKLPAQLPFHGTDIWNGYELSWLNAKGKPQVAILRCEVPITSPNLIESKSFKLYLNSLNQSRFASVNAVMQVLENDLSECAGDSVAVHVIPSSQFDSIQFGQFTGTCIDELDIEVNDFAITPELLKPSTTARTEIVCSETLVSHLLKSNCLITNQPDWGSILIKYTGTQISHEGLLRYLISFRQHNEFHEQCVERIFYDILQQCQPQQLTVYARYTRRGGLDINPFRSNFEAPYADARLARQ

SEQ ID NO: 46176 - protein, 274 aa, Glaciecola pallidula
  REGION 1..274: note = tr|K6ZHT3|K6ZHT3_9ALTE NADPH-dependent 7-cyano-7-deazaguanine reductase OS=Glaciecola pallidula DSM 14239 = ACAM 615 OX=1121922 GN=queF PE=3 SV=1
MDHLSLGKKVEYAKEYDNSLLQRVPRSLSRDSIKLPTQLPFHGTDIWNGYELSWLNAKGKPQVAILRCEVPITSPNLIESKSFKLYLNSLNQSQFAHIDDVTQILHKDLSECAGANVSVQVIPSAQFEGVTFGRLPGVCIDDLDIEITDFDITPRLLALKTNTQTEGTCSETLVSHLLKSNCLITNQPDWGSILIKYTGCQISHEGLLRYLISFRQHNEFHEQCVERIFYDILQQCKPQELTVYARYTRRGGLDINPFRSNFEAPYQDARLARQ

SEQ ID NO: 46177 - protein, 310 aa, Glaciecola punicea
  REGION 1..310: note = tr|H5TB53|H5TB53_9ALTE NADPH-dependent 7-cyano-7-deazaguanine reductase OS=Glaciecola punicea ACAM 611 OX=1121923 GN=queF PE=3 SV=1
MHEYFVIIPNCDAFSNTRDMLVNDIRYLYTEKRLDHLVLGKTTAYAQHYDASLLQQVPRSLSRDTINLPLELPFTGVDTWNAYEVSWLNTKGKPVVAIMQCDVPIDSANLIESKSFKLYLNSFNQTRFASEEEVLGLMQKDLSACAGRPVELSLVPCAAFANIRIGDLPSHANADFPACVIDDLDIAIDDYNLSASSLTTHNEVVSETLISHLLKSNCLITNQPDWGSVQIRYSGKQIDKESVLRYLISFRQHNEFHEQCVERIFYDILTHCKPKKLSVYARYTRRGGLDINPFRSNFEAPYNNVRLARQ

SEQ ID NO: 46178 - protein, 274 aa, Glaciecola sp.
  REGION 1..274: note = tr|A0A2N1HX20|A0A2N1HX20_9ALTE NADPH-dependent 7-cyano-7-deazaguanine reductase OS=Glaciecola sp. 33A; OX = 2057807 GN=queF PE=3 SV=1
MDHLSLGKKVEYAKEYDNSLLQRVPRSLSRDSIKLPTQLPFHGTDIWNGYELSWLNAKGKPQVAILRCEVPITSPNLIESKSFKLYLNSLNQSQFANIDDVAQILHADLSECAGANVSVQVIPSAQFEHVTFGHLPGMCIDDLDIEITDFDITPELLALKTDTQTEGTCSETLVSHLLKSNCLITNQPDWGSILIKYTGCQISHEGLLRYLISFRQHNEFHEQCVERIFYDILQQCKPQQLTVYARYTRRGGLDINPFRSNFEAPYQDARLARQ

SEQ ID NO: 46179 - protein, 283 aa, Glaciecola sp.
  REGION 1..283: note = tr|A0A2Z6UD35|A0A2Z6UD35_GLASK NADPH-dependent 7-cyano-7-deazaguanine reductase OS=Glaciecola sp. (strain KUL10) OX=2161813 GN=queF PE=3 SV=1
MPFDVNKNYIAEVTLQNLTLGKEVKYSDKYDPSLLQAVPRSLSRDAINLPKVLPFDGLDIWNGYELSWLNAKGKPVVAILRCEVPVSSTNLIESKSFKLYLNSFNQTKFHSLAQVQEHISNDLSECANAKVAVHIIPSEQFDSLQFGKFKGTLIDDLDIEINDFEINPELLTVCEEKTLETLVSHLLKSNCLITNQPDWGSIMIKYSGNKINHEGLLKYLISFRQHNEFHEQCVERIFHDIMTQCKPKQLTVYARYTRRGGLDINPFRSNFEAPYKDARLARQ

SEQ ID NO: 46180 - protein, 278 aa, Glaciimonas sp.
  REGION 1..278: note = tr|A0A2T6EZQ6|A0A2T6EZQ6_9BURK NADPH-dependent 7-cyano-7-deazaguanine reductase OS=Glaciimonas sp. PCH181; OX = 2133943 GN=queF PE=3 SV=1
MTAPNTPEFSPLGKPAAYKAEYDPTLLFPIARQGKREEIGIHGTLPFFGVDIWNAYEVSWLNLRGKPQVAIATITAPADSPNIIESKSFKLYLNSFNQTKLADTEALLALLRTDLSLGFGATVQVILTTADMFSRQVIKEPQGLLLDRLDIEVTDYQPMPTLLKTDRHAVPVDETLVSHLLKSNCLVTGQPDWGSVQIHYIGTPIDQEGLLKYLISFRDHNEFHEQCVERIFMDIMQHCAPQKLSVYARYTRRGGLDINPWRCNFSGPPPSNLRQARQ

SEQ ID NO: 46181 - protein, 279 aa, unidentified
  source 1..279: note = Glaesserella parasuis
  REGION 1..279: note = tr|U4SMK6|U4SMK6_HAEPR NADPH-dependent 7-cyano-7-deazaguanine reductase OS=Glaesserella parasuis D74 OX=1275971 GN=queF PE=3 SV=1
MNYNNECLSMLKLGKKTEYKSTYDPSLLQAVPRYLNRESLGIVKQQPFTVGADIWTLYELSWLNQNGVPQVAIADVIIDSSSSNIIESKSFKLYLNSFNQMRFPSREDVQRRIQSDLSKCAQGDVTVQIYKLSDFAMRSISEFNGECIDNQNICINRYDFTRESLQGIANGEIVEERLVSHLLKSNCLITSQPDWGSIQICYVGKQLDREKLLRYLVSFREHNEFHEQCVERIFCDLMEFAQPQKLTVYARYTRRGGLDINPFRSNFEGIPENLRMVRQ

SEQ ID NO: 46182 - protein, 279 aa, unidentified; identical to SEQ ID NO: 46181
  source 1..279: note = Glaesserella parasuis
  REGION 1..279: note = tr|A0A0E1RPM3|A0A0E1RPM3_HAEPR NADPH-dependent 7-cyano-7-deazaguanine reductase OS=Glaesserella parasuis 29755 OX=456298 GN=queF PE=3 SV=1

SEQ ID NO: 46183 - protein, 279 aa, unidentified
  source 1..279: note = Glaesserella sp.
  REGION 1..279: note = tr|A0A328C1L8|A0A328C1L8_9PAST NADPH-dependent 7-cyano-7-deazaguanine reductase OS=Glaesserella sp. HHC-2018 OX=2094024 GN=queF PE=3 SV=1
MNYNDESLAHLTLGQKTEYKSSYDPHLLQAVPRKLNRDSLGITEQQPFNAGADIWTLYELSWLNLNGVPQVAIADVSIDFRSQNLIESKSFKLYLNSFNQTRFASMNDVQQRLQHDLNQCASGQVSVNIYKLSDFTHQPIADFDGECIDDQDICIDSYQFSTSYLNDIASGDMVEETLVSHLLKSNCLITSQPDWGSVQIHYVGKRLDREKLLRYLVSFREHNEFHEQCVERIFCDLMQFATPEKLTVYARYTRRGGLDINPFRSNFETLPENRRMARQ

SEQ ID NO: 46184 - protein, 136 aa, unidentified
  source 1..136: note = Gloeobacter kilaueensis
  REGION 1..136: note = tr|U5QEU6|U5QEU6_9CYAN NADPH-dependent 7-cyano-7-deazaguanine reductase OS=Gloeobacter kilaueensis JS1 OX=1183438 GN=queF PE=3 SV=1
MSDLPVASGTAEAVKYGERAIEEGRLITFPNPRPGRAYDIHITLPEFTCKCPFSGYPDFATIYLTYVPNEKVVELKSLKLYINNFRDRYISHEEAVHVILDDFVEASSPLRAAIKGDFNPRGNVHMVVEARYERPV

SEQ ID NO: 46185 - protein, 137 aa, unidentified
  source 1..137: note = Gloeobacter violaceus
  REGION 1..137: note = sp|Q7NFD3|QUEF_GLOVI NADPH-dependent 7-cyano-7-deazaguanine reductase OS=Gloeobacter violaceus (strain ATCC 29082 / PCC 7421) OX=251221 GN=queF PE=3 SV=1
MSDLPVAPTPAEPVKYGERAIEAGQLITFPNPRPGRDYDIHITLPEFTCKCPFSGYPDFATIYLTYVPHEKVVELKALKLYVNSFRDRYISHEEVVHVVLDDFVAAADPLRVQIKGDFNPRGNVHMVVEARHTRPGT

SEQ ID NO: 46186 - protein, 186 aa, Gloeocapsa sp.
  REGION 1..186: note = tr|K9XC20|K9XC20_9CHRO NADPH-dependent 7-cyano-7-deazaguanine reductase OS=Gloeocapsa sp. PCC 7428 OX=1173026 GN=queF PE=3 SV=1
MVGMTTIVQIGSNTRNWQELWFMSNESSLVQSGTEASLAADNETVEQQKYGERHIAEGKLITFPNPRIGRWYNIYITLPEFTCKCPFSGYPDFATIYINYVPNERVVELKAIKLYINSYRDRYISHEESINQILDDFVAACDPLEVHIKGDFNPRGNVHTVIEVTHKREQTPAQSTILTRKESDLK

SEQ ID NO: 46187 - protein, 129 aa, Gloeocapsa sp.
  REGION 1..129: note = tr|L8LRL5|L8LRL5_9CHRO NADPH-dependent 7-cyano-7-deazaguanine reductase OS=Gloeocapsa sp. PCC 73106 OX=102232 GN=queF PE=3 SV=1
MTQSDIKYGERAIAEGSLITFPNPRVGRSYLVQITLPEFTCKCPFSGYPDFATIYLSYTPDQLIVELKALKLYINSYRDRYISHEEVVNQILDDFVEACDPLHATIKGDFSPRGNVHTVIEVQHHKNQP

SEQ ID NO: 46188 - protein, 147 aa, unidentified
  source 1..147: note = Gloeomargarita lithophora
  REGION 1..147: note = tr|A0A1J0AGS6|A0A1J0AGS6_9CYAN NADPH-dependent 7-cyano-7-deazaguanine reductase OS=Gloeomargarita lithophora Alchichica-D10 OX=1188229 GN=queF PE=3 SV=1
MTPTPEPYGERLIREGTMITFPNPRPGRQYWIRMTLPEFTCKCPFSGYPDFATIYLDYIPDERVVELKSIKLYINGYRDKQIAHEAVANQILDDFVAVAAPLAVRLKADFNPRGNVHTVIDVAYPDSPMGQVLDQRLHLGTGQGAGE

SEQ ID NO: 46189 - protein, 138 aa, unidentified
  source 1..138: note = Gloeothece citriformis
  REGION 1..138: note = sp|B7KBA7|QUEF_GLOC7 NADPH-dependent 7-cyano-7-deazaguanine reductase OS=Gloeothece citriformis (strain PCC 7424) OX=65393 GN=queF PE=3 SV=1
MSNSIEQQQTPEVPPLKYGEREIAKGELFTFPNPRIGRHYQIHITLPEFTCKCPFSGYPDFATIYLTYVPNEKVVELKAIKLYINNYRDLYISHEEAVNQILDDFVAACDPLEVQIKGDYNPRGNVHTVIEVNYQKAN

SEQ ID NO: 46190 - protein, 138 aa, unidentified
  source 1..138: note = Gloeothece verrucosa
  REGION 1..138: note = tr|E0U8J7|E0U8J7_GLOV7 NADPH-dependent 7-cyano-7-deazaguanine reductase OS=Gloeothece verrucosa (strain PCC 7822) OX=497965 GN=queF PE=3 SV=1
MSNFTEQQPSAEAAQLKYGEREIAQGELFTFPNPRVGRHYHIQITLPEYTCKCPFSGYPDFATIYLTYVPNEKVVELKAIKLYINNYRDRYISHEEAINQILDDFVAACDPLEVQIKGDFNPRGNVHTVIEVNYKKPQ

SEQ ID NO: 46191 - protein, 159 aa, Gluconacetobacter diazotrophicus
  REGION 1..159: note = tr|A9H9B4|A9H9B4_GLUDA NADPH-dependent 7-cyano-7-deazaguanine reductase OS=Gluconacetobacter diazotrophicus (strain ATCC 49037 / DSM 5601 / PAl5); OX = 272568 GN=queF P E=3 SV=1
MSAPTRPDDGSQTLTQLGQATIQPARPEDATLERVPAPHPGRRYVVRFTAPEFTSLCPVTGQPDFAHLVIDYIPDQWIVESKSLKLFLTSFRNHGAFHEACSIQIATTLVDLLSPVWLRIGAYWYPRGGMPIDVFWQTGPAPEGVWIPAQDVPGYRGRG

SEQ ID NO: 46192 - protein, 163 aa, Gluconacetobacter entanii
  REGION 1..163: note = tr|A0A318PV32|A0A318PV32_9PROT NADPH-dependent 7-cyano-7-deazaguanine reductase OS=Gluconacetobacter entanii OX=108528 GN=queF PE=3 SV=1
MSSPTPSPARPDDGSQTLTQLGRNTTQPTSPEEAILERVPAPDADRRYVVRFTAPEFTSLCPVTGQPDFAHIVIDYIPRQWIVESKSLKLFLTSFRNHGAFHEKCSMQIATTLVDLLDPVWLRIGAYWYPRGGMPIDIFWQTGAPPEGAWIPPQDVSGYRGRG

SEQ ID NO: 46193 - protein, 159 aa, Gluconacetobacter liquefaciens
  REGION 1..159: note = tr|A0A370FX91|A0A370FX91_GLULI NADPH-dependent 7-cyano-7-deazaguanine reductase OS=Gluconacetobacter liquefaciens OX=89584 GN=queF PE=3 SV=1
MSASTPPDDGTQALTQLGRASAQPASPEDATLERVPAPYRDRRYLVRFTAPEFTSLCPVTGQPDFAHLVIDYVPDQWIVESKSLKLFLTSFRNHGAFHEACSVQIATTLVDLLSPVWLRIGAYWYPRGGMPIDVFWQTGAPPADVWIPAQDVPGYRGRG

SEQ ID NO: 46194 - protein, 165 aa, Gluconacetobacter sp.
  REGION 1..165: note = tr|F3S6B1|F3S6B1_9PROT NADPH-dependent 7-cyano-7-deazaguanine reductase OS=Gluconacetobacter sp. SXCC-1 OX=1004836 GN=queF PE=3 SV=1
MPMDRFMNNPSPPDDGSRLLTQLGQNTAQPASPEEAELERVPAPERGRHYVVRFTAPEFTSLCPVTGQPDFAHIVIDYIPDEWIVESKSLKLFLTSFRNHGAFHEKCSMQIALTLVDLLRPVWLRIGAYWYPRGGMPIDVFWQTGTPPDGVWIPSQDVPGYRGRG

SEQ ID NO: 46195 - protein, 166 aa, Gluconobacter albidus
  REGION 1..166: note = tr|A0A149TGI9|A0A149TGI9_9PROT NADPH-dependent 7-cyano-7-deazaguanine reductase OS=Gluconobacter albidus; OX = 318683 GN=queF PE=3 SV=1
MSDHQTDHHPTGPSAPGTDALSQLGRATTTPQSPEEAVLERVPSPHQGRQYVVRFTAPEFTSLCPVTGQPDFAHIVIDYIPGEWIVESKSLKLFLTSFRNHGAFHEDCSIAIAERLVALLNPQWLRIGAYWYPRGGIPIDVFWQTGEPPKGVWIPAQDVPGYRGRG

SEQ ID NO: 46196 - protein, 162 aa, Gluconobacter cerinus
  REGION 1..162: note = tr|A0A1B6VL82|A0A1B6VL82_9PROT NADPH-dependent 7-cyano-7-deazaguanine reductase OS=Gluconobacter cerinus; OX = 38307 GN=queF PE=3 SV=1
MSDHHPTGPSAPGTDALSQLGRNTPAANSPEEAVLERVPSPHQGRKYVVRFTAPEFTSLCPVTGQPDFAHIVIDYIPSKWIVESKSLKLYLTSFRNHGAFHEDCSVAIAERLVELLDPEWLRIGAYWYPRGGIPIDVFWQTGEPPAGVWIPSQDVPGYRGRG

SEQ ID NO: 46197 - protein, 162 aa, Gluconobacter frateurii
  REGION 1..162: note = tr|A0A0S6TL12|A0A0S6TL12_9PROT NADPH-dependent 7-cyano-7-deazaguanine reductase OS=Gluconobacter frateurii NBRC 103465 OX=1307834 GN=queF PE=3 SV=1
MSNTTPTGPSAPGTDALSQLGRNTPAASCPEEAVLERVPSPHQGRKYVVRFTAPEFTSLCPVTGQPDFAHLVIDYIPSKWIVESKSLKLYLTSFRNHGAFHEDCSVAIAERLVELLDPEWLRIGAYWYPRGGIPIDVFWQTGEPPAGVWIPSQDVPGYRGRG

SEQ ID NO: 46198 - protein, 162 aa, Gluconobacter frateurii
  REGION 1..162: note = tr|A0A0K8N4Q1|A0A0K8N4Q1_9PROT NADPH-dependent 7-cyano-7-deazaguanine reductase OS=Gluconobacter frateurii NBRC 101659 OX=1104996 GN=queF PE=3 SV=1
MSNTIPTGPSAPGTDALSQLGRNTPAASCPEEAVLERVPSPHQGRKYVVRFTAPEFTSLCPVTGQPDFAHIVIDYIPSKWIVESKSLKLYLTSFRNHGAFHEDCSVAIAERLVELLDPEWLRIGAYWYPRGGIPIDVFWQTGEPPAGVWIPSQDVPGYRGRG

SEQ ID NO: 46199 - protein, 162 aa, Gluconobacter japonicus
  REGION 1..162: note = tr|A0A149SFX1|A0A149SFX1_GLUJA NADPH-dependent 7-cyano-7-deazaguanine reductase OS=Gluconobacter japonicus OX=376620 GN=queF PE=3 SV=1
MSNTTPTGPSAPGTDALSQLGRNTPAASCPEEAVLERVPSPHQGRKYVVRFTAPEFTSLCPVTGQPDFAHIVIDYIPSKWIVESKSLKLYLTSFRNHGAFHEDCSVAIAERLVELLDPEWLRIGAYWYPRGGIPIDVFWQTGEPPAGVWIPSQDVPGYRGRG

SEQ ID NO: 46200 - protein, 162 aa, Gluconobacter japonicus
  REGION 1..162: note = tr|A0A149SK09|A0A149SK09_GLUJA NADPH-dependent 7-cyano-7-deazaguanine reductase OS=Gluconobacter japonicus OX=376620 GN=queF PE=3 SV=1
MSNTTPTGPSAPGTDALSQLGRNTPAANCPEEAVLERVPSPHQGRKYVVRFTAPEFTSLCPVTGQPDFAHIVIDYIPSKWIVESKSLKLYLTSFRNHGAFHEDCSVAIAERLVELLDPEWLRIGAYWYPRGGIPIDVFWQTGEPPAGVWIPSQDVPGYRGRG

SEQ ID NO: 46201 - protein, 162 aa, Gluconobacter kanchanaburiensis
  REGION 1..162: note = tr|A0A511B4F8|A0A511B4F8_9PROT NADPH-dependent 7-cyano-7-deazaguanine reductase OS=Gluconobacter kanchanaburiensis NBRC 103587 OX=1307948 GN=queF PE=3 SV=1
MSNHQPTGPSAPGTDALSQLGRATTTPQSPEEAVLERVPSPHQGRQYVVRFTAPEFTSLCPVTGQPDFAHIVIDYIPGEWIVESKSLKLFLTSFRNHGAFHEDCSIAIAERLVALLDPQWLRIGAYWYPRGGIPIDVFWQTGEPPKGVWIPAQDVPGYRGRG

SEQ ID NO: 46202 - protein, 182 aa, unidentified
  source 1..182: note = Gluconobacter morbifer
  REGION 1..182: note = tr|G6XF21|G6XF21_9PROT NADPH-dependent 7-cyano-7-deazaguanine reductase OS=Gluconobacter morbifer G707 OX=1088869 GN=queF PE=3 SV=1
MTDKAAPHLTKTPSFFRNLSMSDHHPTGPSAPGTDALSQLGRQTAQPQSPDEAILERVPAPHQGRQYVVRFTAPEFTSLCPVTGQPDFAHIVIDYIPSEWIVESKSLKLFLTSFRNHGAFHEDCSVTIAERLVERLDPQWLRIGAYWYPRGGIPIDVFWQTGEPPKGVWIPAQDVPGYRGRG

SEQ ID NO: 46203 - protein, 162 aa, Gluconobacter oxydans
  REGION 1..162: note = tr|K7STR7|K7STR7_GLUOY NADPH-dependent 7-cyano-7-deazaguanine reductase OS=Gluconobacter oxydans H24 OX=1224746 GN=queF PE=3 SV=1
MSDTTPTGPSAPGTDALSQLGRNTPAASCPEEAVLERVPSPHQGRKYVVRFTAPEFTSLCPVTGQPDFAHLVIDYIPSKWIVESKSLKLYLTSFRNHGAFHEDCSVAIAERLVELLDPEWLRIGAYWYPRGGIPIDVFWQTGEPPAGVWIPSQDVPGYRGRG

SEQ ID NO: 46204 - protein, 162 aa, Gluconobacter oxydans
  REGION 1..162: note = sp|Q5FT82|QUEF_GLUOX NADPH-dependent 7-cyano-7-deazaguanine reductase OS=Gluconobacter oxydans (strain 621H) OX=290633 GN=queF PE=3 SV=1
MSDHHPTGPSAPGTDALSQLGRATTTPQSPEEAVLERVPSPHQGRQYVVRFTAPEFTSLCPVTGQPDFAHIVIDYIPGEWIVESKSLKLFLTSFRNHGAFHEDCSIAIAERLVALLDPQWLRIGAYWYPRGGIPIDVFWQTGEPPKGVWIPAQDVPGYRGRG

SEQ ID NO: 46205 - protein, 162 aa, Gluconobacter roseus; identical to SEQ ID NO: 46204
  REGION 1..162: note = tr|A0A4Y3M578|A0A4Y3M578_9PROT NADPH-dependent 7-cyano-7-deazaguanine reductase OS=Gluconobacter roseus NBRC 3990 OX=1307950 GN=queF PE=3 SV=1

SEQ ID NO: 46206 - protein, 162 aa, Gluconobacter sp.; identical to SEQ ID NO: 46196
  REGION 1..162: note = tr|A0A252BLC7|A0A252BLC7_9PROT NADPH-dependent 7-cyano-7-deazaguanine reductase OS=Gluconobacter sp. DsW_058 OX=1511210 GN=queF PE=3 SV=1

SEQ ID NO: 46207 - protein, 162 aa, Gluconobacter sphaericus; identical to SEQ ID NO: 46201
  REGION 1..162: note = tr|A0A4Y3QAC0|A0A4Y3QAC0_9PROT NADPH-dependent 7-cyano-7-deazaguanine reductase OS=Gluconobacter sphaericus NBRC 12467 OX=1307951 GN=queF PE=3 SV=1

SEQ ID NO: 46208 - protein, 162 aa, Gluconobacter thailandicus
  REGION 1..162: note = tr|A0A149SLU2|A0A149SLU2_GLUTH NADPH-dependent 7-cyano-7-deazaguanine reductase OS=Gluconobacter thailandicus OX=257438 GN=queF PE=3 SV=1
MSDTTPTGPSAPGTDALSQLGRNTPAASCPEEAVLERVPSPHQGRKYVVRFTAPEFTSLCPVTGQPDFAHIVIDYIPSKWIVESKSLKLYLTSFRNHGAFHEDCSVAIAERLVELLDPEWLRIGAYWYPRGGIPIDVFWQTGEPPAGVWIPSQDVPGYRGRG

SEQ ID NO: 46209 - protein, 162 aa, Gluconobacter thailandicus
  REGION 1..162: note = tr|A0A5C0A3J0|A0A5C0A3J0_GLUTH NADPH-dependent 7-cyano-7-deazaguanine reductase QueF OS=Gluconobacter thailandicus OX=257438 GN=queF PE=4 SV=1
MSDTTPTGPSAPGTDALSQLGRNTPAASCPEEAVLERVPSPHQGRKYVVRFTAPEFTSLCPVTGQPDFAHLVIDYIPSQWIVESKSLKLYLTSFRNHGAFHEDCSVAIAKRLVELLDPEWLRIGAYWYPRGGIPIDVFWQTGEPPAGVWIPSQDVPGYRGRG

SEQ ID NO: 46210 - protein, 165 aa, Gluconobacter wancherniae
  REGION 1..165: note = tr|A0A511B0S5|A0A511B0S5_9PROT NADPH-dependent 7-cyano-7-deazaguanine reductase OS=Gluconobacter wancherniae NBRC 103581 OX=656744 GN=queF PE=3 SV=1
MSEPVSPAPTGPSAPGTDALSQLGRQTVAPTCPEEAVLERVPAPHQDRKYVVRFTAPEFTSLCPVTGQPDFAHIVIDYIPGKWIVESKSLKLYLTSFRNHGAFHEDCSVTIASRLVELLDPQWLRIGAYWYPRGGMPIDVFWQTGAAPEGVWIPSQDVPGYRGRG

SEQ ID NO: 46211 - protein, 154 aa, unidentified
  source 1..154: note = Glycocaulis alkaliphilus
  REGION 1..154: note = tr|A0A3T0E8J1|A0A3T0E8J1_9RHOB NADPH-dependent 7-cyano-7-deazaguanine reductase OS=Glycocaulis alkaliphilus OX=1434191 GN=queF PE=3 SV=1
MTEERYTSLEQLGAQTGAPESPEAARLERVSNPAPGNDYLIRFTCPEFTSICPVTGQPDFAHLVIDYVPGEWIVESKSLKLFLTSFRNHGAFHEACTMMIGQRLVDEIAPKWLRIGGYWYPRGGIPIDVFGQWGECPKGVWVPDQGVQPYRGRG

SEQ ID NO: 46212 - protein, 155 aa, unidentified
  source 1..155: note = Glycocaulis sp.
  REGION 1..155: note = tr|A0A550KN50|A0A550KN50_9RHOB NADPH-dependent 7-cyano-7-deazaguanine reductase OS=Glycocaulis sp. ZYF765; OX = 2518983 GN=queF PE=3 SV=1
MTDQRYSDLDQLGSSTARAADRPEDASLESVANPHTQTDYLVRFAAPEFTSICPVTGQPDFAHLVIDYAPDQWIVESKSLKLFLQSFRNHGAFHEACTTMIGQRLVDALAPKWLRIGGYWYPRGGIPIDVFAQWGELPKGMWVPDQGVTPYRGRG

SEQ ID NO: 46213 - protein, 136 aa, Gracilibacillus boraciitolerans
  REGION 1..136: note = tr|W4VKS8|W4VKS8_9BACI NADPH-dependent 7-cyano-7-deazaguanine reductase OS=Gracilibacillus boraciitolerans JCM 21714 OX=1298598 GN=queF PE=3 SV=1
MSENYYLPRSGPMPRPENVEQGREVLKQEAFEAPNVQNITFRAQEFTAVCPKTGQPDFGTVEISYTPRHKCIESKSLKFYLWAYRDHGAFCESLAAQIADDIMWAIEAATVKVTVNQTARGGIELTTEALREYSNK

SEQ ID NO: 46214 - protein, 166 aa, Gracilibacillus dipsosauri
  REGION 1..166: note = tr|A0A317L4J5|A0A317L4J5_9BACI NADPH-dependent 7-cyano-7-deazaguanine reductase OS=Gracilibacillus dipsosauri OX=178340 GN=queF PE=3 SV=1
MSGRSHEQGLQDLKQLGNQDTQYTDDYAPEVLEAVDNLHSDRDYFVKFNCPEFTSLCPITGQPDFATMYISYIPNQKIVESKSLKLYLFSFRNHGDFHEDCVNIIMNDLIQLLDPRYIEVWGKFTPRGGISIDPWCNYGKPGTKYEEMATHRLINHDLNPEKIDNR

SEQ ID NO: 46215 - protein, 135 aa, Gracilibacillus halophilus
  REGION 1..135: note = tr|N4WUZ0|N4WUZ0_9BACI NADPH-dependent 7-cyano-7-deazaguanine reductase OS=Gracilibacillus halophilus YIM-C55.5 OX=1308866 GN=queF PE=3 SV=1
MSDEYYLPRSGPMPRPNSVEEGRGVLKQEAFDAPNVQRITFRALEFTAICPKTGQPDFGTVEIAYTPRDKCIESKSMKFYMWSFRDHGAFCESLAAQIADDIMWAIEPASVDVTVYQTARGGIELTTEASREYGE

SEQ ID NO: 46216 - protein, 135 aa, Gracilibacillus kekensis
  REGION 1..135: note = tr|A0A1M7L3C0|A0A1M7L3C0_9BACI NADPH-dependent 7-cyano-7-deazaguanine reductase OS=Gracilibacillus kekensis OX=1027249 GN=queF PE=3 SV=1
MAENYYLPRSGPMPRPENVEQGREVLKQEAFDAPNVQNISFRAQEFTAVCPKTGQPDFGTVEISYTPRHKCIESKSLKFYLWSYRDHGAFCESLAAQIADDIMWAIEAATVKVVVHQTTRGGIELTTEAIREYSS

SEQ ID NO: 46217 - protein, 135 aa, Gracilibacillus orientalis
  REGION 1..135: note = tr|A0A1I4JVH0|A0A1I4JVH0_9BACI NADPH-dependent 7-cyano-7-deazaguanine reductase OS=Gracilibacillus orientalis OX=334253 GN=queF PE=3 SV=1
MSENYYLPRSGPMPRPSSVEEGRAVLKQEAFEAPNVQNITFRALEFTAVCPKTGQPDFGKVEISYTPRHKCIESKSMKFYLWSFRDHGAFCESLAAQIADDMMWAIEPASVKVTVYQTARGGIELTTEAHREYTE

SEQ ID NO: 46218 - protein, 135 aa, Gracilibacillus ureilyticus
  REGION 1..135: note = tr|A0A1H9MTB3|A0A1H9MTB3_9BACI NADPH-dependent 7-cyano-7-deazaguanine reductase OS=Gracilibacillus ureilyticus OX=531814 GN=queF PE=3 SV=1
MSENYYLPRSGPMPRPESVEEGRNVLKQEAFDAPNVQNITFRALEFTAVCPKTGQPDFGKVEISYTPRNKCIESKSLKFYLWSYRDHGAFCESLAAQIADDIMWAIEAATVKVTVYQTARGGIELTTEAIREYQA

SEQ ID NO: 46219 - protein, 170 aa, Granulibacter bethesdensis
  REGION 1..170: note = tr|W6I1P5|W6I1P5_9PROT NADPH-dependent 7-cyano-7-deazaguanine reductase OS=Granulibacter bethesdensis OX=364410 GN=queF PE=3 SV=1
MPSRCALPGRREIGRNRMAENYAGLTQLGQTVSQPASPDQAVLEKVPNPTPGKAYMIRFTAPEFTSLCPLTGQPDFAHIVLDYVPRDWIVESKSLKLFLTSFRNVGSFHEACSMKIAERVVSLLDPVWLRIGAYWYPRGGIPIDVFWQTGSPPDGVWIPAQDVPGYRGRG

SEQ ID NO: 46220 - protein, 153 aa, Granulibacter bethesdensis
  REGION 1..153: note = sp|Q0BVG3|QUEF_GRABC NADPH-dependent 7-cyano-7-deazaguanine reductase OS=Granulibacter bethesdensis (strain ATCC BAA-1260 / CGDNIH1) OX=391165; GN = queF PE=3 SV=1
MAENYAGLTQLGQTVSQPASPDQAVLEKVPNPTPGKAYMIRFTAPEFTSLCPLTGQPDFAHIVLDYVPRDWIVESKSLKLFLTSFRNVGSFHEACSMKIAERVVSLLDPVWLRIGAYWYPRGGIPIDVFWQTGSPPDGVWIPAQDVPGYRGRG

SEQ ID NO: 46221 - protein, 162 aa, Granulicatella elegans
  REGION 1..162: note = tr|D0BNU6|D0BNU6_9LACT NADPH-dependent 7-cyano-7-deazaguanine reductase OS=Granulicatella elegans ATCC 700633 OX=626369 GN=queF PE=3 SV=1
MRKNEEMGEITHLGSKTVYRDDYAPEVLESFPNKHPENDYFVKFNCPEFTSLCPITGQPDFATIYISYVPGERMVESKSLKLYLFSFRNRGDFHEDCMNIIMKDLVKLMDPKYIEVWGKFTPRGGISIDPYCNYGKPGTKWEQVADHRMMNHDLYPEKVDNR

SEQ ID NO: 46222 - protein, 162 aa, Granulicatella sp.; identical to SEQ ID NO: 46221
  REGION 1..162: note = tr|A0A420YUH6|A0A420YUH6_9LACT NADPH-dependent 7-cyano-7-deazaguanine reductase OS=Granulicatella sp.; OX = 2049028 GN=queF PE=3 SV=1

SEQ ID NO: 46223 - protein, 143 aa, unidentified
  source 1..143: note = Granulicella mallensis
  REGION 1..143: note = tr|G8NQH7|G8NQH7_GRAMM NADPH-dependent 7-cyano-7-deazaguanine reductase OS=Granulicella mallensis (strain ATCC BAA-1857 / DSM 23137 / MP5ACTX8) OX=682795; GN = queF PE= 3 SV=1
MGENREMDEKTHTTGYTDDHAKAGLDTKFPEIETWRNQFRAYEILIDDPEFTSVCPKTGLPDFGVLTIRYMPREKCLELKSLKEYLFTYRNLGIFQENIANQVLDDVVKATDPVWCEIKGDFRPRGGISTVVTARYPRTEERS

SEQ ID NO: 46224 - protein, 134 aa, Granulicella pectinivorans
  REGION 1..134: note = tr|A0A1I6MCG7|A0A1I6MCG7_9BACT NADPH-dependent 7-cyano-7-deazaguanine reductase OS=Granulicella pectinivorans OX=474950 GN=queF PE=3 SV=1
MGTQNTGYTDDHAKAGLDHEFPSIDTWENQFPGYEILIDDPEFTSVCPKTSLPDFGVLTIRYSPRKSCLELKSLKEYLFHYRNLGIFQENIANQVLNDIVKATDPVWAEVKGDFRPRGGISTVVTARYPRPSEK

SEQ ID NO: 46225 - protein, 139 aa, Granulicella rosea
  REGION 1..139: note = tr|A0A239HEK3|A0A239HEK3_9BACT NADPH-dependent 7-cyano-7-deazaguanine reductase OS=Granulicella rosea; OX = 474952 GN=queF PE=3 SV=1
MRTQNTGYTDDHAASGLDHVFPSIDTWQNQFQAYEILVDDPEFTSICPKTGLPDFGVLTIRYMPREQCLELKSLKEYLFHYRNLGIFQENIANQVLNDIVKATDPVWAVVKGDFRPRGGISTVVTATYPRPEDSKPPRS

SEQ ID NO: 46226 - protein, 137 aa, unidentified
  source 1..137: note = Granulicella sibirica
  REGION 1..137: note = tr|A0A4Q0T2A3|A0A4Q0T2A3_9BACT NADPH-dependent 7-cyano-7-deazaguanine reductase OS=Granulicella sibirica; OX = 2479048 GN=queF PE=3 SV=1
MRTQNTGYTDDHAKSGLDHVFPSIDTWQNQFQGYEILIDDPEFTSICPKTGLPDFGILTVRYMPREHCLELKSFKEYLFHYRNLGIFQENIANQVLNDLVKATDPVWAVVKGDFRPRGGISTVVTATYPRPTDSKPS

SEQ ID NO: 46227 - protein, 139 aa, Granulicella sp.
  REGION 1..139: note = tr|A0A3N1JIA4|A0A3N1JIA4_9BACT NADPH-dependent 7-cyano-7-deazaguanine reductase OS=Granulicella sp. GAS466 OX=2485170 GN=queF PE=3 SV=1
MTTKTTGYTDDHAAAGLDTAFPEIETWPNQFKAYEILIDDPEFTSVCPKTGLPDFGRLTIRYMPRERCMELKSLKEYLFIYRNLGIFQENIVNQVLDDVVKATDPVWAKVVGDFRPRGGISTIVEAFYPRPENSKGPRS

SEQ ID NO: 46228 - protein, 139 aa, unidentified
  source 1..139: note = Granulicella tundricola
  REGION 1..139: note = tr|E8WYR2|E8WYR2_GRATM NADPH-dependent 7-cyano-7-deazaguanine reductase OS=Granulicella tundricola (strain ATCC BAA-1859 / DSM 23138 / MP5ACTX9); OX = 1198114 GN=queF P E=3 SV=1
MRTQNTGYTDDHAASGLDHVFPAIDVWANQFQGYEILVDDPEFTSICPKTGLPDFGILTIRYMPRKECLELKSLKEYLFHYRNLGIFQENIVNQILDDVVKATDPVWAVIKGDFRPRGGISTTVTATYPRPLDAKPPVG

SEQ ID NO: 46229 - protein, 155 aa, Granulosicoccus antarcticus
  REGION 1..155: note = tr|A0A2Z2NS97|A0A2Z2NS97_9GAMM NADPH-dependent 7-cyano-7-deazaguanine reductase OS=Granulosicoccus antarcticus IMCC3135 OX=1192854 GN=queF PE=3 SV=1
MSDETIYSGLKQLGGATVLPNSPEDAELERVANPEAGTDYLVRFTQPEFTSLCPMTGQPDFAHLVIDYIPGEWLVESKSLKLYLGSFRNHGAFHEACTVSIAKRLEELLQPAWLRIGGYWFPRGGMPIDVFYQTGEAPSGVWIPEQNVPGYRGRG

SEQ ID NO: 46230 - protein, 281 aa, unidentified
  source 1..281: note = Grimontella sp.
  REGION 1..281: note = tr|A0A318G8P7|A0A318G8P7_9GAMM NADPH-dependent 7-cyano-7-deazaguanine reductase OS=Grimontella sp. AG753; OX = 2183905 GN=queF PE=3 SV=1
MSSYDNHQALSGLTLGKTTDYRDRYDASLLQGVPRSLNRDPLGLKAENLPFQGADIWTLYELSWLNANGLPQVAVGHVELNYASINLVESKSFKLYLNSFNQTRFASWDEVRETLERDLSACAQGEVSVALYRLDEIEGQPIAHFHGTCIDDQDIVIDNYDFDAALLTDAASGKMVEETLVSHLLKSNCLITHQPDWGSVQIQYRGPKIDREKLLRYLVSFRHHNEFHEQCVERIFTDIQRFCQPESLSVYARYTRRGGLDINPWRTNTRFIPATGRLVRQ

SEQ ID NO: 46231 - protein, 281 aa, unidentified
  source 1..281: note = Grimontia celer
  REGION 1..281: note = tr|A0A128FE36|A0A128FE36_9GAMM NADPH-dependent 7-cyano-7-deazaguanine reductase OS=Grimontia celer; OX = 1796497 GN=queF PE=3 SV=1
MSKYQDAKELAGLTLGQKTDYQEHYAPELLQPVPRSLNRDDLDLGDSLPFTGYDIWTLYELSWLNKKGLPQVAIGEVRLPATTPNLIESKSFKLYLNSFNQTKFESWQEVVDVLAKDLSACAGADVDVTLSPLEEFTNTPVIAFGGENIDEQDIEIDSYEFDSSLLEGAADGPEVTETLNSNLLKSNCLITSQPDWGSVRIAYKGKRINREKLLRYIVSFRRHNEFHEQCVERIFIDLMKYCQPELLTVYARYTRRGGLDINPYRTNMGKTPSENNRLARQ

SEQ ID NO: 46232 - protein, 281 aa, Grimontia hollisae
  REGION 1..281: note = tr|A0A377HK76|A0A377HK76_GRIHO NADPH-dependent 7-cyano-7-deazaguanine reductase OS=Grimontia hollisae; OX = 673 GN=queF PE=3 SV=1
MSKYQDAKELAGLTLGQKTDYQEHYAPGLLQPVPRSLNRDDLNLGDSLPFTGYDIWTLYELSWLNSKGLPQVAIGEVRLPATTPNLIESKSFKLYLNSFNQTKFESWQEVVDTLAKDLSACAGADVDVTLSPLEEFTNTPVVAFGGENIDEQDIEIDNYDLNPALLEGAADGPVVTETLNSNLLKSNCLITSQPDWGSVRIAYKGKRINREKLLRYIVSFRRHNEFHEQCVERIFTDLMKYCQPELLTVYARYTRRGGLDINPYRTNMGKTPSENNRLARQ

SEQ ID NO: 46233 - protein, 281 aa, Grimontia hollisae; identical to SEQ ID NO: 46232
  REGION 1..281: note = tr|D0ICP5|D0ICP5_GRIHO NADPH-dependent 7-cyano-7-deazaguanine reductase OS=Grimontia hollisae CIP 101886 OX=675812 GN=queF PE=3 SV=1

SEQ ID NO: 46234 - protein, 281 aa, unidentified
  source 1..281: note = Grimontia indica
  REGION 1..281: note = tr|R1J0D2|R1J0D2_9GAMM NADPH-dependent 7-cyano-7-deazaguanine reductase OS=Grimontia indica; OX = 1056512 GN=queF PE=3 SV=1
MSKYQDAKELAGLTLGQKTDYQEHYAPELLQPVPRSLNRDDLDLGDSLPFTGYDIWTLYELSWLNKKGLPQVAIGEVRLPSTTPNLIESKSFKLYLNSFNQTKFESWQEVVDALAKDLSACAGADVDVTLSPLEEFTNTPVIAFGGENIDEQDIEIDNYEFDSSLLEGAAEGPVVTETLNSNLLKSNCLITSQPDWGSVRIAYKGKRINREKLLRYIVSFRRHNEFHEQCVERIFTDLMKYCQPELLTVYARYTRRGGLDINPYRTNMGKTPSENNRLARQ

SEQ ID NO: 46235 - protein, 281 aa, unidentified
  source 1..281: note = Grimontia marina
  REGION 1..281: note = tr|A0A128ETW9|A0A128ETW9_9GAMM NADPH-dependent 7-cyano-7-deazaguanine reductase OS=Grimontia marina; OX = 646534 GN=queF PE=3 SV=1
MSKYQDAKELAGLTLGQKTDYQEHYAPELLQPVPRSLNRDDLDLGDSLPFTGYDIWTLYELSWLNKKGLPQVAIGEVRLPATTPNLIESKSFKLYLNSFNQTKFESWQEVVDALAKDLSACAGADVDVTLSPLEEFTNTPVIAFGGENIDEQDIEIDNYEFDSSLLEGAADGPEVTETLNSNLLKSNCLITSQPDWGSVRIAYKGKRINREKLLRYIVSFRRHNEFHEQCVERIFTDLMKYCQPELLTVYARYTRRGGLDINPYRTNMGKTPSENTRLARQ

SEQ ID NO: 46236 - protein, 281 aa, Grimontia sp.
  REGION 1..281: note = tr|A0A0F6A422|A0A0F6A422_9GAMM NADPH-dependent 7-cyano-7-deazaguanine reductase OS=Grimontia sp. AD028; OX = 1581149 GN=queF PE=3 SV=1
MSKYQDAKELAGLTLGQKTDYQEHYAPELLQPVPRSLNRDDLDLGDSLPFTGYDIWTLYELSWLNKKGVPQVAIGEVRLPATTPNLIESKSFKLYLNSFNQTKFESWQEVVDALAKDLSACAGADVDVTLSPLEEFTNTPVIAFGGENIDEQDIEIDNYEFDSSLLEGAAEGPVVTETLNSNLLKSNCLITSQPDWGSVRIAYKGKRIDREKLLRYIVSFRRHNEFHEQCVERIFTDLMKYCQPELLTVYARYTRRGGLDINPYRTNMGKTPSENNRLARQ

SEQ ID NO: 46237 - protein, 279 aa, Gulbenkiania indica
  REGION 1..279: note = tr|A0A0K6GSF0|A0A0K6GSF0_9NEIS NADPH-dependent 7-cyano-7-deazaguanine reductase OS=Gulbenkiania indica; OX = 375574 GN=queF PE=3 SV=1
MHSPTPEQSPLGKSVRYQDTYDPSLLFPIPRQSKRDEIGVSAEALPFDGVDLWTGFELSWLNPRGKPQVAIATFRIPAHSPRLIESKSFKLYLNSYNQTRIDSLQALQAQLALDLSSAAGAAVEVALLLPRDFPAQRLAELPGESIDDLDIEVDSYAPCPERLSADPGHIVTEVLSSNLLKSNCLVTGQPDWGSVQIAYTGPRIDRESLLRYLIGFRQHNEFHEQCVERIFVDLMRTCQPERLTVYARYTRRGGLDINPLRTNDPSANLHPDNTRTARQ

SEQ ID NO: 46238 - protein, 129 aa, unidentified
  source 1..129: note = Guyparkeria sp.
  REGION 1..129: note = tr|A0A426QP51|A0A426QP51_9GAMM NADPH-dependent 7-cyano-7-deazaguanine reductase OS=Guyparkeria sp. SCN-R1; OX = 2341113 GN=queF PE=3 SV=1
MSTQPSKTLETFPNPHPERDYTIHMEVPEFTCLCPKTGQPDFATILIDFVPDQQCVELKSLKMYMWSFREEGGFHEAMTNRIADDIVAAINPRFLRLTGRWNVRGGIWTNVVVEHRQDGWTPAPKVELP

SEQ ID NO: 46239 - protein, 277 aa, unidentified
  source 1..277: note = Gynuella sunshinyii
  REGION 1..277: note = tr|A0A0C5VNJ8|A0A0C5VNJ8_9GAMM NADPH-dependent 7-cyano-7-deazaguanine reductase OS=Gynuella sunshinyii YC6258 OX=1445510 GN=queF PE=3 SV=1
MADLRDAPLGKTSLYVDQYDPSLLFPIARANNRSTLSAEKLELAFHGFDVWNAWELSWLNNKGKPVVAVGEIIIPAQSPCLIESKSLKLYLNSFNQTRFDDIGAVTAAIEKDLSKAAGSEVKVNILTLENALQPFGTIHSVEGCCVDELDVDIDVYSTTDPQLLKISPDDVVSETLVSHLMKSNCPVTGQPDWGSVIVSYTGPRICPESFLRYVVSFRQHTEFHEHCVERMFMDILKLSQPTELKVSARYVRRGGLDINPTRSMHPVTSDNLRLLRQ

SEQ ID NO: 46240 - protein, 154 aa, unidentified
  source 1..154: note = Haematospirillum jordaniae
  REGION 1..154: note = tr|A0A143DDM9|A0A143DDM9_9PROT NADPH-dependent 7-cyano-7-deazaguanine reductase OS=Haematospirillum jordaniae OX=1549855 GN=queF PE=3 SV=1
MTNSDPSGLTQLGHASALPSSPEAATLETVPNPHPGTLYVARFAAPEFTSLCPVTGQPDFAHLVIDYVPGATLVESKSLKLFLGSFRNHGAFHEDCTVYIGKRLAEALKPVWLRIGGYWYPRGGIPIDVFYQTGPVPEGVWLLDQGVPPYRGRG

SEQ ID NO: 46241 - protein, 279 aa, Haemophilus aegyptius
  REGION 1..279: note = tr|A0A448MHB0|A0A448MHB0_HAEAE NADPH-dependent 7-cyano-7-deazaguanine reductase OS=Haemophilus aegyptius; OX = 197575 GN=queF PE=3 SV=1
MNYQDNSLKSLKLGQKTAYASQYDRTLLQPVPRALNRDGLGITQNQPFTIGADIWTAYEISWLNEKGLPQVAIADIYLDYQSQNLIESKSFKLYLNSFNQSKFANFNAVQQTMQRDLSECAQGDVKVRLNPVAVYDAQKIDHLQGDCIDEQDIEITSYEFNANWLKDCVSDEIVEEKLVSHLLKSNCLITNQPDWGSLHIHYIGKKINQEKLLRYVVSFRQHNEFHEQCVERIFCDLMHYAKPEKLTVYARYTRRGGLDINPFRSNFENLPENLRLARQ

SEQ ID NO: 46242 - protein, 279 aa, Haemophilus ducreyi
  REGION 1..279: note = sp|Q7VL22|QUEF_HAEDU NADPH-dependent 7-cyano-7-deazaguanine reductase OS=Haemophilus ducreyi (strain 35000HP / ATCC 700724) OX=233412 GN=queF PE=3 SV=1
MSYTDTVLSSLKLGQKTEYTGEYDPTLLQAVPRKLNRDHLGITEQQPFNQGADVWTCYEVSWLNLNGLPQVAIAEVVIDANSENLIESKSFKLYLNSVNQTTFESLEQVEYIIESDLSRCACGLVWVKIHKLSEYKNEIIADFSGECIDEQDIEIDNYQYSAQYLEHSAEGEEVEETLVSHLLKSNCLITSQPDWGSVQIHYVGKKINREKLLRYLVSFREHNEFHEQCVERIFTDLMTFAKPEKLMVYARYTRRGGLEINPFRANFDAMPQHIRMARQ

SEQ ID NO: 46243 - protein, 279 aa, Haemophilus ducreyi
  REGION 1..279: note = tr|A0A448KJB9|A0A448KJB9_HAEDC NADPH-dependent 7-cyano-7-deazaguanine reductase OS=Haemophilus ducreyi; OX = 730 GN=queF PE=3 SV=1
MSYTDTVLSSLKLGQKTEYTGEYDPMLLQAVPRKLNRDNLGITEQQPFNQGADVWTCYEVSWLNLNGLPQVAIAEVVIDANSENLIESKSFKLYLNSFNQTIFESLEQVEYIIESDLSRCACGLVWVKIHKLSEYKNEIIADFSGECIDEQDIEIDNYQYSAQYLEHSAEGEEVEETLVSHLLKSNCLITSQPDWGSVQIHYVGKKINREKLLRYLVSFREHNEFHEQCVERIFTDLMTFAKPEKLMVYARYTRRGGLEINPFRANFDAMPQHIRMARQ

SEQ ID NO: 46244 - protein, 279 aa, unidentified
  source 1..279: note = [Haemophilus] felis
  REGION 1..279: note = tr|A0A1T0AST2|A0A1T0AST2_9PAST NADPH-dependent 7-cyano-7-deazaguanine reductase OS=[Haemophilus] felis; OX = 123822 GN=queF PE=3 SV=1
MDYHHQSLDALTLGRQTQYASQYDPTLLQGVPRQLNRDQLNITEKQPFTFGTDIWTAYEISWLNSNGLPQVAIADIALDFQSKNLIESKSFKLYLNSFNQTVFNNIESVRQTIEKDLTQCAEGKVRVQLNKLDYYTQQPIVNFEGLCIDEQDIQISNYEFNPALLENCTQDQIVEEKLVSHLLKSNCLITQQPDWGSVQIHYVGKQINREQLLRYLISFRQHNEFHEQCVERIFCDLMNFAKPEKLTVYARYTRRGGLDINPFRSNFESEPTNYRLARQ

SEQ ID NO: 46245 - protein, 279 aa, Haemophilus haemoglobinophilus
  REGION 1..279: note = tr|A0A1V4AY82|A0A1V4AY82_9PAST NADPH-dependent 7-cyano-7-deazaguanine reductase OS=Haemophilus haemoglobinophilus OX=733 GN=queF PE=3 SV=1
MQYQDQSLQALKLGQKTEYTSTYDRTLLQAVPRKLNRNDLGITEKQPFTFGADIWTAYEISWLNLKGVPQVAIADVEIDYQSENLIESKSFKLYLNSFNQSQFKNLQEVEEILQQDLTQCAQGRVKVRLNSLQYYDRQAIATLQGECIDEQDIEIHSYEFNPSLLENCTSTQWVEETLVSHLLKSNCLITNQPDWGTIQIHYVGQQINREKILRYLISFRQHNEFHEQCVERIFCDLMRFAQPEKLSVYARYTRRGGLDINPFRSNFEPTPLNQRLARQ

SEQ ID NO: 46246 - protein, 279 aa, Haemophilus haemolyticus
  REGION 1..279: note = tr|A0A502JTE7|A0A502JTE7_HAEHA NADPH-dependent 7-cyano-7-deazaguanine reductase OS=Haemophilus haemolyticus OX=726 GN=queF PE=3 SV=1
MNYQDNSLKSLKLGQKTEYASQYDRTLLQPVPRALNRDGLGITQNQPFTIGADIWTAYEISWLNEKGLPQVAIADIYLDYQSQNLIESKSFKLYLNSFNQSKFADFNAVQQTMQRDLSECAQGDVKVRLNPVAVYDSQKIDHLQGDCIDEQDIEITSYEFNADWLKDCVSDEIVEEKLVSHLLKSNCLITNQPDWGTLHIHYIGKKINHEKLLRYVVSFRQHNEFHEQCVERIFCDLMHYAKPEKLTVYARYTRRGGLDINPFRSNFENLPENLRLARQ

SEQ ID NO: 46247 - protein, 279 aa, Haemophilus haemolyticus
  REGION 1..279: note = tr|A0A2X4R605|A0A2X4R605_HAEHA NADPH-dependent 7-cyano-7-deazaguanine reductase OS=Haemophilus haemolyticus OX=726 GN=queF PE=3 SV=1
MNYQDNSLKSLKLGQKTEYASQYDCTLLQPVPRALNRDGLGITQNQPFTIGADIWTAYEISWLNEKGLPQVAIADIYLDYQSQNLIESKSFKLYLNSFNQSKFADFNVVQQTMQRDLSECAQGDVKVRLNPVAVYDSQKIDHLQGDCIDEQDIEITSYEFNADWLKDCVSDEIVEEKLVSHLLKSNCLITNQPDWGTLHIHYIGKKIDHEKLLRYVVSFRQHNEFHEQCVERIFCDLMHYAKSEKLTVYARYTRRGGLDINPFRSNFENLPENLRLARQ

SEQ ID NO: 46248 - protein, 279 aa, Haemophilus influenzae
  REGION 1..279: note = sp|P44153|QUEF_HAEIN NADPH-dependent 7-cyano-7-deazaguanine reductase OS=Haemophilus influenzae (strain ATCC 51907 / DSM 11121 / KW20 / Rd) OX=71421; GN = queF PE=3 SV= 1
MNYQDNSLKSLKLGQKTEYASQYDRTLLQPVPRALNRDGLGITQNQPFTIGADIWTAYEISWLNEKGLPQVAIADIYLDYQSQNLIESKSFKLYLNSFNQSKFADFNAVQQTMQRDLSECAQGDVKVRLNPMAVYDSQKIDHLQGDCIDEQDIEITSYEFNANWLKDCVSDEIVEEKLVSHLLKSNCLITNQPDWGTLHIHYVGKKINQEKLLRYVVSFRQHNEFHEQCVERIFCDLMHYAKPEKLTVYARYTRRGGLDINPFRSNFENLPENLRLARQ

SEQ ID NO: 46249 - protein, 279 aa, Haemophilus influenzae
  REGION 1..279: note = sp|A5UF26|QUEF_HAEIG NADPH-dependent 7-cyano-7-deazaguanine reductase OS=Haemophilus influenzae (strain PittGG) OX=374931 GN=queF PE=3 SV=1
MNYQDNSLKSLKLGQKTEYASQYDRTLLQPVPRALNRDGLGITQNQPFTIGADIWTAYEISWLNEKGLPQVAIADIYLDYQSQNLIESKSFKLYLNSFNQSKFTDFNAVQQTMQRDLIECAQGDVKVRLNPVAVYDAQKIEHLQGDCIDEQDIEITSYEFNANWLKDCVSDEIVEEKLVSHLLKSNCLITNQPDWGTLHIHYVGKKINHEKLLRYVVSFRQHNEFHEQCVERIFCDLMHYAKPEKLTVYARYTRRGGLDINPFRSNFENLPENLRLARQ

SEQ ID NO: 46250 - protein, 279 aa, Haemophilus paracuniculus
  REGION 1..279: note = tr|A0A1T0AR64|A0A1T0AR64_9PAST NADPH-dependent 7-cyano-7-deazaguanine reductase OS=Haemophilus paracuniculus OX=734 GN=queF PE=3 SV=1
MNYDDKSLTGLKLGQKTEYKSEYDPSLLQAVPRRLNRDQLGITEQQPFNQGADIWTLYELSWLNPKGVPQVAIADVAIDFQSENLIESKSFKLYLNSFNQTKFDSIEQVEQTIQRDLATVASGQISVKIHKLSHFSQQPIADFAGECIDDLEIEIEDYHFSADHLANIGEGEVVEETLVSHLLKSNCLITSQPDWGSVQIHYVGKKLNREKLLRYLVSFREHNEFHEQCVERIFCDLMAFAQPEKLTVYARYTRRGGLDINPFRSNFEPLPKNIRMARQ

SEQ ID NO: 46251 - protein, 279 aa, Haemophilus parahaemolyticus
  REGION 1..279: note = tr|A0A369ZFY0|A0A369ZFY0_HAEPH NADPH-dependent 7-cyano-7-deazaguanine reductase OS=Haemophilus parahaemolyticus OX=735 GN=queF PE=3 SV=1
MNYQDKSLSALKLGQNTEYKSQYDASLLQPVPRRLNREGLGIVEQQPFNQGADVWTCYELSWLNSNGLPQVAIADVEIDFKSENLIESKSFKLYLNSFNQTKFASIEEVEQTITRDLRKCASGQVSVKIHKLADYTNQPIVNFSGECIDEQEIQIESYIFSNQHLENVAEDEIVEETLVSHLLKSNCLITSQPDWGSVQIHYVGKRLNREKLLRYLVSFREHNEFHEQCVERIFTDLIQFAKPEKLTVYARYTRRGGLDINPFRSNFESIPVNLRMARQ

SEQ ID NO: 46252 - protein, 279 aa, Haemophilus parahaemolyticus
  REGION 1..279: note = tr|A0A5C1QSW2|A0A5C1QSW2_HAEPH NADPH-dependent 7-cyano-7-deazaguanine reductase OS=Haemophilus parahaemolyticus OX=735 GN=queF PE=3 SV=1
MNYQDKSLSALKLGQNTEYKSQYDASLLQPVPRRLNREGLGIVEQQPFNQGADVWTCYELSWLNSNGLPQVAIADVEIDFKSENLIESKSFKLYLNSFNQTKFASIEEVEQTLTRDLSQCASGQVSVRTHKLADYTNQPIVNFSGECIDEQEIQIESYTFSNQYLENVAEDEIVEETLVSHLLKSNCLITSQPDWGSVQIHYVGKRLNREKLLRYLVSFREHNEFHEQCVERIFTDLMQFAKPEKLTVYARYTRRGGLDINPFRSNFESIPVNLRMARQ

SEQ ID NO: 46253 - protein, 279 aa, Haemophilus parainfluenzae
  REGION 1..279: note = tr|A0A1R0E6F7|A0A1R0E6F7_HAEPA NADPH-dependent 7-cyano-7-deazaguanine reductase OS=Haemophilus parainfluenzae OX=729 GN=queF PE=3 SV=1
MNYQDKSLQSLKLGQETKYATNYDRTLLQPVPRKLNRDGLGITEQQPFTQGADIWTAYEISWLNPKGLPQVAIADVEIDYRSENLIESKSFKLYLNSFNQNKFADFASVERTMREDLSACAQGEVKVRLHPLSHYQGQSIDTLTGDCIDDQDIEIHSYEFNADILQNCTSDNVAEETLVSHLLKSNCLITSQPDWGTVQIHYVGKQIDREKLLRYIVSFRQHNEFHEQCVERIFCDLMHYAKPEKLTVYARYTRRGGLDINPFRSNFEAIPQNLRLTRQ

SEQ ID NO: 46254 - protein, 279 aa, Haemophilus parainfluenzae
  REGION 1..279: note = tr|F0ETP7|F0ETP7_HAEPA NADPH-dependent 7-cyano-7-deazaguanine reductase OS=Haemophilus parainfluenzae ATCC 33392 OX=888828 GN=queF PE=3 SV=1
MNYQDKSLQSLKLGQATEYAANYDRTLLQPVPRKLNRDGLGITEQQPFSEGTDIWTAYEISWLNPKSLPQVAIADVEIDYRSENLIESKSFKLYLNSFNQSKFADFASVERTMREDLSACAQGEVKVRLHPLSHYQGQSIDTLPGDCIDDQDIEIHSYEFDADILQDCTSNNVVEETLVSHLLKSNCLITSQPDWGTVQIHYVGKQIDREKLLRYIVSFRQHNEFHEQCVERIFCDLMHYAKPEKLTVYARYTRRGGLDINPFRSNFEEIPQNLRLARQ

SEQ ID NO: 46255 - protein, 279 aa, Haemophilus paraphrohaemolyticus
  REGION 1..279: note = tr|I2NK03|I2NK03_9PAST NADPH-dependent 7-cyano-7-deazaguanine reductase OS=Haemophilus paraphrohaemolyticus HK411 OX=1095743 GN=queF PE=3 SV=1
MNYQDKSLSALKLGQKTEYKSQYDASLLQPVPRRLNREGLGIVEDQPFNQGADVWTCYELSWLNLNGLPQVAIADVAIDFKSENLIESKSFKLYLNSFNQTKFASIEEVEETIAKDLNQCASGRVSVKIHKLADYTNQPIMNFAGDCIDEQEIQIDNYAFSNQYLENVAEGEIVEETLVSHLLKSNCLITSQPDWGSVQIHYVGKQLNREKLLRYLVSFREHNEFHEQCVERIFTDLMQFAKPEKLTVYARYTRRGGLDINPFRSNFESVPANLRMARQ

SEQ ID NO: 46256 - protein, 279 aa, Haemophilus paraphrohaemolyticus
  REGION 1..279: note = tr|A0A369ZQM6|A0A369ZQM6_9PAST NADPH-dependent 7-cyano-7-deazaguanine reductase OS=Haemophilus paraphrohaemolyticus OX=736 GN=queF PE=3 SV=1
MNYQDKSLSALKLGQKTEYKSQYDASLLQPVPRRLNREGLGIVEDQPFNQGADVWTCYELSWLNPNGLPQVAIADVAIDFKSENLIESKSFKLYLNSFNQTKFASIEEVEQTLTKDLSQCASGQVSVKIHKLADYTNQPIMNFAGKCIDEQEIQINSYAFSNQYLENVAEGEIVEETLVSHLLKSNCLITSQPDWGSVQIHYIGKQLNREKLLRYLVSFREHNEFHEQCVERIFTDLMQFAKPEKLTIYARYTRRGGLDINPFRSNFESVPANLRMARQ

SEQ ID NO: 46257 - protein, 279 aa, Haemophilus parasuis; identical to SEQ ID NO: 46181
  REGION 1..279: note = sp|B8F3V1|QUEF_HAEPS NADPH-dependent 7-cyano-7-deazaguanine reductase OS=Haemophilus parasuis serovar 5 (strain SH0165) OX=557723 GN=queF PE=3 SV=1

SEQ ID NO: 46258 - protein, 279 aa, Haemophilus parasuis
  REGION 1..279: note = tr|A0A1T0A8R9|A0A1T0A8R9_HAEPR NADPH-dependent 7-cyano-7-deazaguanine reductase OS=Haemophilus parasuis; OX = 738 GN=queF PE=3 SV=1
MNYNNECLSMLKLGKKTEYKSTYDPSLLQAVPRYLNRESLGIVKQQPFTVGADIWTLYELSWLNQNGVPQVAIADVIIDSSSSNIIESKSFKLYLNSFNQMRFPSREDVQRRIQSDLSKCAQGDVTVQIYKLSDFAMRSISEFNGECIDNQNICINRYDFTRESLQGIANGEIVEERLVSHLLKSNCLITSQPDWGSIQICYVGKQLDKEKLLRYLVSFREHNEFHEQCVERIFCDLMEFAQPQKLTVYARYTRRGGLDINPFRSNFEGIPENLRMVRQ

SEQ ID NO: 46259 - protein, 279 aa, Haemophilus pittmaniae
  REGION 1..279: note = tr|F9QBJ9|F9QBJ9_9PAST NADPH-dependent 7-cyano-7-deazaguanine reductase OS=Haemophilus pittmaniae HK 85 OX=1035188 GN=queF PE=3 SV=1
MNYQDKSLQSLKLGQATEYAANYDRTLLQPVPRKLNRDGLGITEQQPFTQGADIWTAYEISWLNPKGLPQVAIADVEIDYRSENLIESKSFKLYLNSFNQSKFADFASVERTMREDLSACAKGEVKVRLNPLSNYQEQAIDTLTGDCIDEQDIEIHSYEFNADILQNCTSDNMVEESLVSHLLKSNCLITSQPDWGTVQIHYVGKQIDREKLLRYIVSFRQHNEFHEQCVERIFCDLMHYAKPEKLTVYARYTRRGGLDINPFRSNFEEIPQNLRLARQ

SEQ ID NO: 46260 - protein, 279 aa, Haemophilus pittmaniae
  REGION 1..279: note = tr|A0A377J1S9|A0A377J1S9_9PAST NADPH-dependent 7-cyano-7-deazaguanine reductase OS=Haemophilus pittmaniae; OX = 249188 GN=queF PE=3 SV=1
MNYQDKSLQSLKLGQATEYAANYDRTLLQPVPRKLNRDGLGITEQQPFTQGADIWTAYEISWLNPKGLPQVAIADVEIDYRSENLIESKSFKLYLNSFNQSQFDDFASVERTMREDLSACAQGEVKVRLNPLSNYQEQAIDTLTGDCIDEQDIEIHSYEFNADILQNCTSDNMVEESLVSHLLKSNCLITSQPDWGTVQIHYVGKQIDREKLLRYIVSFRQHNEFHEQCVERIFCDLMHYAKPEKLTVYARYTRRGGLDINPFRSNFEKIPQNLRLARQ

SEQ ID NO: 46261 - protein, 279 aa, unidentified
  source 1..279: note = Haemophilus somnus
  REGION 1..279: note = sp|Q0I3L5|QUEF_HAES1 NADPH-dependent 7-cyano-7-deazaguanine reductase OS=Haemophilus somnus (strain 129Pt) OX=205914 GN=queF PE=3 SV=1
MQYHDQSLQTLKLGKKTEYISTYDRTLLQAVPRKLNRDDLGISTKQPFSFGADIWTAYEISWLNLKGVPQVAIADVEIDYQSENLIESKSFKLYLNSFNQSQFENLQQVEQILQQDLIKCAKGQVKVRLNSLQNYAQQPIATLQGECIDEQDIEIRCYEFDPNLLENCTNKQWVEEKLVSHLLKSNCLITNQPDWGTVQIHYIGNQINREKLLRYLISFRQHNEFHEQCVERIFCDLMKFAQPEKLSVYARYTRRGGLDINPFRSNFEPIPLNQRLARQ

SEQ ID NO: 46262 - protein, 293 aa, Haemophilus sp.
  REGION 1..293: note = tr|H1LNY2|H1LNY2_9PAST NADPH-dependent 7-cyano-7-deazaguanine reductase OS=Haemophilus sp. oral taxon 851 str. F0397 OX=762965 GN=queF PE=3 SV=1
MSKFAKVGHLIGEKMNYQDNSLKSLKLGQKTEYASQYDRTLLQPVPRALNRDGLGITQNQPFTIGADIWTAYEISWLNEKGLPQVAIADIYLDYQSQNLIESKSFKLYLNSFNQSKFADFNAVQQTMQRDLSECAQGDVKVRLNPVAVYDFQKIDHLQGDCIDEQDIEITSYQFNADWLKDCVSDEIVEEKLVSHLLKSNCLITNQPDWGTLHIHYVGKKINHEKLLRYVVSFRQHNEFHEQCVERIFCDLMHYAKPEKLTVYARYTRRGGLDINPFRSNFENLPENLRLARQ

SEQ ID NO: 46263 - protein, 279 aa, Haemophilus sp.
  REGION 1..279: note = tr|A0A1F0UFM0|A0A1F0UFM0_9PAST NADPH-dependent 7-cyano-7-deazaguanine reductase OS=Haemophilus sp. HMSC073C03 OX=1739452 GN=queF PE=3 SV=1
MNYQDKSLQSLKLGQATAYATNYDRTLLQPVPRKLNRDGLGITEQQPFTQGADIWTAYEISWLNPKGLPQVAIADVEIDYRSENLIESKSFKLYLNSFNQSNFADFASVERTMHEDLSACAQGEVKVRLHPLSHYQEQSIDTLTGDCIDEQDIEIHRYEFNANILQNCTSDNVAEETLVSHLLKSNCLITSQPDWGTVQIHYVGKQIDREKLLRYIVSFRQHNEFHEQCVERIFCDLMHYAKPEKLTVYARYTRRGGLDINPFRSNFEEIPQNLRLARQ

SEQ ID NO: 46264 - protein, 279 aa, unidentified
  source 1..279: note = Haemophilus sputorum
  REGION 1..279: note = tr|J5HXF7|J5HXF7_9PAST NADPH-dependent 7-cyano-7-deazaguanine reductase OS=Haemophilus sputorum HK 2154 OX=1078483 GN=queF PE=3 SV=1
MNYEDKSLLGLKLGQKTDYKTTYDPSLLQGVPRKLNRDGLGITEHQPFDRGADIWTCYELSWLNSNGLPQVAIADVAVDFRSENLIESKSFKLYLNSFNQTKFESIGQVQQTIMQDLSQCASGQVSVKICKLSDYRGQQIVDFAGECIDEQDITISDYSFSNDYLSDVAEGEVVEETLVSHLLKSNCLITSQPDWGSVQIHYQGKRLNREKLLRYLVSFREHNEFHEQCVERIFTDLMQFAKPDKLTVYARYTRRGGLDINPFRSNFEDLPQNLRMARQ

SEQ ID NO: 46265 - protein, 279 aa, unidentified
  source 1..279: note = Haemophilus sputorum
  REGION 1..279: note = tr|A0A369YCA3|A0A369YCA3_9PAST NADPH-dependent 7-cyano-7-deazaguanine reductase OS=Haemophilus sputorum; OX = 1078480 GN=queF PE=3 SV=1
MNYEDKSLLGLKLGQKTDYKTTYEPSLLQGVPRKLNRDGLGITERQPFDRGADIWTCYELSWLNSNGLPQVAIADVAVDFRSENLIESKSFKLYLNSFNQTKFESIEQVQQTLMQDLSQCASGQVSVKICKLSDYRGQQIVDFAGECIDEQDITISDYSFSNDYLSDVAECEVVEETLVSHLLKSNCLITSQPDWGSVQIHYQGKRLNREKLLRYLVSFREHNEFHEQCVERIFTDLMQFAKPEKLTVYARYTRRGGLDINPFRSNFEDLPKNLRMARQ

SEQ ID NO: 46266 - protein, 281 aa, Hafnia alvei
  REGION 1..281: note = tr|G9Y9P2|G9Y9P2_HAFAL NADPH-dependent 7-cyano-7-deazaguanine reductase OS=Hafnia alvei ATCC 51873 OX=1002364 GN=queF PE=3 SV=1
MSYQDHKALSGLTLGKATEYRDQYDATLLQPVPRSMNREPLGLYPETLPFHGGDIWTLYELSWLNAKGLPQVAIANVELDAFSHNLIESKSFKLYLNSFNQTRFADWNEVQTTLQRDLAHCAQGNVSVQLMSLDSVEGQAIAAFDGECIDHQDIEITHYEFNAELLKNAANKQAIVEETLVSHLLKSNCLITHQPDWGSVMIQYRGPKIDREALLRYLVSFRHHNEFHEQCVERIFCDIQRFCQPETLSVYARYTRRGGLDINPWRTNTPFVAPKGRLVRQ

SEQ ID NO: 46267 - protein, 281 aa, Hafnia alvei
  REGION 1..281: note = tr|A0A097R5L4|A0A097R5L4_HAFAL NADPH-dependent 7-cyano-7-deazaguanine reductase OS=Hafnia alvei FB1; OX = 1453496 GN=queF PE=3 SV=1
MSYQDHQALAGLTLGKATEYRDSYDASLLQPVPRSMNREPLGLYPNSLPFTGGDIWTLYELSWLNAKGLPQVAIADVELDAFSQNLIESKSFKLYLNSFNQTRFANWDDVQTTLQRDLSHCAQGDVRVQLMKLDDVEGQPIAAFRGECIDNLDIEIDNYEFDAELLKNAADQQNVIEETLVSHLLKSNCLITHQPDWGSVMIQYRGPAINREALLRYLVSFRHHNEFHEQCVERIFCDIQRFCQPETLSVYARYTRRGGLDINPWRTNTTFVAPKGRLVRQ

SEQ ID NO: 46268 - protein, 281 aa, Hafnia paralvei
  REGION 1..281: note = tr|A0A2A2MD20|A0A2A2MD20_9GAMM NADPH-dependent 7-cyano-7-deazaguanine reductase OS=Hafnia paralvei; OX = 546367 GN=queF PE=3 SV=1
MSYQDHKALSGLTLGKATEYRDQYDATLLQPVPRSMNREPLGLYPETLPFRGGDIWTLYELSWLNAKGLPQVAIADVELDAFSHNLIESKSFKLYLNSFNQTRFADWNEVQTTLQRDLAHCAQGNVSVQLMSLDSVEGQAIASFDGECIDHQDIEITHYEFNAELLKNAANKQAIVEETLVSHLLKSNCLITHQPDWGSVMIQYRGPKIDREALLRYLVSFRHHNEFHEQCVERIFCDIQRFCQPETLSVYARYTRRGGLDINPWRTNTPFVAPKGRLVRQ

SEQ ID NO: 46269 - protein, 281 aa, Hafnia paralvei
  REGION 1..281: note = tr|A0A4Q9EMB2|A0A4Q9EMB2_9GAMM NADPH-dependent 7-cyano-7-deazaguanine reductase OS=Hafnia paralvei; OX = 546367 GN=queF PE=3 SV=1
MSYQDHKALSGLTLGKATEYRDQYDATLLQPVPRSMNREPLGLYPETLPFHGGDIWTLYELSWLNAKGLPQVAIANVELDAFSHNLIESKSFKLYLNSFNQTRFADWNEVQTTLQRDLAHCAQGNVSVQLMSLDSVEGQAIAAFDGECIDHQDIEITHYEFDAELLKNAASKQAIVEETLVSHLLKSNCLITHQPDWGSVMIQYRGPKIDREALLRYLVSFRHHNEFHEQCVERIFCDIQRFCQPETLSVYARYTRRGGLDINPWRTNTPFVAPKGRLVRQ

SEQ ID NO: 46270 - protein, 274 aa, Hahella chejuensis
  REGION 1..274: note = sp|Q2SDT2|QUEF_HAHCH NADPH-dependent 7-cyano-7-deazaguanine reductase OS=Hahella chejuensis (strain KCTC 2396) OX=349521 GN=queF PE=3 SV=1
MELEKHTHLGKATEYPEEYSPSWLTPIPRAKSRETLGLSGKPDFVGEDLWNGYELSWLNSKGKPEVALGVFRIRCDSLNIIESKSFKLYLNSFNQSRFTSREEVEALMRKDLSAAAQGEVSVTLLSVTDWRDEPSFWRDAENLDVLDIDVDVYTPDASLLPDPVGDDVVEETLSSDLLKSNCPVTGQPDWATLYIHYRGKPLEKAALLKYIVSMRSHQDFHEHCVESVYLTLMQRYQPEKLAVYARYTRRGGLDINPLRSNYPLAADNFKLPRQ

SEQ ID NO: 46271 - protein, 274 aa, Hahella sp.
  REGION 1..274: note = tr|A0A3T0VQ43|A0A3T0VQ43_9GAMM NADPH-dependent 7-cyano-7-deazaguanine reductase OS=Hahella sp. KA22; OX = 1628392 GN=queF PE=3 SV=1
MELEKHTHLGKATEYPEEYSPSWLTPIPRAKSRGTLGLSGAPDFVGEDLWNGYELSWLNSKGKPEVALGVFRIRCDSLNIIESKSFKLYLNSFNQSRFASREEVQALMQKDLSAAAEGEVSVTLLSASDWRDELSFWQAAENLDGLDIEVEVYTPDASLLPDPVGDDIVEETLSSDLLKSNCPVTGQPDWATLYIHYRGKPLDKAALLKYIVSMRSHQDFHEHCVESVYLTLMQRYQPEKLAVYARYTRRGGLDINPLRSNYPLAADNFKLPRQ

SEQ ID NO: 46272 - protein, 280 aa, Hahella sp.
  REGION 1..280: note = tr|A0A261GRD8|A0A261GRD8_9GAMM NADPH-dependent 7-cyano-7-deazaguanine reductase OS=Hahella sp. CCB-MM4; OX = 1926491 GN=queF PE=3 SV=1
MKQTTKLGQATEYPEHYDAALLTPIPRSPNREKLAISGELPFVGEDLWNAYELSWLNTKGKPVVAIGVFRIPADSANIVESKSFKLYLNSFNQTVFADQEEVRSVMEVDLSRAVEGTVKVEILAPGRWEDEKSDWEQSTCLDDLDVTCTDYTPDINLLVLAGHDEGETDERSETVSETLCSHLLKSNCPVTGQPDWATVYIRYKGKAIDHQGLLQYIVSMRGHQDFHEHCVESIYMALMERCQPEKLAVYARYTRRGGLDINPLRSNYPETAANFKLARQ

SEQ ID NO: 46273 - protein, 309 aa, unidentified
  source 1..309: note = Hahellaceae bacterium
  REGION 1..309: note = tr|A0A2D8REM1|A0A2D8REM1_9GAMM NADPH-dependent 7-cyano-7-deazaguanine reductase QueF OS=Hahellaceae bacterium OX=2048971 GN=CME36_12455 PE=4 SV=1
MSQDKLTHGSLLGRDTSYPDSYAPGLLEALPRRRPLAGAPFGEDIWNQYELSWLDDAGYPRVGVLECRLPCSSPNLIESKSMKLYFNSLNQTRFTSSEMLLARVRRDLSGCAGAEWQLALTHPLPLTQAAAVCAEAEPGDAGFAVSVGERQWSEAVLIDELTQAQALPGPQLPAPEAERRSLLRLADKRAVDASSEEVLVSHLLKTNCPVTGQPDWASVLIWTGSAEQGLDSGHRVDRQSLLDYLVSYRQHSGFHEQCVEEIFSDLAALLGDDRGLLVYARYTRRGGIDINPWRSNVPAQVANTRLVRQ

SEQ ID NO: 46274 - protein, 271 aa, Haliea salexigens
  REGION 1..271: note = tr|A0A3C1KKR4|A0A3C1KKR4_9GAMM NADPH-dependent 7-cyano-7-deazaguanine reductase OS=Haliea salexigens; OX = 287487 GN=queF PE=3 SV=1
MDSEALLLGKQVPAATQYAPELLYPIPRREGRAGLGLAGQLPFEGIDVWHAYELSWLDSQDKALARVGRFTISASTPNLVESKSFKLYLNSLNNTVFDDEAAALACIVRDVSAAAGGEVALAVFAPDDPALTGAQPDGLCIDSAAGRWPRREPVASMLQCAPGSVVEERLYSHLLRSLCPVTGQPDWATLWLHYRGPALDHAALLSYILAYREHQDFHEQCVERIFCDLQQACQPEFLHLQAFYTRRGGLDINPFRSSGGGEPPWLRLARQ

SEQ ID NO: 46275 - protein, 270 aa, Haliea sp.
  REGION 1..270: note = tr|A0A2D5FAQ5|A0A2D5FAQ5_9GAMM NADPH-dependent 7-cyano-7-deazaguanine reductase QueF OS=Haliea sp.; OX = 1932666 GN=queF PE=4 SV=1
MEQGDLLLGRHTPVVDHYAPELLYPIPRREGRDALGLGEPPPFEGVDVWHAWELSWLDAAERPQSRIGRFTIPASSPNLVESKSLKLYLNSLNNVVFDDDAAALACITRDVSAVVGAPVAVVAFAPDDPAMAASQPTGTCIDDSDGRWPRCEPDAGLLVAGDDVIEEALFSHGLRSLCPVTAQPDWATLWLHYRGRALDHGALLTYLLSYRQHRGFHEQCVEQIFRDIHAVIAPEFLHLQAFYTRRGGLDINPFRSSGGGAPPWWRLARQ

SEQ ID NO: 46276 - protein, 273 aa, Haliea sp.
  REGION 1..273: note = tr|A0A2E7C5A9|A0A2E7C5A9_9GAMM NADPH-dependent 7-cyano-7-deazaguanine reductase OS=Haliea sp. OX=1932666; GN = queF PE=3 SV=1
MAIDSESLLLGKQVPAATRYAPELLFPIPRREARDALGYGGEVPFEGVDIWHAYELSWLDSSDKAQARIGRFTIPATTPHLVESKSFKLYLNSLNNTVFDDEAAALACIVRDISAAAGGDVALAVFAPDDPSLAGAQPSGQCIDTAAGRWPRREPEAEMLQCARARVVEEQLYSHLLRSLCPVTGQPDWATLWLHYRGPALDHAALLSYILAYREHQEFHEQCVERIYRDLQQACQPEFLHLQAFYTRRGGLDINPFRSSGGGEPPWLRLARQ

SEQ ID NO: 46277 - protein, 261 aa, unidentified
  source 1..261: note = Halieaceae bacterium
  REGION 1..261: note = tr|A0A2D5FN45|A0A2D5FN45_9GAMM QueF_N domain-containing protein OS=Halieaceae bacterium; OX = 2026743 GN=CME47_10240 PE=4 SV=1
  VARIANT 26: note = Xaa can be any naturally occurring amino acid
  VARIANT 38: note = Xaa can be any naturally occurring amino acid
  VARIANT 121: note = Xaa can be any naturally occurring amino acid
  VARIANT 128: note = Xaa can be any naturally occurring amino acid
  VARIANT 136: note = Xaa can be any naturally occurring amino acid
  VARIANT 152: note = Xaa can be any naturally occurring amino acid
MAGVLGQAVPAPLSYAPQVLERIERXRPFSCIGHGWDXWHCYEMSWCVQQTVEHWVGVLAIPADSPATVESKSLKLYLNSLNHHHFETHEAAIQAIVRDVSACVNATVSLSCTPVDRLASXTRELVGXNLPACNTXEGLAIIDATVLTISPXKGNVVSEHLVSHSLRSLCPVTAQPDWGSLWVRYSGPPIDPASLATYLDAYRSHQGFHEQCVEQIYSDLMGLGLESLDVVAFYQRRGGIDITPWRSSGVIPIDPQRIGRQ

SEQ ID NO: 46278 - protein, 260 aa, unidentified
  source 1..260: note = Halieaceae bacterium
  REGION 1..260: note = tr|A0A520RIT3|A0A520RIT3_9GAMM NADPH-dependent 7-cyano-7-deazaguanine reductase QueF OS=Halieaceae bacterium OX=2026743 GN=EVA62_04910 PE=4 SV=1
MAGVLGQAVAAPERYAPEVLEPISRQQSAAACFGWDIWHAYELSWCIGDQACHWVGWLSIPADSPATVESKSLKLYLNSLNFHSFADHRGAVNTICADISACAGAIVTLECLPVEGLSDITEELDGVNLPACAAYQAIETISSDLLTHSPGKGNVVSEHLVSHSLRSLCPVTAQPDWGSLSIRYSGKAIDHESVSAYLSGYRSHQGFHEQCVDQIFADLLALKPDSLQVVGFYQRRGGIDITPWRSTEPLATNPQRLGRQ

SEQ ID NO: 46279 - protein, 272 aa, unidentified
  source 1..272: note = Halioglobus japonicus
  REGION 1..272: note = tr|A0A2N5YES0|A0A2N5YES0_9GAMM NADPH-dependent 7-cyano-7-deazaguanine reductase OS=Halioglobus japonicus; OX = 930805 GN=queF PE=3 SV=1
MADELEGLLLGKTTPVVDTYSPELLFPIPRSQGRAAIGVATPLPFHGADIWHAYEVSWLNDRGVPQVRVGKFRIPCESPNLVESKSFKLYLNSLNSTRYASEEAVCEVIVRDVSAAAGARVYLELLGPDNHALAGTSLEGSCIDDAPIDVVAGEPDPTRLKVGQCVIEERLYSHLLRSLCPVTGQPDWATVWIDYTGPTLDRTALLEYIVAYRNHQEFHEQCVERMFIDILAHCRPQRLQIQAFYTRRGGMDINPFRSTEAGAQPLPRLNRQ

SEQ ID NO: 46280 - protein, 272 aa, unidentified
  source 1..272: note = Halioglobus lutimaris
  REGION 1..272: note = tr|A0A2N5X2Y4|A0A2N5X2Y4_9GAMM NADPH-dependent 7-cyano-7-deazaguanine reductase OS=Halioglobus lutimaris; OX = 1737061 GN=queF PE=3 SV=1
MAEFSDELLLGKQTPVVDQYSPDLLYPIPRETGRDGLSLDPSRAMYGVDLWHAYEMSWLDDNGKPEVRVGRFSVPADSPNMIESKSFKLYLNSLNNTRFQSEEDLLAVIARDVSAATGAAVALELLPVTSPALGGAVPEGECIDGHSINASAGSPAADTLRTTGEGIEESLHSHLLRSLCPVTGQPDWASVWIHYRGQSLDHCSLLRYIIAFRQHQEFHEQCVERMFSDIGSVTQADVLHIQAFYTRRGGMDINPFRSTDPGARPRPRMNRQ

SEQ ID NO: 46281 - protein, 272 aa, unidentified
  source 1..272: note = Halioglobus sp.
  REGION 1..272: note = tr|A0A3L7DWP3|A0A3L7DWP3_9GAMM NADPH-dependent 7-cyano-7-deazaguanine reductase OS=Halioglobus sp. U0301; OX = 2283635 GN=queF PE=3 SV=1
MSDDKPGLLLGKNVPVADKYSPELLYPIPRARARSSLGLGATLPFDGVDLWHAYELCWLNDRGKPVVRVGRFFIPADSPCMVESKSFKLYLNSLNGSTFACEQQLRETLRTDLAAVIGADIELELFAVDAPELDGGVPEGDCLDDLDISVDDSAPGAELLQVGEEVVAEALYSHLLRSLCPVTGQPDWATVYLSYRGRALERESLLRYLIAFRQHQEFHEQCVERMFVDLQGLIEPEFLEIQAFYTRRGGLDINPFRSTDPGAVPLSRMNRQ

SEQ ID NO: 46282 - protein, 265 aa, unidentified
  source 1..265: note = Halioglobus sp.
  REGION 1..265: note = tr|A0A5B0WM95|A0A5B0WM95_9GAMM NADPH-dependent 7-cyano-7-deazaguanine reductase OS=Halioglobus sp. NY5; OX = 2606449 GN=queF PE=3 SV=1
MLLGKVTAAPDAYAPDVLYPIPRAPGRRAAGIDIDSACFGVDLWHAYELSWLDEQGKPEVRVGRISIPADSPNMVESKSLKLYLNSLNNLRHGSADAVATRIRQDVGGVVGAEIGLELLPVTAPALCGEPLTGECIDQLALHAGGLHPERDLLVTTGQRGEDTVHSHLLRSLCPVTGQPDWASVWIHYRGDLIERASLLQYIIAFRQHQEFHEQCVERMFADIGHRATPEFLQIQAFYTRRGGLDINPMRSTEPGARPLPRMNRQ

SEQ ID NO: 46283 - protein, 125 aa, unidentified
  source 1..125: note = Haloarcobacter mediterraneus
  REGION 1..125: note = tr|A0A4Q1AU61|A0A4Q1AU61_9PROT NADPH-dependent 7-cyano-7-deazaguanine reductase OS=Haloarcobacter mediterraneus OX=2023153 GN=queF PE=3 SV=1
MKYGEKEIVEFDINKEEHFWPNKNKKNYIIDIELPEFMAKCPRSGYPDFATIKLQYTPNEKVIELKALKLYINSFMFREVSHENSANEIFDTLYEKLQPRWMKVIADFKPRGNVHTVIEIDSDKM

SEQ ID NO: 46284 - protein, 164 aa, Halobacillus aidingensis
  REGION 1..164: note = tr|A0A1H0EXK9|A0A1H0EXK9_HALAD NADPH-dependent 7-cyano-7-deazaguanine reductase OS=Halobacillus aidingensis OX=240303 GN=queF PE=3 SV=1
MPGRNDQDLDLSLLGNQGNSYSFEYDPDVLETFDNQHPNRDYFVKFNCPEFTTLCPKTRQPDFATIYISYIPDVKMVESKSLKLYLFSFRNHGDFHEDSVNTIMNDLIDLMDPRYIEVWGKFTPRGGISIDPYCNYGKPGTKFEQMADHRLMNHDLYPEKIDNR

SEQ ID NO: 46285 - protein, 164 aa, Halobacillus alkaliphilus
  REGION 1..164: note = tr|A0A1I2SB76|A0A1I2SB76_9BACI NADPH-dependent 7-cyano-7-deazaguanine reductase OS=Halobacillus alkaliphilus OX=396056 GN=queF PE=3 SV=1
MAGRNEDDLNLSLLGNQGTAYSFEYDPEVLETFENQHTNRDYFVKFNCPEFTTLCPKTGQPDFATIYISYIPDRLMVESKSLKLYLFSFRNHGDFHEDSINTIMNDLIQLMDPRYIEVWGKFTPRGGISIDPYCNYGKPSTKFEQMADHRMMNHDLYPEKIDNR

SEQ ID NO: 46286 - protein, 164 aa, Halobacillus dabanensis
  REGION 1..164: note = tr|A0A1I3WYU2|A0A1I3WYU2_HALDA NADPH-dependent 7-cyano-7-deazaguanine reductase OS=Halobacillus dabanensis OX=240302 GN=queF PE=3 SV=1
MTGRNDQDLDLSLLGNQGTSYSFEYDPEVLETFDNQHPDRDYFVKFNCPEFTTLCPKTRQPDFATVYISYIPNVKMVESKSLKLYLFSFRNHGDFHEDSMNTIMNDLIELMDPRYIEVWGKFTPRGGISIDPYCNYGKPGTKFEQMADHRMMNHDLYPEKIDNR

SEQ ID NO: 46287 - protein, 164 aa, Halobacillus faecis
  REGION 1..164: note = tr|A0A511WPL8|A0A511WPL8_9BACI NADPH-dependent 7-cyano-7-deazaguanine reductase OS=Halobacillus faecis; OX = 360184 GN=queF PE=3 SV=1
MPGRNDQDLDLSLLGNQGTSYSFEYDPDVLETFDNQHPNRDYFVKFNCPEFTTLCPKTRQPDFATIYISYIPNVKMVESKSLKLYLFSFRNHGDFHEDSVNTIMNDLIDLMDPRYIEVWGKFTPRGGISIDPFCNYGKPGTKFEQMADHRLMNHDLYPEKVDNR

SEQ ID NO: 46288 - protein, 164 aa, Halobacillus halophilus
  REGION 1..164: note = tr|I0JGZ5|I0JGZ5_HALH3 NADPH-dependent 7-cyano-7-deazaguanine reductase OS=Halobacillus halophilus (strain ATCC 35676 / DSM 2266 / JCM 20832 / NBRC 102448/ NCIMB 226 9) OX=866895 GN=queF PE=3 SV=1
MPGRNEDDLNLSLLGNQGTAYSFEYDPEVLETFENQHPNRDYFVKFNCPEFTTLCPKTGQPDFATVYISYIPDRLMVESKSLKLYLFSFRNHGDFHEDSMNTIMNDLIQLMDPRYIEVWGKFTPRGGISIDPYCNYGKPSTKFEQMADHRLMNHDLYPEKIDNR

SEQ ID NO: 46289 - protein, 164 aa, Halobacillus karajensis
  REGION 1..164: note = tr|A0A059NXP3|A0A059NXP3_9BACI NADPH-dependent 7-cyano-7-deazaguanine reductase OS=Halobacillus karajensis OX=195088 GN=queF PE=3 SV=1
MPGRNDQELDLSLLGNQGTSYSFEYDPDVLETFENQHPNRDYFVKFNCPEFTTLCPKTRQPDFATIYISYIPDVKMVESKSLKLYLFSFRNHGDFHEDSVNTIMNDLINLMDPRYIEVWGKFTPRGGISIDPYCNYGKPGTKFEQMAHHRLMNHDLYPEKIDNR

SEQ ID NO: 46290 - protein, 164 aa, Halobacillus litoralis
  REGION 1..164: note = tr|A0A410MDG4|A0A410MDG4_9BACI NADPH-dependent 7-cyano-7-deazaguanine reductase OS=Halobacillus litoralis; OX = 45668 GN=queF PE=3 SV=1
MPGRNDNELDLSLLGNQGTGYSFEYDPDVLETFDNQHPNRDYFVKFNCPEFTTLCPKTNQPDFATIYISYIPDVKMVESKSLKLYLFSFRNHGDFHEDSVNTIMNDLIDLMDPRYIEVWGKFTPRGGISIDPYCNYGKPGTKFEQMADHRMMNHDLYPETIDNR

SEQ ID NO: 46291 - protein, 164 aa, Halobacillus mangrovi
  REGION 1..164: note = tr|A0A1W5ZQE2|A0A1W5ZQE2_9BACI NADPH-dependent 7-cyano-7-deazaguanine reductase OS=Halobacillus mangrovi; OX = 402384 GN=queF PE=3 SV=1
MPGRKEDDLNLSLLGNQNNEYSFQYDPAVLETFDNQHPNRDYFVKFNCPEFTTLCPKTRQPDFATIYISYIPDKKMVESKSLKLYLFSFRNHGDFHEDSVNTIMNDLIELMDPRYIEVWGKFTPRGGISIDPYCNYGKPGTKFEQMADHRMMNHDMYPETIDNR

SEQ ID NO: 46292 - protein, 164 aa, Halobacillus salinus
  REGION 1..164: note = tr|A0A4Z0GXJ4|A0A4Z0GXJ4_9BACI NADPH-dependent 7-cyano-7-deazaguanine reductase OS=Halobacillus salinus; OX = 192814 GN=queF PE=3 SV=1
MPGRNEDSLDLSLLGNQGNAYSFEYDPEVLETFDNQHPNRDYFVKFNCPEFTTLCPKTRQPDFATIYISYIPDVKMVESKSLKLYLFSFRNHGDFHEDSVNTIMNDLIELMDPRYIEVWGKFTPRGGISIDPFCNYGKKGTKFEQMADHRLMNHDLYPEKIDNR

SEQ ID NO: 46293 - protein, 164 aa, Halobacillus sp.
  REGION 1..164: note = tr|A0A0B0DA00|A0A0B0DA00_9BACI NADPH-dependent 7-cyano-7-deazaguanine reductase OS=Halobacillus sp. BBL2006 OX=1543706 GN=queF PE=3 SV=1
MPGRKEDDLDLSLLGNQNNEYSFTYDPEVLETFDNQHPNRDYFVKFNCPEFTTLCPKTRQPDFATIYISYIPDQKMVESKSLKLYLFSFRNHGDFHEDSVNTIMNDLIDLMDPRYIEVWGKFTPRGGISIDPYCNYGKPGTKFEQMADHRMMNHDLYPETIDNR

SEQ ID NO: 46294 - protein, 164 aa, Halobacillus sp.
  REGION 1..164: note = tr|L5N7H6|L5N7H6_9BACI NADPH-dependent 7-cyano-7-deazaguanine reductase OS=Halobacillus sp. BAB-2008 OX=1246484 GN=queF PE=3 SV=1
MPGRNEDSLNLSLLGNQETAYATTYDPQVLETFDNQHPNRDYFVKFNCPEFTTLCPKTGQPDFATIYISYVPNIKMVESKSLKLYLFSFRNHGDFHEDSVNTIMNDLIDLMDPRYIEVWGKFTPRGGISIDPYCNYGKPGTKFEQMADHRMMNHDMYPETIDNR

SEQ ID NO: 46295 - protein, 164 aa, Halobacillus trueperi; identical to SEQ ID NO: 46284
  REGION 1..164: note = tr|A0A3E0JAG7|A0A3E0JAG7_9BACI NADPH-dependent 7-cyano-7-deazaguanine reductase OS=Halobacillus trueperi; OX = 156205 GN=queF PE=3 SV=1

SEQ ID NO: 46296 - protein, 203 aa, unidentified
  source 1..203: note = Halobacteriovoraceae bacterium
  REGION 1..203: note = tr|A0A2E3XU93|A0A2E3XU93_9PROT NADPH-dependent 7-cyano-7-deazaguanine reductase OS=Halobacteriovoraceae bacterium OX=2026745 GN=queF PE=3 SV=1
MSKKKTAPKTAKKAAKKATKKSVKKSSNKANQKSPKSKARNPQELKDFSLGESHTDYPSEYAPQVLEAFDNKNPNDIAWTTFVCTEFTSLCPKTAQPDFARIFINYIADEKMVESKSLKLYLFSFRNHGDFHEDCVQKICNDLFKLMKPKYIEVVGEFTPRGGIAIYPYSSQSNSEKKFKELLEKRRLNYAPGAYTMPLSRVY

SEQ ID NO: 46297 - protein, 179 aa, unidentified
  source 1..179: note = Halobacteriovoraceae bacterium
  REGION 1..179: note = tr|A0A2E2U8N1|A0A2E2U8N1_9PROT NADPH-dependent 7-cyano-7-deazaguanine reductase OS=Halobacteriovoraceae bacterium OX=2026745 GN=queF PE=3 SV=1
MAQRKSSPKKKSTARTDSELKGVSLLGNQNTKYPDTYAPEILESFPNKNPKSEAWTSFVCTEFTSLCPKTGQPDFARIYINYIADKKMVESKSLKLYLFSFRNHGDFHEDCIQKIADDLYNLMKPKYIEVIGEFTPRGGITIYPYVSLDNGSTRFKKIKDLRFSNYSPGKYTLELSRIY

SEQ ID NO: 46298 - protein, 178 aa, unidentified
  source 1..178: note = Halobacteriovorax marinus
  REGION 1..178: note = tr|A0A1Y5FIG6|A0A1Y5FIG6_9PROT NADPH-dependent 7-cyano-7-deazaguanine reductase OS=Halobacteriovorax marinus OX=97084 GN=queF PE=3 SV=1
MAKAKTKSVSTKKGRNAKELESFSLGENETRYPTTYSPELLEAFDNKNPASDAWTTFLCTEFTSLCPKTAQPDFARIYINYIAGEKMVESKSLKLYLFSFRNHGDFHEDCIQKICNDLAKLMKPKYIEVIGEFTPRGGISIYPYSSYSNAKKLYKDIKAKRFAEYSPGKYTMDMSKIY

SEQ ID NO: 46299 - protein, 181 aa, unidentified
  source 1..181: note = Halobacteriovorax marinus
  REGION 1..181: note = tr|E1X3M0|E1X3M0_HALMS NADPH-dependent 7-cyano-7-deazaguanine reductase OS=Halobacteriovorax marinus (strain ATCC BAA-682 / DSM 15412 / SJ) OX=862908; GN = queF PE=3 SV =1
MAKVKTKKKKTGTGAKGRNAKELASFTLGEAETKYSMTYSPEVLEAFDNKNPNSDAWTTFLCTEFTSLCPKTSQPDFARIYINYIADKKMVESKSLKLYLFSFRNHGDFHEDCIQKICDDLAKLMKPKYIEVIGEFTPRGGIAIYPYSSYSNSKALYKSIKAKRFAEYSPGKYTMDMSKIY

SEQ ID NO: 46300 - protein, 169 aa, unidentified
  source 1..169: note = Halobacteriovorax sp.
  REGION 1..169: note = tr|A0A2E6H764|A0A2E6H764_9PROT NADPH-dependent 7-cyano-7-deazaguanine reductase OS=Halobacteriovorax sp.; OX = 2020862 GN=queF PE=3 SV=1
MAKKVQKIRKGVKNLGLGETTEYPSTYSPKILEKFPNKNPSSEAWTTFICTEFTSLCPKTNQPDFAKIYINYIADKTMVESKSLKLYLFSFRNHGDFHEDCVQTMCDDLMKLMKPKYLEVIGEFTPRGGIAIFPYASADNGTKKFKDLKNKRFSEYAPGKYSMPLSKLY

SEQ ID NO: 46301 - protein, 176 aa, unidentified
  source 1..176: note = Halobacteriovorax sp.
  REGION 1..176: note = tr|A0A2D5YMK0|A0A2D5YMK0_9PROT NADPH-dependent 7-cyano-7-deazaguanine reductase OS=Halobacteriovorax sp.; OX = 2020862 GN=queF PE=3 SV=1
  VARIANT 17: note = Xaa can be any naturally occurring amino acid
  VARIANT 43: note = Xaa can be any naturally occurring amino acid
  VARIANT 69: note = Xaa can be any naturally occurring amino acid
  VARIANT 71: note = Xaa can be any naturally occurring amino acid
  VARIANT 75: note = Xaa can be any naturally occurring amino acid
  VARIANT 77: note = Xaa can be any naturally occurring amino acid
  VARIANT 104..105: note = Xaa can be any naturally occurring amino acid
  VARIANT 111: note = Xaa can be any naturally occurring amino acid
  VARIANT 113: note = Xaa can be any naturally occurring amino acid
MATKKKTKSKTKTRSGXLKTFKLGEAITDYPTTYAPEVLEAFXNKNPKSDAWTTFVCTEFTSLCPKTSXPXFARXYXNYIADKKMVESKSLKLYLFSFRNHGDXXEDCVQXIXDDLVSLMNPKFIEVIGEFTPRGGIAIYPYASYARKVKKYQMVKDHRFMNYAPGKYSMDLSKIY

SEQ ID NO: 46302 - protein, 146 aa, Halocella sp.
  REGION 1..146: note = tr|A0A3S9H301|A0A3S9H301_9FIRM 7-cyano-7-deazaguanine reductase OS=Halocella sp. SP3-1; OX = 2382161 GN=D7D81_13940 PE=4 SV=1
MMGKEIKTYKDIDPSILKSIPNPSEQAYETKIKIPECTFLGVQNQPDFATVYFTFYPDKKIIELKSLKKYIYQFRNIVVSYERLINVLYEHLMEVYQPERLRIVIICNPRGGISSKLTVDSDWKVRGGEEKYRDWFNRDDTWKVEM

SEQ ID NO: 46303 - protein, 167 aa, unidentified
  source 1..167: note = Halodesulfovibrio marinisediminis
  REGION 1..167: note = tr|A0A1N6E7Q1|A0A1N6E7Q1_9DELT NADPH-dependent 7-cyano-7-deazaguanine reductase OS=Halodesulfovibrio marinisediminis DSM 17456 OX=1121457 GN=queF PE=3 SV=1
MTITKSQDKTDHLEVLGKGGQTKYQLDGPHSGILETFPNNYPNRPYIVSVEFPEYTSLCPMTGQPDFGVIVMEYIPKDRIVESKSLKLYFFAYRNHQSFMETIANTMLEDFVEALDPLWCRVKGLFSPRGATTLHVFAEHFDTSAENLDEIKSIVSEWKQEANRHSS

SEQ ID NO: 46304 - protein, 167 aa, unidentified
  source 1..167: note = Halodesulfovibrio spirochaetisodalis
  REGION 1..167: note = tr|A0A1B7XBJ5|A0A1B7XBJ5_9DELT NADPH-dependent 7-cyano-7-deazaguanine reductase OS=Halodesulfovibrio spirochaetisodalis OX=1560234 GN=queF PE=3 SV=1
MTITRSQDKTDHLKVLGKGGQTEYQLDGPHAGILETFPNNYPQRPYIVSVEFPEYTSLCPMTGQPDFGTIVVEYIPKDRIVESKSIKLYFFAYRNHQSFMETIANTMLEDFVEALAPLWCRVKGLFSPRGATTLHVFAEQFDTSSDNIDEIKAIVSEWKQEQNRHSS

SEQ ID NO: 46305 - protein, 138 aa, unidentified
  source 1..138: note = Halomicronema excentricum
  REGION 1..138: note = tr|A0A4Q7DZI8|A0A4Q7DZI8_9CYAN NADPH-dependent 7-cyano-7-deazaguanine reductase OS=Halomicronema excentricum str. Lakshadweep OX=2294035 GN=queF PE=3 SV=1
MPDQQYGDRAIAQAAFEPLEKWANQTDNAYTIHLEHPEFTALCPRSGYPDFGTIVVDYQPGDWVVELKAFKLYINSFRDQRISHEMVTNAIADRLWQELAPVGLRVIGDFTRRGGVKTVITVAKGDGSLFTPYTPNLL

SEQ ID NO: 46306 - protein, 141 aa, unidentified
  source 1..141: note = Halomicronema hongdechloris
  REGION 1..141: note = tr|A0A1Z3HV96|A0A1Z3HV96_9CYAN NADPH-dependent 7-cyano-7-deazaguanine reductase OS=Halomicronema hongdechloris C2206 OX=1641165 GN=queF PE=3 SV=1
MSHISESMYGDIAIAQAATEPLEKWPNPSTNAYAIHLEHPEFTALCPRSGYPDFGTIVVDYQPGEWVVELKAFKLYINSFRDQRISHEQVVNAVADRLWQELHPVGLRIIGDFTRRGGVKTMITVSKGNGQLFGEYRPNLL

SEQ ID NO: 46307 - protein, 276 aa, unidentified
  source 1..276: note = Halomonadaceae bacterium
  REGION 1..276: note = tr|A0A139C904|A0A139C904_9GAMM NADPH-dependent 7-cyano-7-deazaguanine reductase OS=Halomonadaceae bacterium T82-2 OX=1783518 GN=queF PE=3 SV=1
MNRPDTLKDAPLGRESDYPERYDPVLLYPIPRAANRAPLGIGEGALPFVGEDEWHAFELSWLNARGKPCVAVARFRLPADSPNLIESKSWKLYLNSFNQTRFDSREQVVETLERDLGEAAGKPVGVDLLGVDAPELMPRTLPGECIDGLDIAVDDYTPNAGVLQVGADVVEETLHSHLLKSNCPVTGQPDWGSVLIRYRGPRIDREGLLRYLIGFRQHQDFHEHCVEHIFTDLMTRARPERLLVMARYVRRGGLDISPWRATPGERPPQPLRLARQ

SEQ ID NO: 46308 - protein, 278 aa, unidentified
  source 1..278: note = Halomonas aestuarii
  REGION 1..278: note = tr|A0A1J0VIF5|A0A1J0VIF5_9GAMM NADPH-dependent 7-cyano-7-deazaguanine reductase OS=Halomonas aestuarii; OX = 1897729 GN=queF PE=3 SV=1
MTPTRPDTLEHAPLGRDAAYPEQYDAGLLYAIPRAANRVPLGIEEGALPFVGEDEWHAFEVSWLNARGKPIVAVARFRLPADSPFLIESKSWKLYLNGFNQTRFESRQAVIDTLERDLAEAAGSAVSVELFDVDHEALLPRRLPGQGLDDLDIEVTDYTPSAEHLTVGEEVVEETLYSHLLKSNCPVTGQPDWGSVMIRYRGPRLDREGLLRYLIGYRQHQDFHEHCVEQIFMDLMARARPERLLVLARYVRRGGLDISPWRATPGERPPSPLRLSRQ

SEQ ID NO: 46309 - protein, 277 aa, Halomonas alkaliantarctica
  REGION 1..277: note = tr|A0A4R7Y652|A0A4R7Y652_9GAMM NADPH-dependent 7-cyano-7-deazaguanine reductase OS=Halomonas alkaliantarctica OX=232346 GN=queF PE=3 SV=1
MAHRPDTLAHAPLGRDSAYPELYDAGLLYPIPRAANRVPLGIEEGALPFAGEDEWHAFEVSWLNSRGKPIVAVARFRLSAASPNLIESKSWKLYLNSFNQTRFYSRQEVMETLANDLSVAAGAEVSVELFDVDASELSPQQLPGECLDDLDIAVSDYTPSSNHLSVGEEIVEETLYSHLLKSNCPVTGQPDWGSVLIRYKGPKIDREGLLRYLIGFRQHQDFHEHCVEHIFTDLMAQAKPTQLLVLARYVRRGGLDISPWRATPGLTPPTPLRLARQ

SEQ ID NO: 46310 - protein, 277 aa, Halomonas alkaliphila
  REGION 1..277: note = tr|A0A386WY95|A0A386WY95_9GAMM NADPH-dependent 7-cyano-7-deazaguanine reductase OS=Halomonas alkaliphila; OX = 272774 GN=queF PE=3 SV=1
MAHRPDTLEHAPLGRDSAYPEQYDAGLLYPIPRAANRAPLGIEDNKLPFVGEDEWHAFEVSWLNNRGKPIVAVARFRLPADSPNLIESKSWKLYLNSLNQTRFESREAMQHVLVRDLAAAAGAAVSVELLGVDDAELAPQRLPGKCLDDLDIDISDYTPSAAHLAVSEEIVEETLHSHLLKSNCPVTGQPDWGSVLIRYKGPKIDREGLLRYLIGYRQHQDFHEHCVEHIFTDLMQLAKPEELLVLARYVRRGGLDISPWRATPGLTPPSPLRLARQ

SEQ ID NO: 46311 - protein, 277 aa, Halomonas andesensis
  REGION 1..277: note = tr|A0A3S0WNU6|A0A3S0WNU6_9GAMM NADPH-dependent 7-cyano-7-deazaguanine reductase OS=Halomonas andesensis; OX = 447567 GN=queF PE=3 SV=1
MAHRPDTLEHAPLGRDSAYPEQYDAGLLYPIPRAANRAPLGIDDDKLPFVGEDEWHAFEVSWLNGRGKPIVAVARFRLPANSPNLIESKSWKLYLNSLNQTRFASREDVQRTLLRDLAAAAGGSVSVELLGVDDSELVPQRLPGECLDDLDIDVSDYTPSAAHLAVGEVIVEETLYSHLLKSNCPVTGQPDWGSVLIRYKGPKIDREGLLRYLIGYRQHQDFHEHCVEHIFTDLMQLAKPEELLVLARYVRRGGLDISPWRATPGLTPPSPLRLARQ

SEQ ID NO: 46312 - protein, 278 aa, Halomonas anticariensis
  REGION 1..278: note = tr|S2L458|S2L458_HALAF NADPH-dependent 7-cyano-7-deazaguanine reductase OS=Halomonas anticariensis (strain DSM 16096 / FP35) OX=1121939 GN=queF; PE = 3 SV=1
MSIERPDTLQDAPLGRVSAYPEHYDAGLLYPIARAANRAPLGIRDDSLPFEGEDEWHAFELSWLDTKGKPVVAVARFRLPASSPNLIESKSWKLYLNSFNQTRFASRDEVIESLERDLSAAAGAPVVTELFGVDDERLTPRRLPGECIDDLDIEIHDYTPSPELLAVGDEVVEETLHSHLLKSNCPVTGQPDWGSVMIRYRGPCLDREGVLRYLVSYRQHQDFHEHCVEHIFTDLMARARPERLLVLARYVRRGGLDISPWRGTPGERPPEPLRLARQ

SEQ ID NO: 46313 - protein, 277 aa, Halomonas aquamarina
  REGION 1..277: note = tr|A0A1H8KFA8|A0A1H8KFA8_9GAMM NADPH-dependent 7-cyano-7-deazaguanine reductase OS=Halomonas aquamarina; OX = 77097 GN=queF PE=3 SV=1
MVHRPDTLEHAPLGRDSAYPEQYDAGLLYPIPRAANRAPLGIEENALPFVGEDEWHAFEVSWLNGRGKPVVAVARFRLPASSPQLIESKSWKLYLNSLNQTRFVSQAEVEAILVRDLSGAAGAPVSVELLPVDDEALAPRRLPGECLDDLDIEVSHYTPSAEHLTTHDDIVEETLHSHLLKSNCPVTGQPDWGSVLIRYKGPKLDREGLLRYLIGYRQHQDFHEHCVEHIFTDVMQQAKPEELLVLARYVRRGGLDISPWRATPGLTPPSPLRLARQ

SEQ ID NO: 46314 - protein, 277 aa, Halomonas arcis
  REGION 1..277: note = tr|A0A1H0CRC6|A0A1H0CRC6_9GAMM NADPH-dependent 7-cyano-7-deazaguanine reductase OS=Halomonas arcis; OX = 416873 GN=queF PE=3 SV=1
MSHRPDTLAHAPLGRESAYPAQYDAGLLYSIPRAANRAPLGIDEANLPFVGEDEWHAFEVSWLNGRGKPIVAVARFRLPANSPQLIESKSWKLYLNSFNQTRFAQRDEVIATLSHDLSAAAGAPVSVELFDVDADALAPQRLPGESLDALDIEVSDYTPSADHLVVGEPIVEETLHSHLLKSNCPVTGQPDWGSVMIRYKGPKLDREGLLRYLIGYRQHQDFHEHCVEHIFTDLMHRAKPSELLVLARYVRRGGLDISPWRATPGLTPPSPLRLARQ

SEQ ID NO: 46315 - protein, 86 aa, Halomonas axialensis
  REGION 1..86: note = tr|A0A455V933|A0A455V933_9GAMM Uncharacterized protein OS=Halomonas axialensis OX=115555; GN = HAALTHF_46970n PE=4 SV=2
MIRYKGPKLDREGLLRYLIGYRQHQDFHEHCVEHIFTDVMQQAKPEELLVLARYVRRGGLDISPWRATPGLTPPACCALPGSNAHL

SEQ ID NO: 46316 - protein, 123 aa, Halomonas axialensis
  REGION 1..123: note = tr|A0A455VD15|A0A455VD15_9GAMM QueF_N domain-containing protein OS=Halomonas axialensis; OX = 115555 GN=HAALTHF_46980n PE=4 SV=2
MLYPIPRAANRAPLGIEENALPFVGEDEWHAFEVSWLNGRGKPVVAVARFRLPASSPHLIESKSWKLYLNSLNQTRFASQTKVEETLVRDLSSAAGASVSVELLGVDDSELAPSACRASAWMI

SEQ ID NO: 46317 - protein, 278 aa, unidentified
  source 1..278: note = Halomonas beimenensis
  REGION 1..278: note = tr|A0A291P973|A0A291P973_9GAMM NADPH-dependent 7-cyano-7-deazaguanine reductase OS=Halomonas beimenensis; OX = 475662 GN=queF PE=3 SV=1
MSSHRPETLAHAPLGRESAYPEHYDAGLLYPIVRAANRAPLGIEEGALPFVGEDEWHAFEVSWLNARGKPVVAVARFRLPADSPRLIESKSWKLYLNGFNQTRFANREAVVATLERDLAEAAGSPVGVELFGVDDEVLAPRRLPGECLDELEIEVSDYTPSAEHLRVGEEIVEETLHSHLLKSNCPVTGQPDWGSMLIRYRGPRLDREGLLRYLIGYRQHQDFHEHCVEHIFMDLMTRARPERLLVLARYVRRGGLDISPWRATPGERPPSALRLARQ

SEQ ID NO: 46318 - protein, 277 aa, Halomonas boliviensis
  REGION 1..277: note = tr|A0A265DWX6|A0A265DWX6_9GAMM NADPH-dependent 7-cyano-7-deazaguanine reductase OS=Halomonas boliviensis LC1 OX=1072583 GN=queF PE=3 SV=1
MAHRPDTLEHAPLGRESAYPEQYDAGLLYPIPRAANRVPLGIEEGALPFVGEDEWHAFEVSWLNSRGKPIVAVARFRLPAASPNLIESKSWKLYLNSFNQTRFYSREEVMQTLANDLSVAAGAEVSVELFDVDAPELAPQLLPGECLDDLDIAVSDYTPSEAHLTVGEVVVEETLYSHLLKSNCPVTGQPDWGSVLIRYKGPKIDREGLLRYLIGFRQHQDFHEHCVEHIFTDIMTQAKPTQLLVLARYVRRGGLDISPWRATPGLTPPTPLRLARQ

SEQ ID NO: 46319 - protein, 277 aa, Halomonas campaniensis
  REGION 1..277: note = tr|A0A246RYC2|A0A246RYC2_9GAMM NADPH-dependent 7-cyano-7-deazaguanine reductase OS=Halomonas campaniensis; OX = 213554 GN=queF PE=3 SV=1
MAHRPDTLEHAPLGRDSAYPEQYDAGLLYPIPRAANRAPLGIEEGDLPFIGEDEWHAFEVSWLNSRGKPIVAVARFRLPAASPHLIESKSWKLYLNSFNQTRFYSREDVMKTLAHDLAAAAGAEVSVELFDVDAPELSARSLPGECLDDLDIAISDYTPSSTHLTVGEEIVEETLYSHLLKSNCPVTGQPDWGSVLVRYKGPKIDREGLLRYLIGFRQHQDFHEHCVEHIFTDLMAQAKPTQLLVLARYVRRGGLDISPWRATPGLTPPTPLRLARQ

SEQ ID NO: 46320 - protein, 277 aa, Halomonas campaniensis
  REGION 1..277: note = tr|A0A060BDT6|A0A060BDT6_9GAMM NADPH-dependent 7-cyano-7-deazaguanine reductase OS=Halomonas campaniensis; OX = 213554 GN=queF PE=3 SV=1
MAHRPDTLEHAPLGRDSAYPEHYDAGLLYPIPRAANRAPLGIEDSKLPFVGEDEWHAFEVSWLNNRGKPIVAVARFRLPADSPNLIESKSWKLYLNSLNQTHFESRDAVQRVLVRDLAAAAGAAVSVELLAVDDVELTPQRLPGECLDDLDIDISDYTPSAAHLAVSEEIVEETLHSHLLKSNCPVTGQPDWGSVLIRYKGPKIDREGLLRYLIGYRQHQDFHEHCVEHIFTDLMQLAKPEELLVLARYVRRGGLDISPWRATPGLTPPSPLRLARQ

SEQ ID NO: 46321 - protein, 277 aa, Halomonas caseinilytica
  REGION 1..277: note = tr|A0A1M6XEI7|A0A1M6XEI7_9GAMM NADPH-dependent 7-cyano-7-deazaguanine reductase OS=Halomonas caseinilytica OX=438744 GN=queF PE=3 SV=1
MNDRPDSLADAPLGRESAYPEQYDAGLLYPIERAINRAPLGIEEDALPFVGEDEWHAFELSWLNARGKPIVAVARFRLPASSPRLIESKSWKLYLNGFNQSRFASTERVVRVLEHDLSEAAGAPVGVEVFGVDDPVLTPRALPGESIDEQDIEIADYTPSAEHLTVGEVIVEETLHSHLLKSNCPVTGQPDWGSVMIRYRGPKLDREGLLRYLVGYRQHQDFHEHCVEHIFTDLMARARPERLLVLARYVRRGGLDISPWRATPGEWPPSPLRLARQ

SEQ ID NO: 46322 - protein, 314 aa, unidentified
  source 1..314: note = Halomonas chromatireducens
  REGION 1..314: note = tr|A0A125R0C7|A0A125R0C7_9GAMM NADPH-dependent 7-cyano-7-deazaguanine reductase OS=Halomonas chromatireducens OX=507626 GN=queF PE=3 SV=1
MDRPDTLEHAPLGRESAYPERYDAGLLYPIPRAANRAPLGIEEGSLPFVGEDEWHAFEVSWLNGRGKPIVTVARFRLPADSPKLIESKSWKLYLNGFNQTRFDSREQVIDTLVADLSAAAGAPVSVELFGVDDDALAVQRLPGECLDELDIEIADYTPSAEHLRVTEEVVEETLYSHLLKSNCPVTGQPDWGSVLIRYRGPKLDREGLLRYLIGYRQHQDFHEHCVEHIFTDLMARARPERLLVLARYVRRGGLDISPWRRSICSRPPWQIAIPAGCARYTTWSSRQASASRPPSLECDNTSIGERHGCDDAAA

SEQ ID NO: 46323 - protein, 283 aa, Halomonas cupida
  REGION 1..283: note = tr|A0A1M6ZCQ9|A0A1M6ZCQ9_9GAMM NADPH-dependent 7-cyano-7-deazaguanine reductase OS=Halomonas cupida; OX = 44933 GN=queF PE=3 SV=1
MSELSTSGQRPETLKHAPLGRESDYPEHYDPGLLFPIPRAANRAPLGIEEGNLPFIGEDEWHAFELSWLNRKGKPIVAVARFRLPAESPNLIESKSWKLYLNSFNQTRFDDHAAVIEALTRDLSQAAEAELCVDLLAVDDAELAPRALPGECIDDLDIEVESYTPSVAHLKVGDEIVEETLTSHLLKSNCPVTGQPDWGSVMIRYRGPRLDRHGLLRYIIGYRQHQDFHEHCVEHIFTDLMHHARPERLLVMARYVRRGGLDISPWRGTPGEVPPLPLRLARQ

SEQ ID NO: 46324 - protein, 278 aa, Halomonas daqiaonensis
  REGION 1..278: note = tr|A0A1H7KYL2|A0A1H7KYL2_9GAMM NADPH-dependent 7-cyano-7-deazaguanine reductase OS=Halomonas daqiaonensis; OX = 650850 GN=queF PE=3 SV=1
MTHHRPDTLEHAPLGRQSVYPEHYDAGLLYPIVRDANRAPLGIEEGALPFVGEDEWHAFEVSWLNARGKPRVAVARFRLPADSPNLIESKSWKLYLNGFNQTRFGGRERVIDTLVSDLSRAAGAAVSVELFDVDHEALAPRRLPGECLDDLDIEITDYTPSVEHLRVGEAIVEETLHSHLLKSNCPVTGQPDWGSVLIRYQGPKLDREGLLRYLIGFRQHQDFHEHCVEHIFMDLMARARPQRLLVLARYVRRGGLDISPWRATLGECPPEPLRLARQ

SEQ ID NO: 46325 - protein, 277 aa, Halomonas daqingensis
  REGION 1..277: note = tr|A0A1H5XU34|A0A1H5XU34_9GAMM NADPH-dependent 7-cyano-7-deazaguanine reductase OS=Halomonas daqingensis; OX = 419596 GN=queF PE=3 SV=1
MSHRPDTLEHAPLGRESAYPEHYDAGLLYPIPRAANRAPLGIEEGRLPFVGEDEWHAFEVSWLNARGKPRVAVARFRLPAESPNLIESKSWKLYLNGFNQTRFDSREQVIDTLERDLAQAAGAPVSVELYDVDDAALAVCRLPGECLDELDIEIDAYSPSAEHLKVGEEIVEETLYSHLLKSNCPVTGQPDWGSVLIRYRGPKLDREGLLRYLIGYRQHQDFHEHCVEHIFTDLMAKAKPERLLVLARYVRRGGLDISPWRATPGERPPEPLRLARQ

SEQ ID NO: 46326 - protein, 277 aa, Halomonas desiderata
  REGION 1..277: note = tr|A0A243SZ79|A0A243SZ79_9GAMM NADPH-dependent 7-cyano-7-deazaguanine reductase OS=Halomonas desiderata SP1 OX=1191209 GN=queF PE=3 SV=1
MSHRPDTLEHAPLGRESAYPEHYDAGLLYPIPRAANRAPLGIEAGRLPFVGEDEWHAFEVSWLNARGKPRVAVARFRLPAESPNLIESKSWKLYLNGFNQTRFDSREQVIDTLERDLAQAAGAPVSVELFDVDDAALAVCRLPGECLDELDIEIDAYSPSAEHLKVGEEIVEETLYSHLLKSNCPVTGQPDWGSVLIRYRGPKLDREGLLRYLIGYRQHQDFHEHCVEHIFTDLMAKAKPERLLVLARYVRRGGLDISPWRATPGERPPEPLRLARQ

SEQ ID NO: 46327 - protein, 278 aa, Halomonas elongata
  REGION 1..278: note = tr|A0A329Q7C0|A0A329Q7C0_HALEL NADPH-dependent 7-cyano-7-deazaguanine reductase OS=Halomonas elongata; OX = 2746 GN=queF PE=3 SV=1
MAHHRPETLTGAPLGRESAYPEHYDAGLLYPIERAANRAPLGIEEGALPFDGEDEWHAFELSWLNARGKPIVAVARFRLPASSPRLIESKSWKLYLNSFNQSRFASTDEVIQLLERDLAEAAGAAVGVEVFGVDDPALTPRSLPGECIDDLDIEIADYTPSAAHLTVGEEVVEETLHSHLLKSNCPVTGQPDWGSVMIRYRGPKLDREGLLRYLVGYRQHQDFHEHCVEHIFTDLMARARPERLLVLARYVRRGGLDISPWRATPGERPPEPLRLARQ

SEQ ID NO: 46328 - protein, 278 aa, Halomonas elongata
  REGION 1..278: note = tr|A0A1B8P4J8|A0A1B8P4J8_HALEL NADPH-dependent 7-cyano-7-deazaguanine reductase OS=Halomonas elongata; OX = 2746 GN=queF PE=3 SV=1
MAHHRPETLTGAPLGRESAYPEHYDAGLLYPIERAANRAPLGIEEGALPFDGEDEWHAFELSWLNARGKPIVAVARFRLPASSPRLIESKSWKLYLNSFNQSRFASTDEVTQILERDLAEAAGAAVGVEVFGVDDPVLTPRSLPGECIDDLDVEIADYTPSAAHLTVGEEIVEETLHSHLLKSNCPVTGQPDWGSVMIRYRGPKLDREGLLRYLVGYRQHQDFHEHCVEHIFTDLMARARPERLLVLARYVRRGGLDISPWRATPGERPPEPLRLARQ

SEQ ID NO: 46329 - protein, 278 aa, unidentified
  source 1..278: note = Halomonas endophytica
  REGION 1..278: note = tr|A0A2N7U0P5|A0A2N7U0P5_9GAMM NADPH-dependent 7-cyano-7-deazaguanine reductase OS=Halomonas endophytica; OX = 2033802 GN=queF PE=3 SV=1
MAHHRPDTLEHAPLGRESAYPEQYDAALLYPISRAANRAPLGIEAGALPFVGQDEWHAFEVSWLNARGKPIVAVARFRLPADSPNLIESKSWKLYLNGFNQTRFDSRERVVTILEQDLAAAAGAPVSVELFDVDAPALAVRELPGECLDDLDIEISDYTPSTEHLRVSEDVVEETLYSHLLKSNCPVTGQPDWGSVLIRYRGPRLDREGLLRYLVGYRQHQDFHEHCVEHIFTDLMARARPERLLVLARYVRRGGLDISPWRGTPGEKPPESLRLARQ

SEQ ID NO: 46330 - protein, 277 aa, Halomonas eurihalina
  REGION 1..277: note = tr|A0A5D9D8R0|A0A5D9D8R0_HALER NADPH-dependent 7-cyano-7-deazaguanine reductase OS=Halomonas eurihalina; OX = 42566 GN=queF PE=3 SV=1
MNDRPDSLVDAPLGRESAYPEHYDAGLLYPIERAVNRAPLGIEERALPFDGEDEWHAFELSWLNARGKPIVAVARFRLPASSPRLIESKSWKLYLNSFNQSRFDATGDVIQLLERDLAEAAGAPVGVEVFGVDDPALTPRALPGESIDEQDIEISDYTPSAEHLTVGEAIVEETLHSHLLKSNCPVTGQPDWGSVMIRYRGPKLDREGLLRYLVGYRQHQDFHEHCVEHIFTDLMARARPERLLVLARYVRRGGLDISPWRATPGERPPSPLRLARQ

SEQ ID NO: 46331 - protein, 278 aa, Halomonas gudaonensis
  REGION 1..278: note = tr|A0A1G8MXT9|A0A1G8MXT9_9GAMM NADPH-dependent 7-cyano-7-deazaguanine reductase OS=Halomonas gudaonensis; OX = 376427 GN=queF PE=3 SV=1
MNRKRPNTLQQAPLGRETDYPERYDAGLLYPMPRAANRVPLGIQEGRLPFVGEDEWHAFEVSWLNDRGKPLVAVARFRLPAESPNLIESKSWKLYLNGFNQSRFASREHVLEALEHDLSMAAGAPVSVELFGVDDDALMPRRLPGECLDDLDIEVPSYTPSAEVIGVGDEVVEETLHSHLLKSNCPVTGQPDWGSVLIRYRGPKLDREGLLRYLIGYRQHQDFHEHCVEHVFMDLMARARPERLLVLARYVRRGGLDISPWRATPGERPPQPLRLARQ

SEQ ID NO: 46332 - protein, 277 aa, Halomonas halmophila
  REGION 1..277: note = tr|A0A4Y4F170|A0A4Y4F170_9GAMM NADPH-dependent 7-cyano-7-deazaguanine reductase OS=Halomonas halmophila; OX = 252 GN=queF PE=3 SV=1
MNDRPDSLAYAPLGRESAYPEQYDAGLLYPIERAVNRAPLGIEAGALPFVGEDEWHAFELSWLNARGKPRVAVARFRLPAESPRLIESKSWKLYLNSYNQSRFASPAAVREQLEKDLAEAAGAPVSVELFGVDASELMPQRLPGECIDELDIAIDDYTPSAEPLVVGDEIVEETLHSHLLKSNCPVTGQPDWGSVLIRYRGPRIDREGLLRYLVGYRQHQDFHEHCVEHIFCDLMARARPERLLVLARYVRRGGLDISPWRGTLGEIPPTPLRLARQ

SEQ ID NO: 46333 - protein, 278 aa, Halomonas halophila
  REGION 1..278: note = tr|A0A510ZI94|A0A510ZI94_9GAMM NADPH-dependent 7-cyano-7-deazaguanine reductase OS=Halomonas halophila; OX = 29573 GN=queF PE=3 SV=1
MAHQRPETLAEAPLGRESAYPEHYDAGLLYPIARAANRAPLGIEEGALPFVGEDEWHAFEVSWLNARGKPIVAVARFRLPAESPRLIESKSWKLYLNSFNQTRLASQDEARAIMERDLSAAAGAPVAVELFGVDDAALAPRRLPGECIDERDIEVEDYTPSAEHLATGDEIVEETLHSHLLKSNCPVTGQPDWGSVMIRYRGPRLDRDGLLRYLIGYRQHQDFHEHCVEHIFMDLMERAKPERLLVLARYVRRGGLDISPWRGTPGEQPPTPLRLARQ

SEQ ID NO: 46334 - protein, 276 aa, unidentified
  source 1..276: note = Halomonas heilongjiangensis
  REGION 1..276: note = tr|A0A2N7TPN6|A0A2N7TPN6_9GAMM NADPH-dependent 7-cyano-7-deazaguanine reductase OS=Halomonas heilongjiangensis OX=1387883 GN=queF PE=3 SV=1
MDRPDTLEHAPLGRESAYPERYDAGLLYPIARAANRAPLGIEEGALPFVGEDEWHAFEVSWLNARGKPVVAVARFRLPVDSPNLIESKSWKLYLNGFNQTRFDSRERVIDTLVADLSAAAGAPVSVELLDVDDEALAPRRLPGESLDDLDIEVSDYTPSADHLKVGVEIVEETLYSHLLKSNCPVTGQPDWGSVLIRYRGPRLDREGLLRYLIGYRQHQDFHEHCVEHIFTDLMARARPERLLVLARYVRRGGLDISPWRGTPGERPPEPLRLARQ

SEQ ID NO: 46335 - protein, 283 aa, unidentified
  source 1..283: note = Halomonas huangheensis
  REGION 1..283: note = tr|W1N5J8|W1N5J8_9GAMM NADPH-dependent 7-cyano-7-deazaguanine reductase OS=Halomonas huangheensis; OX = 1178482 GN=queF PE=3 SV=1
MSELSTPGQRPETLEHAPLGRESNYPEHYDPSLLFPIARAANRAPLGIEESRLPFVGEDEWHAFELSWLNRKGKPIVAVARFRLPAESPNLIESKSWKLYLNSFNQTHFDDHAAVAQTLTADLSKAAGAEVKVELLAVDDAELMPRPLPGECIDDLDIDVRSYTPSSDHLAVGDEVVEETLTSHLLKSNCPVTGQPDWGSVMIRYRGPRLDREGLLRYIIGYRQHQDFHEHCVEHIFTDLMQRARPERLLVMARYVRRGGLDISPWRATPGEEPPLPLRLARQ

SEQ ID NO: 46336 - protein, 277 aa, Halomonas hydrothermalis
  REGION 1..277: note = tr|A0A291JVM8|A0A291JVM8_9GAMM NADPH-dependent 7-cyano-7-deazaguanine reductase OS=Halomonas hydrothermalis OX=115561 GN=queF PE=3 SV=1
MAHRPDTLEHAPLGRDSAYPEQYDAALLYPIPRAANRAPLGIEESALPFVGEDEWHAFEVSWLNGRGKPVVAVARFRLPASSPQLIESKSWKLYLNSLNQTRFASQAEVEAILVRDLSGAAGAPVSVELLPVDDEALAPRRLPGECLDDLDIEVSHYTPSAEHLTTHDDIVEETLHSHLLKSNCPVTGQPDWGSVLIRYKGPRLDREGLLRYLIGYRQHQDFHEHCVEHIFTDLMQYAQPESLLVLARYVRRGGLDISPWRATPGMAPPSPLRLARQ

SEQ ID NO: 46337 - protein, 278 aa, Halomonas ilicicola
  REGION 1..278: note = tr|A0A1M4YD91|A0A1M4YD91_9GAMM NADPH-dependent 7-cyano-7-deazaguanine reductase OS=Halomonas ilicicola DSM 19980 OX=1121942 GN=queF PE=3 SV=1
MNTDRPDTLRDAPLGRESAYPERYDPTLLYPIARAANRAPLGIDDADLPFEGEDEWHAFELSWLDPKGKPIVAVARFRLPASSPNLIESKSWKLYLNSFNHSHFPGRDEVREALVRDLSHAAGADVEVTLLGVDDETLMPRRLPGECIDGLDVEIRDYTPRPELLVTGDAIVEESLHSHLLKSNCPVTGQPDWGSVLIRYRGPRIDREGLLRYLVSYRQHQDFHEHCVEHIFTDLMARVRPERLLVLARYVRRGGLDISPWRATPGERPPQPLRLARQ

SEQ ID NO: 46338 - protein, 276 aa, Halomonas korlensis
  REGION 1..276: note = tr|A0A1I7FU78|A0A1I7FU78_9GAMM NADPH-dependent 7-cyano-7-deazaguanine reductase OS=Halomonas korlensis; OX = 463301 GN=queF PE=3 SV=1
MDRLDTLSDAPLGRDSVYPDAYDAGLLFPISRTVNRAALGIEASSLPFVGEDEWHAFEVSWLNARGKPVVAVARFRLPADSPHLIESKSWKLYLNGFNQARFESRERVIDLLTRDLAATAGAPVSVELFDVDDEALGPRKMPGQCLDELDIEINDYTPHAEHLTVGEAVVEETLHSHLLKSNCPVTGQPDWGSVLIRYQGAQLDREGLLRYLIGYRQHQDFHEHCVEHIFIDLMERARPERLLVLARYVRRGGLDISPWRGTPGERPPQPLRLARQ

SEQ ID NO: 46339 - protein, 277 aa, Halomonas meridiana
  REGION 1..277: note = tr|A0A1N6HVE2|A0A1N6HVE2_9GAMM NADPH-dependent 7-cyano-7-deazaguanine reductase OS=Halomonas meridiana; OX = 29570 GN=queF PE=3 SV=1
MVHRPDTLEHAPLGRDSAYPEQYDAGLLYPIPRAANRAPLGIEEGALPFVGEDEWHAFEVSWLNGRGKPIVAVARFRLPASSPHLIESKSWKLYLNSLNQTRFASQTKVEETLVRDLSSAAGASVSVELLGVDDSELAPQRLPGECLDDLDIEVSDYTPSAAHLTTGDEVVEETLHSHLLKSNCPVTGQPDWGSVLIRYKGPKLDREGLLRYLIGYRQHQDFHEHCVEHIFTDVMQQAKPEELLVLARYVRRGGLDISPWRATPGLTPPSLLRLARQ

SEQ ID NO: 46340 - protein, 277 aa, Halomonas meridiana
  REGION 1..277: note = tr|A0A0D7UTI5|A0A0D7UTI5_9GAMM NADPH-dependent 7-cyano-7-deazaguanine reductase OS=Halomonas meridiana; OX = 29570 GN=queF PE=3 SV=1
MVHRPDTLEHAPLGRDSAYPEQYDAGLLYPIPRAANRAPLGIEEGALPFVGEDEWHAFEVSWLNGRGKPIVAVARFRLPASSPHLIESKSWKLYLNSLNQTRFASQAKVEETLVRDLSSAAGASVSVKLLGVDDSELAPQRLPGECLDDLDIEVSDYTPSATHLTASDEIVEETLHSHLLKSNCPVTGQPDWGSVLIRYKGPKLDREGLLRYLIGYRQHQDFHEHCVEHIFTDLMQQAKPEELLVLARYVRRGGLDISPWRATPGLTPPSPLRLARQ

SEQ ID NO: 46341 - protein, 278 aa, Halomonas muralis
  REGION 1..278: note = tr|A0A1G9F3H8|A0A1G9F3H8_9GAMM NADPH-dependent 7-cyano-7-deazaguanine reductase OS=Halomonas muralis; OX = 119000 GN=queF PE=3 SV=1
MKTQCPDVLKNAPLGRESAYPERYDPTLLFPIARAANRAPLGIADEALPFVGEDEWHAFELSWLDPKGKPIVAVARFRLLATSPNLIESKSWKLYLNSFNHSRFAGHAEVEQTLARDLSAAAGGDVSVTLLDVDDEALTPRRLPGDCIDGLDVEIHDYAPNPDLLSAGDETIEESLHSHLLKSNCPVTGQPDWGSVLIRYHGPRIDREGLLKYLVSYRQHQDFHEHCVEHIFTDLMARVRPERLLVMARYVRRGGLDISPWRATPGERPPEPLRLARQ

SEQ ID NO: 46342 - protein, 277 aa, unidentified
  source 1..277: note = Halomonas nigrificans
  REGION 1..277: note = tr|A0A2A4HMF4|A0A2A4HMF4_9GAMM NADPH-dependent 7-cyano-7-deazaguanine reductase OS=Halomonas nigrificans; OX = 2042704 GN=queF PE=3 SV=1
MAYRPDTLENAPLGRDAAYPEHYDAGLLYPIPRAANRAPLGIEEGKLPFVGEDEWHAFEVSWLNGRGKPIVAVARFRLPAESPNLIESKSWKLYLNSFNQTRFADQDAVQSTLTRDLANAAGATVSVELLAVDDAELTPQSLPGECLDDLDIDVSNYTPSATFLVAGEEVVEESLYSHLLKSNCPVTGQPDWGSVLIRYKGPKIDREGLLRYLIGYRQHQDFHEHCVEHIFTDLMQQVKPEELLVLARYVRRGGLDISPWRATPGLTPPSPLRLARQ

SEQ ID NO: 46343 - protein, 278 aa, Halomonas nitroreducens
  REGION 1..278: note = tr|A0A431V0C7|A0A431V0C7_9GAMM NADPH-dependent 7-cyano-7-deazaguanine reductase OS=Halomonas nitroreducens OX=447425 GN=queF PE=3 SV=1
MSHHRPDTLVHAPLGRESAYPEDYDAGLLYPIERAANRAPLGIEAGALPFVGEDEWHAFEVSWLNARGKPIVAVARFRLPADSPRLIESKSWKLYLNGFNQTRFASQEEVVATLERDLAEAARAAVGVELFGVDDAVLVPKRLPGECIDDRDIEIDDYTPSAEHLRVGEEVVEETLHSHLLKSNCPVTGQPDWGSVLVRYRGPRLDRDGLLRYLIGYRQHQDFHEHCVEHIFMDLMARARPERLLVLARYVRRGGLDISPWRATPGERPPSPLRLARQ

SEQ ID NO: 46344 - protein, 99 aa, unidentified
  source 1..99: note = Halomonas olivaria
  REGION 1..99: note = tr|A0A3T1DM06|A0A3T1DM06_9GAMM Uncharacterized protein OS=Halomonas olivaria OX=390919 GN=HORIV_20240; PE = 4 SV=1
MLKSNCPVTGQPDWGSVLVRYKGPKIDREGLLRYLIGFRQHQDFHEHCVEHIFTDLMAQAKPTQLLVLARYVRRGGLDISPWRATPGLTPPTPLRLARQ

SEQ ID NO: 46345 - protein, 149 aa, unidentified
  source 1..149: note = Halomonas olivaria
  REGION 1..149: note = tr|A0A3T1DLX1|A0A3T1DLX1_9GAMM QueF_N domain-containing protein OS=Halomonas olivaria OX=390919; GN = HORIV_20230 PE=4 SV=1
MAHRPDTLEHAPLGRDSAYPEQYDAGLLYPIPRAANRAPLGIEEDDLPFVGEDEWHAFEVSWLNSRGKPIVAVARFRLPAASPYLIESKSWKLYLNSFNQTRFYSREDVMKTLAHDLAAAAGAEVSVELFDVDAPELSARPLPGSAWTI

SEQ ID NO: 46346 - protein, 278 aa, Halomonas pacifica
  REGION 1..278: note = tr|A0A510XB94|A0A510XB94_9GAMM NADPH-dependent 7-cyano-7-deazaguanine reductase OS=Halomonas pacifica; OX = 77098 GN=queF PE=3 SV=1
MTSHRPETLEHAPLGRDSAYPEHYDAGLLYPIPRAANRAPLGISEEALPFVGEDEWHAFELSWLNARGKPMVAVARFRLPADSPNLIESKSWKLYLNSFNQTRLESREALIATLEADLAAAAGAPVTVELFGVDDAALAPQRLPGDCLDDLDIEVNDYTPSAEHLVVGEAIVEETLHSHLLKSNCPVTGQPDWGSVLIRYRGPRLDREGLLRYLISYRQHQDFHEHCVEHIFTDLLARARPERLLVMARYVRRGGLDISPWRGTPGETPPLPLRLARQ

SEQ ID NO: 46347 - protein, 276 aa, Halomonas pantelleriensis
  REGION 1..276: note = tr|A0A1G9JXD4|A0A1G9JXD4_9GAMM NADPH-dependent 7-cyano-7-deazaguanine reductase OS=Halomonas pantelleriensis OX=48727 GN=queF PE=3 SV=1
MQRPETLANAPLGRESAYPEQYDAALLYPIPRAANRAPLGIEEGALPFVGEDEWHAFEVSWLNARGKPLVAVARFRLPADSPNLIESKSWKLYLNSFNQTRFASREEVMATLECDLSAAAGTPVGVALLGVEDEALTPRPLPGECLDGLDIEIDDYTPSAAHLRVGEEIVEETLHSHLLKSNCPVTGQPDWGSVLIRYRGPRLDREGLLRYLIGYRQHQDFHEHCVEHIFMDLMAQACPERLLVLARYVRRGGLDISPWRATPGERPPEPLRLARQ

SEQ ID NO: 46348 - protein, 278 aa, Halomonas saccharevitans
  REGION 1..278: note = tr|A0A1I6YW12|A0A1I6YW12_9GAMM NADPH-dependent 7-cyano-7-deazaguanine reductase OS=Halomonas saccharevitans OX=416872 GN=queF PE=3 SV=1
MTQHRPDTLTHAPLGRESAYPEHYDAGLLYPIPRAANRAPLGIEEGALPFVGEDEWHAFEVSWLNARGKPLVAVARFRLPAESPYLIESKSWKLYLNGFNQTRFESRQAVIDTLLRDLAQAAGAPVAVELLDLDDAALAVKRLPGECLDDLDIEVTDYTPSAAHLTAGEEIVEETLTSHLLKSNCPVTGQPDWGSVLIRYRGPRLDREGLLRYLIGYRQHQDFHEHCVEHIFTDLMARAHPERLLVLARYVRRGGLDISPWRATPGERPPEPLRLSRQ

SEQ ID NO: 46349 - protein, 277 aa, Halomonas shengliensis
  REGION 1..277: note = tr|A0A1H0N4X9|A0A1H0N4X9_9GAMM NADPH-dependent 7-cyano-7-deazaguanine reductase OS=Halomonas shengliensis; OX = 419597 GN=queF PE=3 SV=1
MSRRPETLADAPLGRESAYPERYDVGLLYPIPRAANRAPLGIEEGALPFVGEDEWHAFEVSWLNARGKPVVAVARFRLPAASPYLIESKSWKLYLNGFNQSRFASRQAVIETLERDLSRAAGATVSVALFAVDDEALAPRRLPGECLDDLDIAIDDYTPSVEHLRVGDEVVEETLHSHLLKSNCPVTGQPDWGSVLIRYRGPRLDREVLLRYLVGYRQHQDFHEHCVEHIFMDLMARARPERLLVLARYVRRGGLDISPWRATLGERPPEPLRLARQ

SEQ ID NO: 46350 - protein, 277 aa, unidentified
  source 1..277: note = Halomonas songnenensis
  REGION 1..277: note = tr|A0A2T0V8C2|A0A2T0V8C2_9GAMM NADPH-dependent 7-cyano-7-deazaguanine reductase OS=Halomonas songnenensis; OX = 1176243 GN=queF PE=3 SV=1
MAHRPDTLEHAPLGRDSAYPEQYDAGLLFPIPRAANRAPLGIEEGSLPFVGEDEWHAFEVSWLNARGKPIVAVARFRLPADSPSLIESKSWKLYLNSFNQTRIESREALIETLTRDLSAAAGAPISVELLGVEDAELAPKPLPGDCLDDLDIEVSDYTPSAAHLAVSDEIVEETLHSHLLKSNCPVTGQPDWGSVLIRYKGPKLDREGLLRYLIGYRQHQDFHEHCVEHIFTDLMAHAKPIELLVLARYVRRGGLDISPWRATPGLTPPSPLRLARQ

SEQ ID NO: 46351 - protein, 277 aa, Halomonas sp.
  REGION 1..277: note = tr|A0A2N0G656|A0A2N0G656_9GAMM NADPH-dependent 7-cyano-7-deazaguanine reductase OS=Halomonas sp. es.049; OX = 1761788 GN=queF PE=3 SV=1
MNYRPDTLINAPLGQESSYPEQYDASLLYPIARAANRAPLGIDEDALPFIGADEWHAFEMSWLNQRGKPMVAVARFTLPADSSHLIESKSWKLYLNSFNQTRFASREEVVEYLTQDLSKVAGATVTVELLDVDSDALMPRPLPGECLDELDIEVDAYTPSASHLSVGDEWVEETLYSHLLKSNCPVTGQPDWGSVLIRYKGRKVEREGLLRYVIGYRQHQDFHEHCVEHIFTDLMRIAAPEELLVLARYVRRGGLDISPWRATPGMSPPGPLRLARQ

SEQ ID NO: 46352 - protein, 278 aa, Halomonas sp.
  REGION 1..278: note = tr|A0A369L4M0|A0A369L4M0_9GAMM NADPH-dependent 7-cyano-7-deazaguanine reductase OS=Halomonas sp. DQ26W; OX = 2282311 GN=queF PE=3 SV=1
MTHHRPDTLEHAPLGRESAYPEHYDAGLLYPIPRAANRAPLGIEEGSLPFVGEDEWHAFEVSWLNGRGKPIVAVARFSLPADSPNLIESKSWKLYLNSFNQTRFNSREQVIDTLARDLAQAAGAPVSVELYSVDDDALAVQHLPGECLDGLDIEIENYTPSAEHLQVAEEVVEETLYSHLLKSNCPVTGQPDWGSVLVRYRGPKLDREGLLRYLIGYRQHQDFHEHCVEHIFTDLMTRARPERLLVLARYVRRGGLDISPWRATPGERPPEPLRLARQ

SEQ ID NO: 46353 - protein, 281 aa, Halomonas subglaciescola
  REGION 1..281: note = tr|A0A1M7IGB8|A0A1M7IGB8_9GAMM NADPH-dependent 7-cyano-7-deazaguanine reductase OS=Halomonas subglaciescola OX=29571 GN=queF PE=3 SV=1
MEESHTGLEHSPLGRVATYPEHYDATLLFPLLRAENRVELGLEADDALPFVGEDEWHGFELSWLNARGKPVVAVGRFRLPADAPNLIESKSFKLYLNSFNQSRFASADDVAATLERDLTQTTGGRVGVDLLDVDDPALTPRTLPGECIDALDIDVNDYSPSADYLRAAVENAEIVEETLHSHLLKSNCPITGQPDWGSVMVRYKGPRLDREGLLRYLIGFRLQQGFHEHCVEQIFTDLMRQTAPSELLVLARYVRRGGLDISPWRATPGLLPPSPLRLARQ

SEQ ID NO: 46354 - protein, 277 aa, Halomonas subterranea
  REGION 1..277: note = tr|A0A1H9RGY3|A0A1H9RGY3_9GAMM NADPH-dependent 7-cyano-7-deazaguanine reductase OS=Halomonas subterranea; OX = 416874 GN=queF PE=3 SV=1
MPHRPETLMEAPLGRESAYPEAYDPDLLYPIPRAANRAALDIDEGRLPFVGEDEWHAFEVSWLNGRGKPVVAVARFRLPADSPNLIESKSWKLYLNSFNQTRFAHRDDVIARLTQDLAGAATAPVSVELFDVDADALAPQQLPGECLDALDIEVSDYTPSADHLTTGEQVVEETLYSHLLKSNCPVTGQPDWGSVMIRYTGPKIEREGLLRYLIGYRQHQDFHEHCVEHIFTDLMRRAKPSELLVLARYVRRGGLDISPWRATPGLAPPSPLRLARQ

SEQ ID NO: 46355 - protein, 153 aa, Halomonas sulfidaeris
  REGION 1..153: note = tr|A0A455U3R0|A0A455U3R0_9GAMM Uncharacterized protein OS=Halomonas sulfidaeris OX=115553 GN=HSBAA_18110; PE = 4 SV=1
MSVELFDVDASELSAQQLPGECLDDLDIAVSDYTPSSDHLMVGNEIVEETLYSHLLKSNCPVTGQPDWGSVLIRYKGPKLDREGLLRYLIGFRQHQDFHEHCVEHIFTDLMTQAKPTQLLVLARYVRRGGLDISPWRATPGLTPPTPLRLARQ

SEQ ID NO: 46356 - protein, 277 aa, Halomonas sulfidaeris
  REGION 1..277: note = tr|A0A365TIU1|A0A365TIU1_9GAMM NADPH-dependent 7-cyano-7-deazaguanine reductase OS=Halomonas sulfidaeris; OX = 115553 GN=queF PE=3 SV=1
MTYRPDTLENAPLGRDSAYPEQYDAGLLYPIPRAANRAPLGIEEDALPFVGEDEWHAFEVSWLNSRGKPIVAVARFRLPASSPNLIESKSWKLYLNSFNQSRFYSRQEVMETLANDLAVAAGAEVSVELFDVDASELAAQQLPGECLDDLDIAVSDYTPSSDHLVVGDEIVEETLYSHLLKSNCPVTGQPDWGSVLIRYKGPKLDREGLLRYLIGFRQHQDFHEHCVEHIFTDLMTQAKPTQLLVLARYVRRGGLDISPWRATPGLTPPTPLRLARQ

SEQ ID NO: 46357 - protein, 278 aa, Halomonas taeanensis
  REGION 1..278: note = tr|A0A328XRI4|A0A328XRI4_9GAMM NADPH-dependent 7-cyano-7-deazaguanine reductase OS=Halomonas taeanensis; OX = 284577 GN=queF PE=3 SV=1
MTHDRPETLAEAPLGRESAYPEHYDPALLYPIPRAANRAPLGITNDALPFVGEDEWHAFEVSWLTPRGKPVVAVARFRLPAESPNLIESKSWKLYLNSYNQTRFASRAEVSATLEQDLAAAAGAPVSVELFGVDDQALATQRLPGECIDDLDVEIDAYTPDPALLSVGEEVVEETLHSHLLKSNCPVTGQPDWGSVLIRYRGPQIDREGLLKYLVSYRQHQDFHEHCVEHIFTDLMARARPERLLVLARYVRRGGLDISPWRATPGERPPEPLRLARQ

SEQ ID NO: 46358 - protein, 278 aa, Halomonas taeanensis
  REGION 1..278: note = tr|A0A1G7SXG7|A0A1G7SXG7_9GAMM NADPH-dependent 7-cyano-7-deazaguanine reductase OS=Halomonas taeanensis; OX = 284577 GN=queF PE=3 SV=1
MTHDRPETLTDAPLGRESAYPEHYDPALLYPIARAANRAPLGIANDALPFVGEDEWHAFEVSWLTPRGKPVVAVARFRLPADSPNLIESKSWKLYLNSYNQTRFASRAEVSATLEQDLASAAGAPVAVELFGVDDQALATQRLPGECIDDLDVEIDAYTPDPALLSVGDEVVEETLHSHLLKSNCPVTGQPDWGSVLIRYRGPQLDREGLLKYLVSYRQHQDFHEHCVEHIFTDLMARARPERLLVLARYVRRGGLDISPWRGTPGERPPEPLRLARQ

SEQ ID NO: 46359 - protein, 277 aa, Halomonas titanicae
  REGION 1..277: note = tr|A0A558J277|A0A558J277_9GAMM NADPH-dependent 7-cyano-7-deazaguanine reductase OS=Halomonas titanicae; OX = 664683 GN=queF PE=3 SV=1
MAHRPDTLEHAPLGRDSAYPEQYNAGLLYPIPRAANRAPLGIEEGALPFVGEDEWHAFEVSWLNSRGKPIVAVARFRLPASSPHLIESKSWKLYLNSFNQTRFYSREEVVQTLANDLAVAAGAEVSVELFDVDAPELSAQRLPGECLDDLDIAVSDYTPSSAHLTVGDEVVEETLYSHLLKSNCPVTGQPDWGSVLICYKGPKIDREGLLRYLIGFRQHQDFHEHCVEHIFTDLMAQVQPTQLLVLARYVRRGGLDISPWRATPGLTPPTPLRLARQ

SEQ ID NO: 46360 - protein, 285 aa, Halomonas titanicae
  REGION 1..285: note = tr|L9U717|L9U717_9GAMM NADPH-dependent 7-cyano-7-deazaguanine reductase OS=Halomonas titanicae BH1 OX=1204738 GN=queF PE=3 SV=1
MRRESFYTMAHRPDTLEHAPLGRDSAYPEQYDAGLLYPIPRVANREPLGIEEGTLPFVGEDEWHAFEVSWLNSRGKPIVAVARFRLPAASPNLIESKSWKLYLNSFNQTRFYSRQEVMETLAHDLAVAAGAEVSVELFDVDASELSPQLLPGECLDDLDIAVSDYTPSSDHLTVGEEVVEETLYSHLLKSNCPVTGQPDWGSVLIRYKGPKIDREGLLRYLIGFRQHQDFHEHCVEHIFCDLMAQAKPTQLLVLARYVRRGGLDISPWRATPGLTPPTPLRLARQ

SEQ ID NO: 46361 - protein, 278 aa, unidentified
  source 1..278: note = Halomonas urumqiensis
  REGION 1..278: note = tr|A0A2N7UF63|A0A2N7UF63_9GAMM NADPH-dependent 7-cyano-7-deazaguanine reductase OS=Halomonas urumqiensis; OX = 1684789 GN=queF PE=3 SV=1
MTHPRPATLSNAPLGRESAYPEHYDAGLLYPIARAANRAPLGIEEDALPFVGEDEWFAFEVSWLNARGKPLVAVARFRVPADSPRLIESKSWKLYLNSFNQTRFQDRDAVIDTLRRDLEAAAGVAVDVALYGVEDPVLMPHGLPGDCIDELDIAVDDYTPSAGHLAAGEEIVEETLHSHLLKSNCPVTGQPDWGSVMIRYRGPKLDREGLLRYLIGYRQHQDFHEHCVEHIFTDLMAQARPERLLVLARYVRRGGLDISPWRATPGERPPQPMRLARQ

SEQ ID NO: 46362 - protein, 278 aa, Halomonas ventosae
  REGION 1..278: note = tr|A0A2T0VQ19|A0A2T0VQ19_9GAMM NADPH-dependent 7-cyano-7-deazaguanine reductase OS=Halomonas ventosae; OX = 229007 GN=queF PE=3 SV=1
MAHHRPDTLMHAPLGREAAYPAHYDAGLLFAIPRAANRAPLGIEEGALPFIGEDEWHAFEVSWLNTRGKPLVAVARFRLPAESPNLVESKSWKLYLNGFNQTRFESRQAVIDTLEHDLSAAAAAPVSVELFHVDDEALAVTPLPGECLDDLDIEVTDYTPCAEHLAVGEEIVEETLHSHLLKSNCPVTGQPDWGSVLIRYRGPRLDREGLLRYLIGYRQHLDFHEHCVEHIFMDLMDRTRPERLLVLARYVRRGGLDISPWRATPGERPPEPLRLSRQ

SEQ ID NO: 46363 - protein, 279 aa, Halomonas ventosae
  REGION 1..279: note = tr|A0A4R6HE95|A0A4R6HE95_9GAMM NADPH-dependent 7-cyano-7-deazaguanine reductase OS=Halomonas ventosae; OX = 229007 GN=queF PE=3 SV=1
MSHPRPDALAHAPLGHTAVYPQHYDAGLLYPIPRTANRMPLGIEEGALPFVGEDEWHAFEVSWLNARGKPRVAVARFSLPADSPNLIESKSWKLYLNGFNQTRFDSRERVMDTLVNDLSRAAGAAVGVELLDVDDEALSPRRLPGECLDDLDIEVTDYTPSAEHLRVSDEVIVEETLYSHLLKSNCPVTGQPDWGSVLIRYRGPRLDREGLLRYLIGYRQHQDFHEHCVEHIFMDLVERARPQRLLVLARYVRRGGLDISPWRATPGERPPAPLRLARQ

SEQ ID NO: 46364 - protein, 277 aa, Halomonas venusta
  REGION 1..277: note = tr|A0A3S8YQL7|A0A3S8YQL7_9GAMM NADPH-dependent 7-cyano-7-deazaguanine reductase OS=Halomonas venusta; OX = 44935 GN=queF PE=3 SV=1
MAHRPDTLEHAPLGRDSAYPEQYDAGLLYPIPRAANRAPLGIEDSKLPFVGEDEWHAFEVSWLNNRGKPIVAVARFRLPADSPSLIESKSWKLYLNSLNQTRFESREAVQRVLVRDLAAAAGASVSVELLGVDDAELAPQRLPGECLDDLDIDISDYTPSAAHLVVSEEIVEETLHSHLLKSNCPVTGQPDWGSVLIRYKGPKIDREGLLRYLIGYRQHQDFHEHCVEHIFTDLMQLAKPEELLVLARYVRRGGLDISPWRATPGLTPPSPLRLARQ

SEQ ID NO: 46365 - protein, 277 aa, Halomonas xianhensis
  REGION 1..277: note = tr|A0A4R8FPR1|A0A4R8FPR1_9GAMM NADPH-dependent 7-cyano-7-deazaguanine reductase OS=Halomonas xianhensis; OX = 442341 GN=queF PE=3 SV=1
MTHRPDTLKHAPLGRESVYPEHYDPTLLFPIARSANRAPLGIDNADLPFVGEDEWHAFEMSWLDERGKPIVAVARFRLPATSPNLIESKSWKLYLNSFNQTRFADWNAVLGTLAEDLSAAAGGGVEVSLFDLDDDALMPRKLPGECIDGLDVEISDYSPNSGLLMASEEIVEESLYSHLLKSNCPVTGQPDWGSVLIRYRGPKIDREGLLRYVVSFRQHQDFHEHCVEHIFTDLMARVRPERLLVMARYMRRGGLDISPWRGTPGERPPEPLRLARQ

SEQ ID NO: 46366 - protein, 277 aa, Halomonas xianhensis
  REGION 1..277: note = tr|A0A1I2ZJA9|A0A1I2ZJA9_9GAMM NADPH-dependent 7-cyano-7-deazaguanine reductase OS=Halomonas xianhensis; OX = 442341 GN=queF PE=3 SV=1
MTHRPDTLKHAPLGRESVYPEHYDPTLLFPIARSANRAPLGIDNADLPFVGEDEWHAFEMSWLDERGKPIVAVARFRLPATSPNLIESKSWKLYLNSFNQTRFADWNAVLGTLAEDLSAAAGGGVEVSLLDLDDDALMPRKLPGECIDGLDVEISDYSPNSRLLTASEEIVEESLYSHLLKSNCPVTGQPDWGSVLIRYRGPKIDREGLLRYVVSFRQHQDFHEHCVEHIFTDLMARVRPKRLLVMARYVRRGGLDISPWRGTPGERPPEPLRLARQ

SEQ ID NO: 46367 - protein, 165 aa, Haloplasma contractile
  REGION 1..165: note = tr|F7Q132|F7Q132_9BACT NADPH-dependent 7-cyano-7-deazaguanine reductase OS=Haloplasma contractile SSD-17B OX=1033810 GN=queF PE=3 SV=1
MAGRNEKDLDGVTLLGNQGVKYNYEYDPDILESFENKHPGNDYFVKFNAPEFTSLCPITGQPDFATIYISYVPGKLMVESKSLKLYLFSFRNHGDFHEDCMNIIMKDLIKLMDPKYIEVWGKFTPRGGISIDPYCNYGKPGTEWENVAKQRLFQHDMYPETIDNR

SEQ ID NO: 46368 - protein, 119 aa, Halorhodospira halochloris
  REGION 1..119: note = tr|A0A0X8X8Y2|A0A0X8X8Y2_HALHR NADPH-dependent 7-cyano-7-deazaguanine reductase OS=Halorhodospira halochloris OX=1052 GN=queF PE=3 SV=1
MTTDSSSLLETFTNPNPDRDYTIQMEIPEFTCLCPKTGQPDFATLKLEYIPDRLCVELKSLKLYVWSYRDTGAFHEAVTNRILNDLVTVTAPRYMKLTAEFNVRGGIWTTVVVEHPQGD

SEQ ID NO: 46369 - protein, 118 aa, Halorhodospira halophila
  REGION 1..118: note = sp|A1WY83|QUEF_HALHL NADPH-dependent 7-cyano-7-deazaguanine reductase OS=Halorhodospira halophila (strain DSM 244 / SL1) OX=349124 GN=queF PE=3; SV = 1
MSTEPSKTLETFENPNPERDYTIRMEIPEFTCLCPKTGQPDFATLNLEYIPERHCVELKSLKLYIWSYRDVGGFHEALTNQILGDLVAATQPRYMKLTAHFNVRGGIWTTVEAEHHGR

SEQ ID NO: 46370 - protein, 273 aa, Halospina denitrificans
  REGION 1..273: note = tr|A0A4R7JTJ6|A0A4R7JTJ6_9GAMM NADPH-dependent 7-cyano-7-deazaguanine reductase OS=Halospina denitrificans OX=332522 GN=DES49_1754 PE=3 SV=1
MTQDDMPLGRTTNYPESYDPELLFPVPRVDNRRELGLGQGGWPWYGEDRWQAWEISWLRPDGVPRVAVGEFRVPADSPCLIESKSFKLYLNSLNNRVFPTQVELIRTLETDLSEKAGALVSARLFPVEEMRQAQARPSEAALIDDAGGVVLPADEPLSHLVEARGERVQERLCSHLLRSLCPVTGQPDWGTLLVEYDGPRIDRGALLGYIIGFREQRDFHEHCVERIFTDLQHHLGPARLSVGAWYTRRGGLDINPWRSTDTGSAPGIRLCRQ

SEQ ID NO: 46371 - protein, 272 aa, Halospina sp.
  REGION 1..272: note = tr|A0A5J5FKY8|A0A5J5FKY8_9GAMM NADPH-dependent 7-cyano-7-deazaguanine reductase QueF OS=Halospina sp. K52047b OX=2614160 GN=queF PE=4 SV=1
MELDDAPLGRTSAYPEHYDPALLYPVARAQARESLGLADGWPWQGEDRWQAWELSWLRPDGVPRVATAEFRVPADSPNLIESKSLKLYLNAFNSTVFEGVESVRTTIERDLSEAAGAAVSVVLGDVDADAGLVARPEGAHLIDDVEGVIMPADGPLASLRSLDGDVVTESLCSHLLRSLCPVTGQPDWATLVVHYTGARMRPEALLGYVISYREARDFHEACVERIFTDLRDALTPERLSVGAFYTRRGGLDINPWRSTHQGDAPAPRLLRQ

SEQ ID NO: 46372 - protein, 284 aa, Halotalea alkalilenta
  REGION 1..284: note = tr|A0A172YH98|A0A172YH98_9GAMM NADPH-dependent 7-cyano-7-deazaguanine reductase OS=Halotalea alkalilenta; OX = 376489 GN=queF PE=3 SV=1
MNDHATHAGLDDAPLGHASSYPERYDAGLLFPIPRAANRVGLGLAPGAALPFVGLDQWQAFELSWLDPRGKPVVRLARFTVPANSPNLIESKSWKLYLNGFNQMRHAHEAEVAALLHRDLSQAAGAQVEVALFGVDDPALATVRLPGSCIDGFDVEIEDYSPNPALLRCVEDEVVEETLHSHLLKSNCPVTGQPDWGSVVVRYRGPRLVAETLLAYLVSYRNHQDFHEHCVERIFLDLLERARPERLAVMARYTRRGGLDINPCRATSRDALDPAWLDARMTRQ

SEQ ID NO: 46373 - protein, 134 aa, unidentified
  source 1..134: note = Halothece sp.
  REGION 1..134: note = tr|K9Y6A4|K9Y6A4_HALP7 NADPH-dependent 7-cyano-7-deazaguanine reductase OS=Halothece sp. (strain PCC 7418) OX=65093 GN=queF PE=3 SV=1
MAENLTNSPEMKYGEREIAEGELITFPNPRPGRRYKVDVSLPEFTCKCPFSGYPDFATINISYMPDQAIVELKAIKLYINSYRDRYISHEEAVNQILDDFVAACDPLEVTITGDFSPRGNVHTVVEVHHQQPRV

SEQ ID NO: 46374 - protein, 129 aa, unidentified
  source 1..129: note = Halothiobacillaceae bacterium
  REGION 1..129: note = tr|A0A545SB75|A0A545SB75_9GAMM NADPH-dependent 7-cyano-7-deazaguanine reductase OS=Halothiobacillaceae bacterium OX=2268194 GN=queF PE=3 SV=1
MSTRPSRELETFANPNPERDFTIRIRVPEFTCICPKTGQPDFATIFIDYIADQKCVELKALKLYMWSFREEGGFHEAMTNRILTDLVEATDPRYMRVTGEWNVRGGVYTTVVAEHRQEGWLPPVKVELP

SEQ ID NO: 46375 - protein, 129 aa, Halothiobacillus neapolitanus
  REGION 1..129: note = tr|D0KWM7|D0KWM7_HALNC NADPH-dependent 7-cyano-7-deazaguanine reductase OS=Halothiobacillus neapolitanus (strain ATCC 23641 / c2) OX=555778 GN=queF; PE = 3 SV=1
MSTQPSKTLETFPNPFPDRDYTIHMTIPEFTCLCPKTGQPDFATITLDFVPDQLCVELKSLKTYMWSFREEGGFHEAMTNGILNDLVAAISPRFMRVTGEWNVRGGIYTNVVVEHRQPGWTPAPKIDLP

SEQ ID NO: 46376 - protein, 129 aa, Halothiobacillus sp.; identical to SEQ ID NO: 46375
  REGION 1..129: note = tr|A0A259S643|A0A259S643_9GAMM NADPH-dependent 7-cyano-7-deazaguanine reductase OS=Halothiobacillus sp. 13-55-253 OX=1970379 GN=queF PE=3 SV=1

SEQ ID NO: 46377 - protein, 129 aa, Halothiobacillus sp.
  REGION 1..129: note = tr|A0A191ZHC4|A0A191ZHC4_9GAMM NADPH-dependent 7-cyano-7-deazaguanine reductase OS=Halothiobacillus sp. LS2 OX=1860122 GN=queF PE=3 SV=1
MSTQPSKTLETFPNPYPNRDYTIHMRVPEFTCLCPKTGQPDFATILIDFVPDQLCVELKSLKLYMWSFREEGGFHEAVTNGILDDIVQAISPRFIRVTGEWNVRGGVYTNVVVEYRKPDWQPAPRVELP

SEQ ID NO: 46378 - protein, 272 aa, Halovibrio sp.
  REGION 1..272: note = tr|A0A2A2F4J1|A0A2A2F4J1_9GAMM NADPH-dependent 7-cyano-7-deazaguanine reductase OS=Halovibrio sp. YL5-2; OX = 2032626 GN=queF PE=3 SV=1
MELDDAPLGRTSAYPEHYDPALLYPVARAQAREPLGLADGWPWQGEDRWQAWELSWLRPDGVPRVATAEFRVPADSPNLIESKSLKLYLNAFNSTVFEGVESVRTTIERDLSEAAGAAVSVVLGDVDADAGLVARPEGAHLIDNVEGVIMPDDGPLASLRSLDGDVVTETLCSHLLRSLCPVTGQPDWATLVVHYTGARIRPEALLGYVISYREARDFHEACVERIFTDLRNTLTPERLSVGAFYTRRGGLDINPWRSTHQGDAPAPRLLRQ

SEQ ID NO: 46379 - protein, 277 aa, unidentified
  source 1..277: note = Halovibrio variabilis
  REGION 1..277: note = tr|A0A511USR8|A0A511USR8_9GAMM NADPH-dependent 7-cyano-7-deazaguanine reductase OS=Halovibrio variabilis; OX = 31910 GN=queF PE=3 SV=1
MSHRPDTLEHAPLGRDAVYPEQYDAGLLYPIPRAANRAPLGIEEGALPFVGEDEWHAFEVSWLNERGKPIVAVARFRLPADSPHLIESKSWKLYLNSFNQTRFYSREEVMQTLANDLSGAAGAAVSAELFDVDAAELAPQRLPGDCLDDLDILVSDYTPTSGHIAIGEEIVEETLYSHLLKSNCPVTGQPDWGSVMIRYKGPKIDREGLLRYLVSYRQHQDFHEHCVEHIFTDLMAHAKPTQLLVLARYVRRGGLDISPWRATPGLTPPTPLRLARQ

SEQ ID NO: 46380 - protein, 280 aa, unidentified
  source 1..280: note = Hamiltonella defensa
  REGION 1..280: note = tr|C4K591|C4K591_HAMD5 NADPH-dependent 7-cyano-7-deazaguanine reductase OS=Hamiltonella defensa subsp. Acyrthosiphon pisum (strain 5AT) OX=572265; GN = queF_1 PE=3 SV=1
MQDNDGIYAKHLGEKSDYIETYTPSLLEPVPRAFGREKIGLIDDTLPFDGFDLWTAFELSWLNQKGKPMVGMAEFKVPAQSKNLIESKSLKLYLNSLNQSHFDSSEALQSVLSKDLSNAAMGAVSVTVFEGMKNDDLHIHHPEGVNIDDIDIQVDDYRFNEGYLKDATQETAPFVSETLMSHLLKSNCLVTHQPDWGSVFIKYEGNKIDREKLLRYIISFRQHHEFHEQCVERIFLDIKKYCRPEKLTVFARYTRRGGLDINPFRSNYESIPNIKRLIRQ

SEQ ID NO: 46381 - protein, 280 aa, unidentified
  source 1..280: note = Hamiltonella defensa
  REGION 1..280: note = tr|C4K6F2|C4K6F2_HAMD5 NADPH-dependent 7-cyano-7-deazaguanine reductase OS=Hamiltonella defensa subsp. Acyrthosiphon pisum (strain 5AT) OX=572265; GN = queF_2 PE=3 SV=1
MHDNEDVYSKYLGKKSDYIDTYTPSLLEPVPRVLGRKKIGLMDDTLPFDGFDLWTAFELSWLNQKGKPMVGMAEFKIPAQSKNLIESKSLKLYLNSLNQSHFDSSEALQSVLSKDLSNAAVGAVYITVSEGMKNDDLHIHHPEGVNIDDIDIEVPDYRFNEGYLKDATQETAPFVSETLMSHLLKSNCLVTHQPDWGSVFIKYEGHPIDKEKLLRYIISFRQHHEFHEQCVERIFMDIKKYCRPEKLTVFARYTRRGGLDINPFRSDYESSFNVGRLIRQ

SEQ ID NO: 46382 - protein, 273 aa, unidentified
  source 1..273: note = Handelsmanbacteria sp.
  REGION 1..273: note = tr|A0A1F6C5F0|A0A1F6C5F0_HANXR NADPH-dependent 7-cyano-7-deazaguanine reductase QueF; OS = Handelsmanbacteria sp. (strain RIFCSPLOWO2_12_FULL_64_10) OX=1817868 GN=A3F84 _01090 PE=3; SV = 1
MNSAWSQAPPGRRTGFVSAYTPGLLFPVSRRPKREEVCVPEPLPFRGCDIWNAYELSWLNPGGRPEVAIAEFRVPCDSECLVESKSFKLYLNSFCQSKFPGRDEVEATLAKDLAGATGSEVSVSLFLPEQFSHQRLSGFGGICLDRLSVRIERYTVQPDFLRAGGEVVEEALYSHLLKSNCPVTGQPDWGSVLFHYVGRQIDREGLLKYVVSFREHQEFHEHCVERMFMDILRRCEPERLTVYARYTRRGGLDINPFRSNWEEAPENVRLARQ

SEQ ID NO: 46383 - protein, 148 aa, Hansschlegelia sp.
  REGION 1..148: note = tr|A0A4Q9GLE5|A0A4Q9GLE5_9RHIZ NADPH-dependent 7-cyano-7-deazaguanine reductase OS=Hansschlegelia sp. Dub; OX = 2528245 GN=queF PE=3 SV=1
MTDLQLGRDVGLPASPETASLDRVPNPHRDVDYVVRFAAPEFTSLCPVTGQPDFAHLVIDYVPDEWLVESKSLKLFLGSFRNHGAFHEDCTVAIGKRLMETLKPRWLRIGGYWYPRGGIPIDVFWQTGDAPAGVWIPDQGVPSYRGRG

SEQ ID NO: 46384 - protein, 148 aa, Hansschlegelia zhihuaiae
  REGION 1..148: note = tr|A0A4Q0MKF3|A0A4Q0MKF3_9RHIZ NADPH-dependent 7-cyano-7-deazaguanine reductase OS=Hansschlegelia zhihuaiae OX=405005 GN=queF PE=3 SV=1
MSDLQLGKPVSLPASPDEAELDRVPNPHPDVDYVARFTAPEFTSLCPVTGQPDFAHLVIDYVPAEWLVESKSLKLYLGAFRNHGAFHEDCTVAIAKRLIAALAPKWLRIGGYWYPRGGIPIDVFFQQGELPKGVWAPDQGVAPYRGRG

SEQ ID NO: 46385 - protein, 140 aa, Hapalosiphon sp.
  REGION 1..140: note = tr|A0A0M0SI82|A0A0M0SI82_9CYAN NADPH-dependent 7-cyano-7-deazaguanine reductase OS=Hapalosiphon sp. MRB220 OX=1704290 GN=queF PE=3 SV=1
MSNSLSESVSQPSQEMKYGEREIAEGQLTTFPNPRIGRRYNIDITLPEFTCKCPFSGYPDFATIHITYIPDQLVVELKALKLYINSYRDRYISHEESANQILDDFVTACDPLEITVKADFAPRGNVHTVIEVRHVKSESQ

SEQ ID NO: 46386 - protein, 140 aa, unidentified
  source 1..140: note = Hapalosiphonaceae cyanobacterium
  REGION 1..140: note = tr|A0A328IFH0|A0A328IFH0_9CYAN NADPH-dependent 7-cyano-7-deazaguanine reductase OS=Hapalosiphonaceae cyanobacterium JJU2 OX=2109628 GN=queF PE=3 SV=1
MSNSLSESVSQPSQEMKYGEREIAEGQLITFPNPRIGRRYNIDITLPEFTCKCPFSGYPDFATIHITYIPDQLVVELKALKLYINSYRDRYISHEESANQILDDFVAACDPLEITLKADFAPRGNVHTVIEVHHVKSESQ

SEQ ID NO: 46387 - protein, 153 aa, unidentified
  source 1..153: note = Hartmannibacter diazotrophicus
  REGION 1..153: note = tr|A0A2C9D4C6|A0A2C9D4C6_9RHIZ NADPH-dependent 7-cyano-7-deazaguanine reductase OS=Hartmannibacter diazotrophicus OX=1482074 GN=queF PE=3 SV=1
MTTLDPASVKLGKHTDIPTEPSADILDRVPNPHPDTTYVARFTAPEFTSLCPVTGQPDFAHLVIDYVPNAWLVESKSLKLYLFSFRNHGAFHEGCTVEIGKALNDLLKPHWLRIGGYWYPRGGIPIDVFWQSGPVPEGIWLPDQGVPTYRGRG

SEQ ID NO: 46388 - protein, 160 aa, unidentified
  source 1..160: note = Hathewaya proteolytica
  REGION 1..160: note = tr|A0A1M6N5L0|A0A1M6N5L0_9CLOT NADPH-dependent 7-cyano-7-deazaguanine reductase OS=Hathewaya proteolytica DSM 3090 OX=1121331 GN=queF PE=3 SV=1
MRKDLNLNLLGNEDIKYSFGYTPEVLETFDNKHPHNDYFVKFNCPEFTSLCPITSQPDFATIYISYVPDLKMVESKSLKLYLFSFRNHGDFHEDCMNIIMKDLIKLMDPKYIEVWGKFTPRGGISIDPYCNYGKPGTPWESIAFNRLANHDIYPEKVDNR

SEQ ID NO: 46389 - protein, 148 aa, Helicobacter acinonychis
  REGION 1..148: note = sp|Q17ZN4|QUEF_HELAH NADPH-dependent 7-cyano-7-deazaguanine reductase OS=Helicobacter acinonychis (strain Sheeba) OX=382638 GN=queF PE=3 SV=1
MSSELNLKLLGTKTPYIFEYNKDLLEAFPNPNPNLDPLITLECKEFTSLCPITSQPDFGVVYIRYIPKDKMVESKSLKLYLFSYRNHGSFHESCINTILLDLVGLLEPKYLEVYGDFVSRGGIAIKPFVNYAIKEYQDFKEKRLLGAK

SEQ ID NO: 46390 - protein, 146 aa, unidentified
  source 1..146: note = Helicobacter ailurogastricus
  REGION 1..146: note = tr|A0A0K2X4D1|A0A0K2X4D1_9HELI NADPH-dependent 7-cyano-7-deazaguanine reductase OS=Helicobacter ailurogastricus OX=1578720 GN=queF PE=3 SV=1
MPNYNLHHLGQKTPYIDKYDPTLLEAFANPHPNLDIFTRLVSAEFTSLCPITAQPDFATIYINYIAGAKMVESKSLKLYLFSFRNEGMFGEDCVGKILNDLVALLEPKYLEVLAKFTKRGSLAIEPFTNYAIPDYGDLKRQRLMKY

SEQ ID NO: 46391 - protein, 157 aa, Helicobacter anseris
  REGION 1..157: note = tr|A0A3D8J404|A0A3D8J404_9HELI NADPH-dependent 7-cyano-7-deazaguanine reductase OS=Helicobacter anseris; OX = 375926 GN=queF PE=3 SV=1
MANLTLLGSKTTNYDFKYNPDILEVFDNRHFENDYFVKFNCPEFTSLCPMTGQPDFATIYINYIPNLKMVESKSLKLYLFSFRNHGDFHENCVNVIMKDLIKIMEPRYIEVCGKFLPRGGISIDPYVNYGIPDTKYAEMAHYRLLHHDLNFEKVDNR

SEQ ID NO: 46392 - protein, 151 aa, unidentified
  source 1..151: note = Helicobacter apodemus
  REGION 1..151: note = tr|A0A4U8UE08|A0A4U8UE08_9HELI NADPH-dependent 7-cyano-7-deazaguanine reductase OS=Helicobacter apodemus; OX = 135569 GN=queF PE=3 SV=1
MKTKIPFKSLGKKTSYTFNYDFNLLETFENSHQDRDYWVHFSCPEFTTLCPITGQPDFATISIAYIPQTKMVESKSLKLYLFSFRNEGGFHEDCVNIILKDLIKLLEPKYLEVLGDFTPRGGISINPYVNYGIPSTKYEEMANFRLLHHNL

SEQ ID NO: 46393 - protein, 98 aa, unidentified
  source 1..98: note = Helicobacter apodemus
  REGION 1..98: note = tr|A0A2U8FDY3|A0A2U8FDY3_9HELI NADPH-dependent 7-cyano-7-deazaguanine reductase OS=Helicobacter apodemus; OX = 135569 GN=queF PE=3 SV=1
MKTKIPFKSLGKKTSYTFNYDFNLLETFENAHQDRDYWVDFVCPEFTTLCPITGQPDFATIRINYIPQAKMVESKSLKLYLFSFRNEGGFHEDCVQYV

SEQ ID NO: 46394 - protein, 167 aa, Helicobacter aurati
  REGION 1..167: note = tr|A0A3D8J6K6|A0A3D8J6K6_9HELI NADPH-dependent 7-cyano-7-deazaguanine reductase OS=Helicobacter aurati; OX = 137778 GN=queF PE=3 SV=1
MKKNSTTKHQKIGKLHSLGKKTHYHFTYNPQILESVPNPHPQVDYFVKFNCPEFTALCPITGQPDFATIYLSYIPDRKIVESKSLKLYLFSFRNHGGFHEDCINIIAQDLIKILDPRYLEVWGKFTPRGGLSIDPYVNYGKKGTKFVKMARKRLLLHDLYPETITNR

SEQ ID NO: 46395 - protein, 161 aa, Helicobacter bilis
  REGION 1..161: note = tr|N2BIV0|N2BIV0_9HELI NADPH-dependent 7-cyano-7-deazaguanine reductase OS=Helicobacter bilis WiWa OX=1235804 GN=queF PE=3 SV=1
MAKQKQYDLKQLGKETIYTFSYDPNVLESVPNPHPQRDYFIKFNCPEFTSLCPITGQPDFATLYISYIADKLIVESKSLKLYLFSFRNHGGFHEDCVNTIADDLINLLSPRYLEVWGKFTPRGGLSIDPYVNYGKEKSVYAKMAKKRLWLHDLYPETITNR

SEQ ID NO: 46396 - protein, 161 aa, Helicobacter bilis; identical to SEQ ID NO: 46395
  REGION 1..161: note = tr|A0A4U8TPN3|A0A4U8TPN3_9HELI NADPH-dependent 7-cyano-7-deazaguanine reductase OS=Helicobacter bilis; OX = 37372 GN=queF PE=3 SV=1

SEQ ID NO: 46397 - protein, 146 aa, Helicobacter bizzozeronii
  REGION 1..146: note = tr|F8KS13|F8KS13_HELBC NADPH-dependent 7-cyano-7-deazaguanine reductase OS=Helicobacter bizzozeronii (strain CIII-1) OX=1002804 GN=queF PE=3 SV=1
MPESLSHLGGKTSYPITYSPHLLEAFDNPHPGQDIFTCLESQEFTSLCPITAQPDFARVRIAYIAHLKMVESKSLKLYLFSFRNEGVFGEDCVGKILNDLVALLEPRYLEVQAHFSARGGITITPFANYATPDYMDFKQQRLLQCL

SEQ ID NO: 46398 - protein, 146 aa, Helicobacter bizzozeronii
  REGION 1..146: note = tr|H5VDD2|H5VDD2_HELBI NADPH-dependent 7-cyano-7-deazaguanine reductase OS=Helicobacter bizzozeronii CCUG 35545 OX=1002805 GN=queF PE=3 SV=1
MLESLSHLGGKTSYPTTYNPHLLEAFENPHPGQDIFTALESAEFTSLCPITAQPDFARVRIAYIAHLKMVESKSLKLYLFSFRNEGVFGEDCVGKILNDLVTLLEPKYLEVQAHFSARGGITITPFANYATPDYMGFKQQRLLQCL

SEQ ID NO: 46399 - protein, 155 aa, Helicobacter canadensis
  REGION 1..155: note = tr|C5ZV74|C5ZV74_9HELI NADPH-dependent 7-cyano-7-deazaguanine reductase OS=Helicobacter canadensis MIT 98-5491 OX=537970 GN=queF PE=3 SV=1
MELKQLGKQTNYIFQYNKEVLETFENKHSKRDYFVKFNCPEFTSLCPITGQPDFATIYISYIPNLKMVESKSLKLYLFSFRNHGGFHEDCVNVILDDLVELMEPKYIEVWGKFTPRGGISIDPYVNYGIPNTKYAEIAEFRLLNHDLYPEKIDNR

SEQ ID NO: 46400 - protein, 159 aa, Helicobacter canis
  REGION 1..159: note = tr|V8CHV2|V8CHV2_9HELI NADPH-dependent 7-cyano-7-deazaguanine reductase OS=Helicobacter canis NCTC 12740 OX=1357399 GN=queF PE=3 SV=1
MSNHTNYDVKALGSHTTYEHNYAPSLLEAVPNPHPDTAYFVKFNCPEFTSLCPITGQPDFATIYISYIPDALIVESKSLKLYLFSFRNHGAFHEDCINLILKDLNKLLEPHYIEVWGKFLPRGGLSIDPYCNHGKGQYQQMAQMRLANHDLYPETITNR

SEQ ID NO: 46401 - protein, 157 aa, Helicobacter canis
  REGION 1..157: note = tr|A0A377J6C8|A0A377J6C8_9HELI NADPH-dependent 7-cyano-7-deazaguanine reductase OS=Helicobacter canis; OX = 29419 GN=queF PE=3 SV=1
MANDLDLKALGSRTTYEHNYAPSLLEAVPNPHPDVAYFVKFNCPEFTSLCPITGQPDFATIYISYIPDTLIVESKSLKLYLFSFRNHGAFHEDCMNLILKDLNKLLEPHYIEVWGKFLPRGGLSIDPYCNYGKGQYQQMAQMRLANHDLYPETITNR

SEQ ID NO: 46402 - protein, 150 aa, Helicobacter cetorum
  REGION 1..150: note = tr|I0EL49|I0EL49_HELC0 NADPH-dependent 7-cyano-7-deazaguanine reductase OS=Helicobacter cetorum (strain ATCC BAA-429 / MIT 00-7128) OX=182217 GN=queF PE=3; SV = 1
MQENNELNLKSLGTKTPYIFEYNKDLLEAFPNPNPNLEPLITLECKEFTSLCPITAQPDFGTIYIRYIPKDKMVESKSLKLYLFSYRNCGNFHESCINTILLDLVELLEPKYLEVYGDFVSRGGIAIKPFVNYALKEYQDFKEKRLLNTK

SEQ ID NO: 46403 - protein, 150 aa, Helicobacter cetorum
  REGION 1..150: note = tr|I0EQE2|I0EQE2_HELCM NADPH-dependent 7-cyano-7-deazaguanine reductase OS=Helicobacter cetorum (strain ATCC BAA-540 / MIT 99-5656) OX=1163745 GN=queF; PE = 3 SV=1
MNPHNELNLKSLGTKTPYIFEYNKDLLEAFPNPNPNLEPLITLECKEFTSLCPITAQPDFGTIYIRYIPKDKMVESKSLKLYLFSYRNHGSFHESCINTILLDLVELLEPKYLEVYGDFVSRGGIAIKPFVNYALKEYQDFKEKRLLSIK

SEQ ID NO: 46404 - protein, 145 aa, Helicobacter felis
  REGION 1..145: note = tr|E7A8Z8|E7A8Z8_HELFC NADPH-dependent 7-cyano-7-deazaguanine reductase OS=Helicobacter felis (strain ATCC 49179 / NCTC 12436 / CS1) OX=936155 GN=queF; PE = 3 SV=1
MLENLSHLGSKTSYPTTYSPHLLEAFENPHPGQDIFTTLESEEFTSLCPITAQPDFARVRIAYIAHLKMVESKSLKLYLFSFRNEGVFGEDCVGKILNDLVALLEPKYLEVHAHFSARGGITITPFANYATPDYADFKRQRLLKI

SEQ ID NO: 46405 - protein, 163 aa, Helicobacter ganmani
  REGION 1..163: note = tr|A0A3D8IBP8|A0A3D8IBP8_9HELI NADPH-dependent 7-cyano-7-deazaguanine reductase OS=Helicobacter ganmani; OX = 60246 GN=queF PE=3 SV=1
MPKKQTPQESLTHLGNKTQYVFTYDKSLLETFENQFTERDYFIKFNCPEFTSLCPITGQPDFATIYISYIPDKKMLESKSLKLYLFSFRNHGGFHEDCVNRILEDLVELMQPRYLEVWGKFLPRGGISIDPYANYGIPKTKYQEMAEYRLTHHDLLLEKVDNR

SEQ ID NO: 46406 - protein, 146 aa, Helicobacter heilmannii
  REGION 1..146: note = tr|A0A0K2XM73|A0A0K2XM73_HELHE NADPH-dependent 7-cyano-7-deazaguanine reductase OS=Helicobacter heilmannii OX=35817 GN=queF PE=3 SV=1
MPSYDLHYLGAKTPYIDKYDPTLLEAFANPHPSLDIFTRLVSAEFTSLCPITAQPDFATIYINYIAGAKMVESKSLKLYLFSFRNEGMFGEDCVGKILNDLVALLQPKYLEVLAKFTKRGSIALEPFANHAAPGYEDLKRQRLARY

SEQ ID NO: 46407 - protein, 90 aa, Helicobacter heilmannii
  REGION 1..90: note = tr|A0A0K2XRL6|A0A0K2XRL6_HELHE NADPH dependent preQ0 reductase OS=Helicobacter heilmannii OX=35817; GN = HHE03_08820 PE=4 SV=1
MLQAVSIYTQGDGKHWKDDEMVAVMLDIARTSLQMLGKDFILNDLVALLEPKYLEVLAKFTKRGSLAIEPFTNYAIPDYGDLKRQRLMKY

SEQ ID NO: 46408 - protein, 160 aa, unidentified
  source 1..160: note = Helicobacter macacae
  REGION 1..160: note = tr|V8CDJ3|V8CDJ3_9HELI NADPH-dependent 7-cyano-7-deazaguanine reductase OS=Helicobacter macacae MIT 99-5501 OX=1357400 GN=queF PE=3 SV=1
MPPKNPSKTQNKPTNKSPIKNAKSTKQSNRYGEKQIQNFTVQKDLELWQNTAPNDYIIKITLPEFCCLCPRSGYPDFATLRLEYIPDKWLVELKAIKLYINSFMSRHISHEASINEIYSTLKSKLKPKWIKLTAEFNPRGNVHTTIEVRSDLVVPKKPKF

SEQ ID NO: 46409 - protein, 158 aa, Helicobacter marmotae
  REGION 1..158: note = tr|A0A3D8I210|A0A3D8I210_9HELI NADPH-dependent 7-cyano-7-deazaguanine reductase OS=Helicobacter marmotae; OX = 152490 GN=queF PE=3 SV=1
MSKHQRENENLTLLGSNGVVYPTDYDPKILEAFENKHKDNDYFVTFNCPEFTSLCPITAQPDFAHITISYIPAKKMVESKSLKLYLFSFRNHGDFHEDCINIIMKDLRDLLLPKYIEVYGRFTPRGGISIDPFVNYAIPHSPYEEMARYRLSNHRLKP

SEQ ID NO: 46410 - protein, 168 aa, Helicobacter muridarum
  REGION 1..168: note = tr|A0A099TWS1|A0A099TWS1_9HELI NADPH-dependent 7-cyano-7-deazaguanine reductase OS=Helicobacter muridarum; OX = 216 GN=queF PE=3 SV=1
MQESKQETRKTERKPKLRSLGQDTKYDFNYNPDILETVPNPHPDNDYFIKFNCPEFTSLCPITGQPDFATIYISYIPNNKIVESKSLKLYLFSFRNHGGFHEDCVNVIAKDLIAILEPRYLEVWGKFLPRGGLSIDPYVNYGNGKRFAKMAKKRLLLHDIYPEIITNR

SEQ ID NO: 46411 - protein, 157 aa, Helicobacter mustelae
  REGION 1..157: note = tr|D3UGN9|D3UGN9_HELM1 NADPH-dependent 7-cyano-7-deazaguanine reductase OS=Helicobacter mustelae (strain ATCC 43772 / LMG 18044 / NCTC 12198 / 12198); OX = 679897 GN=qu eF PE=3 SV=1
MKDLSLLGKQDVEYAFHYNPKILETFENRHKENDYFVKFNCPEFTSLCPMTGQPDFATIYINYIPQHKMVESKSLKLYLFSFRNHGDFHENCVNVIMKDLIGVMEPKFIEVWGKFLPRGGISIDPYANYGLPNTKYEEMAHYRLLHHDLSFEKIDNR

SEQ ID NO: 46412 - protein, 156 aa, Helicobacter pametensis
  REGION 1..156: note = tr|A0A3P6LQX3|A0A3P6LQX3_9HELI NADPH-dependent 7-cyano-7-deazaguanine reductase OS=Helicobacter pametensis OX=95149 GN=queF PE=3 SV=1
MRNKEELGGLSLLGNTGTQYPSTYAPEILEAFDNKHPGNDYFVKFACPEFTSLCPLTGQPDFATILIRYIPDIKMVESKSLKLYLFSFRNHGDFHEDCINIIMKDLIKLMNPKYIEVFGEFTPRGGIAIHPFANYGRPGTPFEQMARERLFTHDMQ

SEQ ID NO: 46413 - protein, 155 aa, Helicobacter pullorum
  REGION 1..155: note = tr|A0A1C0W033|A0A1C0W033_9HELI NADPH-dependent 7-cyano-7-deazaguanine reductase OS=Helicobacter pullorum; OX = 35818 GN=queF PE=3 SV=1
MKLKQLGKQIEYTFDYNKKLLETFENKHSNRDYFVKFNCPEFTSLCPITGQPDFATIYISYIPDIKMVESKSLKLYLFSFRNHGGFHEDCVNTILNDLVELMEPKYIEVWGKFTPRGGISIDPYVNYGIPNTQYEEMARYRLLNHDLYPEKIDNR

SEQ ID NO: 46414 - protein, 155 aa, Helicobacter pullorum
  REGION 1..155: note = tr|A0A448TLW1|A0A448TLW1_9HELI NADPH-dependent 7-cyano-7-deazaguanine reductase OS=Helicobacter pullorum; OX = 35818 GN=queF PE=3 SV=1
MKLKQLGKQIEYTFDYNKKLLETFENKHSNRDYFVKFNCPEFTSLCPITGQPDFATIYISYIPNIKMVESKSLKLYLFSFRNHGGFHEDCVNTILNDLVELMEPRYIEVWGKFTPRGGISIDPYVNYGIPNTKYEEMARYRLLNHDLYPEKIDNR

SEQ ID NO: 46415 - protein, 148 aa, Helicobacter pylori
  REGION 1..148: note = tr|J0GLC4|J0GLC4_HELPX NADPH-dependent 7-cyano-7-deazaguanine reductase OS=Helicobacter pylori Hp P-11b OX=992106 GN=queF PE=3 SV=1
MTPESNLKSLGTKTPYIFEYNSQLLEAFPNPNPNLDPLITLECKEFTSLCPITSQPDFGVIYIRYIPKDKMVESKSLKLYLFSYRNHGSFHESCINTILLDLVQLLEPKYLEVYGDFASRGGIAIKPFVNYAIKEYQDFKEKRLLNAK

SEQ ID NO: 46416 - protein, 148 aa, Helicobacter pylori
  REGION 1..148: note = tr|M3PUG5|M3PUG5_HELPX NADPH-dependent 7-cyano-7-deazaguanine reductase OS=Helicobacter pylori GAM93Bi OX=1159057 GN=queF PE=3 SV=1
MTPESNLKSLGAKTPYIFEYNSDLLEAFPNPNPNLDPLITLECKEFTSLCPITSQPDFGVIFIRYIPKDKMVESKSLKLYLFSYRNHGSFHESCINTILLDLVQLLEPKYLEVCGDFASRGGIAIKPFVNYAIKEYQDFKEKRLLNAK

SEQ ID NO: 46417 - protein, 156 aa, unidentified
  source 1..156: note = Helicobacter saguini
  REGION 1..156: note = tr|A0A347VPM1|A0A347VPM1_9HELI NADPH-dependent 7-cyano-7-deazaguanine reductase OS=Helicobacter saguini; OX = 1548018 GN=queF PE=3 SV=1
MKDLKHLGKETTYNFDYNPDVLESVPNPHPQNDYFIKFNCPEFTVLCPITGQPDFAAMYLSYIPDTLIVESKSLKLYLFSYRNHGGFHEDCVNRIATDLIRLLQPRYLEVWGKFTPRGGLSIDPYVNYGKPNTPFVEMAKQRLWNHDLYPENINNR

SEQ ID NO: 46418 - protein, 159 aa, Helicobacter sp.
  REGION 1..159: note = tr|A0A268U5H1|A0A268U5H1_9HELI NADPH-dependent 7-cyano-7-deazaguanine reductase OS=Helicobacter sp. 13S00477-4 OX=1905759 GN=queF PE=3 SV=1
MNNHKFNLLGKQDTKYDFSYNPDILEVFENKHLGNDYFVKFNCPEFSSLCPITSQPDFATLYISYIPARKMVESKSLKLYLFSFRNHGDFHEDCMNIILKDLINVMEPKYIEVWGKFTPRGGISIDPYVNYGIPDTKYEQMAEYRLLNHDLYPEKIDNR

SEQ ID NO: 46419 - protein, 160 aa, Helicobacter sp.
  REGION 1..160: note = tr|A0A268TCJ4|A0A268TCJ4_9HELI NADPH-dependent 7-cyano-7-deazaguanine reductase OS=Helicobacter sp. 11S02596-1 OX=1476194 GN=queF PE=3 SV=1
MDKKNQLHLLGNQNICYRFDYNPEILETFQNKHVENDYFVKFNCPEFTSLCPITNQPDFASITISYIPDVKMVESKSLKLYLFSFRNHGDFHEDCINIIMKDLIKLMQPRYIEVWGKFTPRGGISIDPYANYGKPGTKYEAMANHRLINHDLNPEKIDNR

SEQ ID NO: 46420 - protein, 139 aa, Helicobacter suis
  REGION 1..139: note = tr|E7G535|E7G535_9HELI NADPH-dependent 7-cyano-7-deazaguanine reductase OS=Helicobacter suis HS5; OX = 710394 GN=queF PE=3 SV=1
MGHKTPYIDKYDPSLLEAFDNPHPHLDIFTRLYTEEFTSLCPITSQPDFASLSINYIAHLKMVESKSLKLYLFSFRNEGMFGEDCAGKILNDLVALLKPKYLEVQAKFSKRGSIALEPFVSYAIKDYQTLKQQRLARIY

SEQ ID NO: 46421 - protein, 145 aa, Helicobacter suis
  REGION 1..145: note = tr|A0A510HAS4|A0A510HAS4_9HELI NADPH-dependent 7-cyano-7-deazaguanine reductase OS=Helicobacter suis; OX = 104628 GN=queF PE=3 SV=1
MQGLSHLGHKTPYIDKYDPSLLEAFDNPHPHLDIFTRLYTEEFTSLCPITSQPDFASLSINYIAHLKMVESKSLKLYLFSFRNEGMFGEDCAGKILNDLVALLKPKYLEVQAKFSKRGSIALEPFVSYAIKDYQTLKQQRLARIY

SEQ ID NO: 46422 - protein, 163 aa, Helicobacter trogontum
  REGION 1..163: note = tr|A0A4U8SAH7|A0A4U8SAH7_9HELI NADPH-dependent 7-cyano-7-deazaguanine reductase OS=Helicobacter trogontum; OX = 50960 GN=queF PE=3 SV=1
MAKQKEIQYNLKQLGKETAYTFSYDPSVLESVPNPHPQRDYFIKFNCPEFTSLCPITAQPDFATIYISYIADKLIVESKSLKLYLFSFRNHGGFHEDCVNTIADDLIRLLSPRYLEVWGKFTPRGGLSIDPYVNYGRENSIYAKLAKKRLWLHDLYPETITNR

SEQ ID NO: 46423 - protein, 163 aa, Helicobacter trogontum
  REGION 1..163: note = tr|A0A4U8TGX4|A0A4U8TGX4_9HELI NADPH-dependent 7-cyano-7-deazaguanine reductase OS=Helicobacter trogontum; OX = 50960 GN=queF PE=3 SV=1
MAKQKEIQYNLKQLGKETTYTFSYDPSVLESVPNPHPQRDYFIKFNCPEFTSLCPITAQPDFATVYISYIADKLIVESKSLKLYLFSFRNHGGFHEDCVNTIADDLIRLLSPRYLEVWGKFTPRGGLSIDPYVNYGRENSIYAKLAKKRLWLHDLYPETITNR

SEQ ID NO: 46424 - protein, 155 aa, unidentified
  source 1..155: note = Helicobacter valdiviensis
  REGION 1..155: note = tr|A0A2W6MTE1|A0A2W6MTE1_9HELI NADPH-dependent 7-cyano-7-deazaguanine reductase OS=Helicobacter valdiviensis OX=1458358 GN=queF PE=3 SV=1
MALKALGNQSEYHFNYDSNLLETFTNPHQNRDYFVKFNCPEFTSLCPITNQPDFATIYISYIPDIKMVESKSLKLYLFSFRNHGGFHEDCVNTIMQDLINLLDPRYIEVWGKFTPRGGISIDPYANYGKVGTKYEEMAHYRLLNHDLYPETIDNR

SEQ ID NO: 46425 - protein, 156 aa, unidentified
  source 1..156: note = Helicobacter winghamensis
  REGION 1..156: note = tr|A0A2N3PKY5|A0A2N3PKY5_9HELI NADPH-dependent 7-cyano-7-deazaguanine reductase OS=Helicobacter winghamensis OX=157268 GN=queF PE=3 SV=1
MESLKHLGTSTQYVFSYDKNLLETFENKHKERDYFVKFNCPEFTSLCPITGQPDFATIYISYIPELKMVESKSLKLYLFSFRNHGEFHEDCVNTILNDLVELMQPRYLEVWGKFTPRGGISIDPYANYGIPNTKYAKMAEYRLLNHDLYPENIDNR

SEQ ID NO: 46426 - protein, 119 aa, unidentified
  source 1..119: note = Helicobacteraceae bacterium
  REGION 1..119: note = tr|A0A1J5FJY2|A0A1J5FJY2_9HELI Uncharacterized protein OS=Helicobacteraceae bacterium CG2_30_36_10; OX = 1805215 GN=AUK54_04135 PE=4 SV=1
MTLRKIAIKENSNIEYSSPELLFLGSSGQPYRGSLYIRFISKGETFDLRDFKQYITSLRQMTFNAEDIAYEIFTKIQSNILTESLGVVVDLSARGGIQQRVSFGVEFLPIKKANIFQVS

SEQ ID NO: 46427 - protein, 128 aa, unidentified
  source 1..128: note = Helicobacteraceae bacterium
  REGION 1..128: note = tr|A0A1J4U225|A0A1J4U225_9HELI NADPH-dependent 7-cyano-7-deazaguanine reductase OS=Helicobacteraceae bacterium CG1_02_36_14 OX=1805214 GN=queF PE=3 SV=1
MKYGEKIVSEFDVEKDLEIWPNVHKRDYLIKMTLPEFSCLCPRSGYPDFATIYLEYTPDEWVVELKAIKLYINSFREKHVSHENSANEIYEVLERKLKPKYMKVVADYNPRGNVHTVIEIDSSKMCKN

SEQ ID NO: 46428 - protein, 154 aa, unidentified
  source 1..154: note = Henriciella algicola
  REGION 1..154: note = tr|A0A399R7S4|A0A399R7S4_9RHOB NADPH-dependent 7-cyano-7-deazaguanine reductase OS=Henriciella algicola; OX = 1608422 GN=queF PE=3 SV=1
MSDNIYTGLEQLGGSSAIPASPQAAELERVKNPHAGTLYLARFTVPEFTSLCPVTGQPDFAHIVIDYAPGEWLVESKSLKLYMTSFRNHGAFHEDCTVAIGKRLQDLLDPTWMRICGYWYPRGGIPIDVFWQTGCPPEDLIVPDTGVPTYRGRG

SEQ ID NO: 46429 - protein, 154 aa, unidentified
  source 1..154: note = Henriciella barbarensis
  REGION 1..154: note = tr|A0A399R128|A0A399R128_9RHOB NADPH-dependent 7-cyano-7-deazaguanine reductase OS=Henriciella barbarensis OX=86342 GN=queF PE=3 SV=1
MSDSIYTGLEQLGGTSAIPASPEEADLERVPNPHAGTLYLARFTVPEFTSLCPVTGQPDFAHILIDYAPGEWLVESKSLKLYMTSFRNHGAFHEDCTVAIGKRLRDLLAPTWMRICGYWYPRGGIPIDVFWQTGRPPEDLIVPDTGVPTYRGRG

SEQ ID NO: 46430 - protein, 154 aa, Henriciella sp.
  REGION 1..154: note = tr|A0A399RMP0|A0A399RMP0_9RHOB NADPH-dependent 7-cyano-7-deazaguanine reductase OS=Henriciella sp. JN25; OX = 2305466 GN=queF PE=3 SV=1
MSKDIYSGLDQLGASSTIPASPEEAKLERVPNPHAGTLYLTRFTAPEFTSLCPVTGQPDFAHIVIDYAPGEWLVESKSLKLYLTSFRNHGAFHEDCTVAIGKRLVDLLAPQWLRIYGYWYPRGGIPIDVFWQSGPVPDGLYVPDTGVPSYRGRG

SEQ ID NO: 46431 - protein, 154 aa, Henriciella sp.
  REGION 1..154: note = tr|A0A2E6L7A2|A0A2E6L7A2_9RHOB NADPH-dependent 7-cyano-7-deazaguanine reductase OS=Henriciella sp.; OX = 1968823 GN=queF PE=3 SV=1
MSESIYSGLEQLGASSTIPASPEEAELERVKNPHAGTLYLARFTVPEFTSLCPVTGQPDFAHIVIDYAPGEWLVESKSLKLYMTSFRNHGAFHEDCTVAIGKRLQELLEPTWMRVCGYWYPRGGIPIDVFWQTGSPPEDLFVPDTGVPTYRGRG

SEQ ID NO: 46432 - protein, 151 aa, unidentified
  source 1..151: note = Hephaestia caeni
  REGION 1..151: note = tr|A0A397NJ60|A0A397NJ60_9SPHN NADPH-dependent 7-cyano-7-deazaguanine reductase OS=Hephaestia caeni; OX = 645617 GN=queF PE=3 SV=1
MAIMETTHLGKPTPMPASPEAARLDYVPNPRPGKRYLVRFTVPEFTSLCPVTAQPDFAHLVIDYVPDETIVESKSLKLFLASFRNHAAFHEDCTVGIAERLVAEMKPHWLRIGGYWYPRGGIPIDVFWQTAAPPADVWIPAQDVPGYRGRG

SEQ ID NO: 46433 - protein, 291 aa, Herbaspirillum aquaticum
  REGION 1..291: note = tr|A0A225SRA6|A0A225SRA6_9BURK NADPH-dependent 7-cyano-7-deazaguanine reductase OS=Herbaspirillum aquaticum OX=568783 GN=queF PE=3 SV=1
MDHTTPSASTIGHTPESSPLGKSSEYPTHYDPSLLFPIARAPKRAELQISGTLPFFGADFWTAYEISWLNLRGKPQIAIATFMVPADSPNIIESKSFKLYLNSFNQERLESADELITKMRADLSAAAGANVQVTLTESSQFGQLQFGELSGLLLDRLDVEIEPAATGAHPDGSLLRANTEEATVEETLVSHLLKSNCPVTSQPDWGSVQIQYVGAPIDQERLLKYIIGFREHNEFHEQCVERIFTDILRHCKPQKLAVYARYTRRGGLDINPWRSNFSSAKPPSQLRNARQ

SEQ ID NO: 46434 - protein, 282 aa, Herbaspirillum hiltneri
  REGION 1..282: note = tr|A0A561JQR6|A0A561JQR6_9BURK NADPH-dependent 7-cyano-7-deazaguanine reductase OS=Herbaspirillum hiltneri OX=341045 GN=queF PE=3 SV=1
MNHANASNSPDTSPLGKSSAYPDAYDPSLLFPIPRQPKRDELGVTGTLPFFGVDIWNAYEVSWLNQRGKPQIAIATFMIQADSPNIIESKSFKLYLNSFNQTRLDDQQALVALLQKDLSAAAGAGVQVTLTEPGAFSSLQMGELSGLLLDRLDIEVVDHHPNPSLLSANHDEATVEETLLSHLLKSNCPVTGQPDWGSVQIHYVGAPINQEALLKYLIGFREHNEFHEQCVERIFVDVLRQCRPQKLAVYARYTRRGGLDINPWRSNFSAARAPSNLRNARQ

SEQ ID NO: 46435 - protein, 291 aa, Herbaspirillum huttiense
  REGION 1..291: note = tr|A0A4R8JA87|A0A4R8JA87_9BURK NADPH-dependent 7-cyano-7-deazaguanine reductase OS=Herbaspirillum huttiense OX=863372 GN=queF PE=3 SV=1
MDHTNPSASTVGHSPESSPLGKSSEYPTHYDPSLLFPIPRAPKRAELQISGTLPFFGVDLWTAYEISWLNLRGKPQIAIATFMVPADSPNIIESKSFKLYLNSFNQERLESADLLIDKMRTDLSAAAGASVQVTLTESSQFGQMQFGELSGLLLDRLDVEIEPATGAAHPDGSLLRAHTDEATVEETLVSHLLKSNCPVTSQPDWGSVQIQYVGAPIDQERLLKYIIGFREHNEFHEQCVERIFTDILRHCKPQKLAVYARYTRRGGLDINPWRSNFSSAKPPSQLRNARQ

SEQ ID NO: 46436 - protein, 291 aa, Herbaspirillum huttiense
  REGION 1..291: note = tr|A0A561KD35|A0A561KD35_9BURK NADPH-dependent 7-cyano-7-deazaguanine reductase OS=Herbaspirillum huttiense OX=863372 GN=queF PE=3 SV=1
MDHTTPSASTIGHTPESSPLGKSSEYPTHYDPSLLFPIARAPKRAELQISGTLPFFGVDLWTAYEISWLNLRGKPQIAIATFMVPADSPNIIESKSFKLYLNSFNQERLESADALITKMRTDLSAAAGASVQVTLTESSQFGQMQFGELSGLLLDRLDVEIEPSTVGAHPDGSLLRANTEEATVEETLVSHLLKSNCPVTSQPDWGSVQIQYVGAPIDQERLLKYIIGFREHNEFHEQCVERIFTDILRHCKPQKLAVYARYTRRGGLDINPWRSNFSSAKPPSQLRNARQ

SEQ ID NO: 46437 - protein, 288 aa, unidentified
  source 1..288: note = Herbaspirillum robiniae
  REGION 1..288: note = tr|A0A246WN01|A0A246WN01_9BURK NADPH-dependent 7-cyano-7-deazaguanine reductase OS=Herbaspirillum robiniae OX=2014887 GN=queF PE=3 SV=1
MDKPTPSASAAGHSPETSPLGKSSEYPEAYDPSLLFPIPRAPKRAELQITGSLPFFGVDIWTAYEISWLNLRGKPQIAIATFMVPADSPNIIESKSFKLYLNSFNQERLESSGELLDKLRADLSAAAGAAVQVALTEPAQFGQLQFGELSGLPLDRLDVEIEAASHPDGSILRASHDEATVEETFVSHLLKSNCPVTGQPDWGSVQIQYVGAPIDQERLLKYIIGFREHNEFHEQCVERIFTDILRHCKPQKLAVYARYTRRGGLDINPWRSNFSSGKPPSQLRNARQ

SEQ ID NO: 46438 - protein, 291 aa, Herbaspirillum rubrisubalbicans
  REGION 1..291: note = tr|A0A0U2SKX1|A0A0U2SKX1_9BURK NADPH-dependent 7-cyano-7-deazaguanine reductase OS=Herbaspirillum rubrisubalbicans M1 OX=1078773 GN=queF PE=3 SV=1
MDHITPSASGTGHSPESSPLGKSSPYPTHYDPSLLFPIPRAPKRAELQISGTLPFFGADFWTAYEISWLNLRGKPQIAIASFMVPADSPNIIESKSFKLYLNSFNQERLESSAQLLDKLRTDLSAAAGANVQVSLTESAQFGQVQFGELSGLLLDRLDVDIEPVSGNPHPDGSQLRANTDEATVEETLVSHLLKSNCPVTSQPDWGSVQIHYVGAPIDQERLLKYIIGFREHNEFHEQCVERIFTDILRHCKPQKLAVYARYTRRGGLDINPWRSNFSSAKPPSQLRNARQ

SEQ ID NO: 46439 - protein, 291 aa, Herbaspirillum rubrisubalbicans
  REGION 1..291: note = tr|A0A328IWF0|A0A328IWF0_9BURK NADPH-dependent 7-cyano-7-deazaguanine reductase OS=Herbaspirillum rubrisubalbicans OX=80842 GN=queF PE=3 SV=1
MDHITPAASGPGHSPESSPLGKSSPYPTHYDPSLLFPIPRAPKRAELQISGTLPFFGADFWTAYEISWLNLRGKPQIAIASFMVPADSPNIIESKSFKLYLNSFNQERLENSEQLLDKLRTDLSAAAGANVQVSLTESAQFGQLQFGELSGLLLDRLDVDIEPISGNSHPDGSLLRANTEEATVEETLVSHLLKSNCPVTSQPDWGSVQIHYVGAPIDQERLLKYIIGFREHNEFHEQCVERIFTDILRHCKPQKLAVYARYTRRGGLDINPWRSNFSSAKPPSQLRNARQ

SEQ ID NO: 46440 - protein, 291 aa, Herbaspirillum seropedicae
  REGION 1..291: note = tr|D8IS39|D8IS39_HERSS NADPH-dependent 7-cyano-7-deazaguanine reductase OS=Herbaspirillum seropedicae (strain SmR1) OX=757424 GN=queF PE=3 SV=1
MDHTNPSASPASHSPESSPLGKSSQYPTHYDPSLLFPIPRAPKRAELQISGTLPFFGVDLWTAYEISWLNLRGKPQIAIATFMVPADSPNIIESKSFKLYLNSFNQERLESADQLIDKMRTDLSAAAGAQVQVALTEPAQFGQLQFGELSGLLLDRLDVEIEAAASGAHPDGSQLRANTEEATVEETLVSHLLKSNCPVTSQPDWGSVQIQYVGAPIDQERLLKYIIGFREHNEFHEQCVERIFTDILRYCKPQKLAVYARYTRRGGLDINPWRSNFSSAKPPSQLRNARQ

SEQ ID NO: 46441 - protein, 291 aa, Herbaspirillum seropedicae
  REGION 1..291: note = tr|A0A4R8P268|A0A4R8P268_HERSE NADPH-dependent 7-cyano-7-deazaguanine reductase OS=Herbaspirillum seropedicae OX=964 GN=queF PE=3 SV=1
MDHTNPSASTVGHSPESSPLGKSSEYPTHYDPSLLFPIPRAPKRAELQISGTLPFFGVDLWTAYEISWLNLRGKPQIAIATFMVPADSPNIIESKSFKLYLNSFNQERLESADQLIDKMRTDLSAAAGASVQVTLTESSQFGQMQFGELSGLLLDRLDVEIEPATGAAHPDGSLLRANTDEATVEETLVSHLLKSNCPVTSQPDWGSVQIQYVGAPIDQERLLKYIIGFREHNEFHEQCVERIFTDILRHCKPQKLAVYARYTRRGGLDINPWRSNFSSGKPPSQLRNARQ

SEQ ID NO: 46442 - protein, 288 aa, Herbaspirillum sp.
  REGION 1..288: note = tr|A0A542LXQ9|A0A542LXQ9_9BURK NADPH-dependent 7-cyano-7-deazaguanine reductase OS=Herbaspirillum sp. SJZ130 OX=2572918 GN=queF PE=3 SV=1
MDKPIPSPSAAGHSPETSPLGKSSAYPGAYDPGLLFPIARAPKRAELQIAGTLPFFGVDIWTAYEISWLNLRGKPQIAIATFTVPADSPNIIESKSFKLYLNSFNQERLESSAQLLEKLRTDLSAAAGAAVQAALTEPAQFGQLQFGELGGLPLDRLDVEIEASAHPDASILRAAQDEAVVEETFVSHLLKSNCPVTGQPDWGSVQIHYVGAPIDQEMLLKYIIGFREHNEFHEQCVERIFVDIMRRCKPQKLAVYARYTRRGGLDINPWRSNFSSGHAPSQLRNARQ

SEQ ID NO: 46443 - protein, 285 aa, Herbaspirillum sp.
  REGION 1..285: note = tr|J2VKV8|J2VKV8_9BURK NADPH-dependent 7-cyano-7-deazaguanine reductase OS=Herbaspirillum sp. YR522 OX=1144342 GN=queF PE=3 SV=1
MDHPATATGHSAETSPLGKHSAYPAEYDPALLFPIPRAPKRADLQITGTLPFFGVDIWTAYEISWLNLRGKPQIAIATFMVPADSPNIIESKSFKLYLNSFNQARLDSSTTLVERMRVDLSGAAGAPVQVTLTEAAQFGQLRFNELGGLSLDRLDVEIEATAHPDGSILRADHEQATVEETFVSHLLKSNCPVTSQPDWGSVQIHYVGAPIDQEQLLKYIIGFRDHNEFHEQCVERIFSDILHYCRPQKLAVYARYTRRGGLDINPWRSNFSSARLPSLDRNARQ

SEQ ID NO: 46444 - protein, 279 aa, Herminiimonas arsenicoxydans
  REGION 1..279: note = tr|A4G8Y9|A4G8Y9_HERAR NADPH-dependent 7-cyano-7-deazaguanine reductase OS=Herminiimonas arsenicoxydans OX=204773 GN=queF PE=3 SV=1
MTTPFKPDGSPLGKPTAYEAHYDPSLLFSIPRQYKRDEIGLSGTLPFFGVDIWNAYEISWLNMRGKPQVAMARVTVPADSPNIVESKSFKLYLNSLNQTKLGGTEALLELLREDLSSGFGAPVQVTLTLPENFARVPMGELNGLLLDRLDIEVHEYSPDPTLLRAARDEPVVEETLVSHLLKSNCLVTGQPDWASVQIQYVGGAIDQAGLLQYLIGFREHNEFHEQCVERIFMDIMRQCKPQKLAVYARYTRRGGLDINPWRSNFSTGTAPSNARNARQ

SEQ ID NO: 46445 - protein, 279 aa, Herminiimonas fonticola
  REGION 1..279: note = tr|A0A4R6GIE8|A0A4R6GIE8_9BURK NADPH-dependent 7-cyano-7-deazaguanine reductase OS=Herminiimonas fonticola OX=303380 GN=queF PE=3 SV=1
MTAPFKPDESPLGRPTTYQAHYDPSLLFAIPRQYKRDELGLSNGTLPFFGVDIWNAYEMSWLNMRGKPQVAMAKIIVPADSPNIVESKSFKLYLNSLNQTKLGGTEALLELLREDLSNGFGAPVQISLTLPENFSKVPMGELDGMLLDRLDIEVSEYSPNVSLLSSAKDEPAIEETLVSHLLKSNCLVTGQPDWASVQIKYVGGAIDQAGLLQYLIGFREHNEFHEQCVERIFMDIMRQCKPQKLAVYARYTRRGGLDINPWRSNFSTGQPSNARNARQ

SEQ ID NO: 46446 - protein, 279 aa, Herminiimonas sp.
  REGION 1..279: note = tr|A0A3N7A7W4|A0A3N7A7W4_9BURK NADPH-dependent 7-cyano-7-deazaguanine reductase OS=Herminiimonas sp. KBW02 OX=2153363 GN=queF PE=3 SV=1
MTTSSTPDASPLGKPSVYQTQYDPSLLFPIPRQGKRDELGLTGDLPFFGVDIWNAYELSWLNMRGKPQVAIARIMAPADSPNIIESKSFKLYLNSFNQTKLGGTDALLELLRADLSAGFGAPVQISLTLPEDFAKISIGELDGMLLDRLDIEVNDYTPDPSLLQAAHDEAPVEETLLSNLLKSNCLVTGQPDWGSVQIHYVGPQINQASLLHYLIGFREHNEFHEQCVERIFMDILRQCKPQKLAVYARYTRRGGLDINPWRSNFSTGKPPSNARNARQ

SEQ ID NO: 46447 - protein, 119 aa, Hippea maritima
  REGION 1..119: note = tr|F2LW51|F2LW51_HIPMA NADPH-dependent 7-cyano-7-deazaguanine reductase OS=Hippea maritima (strain ATCC 700847 / DSM 10411 / MH2) OX=760142 GN=queF; PE = 3 SV=1
MRYGEEEIEKAQLEAWPNNHPENDYQVSIEFPEFTCKCPRSGYPDFATIRIKYVPDKYVIELKSLKLFLNKYRERYISHEDATNEIFNALKEALKPKHLEVIGDFTPRGNVKTVIRIAF

SEQ ID NO: 46448 - protein, 279 aa, Histophilus somni
  REGION 1..279: note = sp|B0UU49|QUEF_HISS2 NADPH-dependent 7-cyano-7-deazaguanine reductase OS=Histophilus somni (strain 2336) OX=228400 GN=queF PE=3 SV=1
MQYHDQSLQTLKLGKKTEYISTYDRTLLQAVPRKLNRDDLGISTKQPFSFGADIWTAYEISWLNLKGVPQVAIADVEIDYQSENLIESKSFKLYLNSFNQSQFENLQQVEQILQQDLIKCAKGQVKVRLNSLQNYAQQPIATLQGECIDEQDIEILCYEFDPNLLENCTNKQWVEEKLVSHLLKSNCLITNQPDWGTVQIHYIGNQINREKLLRYLISFRQHNEFHEQCVERIFCDLMKFAQPEKLSVYARYTRRGGLDINPFRSNFEPIPLNQRLARQ

SEQ ID NO: 46449 - protein, 279 aa, Histophilus somni; identical to SEQ ID NO: 46261
  REGION 1..279: note = tr|A0A4S2QWE2|A0A4S2QWE2_HISSO NADPH-dependent 7-cyano-7-deazaguanine reductase OS=Histophilus somni; OX = 731 GN=queF PE=3 SV=1

SEQ ID NO: 46450 - protein, 119 aa, unidentified
  source 1..119: note = Holophagaceae bacterium
  REGION 1..119: note = tr|A0A3D6EM26|A0A3D6EM26_9BACT NADPH-dependent 7-cyano-7-deazaguanine reductase OS=Holophagaceae bacterium OX=2052165 GN=queF PE=3 SV=1
MVTRPTGELDTFESPRPGRPFTITFETEEFTCLCPLTGQPDFAKLRILYQPDQLCVESKSLKLYLWSFRDRGAFHEAVTNQILDDLVKATKPQWMRVEGDFLIRGGIRTLVVAEHGKKK

SEQ ID NO: 46451 - protein, 144 aa, unidentified
  source 1..144: note = Hormoscilla sp.
  REGION 1..144: note = tr|A0A533NMZ6|A0A533NMZ6_9CYAN NADPH-dependent 7-cyano-7-deazaguanine reductase OS=Hormoscilla sp. GUM007; OX = 2480854 GN=queF PE=3 SV=1
MNSPTRPIDSDLQGDRTLEMKYGERQIAAVKLITFDNPRIGRRYDIHITLPEFTCKCPFSGYPDFATIYLTYVPDELVVELKALKLYINGFRDRHISHEEAVNLILDDFVAACDPLEATVKADFNPRGNVHTVIEVHHSKSTED

SEQ ID NO: 46452 - protein, 144 aa, unidentified
  source 1..144: note = Hormoscilla sp.
  REGION 1..144: note = tr|A0A533P369|A0A533P369_9CYAN NADPH-dependent 7-cyano-7-deazaguanine reductase OS=Hormoscilla sp. GUM202; OX = 2480853 GN=queF PE=3 SV=1
MNSPTRPIDSDIQGDRTLEMKYGERQIAAVKLITFDNPRIGRRYDIHITLPEFTCKCPFSGYPDFATIYLTYVPDELVVELKALKLYINGFRDRHISHEEAVNLILDDFVAACDPLEATVKADFNPRGNVHTAISVHHSKSTEE

SEQ ID NO: 46453 - protein, 155 aa, unidentified
  source 1..155: note = Humitalea rosea
  REGION 1..155: note = tr|A0A2W7I9D4|A0A2W7I9D4_9PROT NADPH-dependent 7-cyano-7-deazaguanine reductase OS=Humitalea rosea; OX = 990373 GN=queF PE=3 SV=1
MSTPTDIRGLTQLGHMSGLPANPDVPVLERVPNPHPGMHYVVRFVAPEFTSLCPLTGQPDFAHIVLDYIPRDWLVESKSLKLHLSSFRNHGSFHEACTLDIARRVGALLTPVWLRIGAYWYPRGGMPIDVFWQSGAPPEGAWIPDQGVAPYRGRG

SEQ ID NO: 46454 - protein, 154 aa, Hwanghaeicola aestuarii
  REGION 1..154: note = tr|A0A2W7NT16|A0A2W7NT16_9RHOB NADPH-dependent 7-cyano-7-deazaguanine reductase OS=Hwanghaeicola aestuarii OX=568105 GN=queF PE=3 SV=1
MAGTDTRGLTQLGTPTGQPASPEEAVLERVPAPHGEKAYVVRFTAPEFTSLCPMTGQPDFAHLVIDYVPGDWLVESKSLKLFLTSFRNHGSFHEDCTLTVASRLVDLLTPRWLRIGGYWYPRGGIPIDVFWQTGAAPEGVWIPDQGVPPYRGRG

SEQ ID NO: 46455 - protein, 120 aa, Hyalangium minutum
  REGION 1..120: note = tr|A0A085W510|A0A085W510_9DELT NADPH-dependent 7-cyano-7-deazaguanine reductase OS=Hyalangium minutum; OX = 394096 GN=queF PE=3 SV=1
MSTQPSKELKTFPNPAAERDYEIAFDVPEFTCLCPLTGQPDFARFKIRYVPDELCVELKSLKLYMWAYRNEGAFHEKVTNTIADDIIKAIQPRKLVVEGDFFVRGGIGTVITVTHEKKKG

SEQ ID NO: 46456 - protein, 275 aa, unidentified
  source 1..275: note = Hydrocarboniclastica marina
  REGION 1..275: note = tr|A0A4V1D8N9|A0A4V1D8N9_9ALTE NADPH-dependent 7-cyano-7-deazaguanine reductase OS=Hydrocarboniclastica marina OX=2259620 GN=queF PE=3 SV=1
MFERATMKDAPLGQVSVYPEKYSSELLYPVPRQANRSKLGLDNGWPWFGEDRWQAFELSWLGPNGVPRVAIGELIVPGDSPNIIESKSLKLYCNSFNQTVFDTVEDVQHLMARDLSRVAGRQVNVTLAKVDSPATLLGRPDGFALLDDLPVVLDEYEKGAGDLKPVGPEGEQRYCSHLLKSNCPVTGQPDWGSVFITLNGPKLDEGGLLAYIVGYRNTQDFHEHCVESIFVDIMNRLKPIQLTVSAQYTRRGGLDINPWRSTGQGSAPKWRLLRQ

SEQ ID NO: 46457 - protein, 141 aa, Hydrocarboniphaga daqingensis
  REGION 1..141: note = tr|A0A1M5PY80|A0A1M5PY80_9GAMM NADPH-dependent 7-cyano-7-deazaguanine reductase OS=Hydrocarboniphaga daqingensis OX=490188 GN=queF PE=3 SV=1
MPLTPNSTRPSTELETFPNPNPGRDFVIRMRMPEFSCLCPKTGQPDFATLYLEYIPETLCVELKSLKLYIWSFRDQGTFHEAVTNKILDDLVKLLQPRYARLTSDFGVRGGIYTHVVAEHRATGWTPAPPVLLPEAEWRKQ

SEQ ID NO: 46458 - protein, 136 aa, Hydrocarboniphaga effusa
  REGION 1..136: note = tr|I7Z9B3|I7Z9B3_9GAMM NADPH-dependent 7-cyano-7-deazaguanine reductase OS=Hydrocarboniphaga effusa AP103 OX=1172194 GN=queF PE=3 SV=1
MTTKPSTDLETFPNPNPDRDFVIRMRIPEFTCLCPKTGQPDFATLYLEYIPESLCVELKSLKLYIWAFRDQGAFHEAVTNKILDDLVTLMQPRFARLTADFGVRGGIFTNVVAEHRAASWKPAEPVILPPGEWIKQ

SEQ ID NO: 46459 - protein, 134 aa, Hydrococcus rivularis
  REGION 1..134: note = tr|A0A1U7HTH7|A0A1U7HTH7_9CYAN NADPH-dependent 7-cyano-7-deazaguanine reductase OS=Hydrococcus rivularis NIES-593 OX=1921803 GN=queF PE=3 SV=1
MQAPEREKPEMKYGERAIAQGELITFPNPRIGRRYDIHITLPEFTCKCPFSGYPDFATIYITYCPDEKVVELKALKLYINSYRDRYISHEEAVNQILDDFVAACDPLEAKIKGDFNPRGNVHTVIEVCHHKQSQ

SEQ ID NO: 46460 - protein, 158 aa, unidentified
  source 1..158: note = Hydrogenibacillus schlegelii
  REGION 1..158: note = tr|A0A2T5G9Q5|A0A2T5G9Q5_HYDSH NADPH-dependent 7-cyano-7-deazaguanine reductase OS=Hydrogenibacillus schlegelii OX=1484 GN=queF PE=3 SV=1
MDPSPFRALGKKSAVPATYDPSVLERFENAFPDRDMFVKFNAPEFTTLCPVTGQPDFATLYISYVPDRWLVESKSLKLYLFSFRNHGAFHESVVNLIRDDLVRLLEPKYLEIWGKFLPRGGLSIDPYVNYGKPGTPWEEVAKKRLYEHDMYPEKVDNR

SEQ ID NO: 46461 - protein, 160 aa, unidentified
  source 1..160: note = Hydrogenibacillus schlegelii
  REGION 1..160: note = tr|A0A132N911|A0A132N911_HYDSH NADPH-dependent 7-cyano-7-deazaguanine reductase OS=Hydrogenibacillus schlegelii OX=1484 GN=queF PE=3 SV=1
MTVDPSPFRALGKKSAVPATYDPSVLERFENAFPDRDMFVKFNAPEFTTLCPVTGQPDFATLYISYVPDRWLVESKSLKLYLFSFRNHGAFHESVVNLIRDDLVRLLEPKYLEIWGKFLPRGGLSIDPYVNYGKPGTPWEEVAKKRLYEHDMYPEKVDNR

SEQ ID NO: 46462 - protein, 129 aa, Hydrogenimonas sp.
  REGION 1..129: note = tr|A0A3G9GUU2|A0A3G9GUU2_9PROT NADPH-dependent 7-cyano-7-deazaguanine reductase OS=Hydrogenimonas sp.; OX = 2231112 GN=queF PE=3 SV=1
MRYGEEIVASFDVDKDLEIWPNKFQKNYKITVTLPEFSCLCPRSGYPDYATFTLEYIPDLWVVELKAVKLYINSFRNRHISHEESANEVFDVLYQKLEPRWMKLTADFNPRGNVHTLIEIDSELFEKEK

SEQ ID NO: 46463 - protein, 133 aa, Hydrogenimonas thermophila
  REGION 1..133: note = tr|A0A1I5LFF7|A0A1I5LFF7_9PROT NADPH-dependent 7-cyano-7-deazaguanine reductase OS=Hydrogenimonas thermophila OX=223786 GN=queF PE=3 SV=1
MKYGEEIIENFNIDKDLEIWPNKFQKNYKITITLPEFSCLCPRSGYPDYATFKLEYIPDQWVIELKAIKLYINSFRNRHISHEESANEIYDVLYEKLKPRWMKLTADFNPRGNVHTLIEIDSDLIKKEVKCVK

SEQ ID NO: 46464 - protein, 133 aa, unidentified
  source 1..133: note = Hydrogenispora ethanolica
  REGION 1..133: note = tr|A0A4R1R487|A0A4R1R487_9FIRM NADPH-dependent 7-cyano-7-deazaguanine reductase OS=Hydrogenispora ethanolica OX=1082276 GN=queF PE=3 SV=1
MNPNDLTFEALGKVVREPSRRLETFPKPPGVQTVILESDEVTSLCPITGQPDWETVTIEFEPDQFCIESKSLKLYLWSFRQDGAFCEALAGQIAQDVYEACKPHWCRVTVSQKPRGGITIKAVAAAGDVLEGK

SEQ ID NO: 46465 - protein, 130 aa, Hydrogenivirga caldilitoris
  REGION 1..130: note = tr|A0A497XSU3|A0A497XSU3_9AQUI NADPH-dependent 7-cyano-7-deazaguanine reductase OS=Hydrogenivirga caldilitoris OX=246264 GN=queF PE=3 SV=1
MEEVREKKYGEIAIEQAELEPWENPTPERDYMIEITFPEFSCLCPRSGYPDYATIRIRYIPDRYIVELKSLKLWLNKFRNRYISHEQATNEIYTALYETLKPRFLEVIGDFNPRGNVHTVVKLRSDGKYD

SEQ ID NO: 46466 - protein, 76 aa, Hydrogenivirga sp.
  REGION 1..76: note = tr|A8V1P8|A8V1P8_9AQUI NADPH-dependent 7-cyano-7-deazaguanine reductase (Fragment); OS = Hydrogenivirga sp. 128-5-R1-1 OX=392423 GN=HG1285_11587; PE = 3 SV=1
TIKIKYVPDKYIVELKSLKLYLNKYRNQYISHEEATNKIYEDLYNLLKPRFLEVVGDWNPRGNVKTIIKVSSEDNQ

SEQ ID NO: 46467 - protein, 130 aa, Hydrogenivirga sp.
  REGION 1..130: note = tr|A8URV7|A8URV7_9AQUI NADPH-dependent 7-cyano-7-deazaguanine reductase OS=Hydrogenivirga sp. 128-5-R1-1 OX=392423 GN=queF PE=3 SV=1
MERAEEKRYGEKAIEEAELEPWENPTPERDYMIDITFPEFSCLCPRSGYPDYATIRIRYIPDRYIVELKSLKLWLNKFRNRYISHEEATNEIYRALEETLKPRFLEVVGDFNPRGNVHTVIRVRSDGRYD

SEQ ID NO: 46468 - protein, 126 aa, Hydrogenobacter hydrogenophilus
  REGION 1..126: note = tr|A0A285NRX9|A0A285NRX9_9AQUI NADPH-dependent 7-cyano-7-deazaguanine reductase OS=Hydrogenobacter hydrogenophilus OX=35835 GN=queF PE=3 SV=1
MEKKYGELAIESAELEPWENPTPERDYLIEITFPEFSCLCPRSGYPDYATIKIRYIPDKYIIELRSLKLWLNKFRNRYISHEQATNEIYTALYETLKPRFLEVIGDFNPRGNVHTVITVRSDERYF

SEQ ID NO: 46469 - protein, 125 aa, Hydrogenobacter thermophilus
  REGION 1..125: note = tr|D3DHD7|D3DHD7_HYDTT NADPH-dependent 7-cyano-7-deazaguanine reductase OS=Hydrogenobacter thermophilus (strain DSM 6534 / IAM 12695 / TK-6); OX = 608538 GN=queF PE=3 S V=1
MEKKYGELAIESARLEPWENPSPERDYMIEITFPEFSCLCPRSGYPDYATIKIRYIPDKYIVELRSLKLWLNKFRNRYISHEQATNEIYTALYETLRPRFLEVIGDFNPRGNVHTVIKVRSDGNY

SEQ ID NO: 46470 - protein, 128 aa, Hydrogenobaculum sp.
  REGION 1..128: note = tr|M1RKV4|M1RKV4_9AQUI NADPH-dependent 7-cyano-7-deazaguanine reductase OS=Hydrogenobaculum sp. HO OX=547144 GN=queF PE=3 SV=1
MQQEKKYGEIEIEKAALEPWENPAKENDYIIEMSFPEFSCLCPRSGYPDYATIKIRYIPNEYIVELKSLKLWLNSFRNQYISHEAATNTIYNKLFELLKPKFLEVIGDFHPRGNLHTVVRVRSDKKYD

SEQ ID NO: 46471 - protein, 128 aa, Hydrogenobaculum sp.; identical to SEQ ID NO: 46470
  REGION 1..128: note = tr|B4U9Q5|B4U9Q5_HYDS0 NADPH-dependent 7-cyano-7-deazaguanine reductase OS=Hydrogenobaculum sp. (strain Y04AAS1) OX=380749 GN=queF PE=3 SV=1

SEQ ID NO: 46472 - protein, 280 aa, unidentified
  source 1..280: note = Hydrogenophaga crassostreae
  REGION 1..280: note = tr|A0A167IPW6|A0A167IPW6_9BURK NADPH-dependent 7-cyano-7-deazaguanine reductase OS=Hydrogenophaga crassostreae OX=1763535 GN=queF PE=3 SV=1
MTPDHSPLGKASAYADQYDASLLFPLPREPKRREIGITGHVPFLGADLWTAFELSWLNPRGKPQVAIAHITVPCESTHIVESKSFKLYLNSFNNSRFASADEVRDRIRADVSRAIWNGESVQSTAGVRVLLPEMFECEPVREMEGLSIDRLDVACTAYHPAPELLTAALSEKSVTEVLTSDLLKSNCLVTGQPDWGSVQVSYSGPQIDQAGLLQYIVSFRNHNEFHEQCVERIYMDIMARCKPAKLSVYARYTRRGGLDINPWRSSHPQLPPANVRTARQ

SEQ ID NO: 46473 - protein, 283 aa, Hydrogenophaga intermedia
  REGION 1..283: note = tr|A0A1L1PIC5|A0A1L1PIC5_HYDIT NADPH-dependent 7-cyano-7-deazaguanine reductase OS=Hydrogenophaga intermedia OX=65786 GN=queF PE=3 SV=1
MNANTPEQSQLGKASAYVDRYDPSLIFPLPREAKRREIGIVGSVPFMGCDLWTAYELSWLNPRGKPQVAIAHITVPCESTHIVESKSFKLYLNSFNNSAFDSAEAVQARLRADLGTAVWHGGPVQAGVGVKLLSPERFDAEPIHELDGLSLDRLDVECTRYQPAPELLTAAFDEQPVNETLVSHLLKSNCLVTGQPDWGSVQITYSGPQIDQAGLLQYLVSFRNHNEFHEQCVERIYMDVWTRCKPAKLSVYARYTRRGGLDINPWRSSHPQQPPANVRTARQ

SEQ ID NO: 46474 - protein, 280 aa, Hydrogenophaga pseudoflava
  REGION 1..280: note = tr|A0A4P6WU68|A0A4P6WU68_HYDPS NADPH-dependent 7-cyano-7-deazaguanine reductase OS=Hydrogenophaga pseudoflava OX=47421 GN=queF PE=3 SV=1
MTPDQSPLGKTTDYVDQYDPSLLFPLPRELKRVEIGITGSVPFLGADLWTAFELSWLNPKGKPQVAIAHITIPCESTHIVESKSFKLYLNSFNNTRMDSADAVRDRIRDDISRAIWGGEAVKSSAGVRLLLPELFECEPVKELEGVSIDRLDVECDTYQPTPAFLSAALDEKPVDEVLVSDLLRSNCPVTGQPDWGSVQIRYSGPQIDQAGLLQYIVSFRNHNEFHEQCVERIYMDIMARCKPAKLMVYARYTRRGGLDINPWRSSHPQLPPANTRTARQ

SEQ ID NO: 46475 - protein, 281 aa, Hydrogenophaga sp.
  REGION 1..281: note = tr|A0A4P7RIE6|A0A4P7RIE6_9BURK NADPH-dependent 7-cyano-7-deazaguanine reductase OS=Hydrogenophaga sp. PAMC20947 OX=2565558 GN=queF PE=3 SV=1
MNTPELSQLGKASAYIDQYDASLLFALPREPKRTEIGIKGHVPFLGADLWTAFELSWLNPRGKPQVAIAHITVPCESTHIVESKSFKLYLNSFNNSRFESADQVREHIRTDVSAAIWHGGKVQSTAGVRLLLPELFDCEPIREMEGLSIDRLDVECSVYQPAPELLSAALDEKPVTEILTSDLLKSNCLVTGQPDWGSVQITYSGPQIDQGGLLQYIVSFRNHNEFHEQCVERIYMDIMARCKPAKLSVVARYTRRGGLDINPWRSSHPQLPPPNVRNARQ

SEQ ID NO: 46476 - protein, 283 aa, Hydrogenophaga sp.
  REGION 1..283: note = tr|A0A1Q3QDS2|A0A1Q3QDS2_9BURK NADPH-dependent 7-cyano-7-deazaguanine reductase OS=Hydrogenophaga sp. 70-12 OX=1895769 GN=queF PE=3 SV=1
MSQNTPEQSQLGKASAYVDRYDPSLIFPLPREAKRREIGIAGDVPFVGCDLWTAYELSWLNPRGKPQVAIAHITVPAESTHIVESKSFKLYLNSFNNTPFDSADAVRDRLRADLSAAVWHGGPMQAGVGVKLLAPERFDAEPIHELDGLSLDRLDVECTRYEPAPELLTAAFDEQPVSETLVSHLLKSNCLVTGQPDWGSVQIAYSGPQIDQAGLLQYLVSFRNHNEFHEQCVERIYMDLWTRCKPAKLSVYARYTRRGGLDINPWRSSHPQQPPANVRTARQ

SEQ ID NO: 46477 - protein, 139 aa, unidentified
  source 1..139: note = Hydrogenophilaceae bacterium
  REGION 1..139: note = tr|A0A1J4Z1M5|A0A1J4Z1M5_9PROT NADPH-dependent 7-cyano-7-deazaguanine reductase OS=Hydrogenophilaceae bacterium CG1_02_62_390 OX=1805218 GN=queF PE=3 SV=1
MPSQPQKTLETFANPNSGRDYQVHIEIPEFTCLCPKTGQPDFATLFLDYIPDLNCVELKSLKLYIWSFRDEGHFHEAVTNRILDDLVKAIDPRFMRLTAKFYVRGGIFTNVVAEHRKTGWQAQPKVELSQFSVQSNTRG

SEQ ID NO: 46478 - protein, 139 aa, unidentified
  source 1..139: note = Hydrogenophilales bacterium
  REGION 1..139: note = tr|A0A2H0G1Z7|A0A2H0G1Z7_9PROT NADPH-dependent 7-cyano-7-deazaguanine reductase OS=Hydrogenophilales bacterium CG18_big_fil_WC_8_21_14_2_50_58_12 OX=1974036; GN = queFPE=3 SV=1
MSSQPSKTLETFDNPNPERDYHIHMEIPEFTCLCPKTGQPDFATLYLDYIADRQCVELKSLKMYVWSFRNEGAFHEAVTNRILNDLVAATQPRFMRLTAKFTVRGGIFTNVVAEHRKPGWEPQLRVDLKEFEANSNTRG

SEQ ID NO: 46479 - protein, 139 aa, unidentified
  source 1..139: note = Hydrogenophilales bacterium
  REGION 1..139: note = tr|A0A1G0NGY2|A0A1G0NGY2_9PROT NADPH-dependent 7-cyano-7-deazaguanine reductase OS=Hydrogenophilales bacterium RIFOXYD1_FULL_62_11 OX=1798415 GN=queF PE=3 SV=1
MPSTPVKTLETFPNPKPERDFHIHMEVPEFTCLCPKTGQPDFATLILDYIPDKTCVELKSLKLYMWSFREEGHFHEDVTNRVLDDLVKATKPRFMRLTAKFYVRGGIFTNVVAEHRKKGWQPAPRVDLMQFDHNSNTRG

SEQ ID NO: 46480 - protein, 273 aa, Hydrogenophilus thermoluteolus
  REGION 1..273: note = tr|A0A2Z6E084|A0A2Z6E084_HYDTE NADPH-dependent 7-cyano-7-deazaguanine reductase QueF OS=Hydrogenophilus thermoluteolus OX=297 GN=HPTL_1741 PE=4 SV=1
MSGLLLGQSVAVPDGYAPELLTPIARATARATLGDPLPHWVGEDRWYGYEGSWLDAHGKPQAAVIEIGVPAHSPYLIESKSLKLYLNGFNQIRFAEGDALVARIQADLAAVAQAPVRVALHPLTQFCRAVASDFGDPGACLLDTVAADDFRYQYDPTLLRIDSPTLCEQRFVMDAFRSLCPVTAQPDWASLYLRCVGPRVDPASLLRYLVSFRCHAEFHEQCIERIYTDLWRLGMTELMVWGRFLRRGGLEINPLRASSEAWLPQQWLADPRQ

SEQ ID NO: 46481 - protein, 126 aa, Hydrogenothermus marinus
  REGION 1..126: note = tr|A0A3M0BN06|A0A3M0BN06_9AQUI NADPH-dependent 7-cyano-7-deazaguanine reductase OS=Hydrogenothermus marinus OX=133270 GN=queF PE=3 SV=1
MENLKYGEKEILEAKLEPWENPYPDRNYTIDITFPEFSCLCPRSGYPDYATIKIRYIPDKTIVELKSLKLYLNKYRNQYISHEEATNKIYDDLYNLLKPRFLEVIGDWNPRGNVKTIIKVSSEENK

SEQ ID NO: 46482 - protein, 128 aa, Hydrogenothermus sp.
  REGION 1..128: note = tr|A0A432RD37|A0A432RD37_9AQUI NADPH-dependent 7-cyano-7-deazaguanine reductase OS=Hydrogenothermus sp.; OX = 2231113 GN=queF PE=3 SV=1
MEKKELKYGEKEILEAKLEPWDNPYPDRNYTIDITFPEFSCLCPRSGYPDYATIKIRYIPDKTIVELKSLKLYLNKYRNKYISHEEATNKIYEDLYNLLKPRFLEVIGDWNPRGNVKTIIKVSSENNK

SEQ ID NO: 46483 - protein, 277 aa, unidentified
  source 1..277: note = Hydrogenovibrio crunogenus
  REGION 1..277: note = sp|Q31DJ4|QUEF_HYDCU NADPH-dependent 7-cyano-7-deazaguanine reductase OS=Hydrogenovibrio crunogenus (strain XCL-2) OX=317025 GN=queF PE=3 SV=1
MTKPTSTADKSLLGQTTPYCQAYDPTILFPIPRQEKRDELGFDLKTLPFTGEDVWTGYEISWLNLKGKPQVGWAEFVFSAEAPNLIESKSFKLYLNSFNGTRFESEDAVIACWQNDLSQACGKPVGVRFYRLDESIVLQGNLPGHCLDALDIEVEDYQVNPDLLHTDSDQIVSETLNSHLLKSNCLVTGQPDWGSIVVRYEGAQINHEALLKYLISFREHNEFHEQCVERVFTDIMRFCQPKKLTVYARYLRRGGLDINPYRSNYEQVFDRARLVRQ

SEQ ID NO: 46484 - protein, 277 aa, unidentified
  source 1..277: note = Hydrogenovibrio crunogenus
  REGION 1..277: note = tr|A0A4P7P2A9|A0A4P7P2A9_9GAMM NADPH-dependent 7-cyano-7-deazaguanine reductase OS=Hydrogenovibrio crunogenus OX=39765 GN=queF PE=3 SV=1
MTNPNSTADKSLLGQTTPYCQAYDPTILFPIPRQEKRDELGFDLNSLPFSGEDIWTGYEISWLNLKGKPQVGWAEFVFSADAPNLIESKSFKLYLNSFNGTRFESEDEVIACWQKDLSQACGKAVGVRFYRLNESVVLQGNLPGHCLDALDIEVENYQVTPDLLHTDSDEMVSETLNSHLLKSNCLVTGQPDWGSIVVRYEGAHINHEGLLKYLISFREHNEFHEQCVERVFTDIMRFCQPQKLTVYARYLRRGGLDINPYRSNYEQTFDCARLVRQ

SEQ ID NO: 46485 - protein, 280 aa, Hydrogenovibrio marinus
  REGION 1..280: note = tr|A0A066ZQP9|A0A066ZQP9_HYDMR NADPH-dependent 7-cyano-7-deazaguanine reductase OS=Hydrogenovibrio marinus OX=28885 GN=queF PE=3 SV=1
MSDHNEKNISTAQQSLLGQSTPYCHSYDPTLLFPIPRQENRDELGFDLQSLPFVGLDIWTAYEVSWLNAKGKPQVAIVEFAFSADAPNLIESKSFKLYLNSFNGTRFDSAEEVIALWEKDLSAASGGEVSVDMRSVDAEEYLGKLPGECLDDLDIEVDAYQVSPDLLVCESEEIVSETLHSHLLKSNCLVTGQPDWGSVVIRYEGKKIEWEGLLKYLISFRNHNEFHEQCVERIFTDIQKRCQPEHLTVYARYLRRGGLDINPYRSNFEDEFDLTRLSRQ

SEQ ID NO: 46486 - protein, 276 aa, Hydrogenovibrio sp.
  REGION 1..276: note = tr|A0A2I2A5R2|A0A2I2A5R2_9GAMM NADPH-dependent 7-cyano-7-deazaguanine reductase OS=Hydrogenovibrio sp. SC-1 OX=2065820 GN=queF PE=3 SV=1
MPQQNAANQSLLGKHTPYCHTYDPGLLFPIPRQEKRTELGISSDSLPFSGQDVWTAYEVSWLNAKGKPLVAWAEFIFSAYSPNLIESKSFKLYLNSFNGTRFESVQAVIDSWQRDLSAASGAPVEVRLHDLSEDQQLVGSMPGECLDGLDIEISHYQVLPSLLQVKSSTEVAACWHSHLLKSNCLVTGQPDWGSVLIRYEGPEIDPEGLLRYIISFREHNEFHEQCVERIFCDIMAQCAPTKLTVYARYLRRGGLDINPYRSNFEKTFNLSRLIRQ

SEQ ID NO: 46487 - protein, 282 aa, unidentified
  source 1..282: note = Hydrogenovibrio thermophilus
  REGION 1..282: note = tr|A0A410H635|A0A410H635_9GAMM NADPH-dependent 7-cyano-7-deazaguanine reductase OS=Hydrogenovibrio thermophilus OX=265883 GN=queF PE=3 SV=1
MTNPVSPQSESTANQSLLGRATPYCRQYDPSILFPVPRQEKRDELDISPDALPFSGQDVWTGFEISWLNDQGKPQVGWALFFFPAASPYLIESKSFKLYLNSFNGTRFASAEAVKQHWITDLSQACGGEVKVELYGLDEPQTLIGAPPGECLDNLDIEVSDYQVRPELLTTVSSTPVSETLYSHLLKSNCLVTGQPDWGSIVIRYEGPQIDRENLLKYLVSFREHNEFHEQCVERVFVDLMRHCQPEKLTVYARYVRRGGLDINPYRSNFETDFDLRRLVRQ

SEQ ID NO: 46488 - protein, 143 aa, unidentified
  source 1..143: note = Hydromonas duriensis
  REGION 1..143: note = tr|A0A4R6YAT5|A0A4R6YAT5_9BURK NADPH-dependent 7-cyano-7-deazaguanine reductase OS=Hydromonas duriensis; OX = 1527608 GN=queF PE=3 SV=1
MELHANLQSLGNKKTQYRYDEPDASLLERFPNPFAHANINPNGVTGTLNMVCPEFTSLCPVTGQPDFATIVIDMQPDQWCVESKSLKLYLGSFRMHGEFHESCICRICNDLVTLLQPKWIKVEGRFTARGGIPLWPSAEYRQP

SEQ ID NO: 46489 - protein, 143 aa, unidentified
  source 1..143: note = Hydromonas sp.
  REGION 1..143: note = tr|A0A345DD81|A0A345DD81_9BURK NADPH-dependent 7-cyano-7-deazaguanine reductase OS=Hydromonas sp. F02; OX = 2268024 GN=queF PE=3 SV=1
MELHANLQSLGNKKTDYRYDEPDASLLERFPNPFVQSSINPNGVTGTLNMVCPEFTSLCPVTGQPDFATIVIDMQPGEWCVESKSLKLYLGSFRMHGEFHESCICRICNDLVTLLQPKWIKVEGRFTPRGGIPLWPSAEYRQP

SEQ ID NO: 46490 - protein, 135 aa, unidentified
  source 1..135: note = Hyella patelloides
  REGION 1..135: note = tr|A0A563VYP8|A0A563VYP8_9CYAN NADPH-dependent 7-cyano-7-deazaguanine reductase OS=Hyella patelloides LEGE 07179 OX=945734 GN=queF PE=3 SV=1
MANSTENTSSSAVKYGEREISEGELITFPNPRVGRRYKVEISLPEFTCKCPFSGYPDFATIHITYFPHEKVVELKGIKLYINSYRDRYISHEESINQILDDFVAAADPLEVTIRGDFNPRGNVHTVVEVNHVKSN

SEQ ID NO: 46491 - protein, 290 aa, Hylemonella gracilis
  REGION 1..290: note = tr|A0A4P6UK84|A0A4P6UK84_9BURK NADPH-dependent 7-cyano-7-deazaguanine reductase OS=Hylemonella gracilis; OX = 80880 GN=queF PE=3 SV=1
MNTSDSTPENSQLGKASAYKDQYDSSLLFPLPRAAKREEIGIPQVKKGGTLPFLGADLWTAYELSWLNPRGKPQVAIAHVTVPCETPNIVESKSFKLYLNSFNHTKFADADEVKVRLRMDLSEAVWRGSGKSGFVGLRLLTPEQFDQEPIHELDGLSIDRLDVECTQYQPAPELLSAAFDEQPVTETLTSGLLKSNCLVTGQPDWGSVQISYSGPQIDQAGLLQYLVSFRQHNEFHEQCVERIYMDVMRRCKPTKLTVYARYTRRGGLDINPWRSSHPQTLPPNVRTARQ

SEQ ID NO: 46492 - protein, 292 aa, Hylemonella gracilis
  REGION 1..292: note = tr|A0A016XHM2|A0A016XHM2_9BURK NADPH-dependent 7-cyano-7-deazaguanine reductase OS=Hylemonella gracilis str. Niagara R OX=1458275 GN=queF PE=3 SV=1
MAMTPPAPTPEDSQLGKASAYTDQYDPRLLFPLPRAAKREEIGIPQLKKGSTLPFLGADLWTAYELSWLNARGKPQVAIAHVTVPCETPNIVESKSFKLYLNSFNNTKFTDADEVKVRLRMDLSEAVWRGSGKSGFVGLRLLTPEQFDQEPIHELDGLSIDRLDVECTQYQPAPELLSAAFDEQPVTETLTSGLLKSNCLVTGQPDWGSVQISYSGPQIDQAGLLQYLVSFRQHNEFHEQCVERIYMDVMRRCKPTKLTVYARYTRRGGLDINPWRSSHPQTLPPNVRTARQ

SEQ ID NO: 46493 - protein, 153 aa, unidentified; identical to SEQ ID NO: 46036
  source 1..153: note = Hyphomicrobiaceae bacterium
  REGION 1..153: note = tr|A0A3S5JEZ8|A0A3S5JEZ8_9RHIZ NADPH-dependent 7-cyano-7-deazaguanine reductase OS=Hyphomicrobiaceae bacterium TMED74 OX=1986774 GN=queF PE=3 SV=1
  VARIANT 107..108: note = Xaa can be any naturally occurring amino acid
  VARIANT 147: note = Xaa can be any naturally occurring amino acid

SEQ ID NO: 46494 - protein, 152 aa, Hyphomicrobium denitrificans
  REGION 1..152: note = tr|N0B6D8|N0B6D8_9RHIZ NADPH-dependent 7-cyano-7-deazaguanine reductase OS=Hyphomicrobium denitrificans 1NES1 OX=670307 GN=queF PE=3 SV=1
MTRKPQVRQLGRNVALPHNPDEAELERVANPHPDTHYAARFTAPEFTSLCPVTGQPDFAHLVIDYVPAKWLVESKSLKLYLASFRNHGAFHEDCTVAIAKRISDLIEPHYLRIGGYWYPRGGIPIDVFWQTGTLPKDVWLPDQGVQTYRGRG

SEQ ID NO: 46495 - protein, 152 aa, Hyphomicrobium denitrificans
  REGION 1..152: note = tr|D8JYX7|D8JYX7_HYPDA NADPH-dependent 7-cyano-7-deazaguanine reductase OS=Hyphomicrobium denitrificans (strain ATCC 51888 / DSM 1869 / NCIB 11706 / TK 0415) OX=5828 99 GN=queF PE=3 SV=1
MARKPQVKQLGRNVSLPRDPDEAELERVANPHADTHYAARFTAPEFTSLCPVTGQPDFAHLVIDYVPNAWLVESKSLKLYLASFRNHGAFHEDCTVAIGKRIAALIEPHYLRIGGYWYPRGGIPIDVFWQTGTLPKDVWLPDQGVQTYRGRG

SEQ ID NO: 46496 - protein, 153 aa, Hyphomicrobium facile
  REGION 1..153: note = tr|A0A1I7NV54|A0A1I7NV54_9RHIZ NADPH-dependent 7-cyano-7-deazaguanine reductase OS=Hyphomicrobium facile; OX = 51670 GN=queF PE=3 SV=1
MAAEKPGATQLGKQVGIPDSPETAQLDRVANPHADTDYVARFTAPEFTSLCPVTGQPDFAHLVIDYVPGAWLLESKSLKLYLASFRNHGAFHEDCTVAIGKRIASLIEPKFLRIGGYWYPRGGIPIDVFWQTGTLPKDVWLPDQGVQPYRGRG

SEQ ID NO: 46497 - protein, 153 aa, unidentified
  source 1..153: note = Hyphomicrobium nitrativorans
  REGION 1..153: note = tr|V5SE45|V5SE45_9RHIZ NADPH-dependent 7-cyano-7-deazaguanine reductase OS=Hyphomicrobium nitrativorans NL23 OX=1029756 GN=queF PE=3 SV=1
MGRETTGITLLGGASEIPESPDKALLERVPNPHADTAYVARFAAPEFTSLCPVTGQPDFAHLVIDYVPDAWLVESKSLKLYLASFRNHGAFHEDCTVAIGKRLVALLEPHYLRIGGYWYPRGGIPIDVFWQTGGVPEGVWLPDQGVPPYRGRG

SEQ ID NO: 46498 - protein, 152 aa, Hyphomicrobium sp.
  REGION 1..152: note = tr|A0A218PNN2|A0A218PNN2_9RHIZ NADPH-dependent 7-cyano-7-deazaguanine reductase OS=Hyphomicrobium sp. GJ21 OX=113574 GN=queF PE=3 SV=1
MARKPQVKQLGRNVGLPRDPDEAELERVANPHADTHYAARFTAPEFTSLCPVTGQPDFAHLVIDYVPNAWLVESKSLKLYLASFRNHGAFHEDCTVAIGKRIAALIEPHYLRIGGYWYPRGGIPIDVFWQTGTLPKDVWLPDQGVQTYRGRG

SEQ ID NO: 46499 - protein, 152 aa, Hyphomicrobium sp.
  REGION 1..152: note = tr|A0A1E4CW17|A0A1E4CW17_9RHIZ NADPH-dependent 7-cyano-7-deazaguanine reductase OS=Hyphomicrobium sp. SCN 65-11 OX=1660102 GN=queF PE=3 SV=1
MASATDHTTLGKQTALPQSPEKAVLDRVPNPHPDTLYVARFTAPEFTSLCPVTGQPDFAHLVIDYVPGDWLVESKSLKLYLGAFRNHGAFHEDCTIAIAKRLVELLAPKYLRIGGYWYPRGGIPIDVFWQTGPCPDGVWLPDQGVAPYRGRG

SEQ ID NO: 46500 - protein, 153 aa, Hyphomicrobium sulfonivorans
  REGION 1..153: note = tr|A0A109BCF9|A0A109BCF9_HYPSL NADPH-dependent 7-cyano-7-deazaguanine reductase OS=Hyphomicrobium sulfonivorans OX=121290 GN=queF PE=3 SV=1
MADQKPAVTQLGQMTALPESPETAVLERVPNPHPDARYVARFTAPEFTSLCPVTGQPDFAHIVIDYVPSGWLVESKSLKLYLGAFRNHGAFHEDCTVAIAKRLVELLQPHYLRIGGYWFPRGGIPIDVFWQTGTVPEGVWLPDQGVPPYRGRG

SEQ ID NO: 46501 - protein, 155 aa, unidentified
  source 1..155: note = Hyphomonadaceae bacterium
  REGION 1..155: note = tr|A0A0F2QEA3|A0A0F2QEA3_9RHOB NADPH-dependent 7-cyano-7-deazaguanine reductase OS=Hyphomonadaceae bacterium BRH_c29 OX=1629720 GN=queF PE=3 SV=1
MSDNPIYQNLGQLGQHTAQPQSPEEAELERVQNPHAGTLYLTRFVAPEFTSLCPVTGQPDFAHLVIDYAPGDWLVESKSLKLYLTSFRNHGAFHEDCTVSIGKKIFDFTEATWLRISGYWYPRGGIPIDVFWQSGEVPKGLYVPDTGVASYRGRG

SEQ ID NO: 46502 - protein, 155 aa, unidentified
  source 1..155: note = Hyphomonadaceae bacterium
  REGION 1..155: note = tr|A0A354TXT5|A0A354TXT5_9RHOB NADPH-dependent 7-cyano-7-deazaguanine reductase OS=Hyphomonadaceae bacterium OX=2026748 GN=queF PE=3 SV=1
MSQNDIYTGLDQLGEKVDAAATPEQAELERVQNPHPDMLYCARFVAPEFTSLCPVTGQPDFAHIVIDYAPDEFLVESKSLKLFLQSFRNHGAFHEDCTLYIAKRLTELLAPKWFRIAGYWYPRGGIPIDVFWQSGEIPSGLWVPETGVAPYRGRG

SEQ ID NO: 46503 - protein, 155 aa, Hyphomonas adhaerens
  REGION 1..155: note = tr|A0A069E0X7|A0A069E0X7_9RHOB NADPH-dependent 7-cyano-7-deazaguanine reductase OS=Hyphomonas adhaerens MHS-3 OX=1280949 GN=queF PE=3 SV=1
MSDNPIYQNLGQLGQHTAQPQSPEEAQLERVPNPHAGTLYLTRFVAPEFTSLCPVTGQPDFAHLVIDYAPGDWLVESKSLKLYLTSFRNHGAFHEDCTVSIGKRIFEFTEAKWLRISGYWYPRGGIPIDVFWQSGEVPAGLYVPDTGVASYRGRG

SEQ ID NO: 46504 - protein, 155 aa, Hyphomonas adhaerens
  REGION 1..155: note = tr|A0A3B9GX96|A0A3B9GX96_9RHOB NADPH-dependent 7-cyano-7-deazaguanine reductase OS=Hyphomonas adhaerens; OX = 81029 GN=queF PE=3 SV=1
MSDNPIYQNLGQLGQHTAQPQSPEEAKLERVPNPHAGTLYLTRFVAPEFTSLCPVTGQPDFAHLVIDYAPGDWLVESKSLKLYLTSFRNHGAFHEDCTVSIGKRVFEFTEAKWLRISGYWYPRGGIPIDVFWQSGEVPKGLYVPDTGVASYRGRG

SEQ ID NO: 46505 - protein, 54 aa, unidentified
  source 1..54: note = Hyphomonas atlantica
  REGION 1..54: note = tr|A0A356W4W2|A0A356W4W2_9RHOB NADPH-dependent 7-cyano-7-deazaguanine reductase QueF (Fragment); OS = Hyphomonas atlantica OX=1280948 GN=DD728_07510 PE=4 SV=1
ADNPIYQGLGQLGQQTDQPQSPETAELERVANPHADTLYLTRFVAPEFTSLCPV

SEQ ID NO: 46506 - protein, 155 aa, unidentified
  source 1..155: note = Hyphomonas atlantica
  REGION 1..155: note = tr|A0A059E571|A0A059E571_9RHOB NADPH-dependent 7-cyano-7-deazaguanine reductase OS=Hyphomonas atlantica; OX = 1280948 GN=queF PE=3 SV=1
MADNPIYQGLGQLGQQTDQPQSPETAELERVANPHADTLYLTRFVAPEFTSLCPVTGQPDFAHLVIDYAPGDWLVESKSLKLYLTSFRNHGAFHEECTVSIGKKIFDFTEAKWLRISGYWYPRGGIPIDVFWQSGEVPAGLYVPDTGVASYRGRG

SEQ ID NO: 46507 - protein, 155 aa, unidentified
  source 1..155: note = Hyphomonas beringensis
  REGION 1..155: note = tr|A0A062TTL9|A0A062TTL9_9RHOB NADPH-dependent 7-cyano-7-deazaguanine reductase OS=Hyphomonas beringensis; OX = 1280946 GN=queF PE=3 SV=1
MADNPIYQNLGQLGQHTAQPQSPEEAELERVPNPHAGELYLTRFVAPEFTSLCPVTGQPDFAHLVIDYAPGDWLVESKSLKLYLTSFRNHGAFHEECTVSIGKKIFDFTEAKWLRISGYWYPRGGIPIDVFWQSGEVPAGLYVPDTGVASYRGRG

SEQ ID NO: 46508 - protein, 155 aa, unidentified
  source 1..155: note = Hyphomonas chukchiensis
  REGION 1..155: note = tr|A0A062UPA8|A0A062UPA8_9RHOB NADPH-dependent 7-cyano-7-deazaguanine reductase OS=Hyphomonas chukchiensis OX=1280947 GN=queF PE=3 SV=1
MPDNPIYSGLDQLGQQTAAPQSPEEAQLERVPNPHAGTLYLTRFVAPEFTSLCPVTGQPDFAHLVIDYAPGDWLVESKSLKLYLTSFRNHGAFHEDCTVSIGKRIFDFTEAKWLRISGYWYPRGGIPIDVFWQSGEVPKGLYVPDTGVASYRGRG

SEQ ID NO: 46509 - protein, 155 aa, Hyphomonas hirschiana
  REGION 1..155: note = tr|A0A059FWK7|A0A059FWK7_9RHOB NADPH-dependent 7-cyano-7-deazaguanine reductase OS=Hyphomonas hirschiana VP5 OX=1280951 GN=queF PE=3 SV=1
MADNPIYQKLGQLGQHTVQPASPEEAQLERVENPHSGTLYLTRFVAPEFTSLCPVTGQPDFAHLVIDYAPGPWLVESKSLKLYLTSFRNHGAFHEECTVSIGKKIFDFTEATWLRISGYWYPRGGIPIDVFWQSGDVPKGLYVPDTGVASYRGRG

SEQ ID NO: 46510 - protein, 155 aa, Hyphomonas jannaschiana
  REGION 1..155: note = tr|A0A059FIG7|A0A059FIG7_9RHOB NADPH-dependent 7-cyano-7-deazaguanine reductase OS=Hyphomonas jannaschiana VP2 OX=1280952 GN=queF PE=3 SV=1
MSDNPIYQNLGQLGQQTAQPQSPEEAELERVPNPHAGTLYLTRFVAPEFTSICPVTGQPDFAHLVIDYAPGEWLVESKSLKLYLTSFRNHGAFHEDCTVSIGKRIFDFTEAKWLRISGYWYPRGGIPIDVFWQSGEVPAGLYVPETGVASYRGRG

SEQ ID NO: 46511 - protein, 155 aa, Hyphomonas johnsonii
  REGION 1..155: note = tr|A0A059FTZ7|A0A059FTZ7_9RHOB NADPH-dependent 7-cyano-7-deazaguanine reductase OS=Hyphomonas johnsonii MHS-2 OX=1280950 GN=queF PE=3 SV=1
MADNPIYEGLGQLGQHVPAPQSPDEAQLERVPNPHAGTLFLTRFVAPEFTSLCPVTGQPDFAHLVIDYAPGDWLVESKSLKLYLTSFRNHGAFHEDCTVSIGKRIFDFTEASWLRISGYWYPRGGIPIDVFWQSGAVPEGLHVPDTGVAPYRGRG

SEQ ID NO: 46512 - protein, 155 aa, Hyphomonas neptunium; identical to SEQ ID NO: 46509
  REGION 1..155: note = sp|Q0C137|QUEF_HYPNA NADPH-dependent 7-cyano-7-deazaguanine reductase OS=Hyphomonas neptunium (strain ATCC 15444) OX=228405 GN=queF PE=3 SV=1

SEQ ID NO: 46513 - protein, 155 aa, Hyphomonas oceanitis
  REGION 1..155: note = tr|A0A059G6F2|A0A059G6F2_9RHOB NADPH-dependent 7-cyano-7-deazaguanine reductase OS=Hyphomonas oceanitis SCH89 OX=1280953 GN=queF PE=3 SV=1
MPDNPIYSGLDQLGQQTAAPQSPEEAQLERVPNPHTGTLYLTRFVAPEFTSLCPVTGQPDFAHLVIDYAPGDWLVESKSLKLYLTSFRNHGAFHEDCTVSIGKRIFDFTHATWLRISGYWYPRGGIPIDVFWQSGEVPKGLYVPDTGVASYRGRG

SEQ ID NO: 46514 - protein, 155 aa, Hyphomonas polymorpha
  REGION 1..155: note = tr|A0A062VKX5|A0A062VKX5_9RHOB NADPH-dependent 7-cyano-7-deazaguanine reductase OS=Hyphomonas polymorpha PS728 OX=1280954 GN=queF PE=3 SV=1
MADNPIYQKLGQLGQHTAQPQSPEEAQLERVENPHSDTLYLTRFVAPEFTSLCPVTGQPDFAHLVIDYAPGPWLVESKSLKLYLTSFRNHGAFHEECTVSIGKRIFEFTEAKWLRISGYWYPRGGIPIDVFWQSGDVPKGLYVPETGVASYRGRG

SEQ ID NO: 46515 - protein, 155 aa, Hyphomonas sp.
  REGION 1..155: note = tr|A0A259LLF5|A0A259LLF5_9RHOB NADPH-dependent 7-cyano-7-deazaguanine reductase OS=Hyphomonas sp. 34-62-18 OX=1970392 GN=queF PE=3 SV=1
MADNPIYQKLGQLGQQTAQPQTPEEAQLERVENPHADTLYLTRFVAPEFTSLCPVTGQPDFAHLVIDYAPGPWLVESKSLKLYLTSFRNHGAFHEECTVSIGKRIFEFTEAKWLRISGYWYPRGGIPIDVFWQSGDVPKGLYVPETGVASYRGRG

SEQ ID NO: 46516 - protein, 155 aa, Hyphomonas sp.
  REGION 1..155: note = tr|A0A2D8EKE8|A0A2D8EKE8_9RHOB NADPH-dependent 7-cyano-7-deazaguanine reductase OS=Hyphomonas sp. OX=87; GN = queF PE=3 SV=1
MADNPIYQGLDQLGQQTHQPQNPEDAQLERVPNPHAGTLYLTRFVAPEFTSLCPVTGQPDFAHLVIDYAPGEWLVESKSLKLYLTSFRNHGAFHEDCTVSIGKKIFDFTEATWLRISGYWYPRGGIPIDVFWQSGEVPAGLHVPDTGVASYRGRG

SEQ ID NO: 46517 - protein, 164 aa, unidentified
  source 1..164: note = Ideonella sakaiensis
  REGION 1..164: note = tr|A0A0K8P8D3|A0A0K8P8D3_IDESA NADPH-dependent 7-cyano-7-deazaguanine reductase OS=Ideonella sakaiensis (strain NBRC 110686 / TISTR 2288 / 201-F6) OX=1547922; GN = queFPE=3 SV=1
MPRKPAPPASAPAPATAVGRREAPATPPTRPSRRLDVFPNPSPQRDYLIQFQAPEFTCHCPLTGQPDFAHLAFEIVPDRLCIELKSLKLYLWSFREQGAFHEAVTNTLLDDVVQAIDPRFARLTARWYVRGGIYTNVVAEHRRKGWKPPAPVLLATLPTATGLG

SEQ ID NO: 46518 - protein, 112 aa, Ideonella sp.
  REGION 1..112: note = tr|A0A523Q461|A0A523Q461_9BURK NADPH-dependent 7-cyano-7-deazaguanine reductase OS=Ideonella sp. MAG2; OX = 2083017 GN=queF PE=3 SV=1
MPEFTCHCPLTGQPDFAHFTIDMVADKLCVELKSLKMYMWSFRDEGAFHEKVTNDILGKIVATTQPRYVRITARWYVRGGIYTNVVVEHRKKGFKGDSVIPAPNLPTATGLR

SEQ ID NO: 46519 - protein, 148 aa, Ideonella sp.
  REGION 1..148: note = tr|A0A437RK12|A0A437RK12_9BURK NADPH-dependent 7-cyano-7-deazaguanine reductase OS=Ideonella sp. KYPY4; OX = 1862385 GN=queF PE=3 SV=1
MARKTPPSPPERAKPATPPSAPGKELQAFPNPAPERDYLIHFDVPEFTCLCPLTGQPDFAHFKIDIVADRFCVETKSLKQYFWSYRNEGAFHEKVTNTIVSDIVKAIAPRYVRIHADWFVRGGIRTLVTVEHRQKGWKPAPKVDLPGA

SEQ ID NO: 46520 - protein, 274 aa, Idiomarina abyssalis
  REGION 1..274: note = tr|A0A370QD43|A0A370QD43_9GAMM NADPH-dependent 7-cyano-7-deazaguanine reductase OS=Idiomarina abyssalis; OX = 86102 GN=queF PE=3 SV=1
MPKKDALDHLSLGQHTDYPNEYDPKQLQPVPRSLNREPIGLKDKLPFSGVDLWTGYEVSWLNSNGLPQVAVGYFAVPAESPNLVESKSFKLYLNSFNDSRFETWEQVQQLMETDLSACAGAPVKVKLKQVSELEGESVATFPGHCIDDQNISISHYDYQPSLLATEQNETEEELHSHLLKSNCLITNQPDWGSVYIHYQGPKLDRAALLAYLVSFRRHNEFHEQCVERIYQDLKALGMKKLTVYARYTRRGGLDINPFRSDFEPALQMQRMARQ

SEQ ID NO: 46521 - protein, 239 aa, Idiomarina aestuarii
  REGION 1..239: note = tr|A0A2T4CTI8|A0A2T4CTI8_9GAMM NADPH-dependent 7-cyano-7-deazaguanine reductase (Fragment) OS=Idiomarina aestuarii OX=624146 GN=C9988_03445 PE=3 SV=1
MTNPLGHLSLGQPTQYPDQYDATLLQAVPRQLNREPLGLNAEQLPFTGVDYWNAYEMSWLNQRGVPQVAIVECQVPIVSPNLIESKSFKLYLNSFNESRWESWQQVQDQLKQDLSHCAGATVQVQLIGLKTASADGFVDLPGLCIDQVDVTITQYHYEPQLLRSVNSGTIVEETLHSHLLKSNCLITNQPDWGSVLIRYRGRQVDHAALLQYIVSFRNHNEFHEQCVERIFVDMKQQLQ

SEQ ID NO: 46522 - protein, 34 aa, Idiomarina aestuarii
  REGION 1..34: note = tr|A0A2T4CSG8|A0A2T4CSG8_9GAMM NADPH-dependent 7-cyano-7-deazaguanine reductase QueF (Fragment); OS = Idiomarina aestuarii OX=624146 GN=queF PE=4 SV=1
LTVYARYTRRGGLDINPFRSDFETAPRQQRLVRQ

SEQ ID NO: 46523 - protein, 276 aa, unidentified
  source 1..276: note = Idiomarina aquatica
  REGION 1..276: note = tr|A0A4R6P2I6|A0A4R6P2I6_9GAMM NADPH-dependent 7-cyano-7-deazaguanine reductase OS=Idiomarina aquatica; OX = 1327752 GN=queF PE=3 SV=1
MPNDNPLQHLNLGQSTDYPSAYDAAQLRAVPRALNRQTIGINDNNLPFVGDDFWTGYELSWLNNNGLPQVAVGYFTVPANSPNLVESKSFKLYLNSFNESRFADWQQVEKLMREDLSQCAGAPVEVELKPISAVTHATIDDLPGDLIDEQDITITAYNYDPGLLQITGNDPTEQHFKSHLLKSNCLITNQPDWGSVYIHGVGPGLDTASLLRYLISFRRHNEFHEQCVERIFQDLTRLGFQKLSVYARYTRRGGLDINPFRSNFEKAPAVGRLARQ

SEQ ID NO: 46524 - protein, 280 aa, unidentified
  source 1..280: note = Idiomarina aquimaris
  REGION 1..280: note = tr|A0A432XQH2|A0A432XQH2_9GAMM NADPH-dependent 7-cyano-7-deazaguanine reductase OS=Idiomarina aquimaris; OX = 641841 GN=queF PE=3 SV=1
MKHSSAEHPLAHLNLGQATTYPEQYNAGLLQPVPRQLNRTPIGIDEGQELPFHGTDYWTGYELSWLQENGLPQVAIGYFEVPADSPHLIESKSFKLYLNSFNASHWPSWTDVEQAIARDLSRCAGAPVQVKLMPLRAPQHQIADWQATSIDDASVAIDSYDYNPELLQAAGHETVTETLYTDLLKSNCLITNQPDWGSLFVHYQGQAIDHASLLRYIVSFRNHNEFHEQCVERIFMDLSQRFALEKLSVYARYTRRGGLDINPFRSNFEAAPNMNRLSRQ

SEQ ID NO: 46525 - protein, 280 aa, unidentified
  source 1..280: note = Idiomarina atlantica
  REGION 1..280: note = tr|A0A094JAG4|A0A094JAG4_9GAMM NADPH-dependent 7-cyano-7-deazaguanine reductase OS=Idiomarina atlantica; OX = 1517416 GN=queF PE=3 SV=1
MKQGTHDNPLAHLNLGQATAYPEHYDASLLQPVARQLNRTPIGIVEASKLPFFGHDEWTGYEISWLQPNGLPQVAIAQFIVPCTSPNLIESKSFKLYLNSFNQSQWPSWEAVAAQMTIDLSACAGAAVTVKLLQLNDAQHLVGQWQGQCLDNPSVAISTYDYAPDLLRHASHERVTEQLYSDLLKSNCLITNQPDWGSLYISYTGRAIDHAALLQYIVSFRNHNEFHEQCVERIFMDLTQRLDLDHLSVYARYTRRGGLDINPYRATEDTAPNRMRLSRQ

SEQ ID NO: 46526 - protein, 276 aa, Idiomarina baltica
  REGION 1..276: note = tr|A0A348WR97|A0A348WR97_9GAMM NADPH-dependent 7-cyano-7-deazaguanine reductase OS=Idiomarina baltica; OX = 190892 GN=queF PE=3 SV=1
MQKNDPLAHLNLGKATDYPTTYDPSQLHAVARELNRTPIGITQKLPFDGQDDWTGYEVSWLNNRGLPQVAIAEFSVPCDSPHLIESKSFKLYLNSFNESRFEDWQTVADIMQHDLSTCAGANVLVSLSSLDELSGTPISGLPGACIDEQDIEVSTYDYQPDLLTVDTSIIESISVHSHLLKSNCLITNQPDWGSVYIHGVGPRLDRASLLRYLISFRRHNEFHEQCVERIFIDLQRLGFTQLTVYARYTRRGGLDINPFRSNFEKAPPSGQRLARQ

SEQ ID NO: 46527 - protein, 276 aa, Idiomarina donghaiensis
  REGION 1..276: note = tr|A0A432XM24|A0A432XM24_9GAMM NADPH-dependent 7-cyano-7-deazaguanine reductase OS=Idiomarina donghaiensis OX=519452 GN=queF PE=3 SV=1
MNESLAHLNLGQPTAYPTQYDASLLQGVPRQLNRTPIGLAEGQPLPFHGDDIWHGYELSWLNSNGLPQVAVAEFRVPATSTNLIESKSFKLYLNSFNDSRWPSWHAVSEQLSIDLSQCAGAPVGVQLSTVQQAQRKAFGDLPGHCIDDQPIEITSYEYSPELLKLSSHDIVEETLHSHLLKSNCLITNQPDWGSVLIRYRGPAVDHAALLRYIVSFRHHNEFHEQCVERLYMDIKERLQPEQLTVYARYTRRGGLDINPFRSDFEPTPESVRLSRQ

SEQ ID NO: 46528 - protein, 276 aa, Idiomarina fontislapidosi
  REGION 1..276: note = tr|A0A432YBT5|A0A432YBT5_9GAMM NADPH-dependent 7-cyano-7-deazaguanine reductase OS=Idiomarina fontislapidosi OX=263723 GN=queF PE=3 SV=1
MQTSDPLAHLNLGKATDYPTTYDPSQLQPVARELNRTPIGVTEDLPFTGHDDWTGYEVSWLNSKGLPQVAIAEFSVPCDSPHLIESKSFKLYLNSFNESRFDDWQTVADVMQHDLSACAGADVMVSLSSLDEYTNLPIGDLPGTCIDNQDIEIDTYDYQPALLKVEPQVVESLTVHSHLLKSNCLITNQPDWSSVYIHGTGPQLDHASLLRYLVSFRRHNEFHEQCVERIFMDLQRLGFSKLTVYARYTRRGGLDINPFRSNFETAPPSGQRLARQ

SEQ ID NO: 46529 - protein, 280 aa, unidentified
  source 1..280: note = Idiomarina halophila
  REGION 1..280: note = tr|A0A432Y050|A0A432Y050_9GAMM NADPH-dependent 7-cyano-7-deazaguanine reductase OS=Idiomarina halophila; OX = 1449799 GN=queF PE=3 SV=1
MKQTPAEHPLAHLELGQATQYPEHYDAGLLKAVPRQLNRTPIGLAEHTPLPFHGDDYWTAYEISWLLPNGLPQVAIGYFTVPCTSPNLIESKSFKLYLNSLNGSQWTSWDEVKATLQRDLSDCAGAAVEVQLVELDHARHSVGEWTAESIDNNDLAISNYDYTPSVLQHAGDARVTEQLRSHLLKSNCLITNQPDWGSLYIHYQGRVIDRAALLRYIVSFRNHNEFHEQCVERIFMDLSQRLDIEKLTVYARYTRRGGLDINPFRSNFETAPAMTRLSRQ

SEQ ID NO: 46530 - protein, 280 aa, Idiomarina homiensis
  REGION 1..280: note = tr|A0A432Y4G2|A0A432Y4G2_9GAMM NADPH-dependent 7-cyano-7-deazaguanine reductase OS=Idiomarina homiensis; OX = 364198 GN=queF PE=3 SV=1
MKHSSAEHPLAHLNLGQATAYPERYDASLLQAVPRQLNRTPIGILAGAALPFKGTDYWTGYELSWLQQNGLPQVAIGYFEVPADSPNLIESKSFKLYLNSFNASRWENWEDVQQTLSRDLTECAGAPVTVHLHPLHAEQHQIGHWHATSIDDTGVSIDCYDYNPELLQPASHEHVTETLYTDLLKSNCLITNQPDWGSLFIHYRGQAIDHASLLRYIVSFRNHNEFHEQCVERIFMDLSQRLVIEQLSVYARYTRRGGLDINPFRSNFEAAPNMNRLSRQ

SEQ ID NO: 46531 - protein, 277 aa, unidentified
  source 1..277: note = Idiomarina indica
  REGION 1..277: note = tr|A0A1G6AF81|A0A1G6AF81_9GAMM NADPH-dependent 7-cyano-7-deazaguanine reductase OS=Idiomarina indica; OX = 1159017 GN=queF PE=3 SV=1
MKNPTLDHLNLGQPTVYPEHYDAALLQAVPRQLNRTPIGLAEGQPLPFQGDDIWHGYELSWLDQKGLPQVAVAEFRVPCHSPNLIESKSFKLYLNSYNDTRWASWEQVQEQLTVDLSACAGAPVTVVLNTLAQAQRQAFGELPGHCLDHQELTIDCYQYRPELLQLASTDMVEETLHSHLLKSNCLITNQPDWGSVLIRYRGPAIDHAALLRYIISFRQHNEFHEQCVERIYMDIKTRLKPSELTVYARYTRRGGLDINPFRSDFEPTPQSARLCRQ

SEQ ID NO: 46532 - protein, 280 aa, Idiomarina insulisalsae
  REGION 1..280: note = tr|A0A432YC96|A0A432YC96_9GAMM NADPH-dependent 7-cyano-7-deazaguanine reductase OS=Idiomarina insulisalsae OX=575789 GN=queF PE=3 SV=1
MKQSSAEHSLAHLSLGQATHYPEHYDASLLQPVPRQLNRTPIGIAEQAPLPFHGTDFWTGYELSWLNPGGMPQVAIGYFQVPATSPNLIESKSFKLYLNSFNATKWQSWQEVEERLVSDLTSCAGAPVQVQLRAPDAAGHEVGRLSGSSLDDQQISISSYDYNPELLQHASNEHVTERLYTHLLKSNCLITNQPDWGSLAIHYHGRAIDHGALLRYIVSFRNHNEFHEQCVERIFMDLTQRLDIDKLSVYARYTRRGGLDINPFRSNFETAPELTRLSRQ

SEQ ID NO: 46533 - protein, 274 aa, Idiomarina loihiensis
  REGION 1..274: note = sp|Q5QW08|QUEF_IDILO NADPH-dependent 7-cyano-7-deazaguanine reductase OS=Idiomarina loihiensis (strain ATCC BAA-735 / DSM 15497 / L2-TR) OX=283942; GN = queF PE=3 SV=1
MPKKDALDHLSLGQHTDYPNEYDPKQLQPVPRSLNREPIGLKDKLPFSGVDLWTGYEISWLNANGLPQVAVGYFAVPAESPNLIESKSFKLYLNSFNDSRFDTWEYVQQLMETDLSACAGTPVKVKLKQLSELEGESVATFPGHCIDDQNISISHYDYQPSLLATEQHETEEALHSHLLKSNCLITNQPDWGSVYIHYQGPKLDRAALLAYLVSFRRHNEFHEQCVERIYQDLKALGMKKLTVYARYTRRGGLDINPFRSDFEPALQMQRMARQ

SEQ ID NO: 46534 - protein, 274 aa, Idiomarina loihiensis; identical to SEQ ID NO: 46533
  REGION 1..274: note = tr|A0A349C2P4|A0A349C2P4_9GAMM NADPH-dependent 7-cyano-7-deazaguanine reductase OS=Idiomarina loihiensis; OX = 135577 GN=queF PE=3 SV=1

SEQ ID NO: 46535 - protein, 276 aa, Idiomarina marina
  REGION 1..276: note = tr|A0A432YK59|A0A432YK59_9GAMM NADPH-dependent 7-cyano-7-deazaguanine reductase OS=Idiomarina marina; OX = 502366 GN=queF PE=3 SV=1
MKQELAHLNLGQPTQYPTHYDASLLQAVPRQLNRTPIGLEEGASLPFHGDDIWHGYELSWLNSLGVPQVAIAEFRVPCTSSNLIESKSFKLYLNSFNESRWNSWAEVQEQLAIDLSNCAGTSVAVRLDTLQQAQRMAFGDLPGHCIDEQSIEIDCYDYNPELLQLSSNNTVSETLHSHLLKSNCLITNQPDWGSVLIRYHGPAIDHAALLRYIISFRHHNEFHEQCVERLYMDIKSRLKPSQLTVYARYTRRGGLDINPFRSDFEPTPQSVRLSRQ

SEQ ID NO: 46536 - protein, 277 aa, Idiomarina maritima
  REGION 1..277: note = tr|A0A317QB84|A0A317QB84_9GAMM NADPH-dependent 7-cyano-7-deazaguanine reductase OS=Idiomarina maritima; OX = 519453 GN=queF PE=3 SV=1
MNQPLAHLNLGQPTQYPTAYDASLLQAVPRQLNRTPIGLPEAQPLPFHGDDIWHGYELSWLNQQGLPQVALAEFRVACNSPNLIESKSFKLYLNSFNDSRFASWQQVETQLSHDLSACAQAPVKVKLMTVQQAQQQAFADLPGQCIDNQDITIDTYNYAPELLQPNAQTQQVSEILHSHLLKSNCLITNQPDWGSVLISYRGRQIDQAALLRYLVSFRHHNEFHEQCVERIFMDIKRQLQPEQLTVYARYTRRGGLDINPFRSDFETTPTSVRLSRQ

SEQ ID NO: 46537 - protein, 276 aa, Idiomarina maritima
  REGION 1..276: note = tr|A0A1I6GGU6|A0A1I6GGU6_9GAMM NADPH-dependent 7-cyano-7-deazaguanine reductase OS=Idiomarina maritima; OX = 519453 GN=queF PE=3 SV=1
MKHELAHLNLGQPTQYPTHYDASLLQAVPRQLNRTPIGLAEGAEIPFHGDDIWHGYELSWLNAQGLPQVAIAEFRVPCTSKNLIESKSFKLYLNSFNESRWAHWQDVQEQLALDLSHCAGAPVSVRLNTVQQAQRMPFGELPGHCIDEQNIAIECYDYNPELLQLSSTKIVSETLHSHLLKSNCLITNQPDWGSVLIRYHGPAIDHAALLRYIVSFRHHNEFHEQCVERLYMDIKTRLKPTQLTVYARYTRRGGLDINPFRSDFEPTPQSVRLSRQ

SEQ ID NO: 46538 - protein, 276 aa, unidentified
  source 1..276: note = Idiomarina piscisalsi
  REGION 1..276: note = tr|A0A432YVT1|A0A432YVT1_9GAMM NADPH-dependent 7-cyano-7-deazaguanine reductase OS=Idiomarina piscisalsi; OX = 1096243 GN=queF PE=3 SV=1
MPKKDALGHLSLGQQTEYPSQYDSTQLQAVPRSLNREPIGISGELPFSGVDQWTGYELSWLNTKGLPQVAIGYFEVPAASPNLIESKSFKLYLNSFNDSRFDTWSDVQNIMKKDLSACAGDSVSVQLTPLSRVAHEAIADFQGECIDTQDIDIEHYDYRPELLKLEDNAEEVEEKLHSHLLKSNCLITNQPDWGSVSIHYQGPKIDRAALLAYLVSFRGHNEFHEQCVERIFQDILALGVKKLSVYARYTRRGGLDINPFRSNFEPAPQMQRMARQ

SEQ ID NO: 46539 - protein, 277 aa, unidentified
  source 1..277: note = Idiomarina planktonica
  REGION 1..277: note = tr|A0A1Y6EW25|A0A1Y6EW25_9GAMM NADPH-dependent 7-cyano-7-deazaguanine reductase OS=Idiomarina planktonica; OX = 1323738 GN=queF PE=3 SV=1
MHSTDDLNHLQLGQTTTYPTTFDPSLLLAVPRALNRDPIGIAANELPFHGTDYWNAYELSWLNSNGLPQVAVAEFSVPVTSPNLIESKSFKLYLNSLNEQRWPNWQQVEQQLGQDLSACAGAPVSVQLHALQSNQAPQFGLLQGHCIDDQDISIDCYDYNPDLLQLNPQAAVVREQLYSHLLKSNCLITNQPDWGSVYINYEGPQLNTESLLRYLVSFRRHNEFHEQCVERIFMDLRRVGISKLTVYARYTRRGGLDINPFRSNFEQPPAQQRLIRQ

SEQ ID NO: 46540 - protein, 274 aa, Idiomarina ramblicola
  REGION 1..274: note = tr|A0A432YYW6|A0A432YYW6_9GAMM NADPH-dependent 7-cyano-7-deazaguanine reductase OS=Idiomarina ramblicola; OX = 263724 GN=queF PE=3 SV=1
MPKKDALDHLSLGQSTNYPSQYDPKQLRPVPRSLNREPIGLKGKLPFSGVDLWTGYEISWLNLNGLPQVAVGYFEVPAESPNLVESKSFKLYLNSFNDSRFDSWESVQKLMEDDLSSCAGAAVKVSLKTLSELTGESIACMPGSCIDSQDLTISHYDYQPSLLAAEDGETEEKLHSHLLKSNCLITNQPDWGSVYIHYMGPKLDRAALLAYLVSFRRHNEFHEQCVERIYQDLKALGMKKLTVYARYTRRGGLDINPFRSDFEPALQMQRMARQ

SEQ ID NO: 46541 - protein, 276 aa, Idiomarina salinarum
  REGION 1..276: note = tr|A0A094J0V8|A0A094J0V8_9GAMM NADPH-dependent 7-cyano-7-deazaguanine reductase OS=Idiomarina salinarum; OX = 435908 GN=queF PE=3 SV=1
MKQPLGHLSLGRPTDYPTAFDAGLLQAVPRQLNRSAIGLNEMSELPFQGQDYWTGYELSWLNARGMPQVAVGEFVIPATSPSLVESKSFKLYLNSFNNCQWADWDAVRDQLQQDLSACAGATVQVKLLTVQQAQQQPFTELPGDCLDNQDIAITEYDYNAGLLAHSDDNEVTETLHSHLLKSNCLITNQPDWGSVMIRYRGKTIDRAALLRYIVSFRHHNEFHEQCVERLFVDLKTQLDIKQLTVYARYTRRGGLDINPFRSDFETAPAPGRLSRQ

SEQ ID NO: 46542 - protein, 281 aa, Idiomarina sediminum
  REGION 1..281: note = tr|A0A432Z8A6|A0A432Z8A6_9GAMM NADPH-dependent 7-cyano-7-deazaguanine reductase OS=Idiomarina sediminum; OX = 431675 GN=queF PE=3 SV=1
MKQSPADHPLAHLELGQATEYPEHYDANLLKPVPRQLNRTPIGIASGQQLPFHGDDYWTGYELSWLLPNGLPQVAIGYFKVPASSPNLIESKSFKLYLNSFNASQWPSWQAVVQTLETDLSACAGGPVRVQLQPVDHVNAHQVGQFSGHSIDATDVAISTYDYAPELLQHAGHERVTEVLYSDLLKSNCLITNQPDWGSVYIHYQGRAIDRAALLRYIVSFRNHNEFHEQCVERIFMDLTQRLDIDKLSVYARYTRRGGLDINPFRSNFEAAPELTRLSRQ

SEQ ID NO: 46543 - protein, 278 aa, Idiomarina seosinensis
  REGION 1..278: note = tr|A0A432ZH65|A0A432ZH65_9GAMM NADPH-dependent 7-cyano-7-deazaguanine reductase OS=Idiomarina seosinensis; OX = 281739 GN=queF PE=3 SV=1
MPKNNSLDHLKLGQATEYPTQYDASQLMAVPRSLNREPIGISQHNPLPFHGLDYWTGYEISWLNKKGLPQVAVGYFTVPADSPNLIESKSFKLYLNSFNESRFEDWAEVTASMQTDLSACAGATVEVSLKPVTAISNEVIDDLPGELIDQQDITIDSYDYDPQLLCIDDDGATHELSVKSHLLKSNCLITNQPDWGSVYIHGFGPQLDRASLLRYLVSFRRHNEFHEQCVERIFQDLSQLGFNKLSVYARYTRRGGLDINPFRSNFEEAPATGRLARQ

SEQ ID NO: 46544 - protein, 64 aa, Idiomarina sp.
  REGION 1..64: note = tr|A0A2D8HUG1|A0A2D8HUG1_9GAMM NADPH-dependent 7-cyano-7-deazaguanine reductase QueF (Fragment); OS = Idiomarina sp. OX=1874361 GN=queF PE=4 SV=1
YLVSFRRHNEFHEQCVERIYQDLKALGMKKLTVYARYTRRGGLDINPFRSDFEPALQMQRMARQ

SEQ ID NO: 46545 - protein, 276 aa, Idiomarina sp.
  REGION 1..276: note = tr|A0A1S2T025|A0A1S2T025_9GAMM NADPH-dependent 7-cyano-7-deazaguanine reductase OS=Idiomarina sp. MD25a; OX = 1889913 GN=queF PE=3 SV=1
MQKSDPLAHLNLGKATDYPTTYDPSQLHAVARELNRTPIGITQPLPFNGQDDWTGYEVSWLNTKGLPQVAIAEFSVPCDSPNLIESKSFKLYLNSFNESRFEDWQTVADIMQHDLSACAGAEVMVSLSSLNEYTHTPIADFPGECIDAQDIEIDTYDYQPNLLEVDPQVVESVNLHSHLLKSNCLITNQPDWGSVFIHGTGPRIDKASLLRYLISFRRHNEFHEQCVERIFMDLHRLGFTQLTVFARYTRRGGLDINPFRSNFEKAPPLGQRLARQ

SEQ ID NO: 46546 - protein, 277 aa, Idiomarina tainanensis; identical to SEQ ID NO: 46536
  REGION 1..277: note = tr|A0A368V441|A0A368V441_9GAMM NADPH-dependent 7-cyano-7-deazaguanine reductase OS=Idiomarina tainanensis; OX = 502365 GN=queF PE=3 SV=1

SEQ ID NO: 46547 - protein, 277 aa, Idiomarina taiwanensis
  REGION 1..277: note = tr|A0A432ZNR9|A0A432ZNR9_9GAMM NADPH-dependent 7-cyano-7-deazaguanine reductase OS=Idiomarina taiwanensis; OX = 337250 GN=queF PE=3 SV=1
MENPLEHLALGQATAYPTAFDPGLLAPVPRQLNRQPLGIDGQNLPFHGIDYWNAYELSWLNEAGLPQVAIAEIAVAVDSINLIESKSFKLYLNSFNESRWSSWSAVAKQLQTDLSNCAEGQVEVKLHSLQQAPQQHIQQFSGICLDEQQLSINEYDYNPELLALQDNPQTVTETLYSDLLKSNCLITNQPDWGSVLIRYQGPAIDHAALLRYLISFRRHNEFHEQCVERIFSDIKTRLKPEKLSVYARYTRRGGLDINPFRSDFEEPPSEQERLVRQ

SEQ ID NO: 46548 - protein, 278 aa, unidentified
  source 1..278: note = Idiomarina tyrosinivorans
  REGION 1..278: note = tr|A0A432ZRN1|A0A432ZRN1_9GAMM NADPH-dependent 7-cyano-7-deazaguanine reductase OS=Idiomarina tyrosinivorans OX=1445662 GN=queF PE=3 SV=1
MAKHQVMDKLSLGKQTQYPTEYDASQLHPVPRSINRQSIGIDNDNALPFSGGDLWNGYELSWLNTKGLPQVAVGRFWVPADSPNLIESKSFKLYLNSFNESRFDDWQTVTELMVSDLSACAGATVNVQLFSLNQLEGSQLSALPGHCIDQQDITIDQYDYDQTLLTLQPDAQPVSETLHSHLLKSNCLITHQPDWGSVVIRYQGPALDQQALLKYLVSFRRHDEFHEQCVERIFQDILALGMDKLTVYANYTRRGGLDINPFRSNFEQPQPWLRLPRQ

SEQ ID NO: 46549 - protein, 276 aa, unidentified; identical to SEQ ID NO: 46527
  source 1..276: note = Idiomarina woesei
  REGION 1..276: note = tr|A0A0K6GWJ6|A0A0K6GWJ6_9GAMM NADPH-dependent 7-cyano-7-deazaguanine reductase OS=Idiomarina woesei; OX = 1381080 GN=queF PE=3 SV=1

SEQ ID NO: 46550 - protein, 303 aa, Idiomarina xiamenensis
  REGION 1..303: note = tr|K2KAK2|K2KAK2_9GAMM NADPH-dependent 7-cyano-7-deazaguanine reductase OS=Idiomarina xiamenensis 10-D-4 OX=740709 GN=queF PE=3 SV=1
MANANELMQQLKLGKHTDYPEHYSADWLQAVPRQINRDSIGLHAATKLPFHGVDDWTGYELSWLNQLGVPQVAVARFRVPADSPNLIESKSFKLYLNSFNEQQWQDWQSVTDTMIRDLSACAGAPVTVKLFSLAEFTQQPIQNLPGQSIDDCLNAHPDQPTAAPISTYDYQPTLLAGAADLTSDVVSETLHSHLLKSNCLITNQPDWGSLLIRYRGPKIDRQALLRYLISFRRHNEFHEQCVERIFTDLMHYCGCQQLTVYARYTRRGGLDINPFRSNVATSAAENADDNAAEPLLVQRLCRQ

SEQ ID NO: 46551 - protein, 276 aa, Idiomarina zobellii
  REGION 1..276: note = tr|A0A1G7LCA8|A0A1G7LCA8_9GAMM NADPH-dependent 7-cyano-7-deazaguanine reductase OS=Idiomarina zobellii; OX = 86103 GN=queF PE=3 SV=1
MPKKDALGHLSLGQQTEYPSQYDSSQLQAVPRSLNREPIGISGELPFSGVDQWTGYELSWLNAKGLPQVAIGYFEVPAASPNLVESKSFKLYLNSFNESRFDTWGDVQSIMKKDLSACAGDSVSVQLTPLSRVAHEAIADFQGECIDSQDIDIEHYDYRPELLKLEDNAKEVEEKLHSHLLKSNCLITNQPDWGSVFIHYQGPKINKAALLAYLVSFRGHNEFHEQCVERIFQDILALGVKKLSVYARYTRRGGLDINPFRSNFEPAPQMQRLARQ

SEQ ID NO: 46552 - protein, 276 aa, unidentified
  source 1..276: note = Idiomarinaceae bacterium
  REGION 1..276: note = tr|A0A2D7YMS5|A0A2D7YMS5_9GAMM NADPH-dependent 7-cyano-7-deazaguanine reductase OS=Idiomarinaceae bacterium OX=1898113 GN=queF PE=3 SV=1
MPNDNPLQHLNLGQSTDYPSAYDAAQLRAVPRALNRQPIGINDNNLPFVGDDFWTGYELSWLNNNGLPQVAVGYFTVPANSPNLVESKSFKLYLNSFNESRFADWQQVEKLMREDLSQCAGAPVAVELKPISAVTHATIDDLPGDLIDEQDITITAYDYDPGLLQITGNDTTEQHFKSHLLKSNCLITNQPDWGSVYIHGVGPGLDTASLLRYLISFRRHNEFHEQCVERIFQDLTRLGFEKLSVYARYTRRGGLDINPFRSNFEKAPAVGRLARQ

SEQ ID NO: 46553 - protein, 276 aa, unidentified; identical to SEQ ID NO: 46526
  source 1..276: note = Idiomarinaceae bacterium
  REGION 1..276: note = tr|A0A2E6UA64|A0A2E6UA64_9GAMM NADPH-dependent 7-cyano-7-deazaguanine reductase OS=Idiomarinaceae bacterium OX=1898113 GN=queF PE=3 SV=1

SEQ ID NO: 46554 - protein, 156 aa, unidentified
  source 1..156: note = Ignatzschineria cameli
  REGION 1..156: note = tr|A0A2U2APR5|A0A2U2APR5_9GAMM NADPH-dependent 7-cyano-7-deazaguanine reductase OS=Ignatzschineria cameli; OX = 2182793 GN=queF PE=3 SV=1
MTDKKEQLENLTLLGNQATVYPTEYTPTILETFKNAHPGREYFVNFHCPEFTTLCPMTNQPDFATIYISYVPTIEMVESKSLKLYLFSFRNHGSFHEDCVNIIMDDLIELMDPLYIEVRGEFTPRGGISIHPYANYGKADTRWEEIATQRLANFQF

SEQ ID NO: 46555 - protein, 156 aa, Ignatzschineria indica
  REGION 1..156: note = tr|A0A2U2AI07|A0A2U2AI07_9GAMM NADPH-dependent 7-cyano-7-deazaguanine reductase OS=Ignatzschineria indica; OX = 472583 GN=queF PE=3 SV=1
MSNKKEQLENLTLLGNQATIYPTEYTPQILETFKNAHPDREYFVNFHCPEFTTLCPMTNQPDFATIYISYVPTIEMVESKSLKLYLFSFRNHGSFHEDCVNIIMDDLIKLMDPLYIEVRGEFTPRGGISIHPYANYGKAGTQWEAVATQRLANFQF

SEQ ID NO: 46556 - protein, 156 aa, Ignatzschineria sp.; identical to SEQ ID NO: 46555
  REGION 1..156: note = tr|A0A256CHE9|A0A256CHE9_9GAMM NADPH-dependent 7-cyano-7-deazaguanine reductase OS=Ignatzschineria sp. F8392 OX=1980117 GN=queF PE=3 SV=1

SEQ ID NO: 46557 - protein, 157 aa, Ignatzschineria ureiclastica
  REGION 1..157: note = tr|A0A2U2ACW2|A0A2U2ACW2_9GAMM NADPH-dependent 7-cyano-7-deazaguanine reductase OS=Ignatzschineria ureiclastica OX=472582 GN=queF PE=3 SV=1
MTTDKKTQLENLTLLGNQATIYPTEYSPAILETFKNAHPEREYFVNFHCPEFTTLCPLTNQPDFATIYISYVPTIEMVESKSLKLYLFSFRNHGSFHEDCVNIILNDLVTLMDPLYLEVRGEFTPRGGISIHPYANYGKAGTRWEAVAQSRLENFQF

SEQ ID NO: 46558 - protein, 125 aa, unidentified
  source 1..125: note = Ignavibacteria bacterium
  REGION 1..125: note = tr|A0A2M7MLY2|A0A2M7MLY2_9BACT NADPH-dependent 7-cyano-7-deazaguanine reductase OS=Ignavibacteria bacterium CG_4_10_14_3_um_filter_37_18 OX=1974037 GN=queF; PE = 3 SV=1
MNSKQKILVLFPNPNPERNYKIIHTAHEFTSVCPVTGQPDFGKITLEYIAEGLCVELKSYKLYLQSFRNDGIYFEAVTNKILNDLVELMQPRYMKITSDFNMRGGISSVIEAVYQSPNFSFLSNE

SEQ ID NO: 46559 - protein, 120 aa, unidentified
  source 1..120: note = Ignavibacteria bacterium
  REGION 1..120: note = tr|A0A1G0PGF5|A0A1G0PGF5_9BACT NADPH-dependent 7-cyano-7-deazaguanine reductase OS=Ignavibacteria bacterium GWB2_35_6b OX=1798424 GN=queF PE=3 SV=1
MNDKTKLLETFPNPNPERDYTIIHTAPEFTSVCPKTGHPDFATMILEYIPDELCVELKSYKYYLNSFRNDGIYFEAVTNKILNDLVEVLKPRFMRLTAEFNTRGGISSIVEVEYEKAIEL

SEQ ID NO: 46560 - protein, 124 aa, unidentified
  source 1..124: note = Ignavibacteriae bacterium
  REGION 1..124: note = tr|A0A2G6E441|A0A2G6E441_9BACT NADPH-dependent 7-cyano-7-deazaguanine reductase OS=Ignavibacteriae bacterium OX=2026749 GN=queF PE=3 SV=1
MKDQKKILEVFENEYQNRDYSIEHTAPEFTSVCPKTGQPDFGTIILEYIPDKLCIELKSYKIYLNSYRNEGIYYESVVNKIMDDLVAVCKPRYMNITAEFNTRGGISSIIEVEYEKEEEINSLN

SEQ ID NO: 46561 - protein, 113 aa, unidentified
  source 1..113: note = Ignavibacteriae bacterium
  REGION 1..113: note = tr|A0A2N1V665|A0A2N1V665_9BACT NADPH-dependent 7-cyano-7-deazaguanine reductase OS=Ignavibacteriae bacterium HGW-Ignavibacteriae-4 OX=2013811 GN=queF PE=3; SV = 1
MNNLETFENPRPGRYFSITHENPEFTSVCPMTGLPDFGNIIVNYVPDQLCVELKSLKYYFLAYRDKGIFYEEITNQILDDLVAVCAPLEMEIISEWGTRGGMTSTIVASYIKE

SEQ ID NO: 46562 - protein, 125 aa, unidentified
  source 1..125: note = Ignavibacteriales bacterium
  REGION 1..125: note = tr|A0A2M7ZFM9|A0A2M7ZFM9_9BACT NADPH-dependent 7-cyano-7-deazaguanine reductase OS=Ignavibacteriales bacterium CG_4_9_14_3_um_filter_34_10 OX=1974044 GN=queF; PE = 3 SV =1
MMNEKQKILITFPNPNTQRDYTIIHVAPEFTSVCPVTGQPDFGTITLEYIADKLCVELKSYKFYLQSFRNDGIYFEAVTNRILNDLDETLKPRYIKITAKFNTRGGIYSEIIAENRRKKLKKKFI

SEQ ID NO: 46563 - protein, 119 aa, unidentified
  source 1..119: note = Ignavibacteriales bacterium
  REGION 1..119: note = tr|A0A2M7I270|A0A2M7I270_9BACT NADPH-dependent 7-cyano-7-deazaguanine reductase OS=Ignavibacteriales bacterium CG12_big_fil_rev_8_21_14_0_65_30_8 OX=1974046; GN = queFPE=3 SV=1
MEEKLKLLEVFDNTHPDREYTVIHEAPEFTSVCPKTGQPDFATITIEYIPDKLCVELKSLKLYLNSYRNDGIYFENVTNKILDDLVKVTKPRYMLVIADFNVRGGIASTIEAEYFKEQN

SEQ ID NO: 46564 - protein, 127 aa, Ignavibacterium album
  REGION 1..127: note = tr|I0AG94|I0AG94_IGNAJ NADPH-dependent 7-cyano-7-deazaguanine reductase OS=Ignavibacterium album (strain DSM 19864 / JCM 16511 / NBRC 101810 / Mat9-16); OX = 945713 GN= queF PE=3 SV=1
MNDKRKILEVFENKYPDRDYTITHVAPEFTSLCPKTGQPDFATITIEYIPDLLCVELKSLKLYFHSYRNDGIFYESLTNQILDDLVAVVKPRYMRITAEFNVRGGISSVVEAEYYSDDYYDEDISFS

SEQ ID NO: 46565 - protein, 128 aa, Ilumatobacter fluminis
  REGION 1..128: note = tr|A0A4R7HZ63|A0A4R7HZ63_9ACTN NADPH-dependent 7-cyano-7-deazaguanine reductase OS=Ilumatobacter fluminis; OX = 467091 GN=queF PE=3 SV=1
MSEQTEKLTVLGNTVRHAIEHVEVFPAPPNVSVVRFTNDELNSMCPVTEQPDLSTVVIEYEPDAWCIESKSLKLYLWGFRDRAVFAEALAAEIAGEVMTTASPRWVKVTLTQRPRGGIEIQVVSELNR

SEQ ID NO: 46566 - protein, 123 aa, Ilumatobacter sp.
  REGION 1..123: note = tr|A0A2E3TTA4|A0A2E3TTA4_9ACTN NADPH-dependent 7-cyano-7-deazaguanine reductase OS=Ilumatobacter sp.; OX = 1967498 GN=queF PE=3 SV=1
MELTVLGNTVRHAIDHVEVFAAPENISTVTFTNDELTSMCPITEQPDLSTVVIDYVPGEWCVESKSLKLYLWGFRKRAVFAEALAAEIAGEIMLTAKPERVTVTLTQRPRGGIEVKAVSELTG

SEQ ID NO: 46567 - protein, 129 aa, unidentified
  source 1..129: note = Imhoffiella purpurea
  REGION 1..129: note = tr|W9VJT9|W9VJT9_9GAMM NADPH-dependent 7-cyano-7-deazaguanine reductase OS=Imhoffiella purpurea; OX = 1249627 GN=queF PE=3 SV=1
MPSVPSKSLEIFPNPQPERDYTIRIRVPEFTCLCPKTGQPDFAELTLEYVPDRQCVELKSLKTYVWSYRDEGAFHEAVTNRILDDLVEATRPRFMRLTADFNVRGGIYTTVVAEHRAADWQPPAPVSLP

SEQ ID NO: 46568 - protein, 139 aa, unidentified
  source 1..139: note = Immundisolibacter cernigliae
  REGION 1..139: note = tr|A0A1B1YQF6|A0A1B1YQF6_9GAMM NADPH-dependent 7-cyano-7-deazaguanine reductase OS=Immundisolibacter cernigliae OX=1810504 GN=queF PE=3 SV=1
MASSRPVRSKKSQAAGSALETFANPHPGRDYTVRMRCPEFTCLCPKTGQPDFATIHIDFVPDRLCVELKSLKLYLWSFRDQGAFHEAVTGSILDDLVGAMAPRFLRVTAEFLVRGGIYTSVVAEHRMPGWTPAAPVLLP

SEQ ID NO: 46569 - protein, 160 aa, Inhella sp.
  REGION 1..160: note = tr|A0A3S2V4E2|A0A3S2V4E2_9BURK NADPH-dependent 7-cyano-7-deazaguanine reductase OS=Inhella sp. CCP-18; OX = 2499851 GN=queF PE=3 SV=1
MATTKKKTPPASQRQKPTNPPSKPSKELQVFPNPAPQRDYLLQFQVPEFTCHCPLTGQPDFAHFTIEMVADEWCVELKSLKMYMWSYRDEGAFHEAVTNKILDDIVKVTNPRFARIKARWYVRGGIYTNIVAEHRKKGWKPATPVEFPAFPMESGLLAGG

SEQ ID NO: 46570 - protein, 130 aa, unidentified
  source 1..130: note = Inmirania thermothiophila
  REGION 1..130: note = tr|A0A3N1Y0A5|A0A3N1Y0A5_9GAMM NADPH-dependent 7-cyano-7-deazaguanine reductase OS=Inmirania thermothiophila OX=1750597 GN=queF PE=3 SV=1
MSTRPSKNLETFPNPEPGRDYTIRIRAPEFTCLCPKTGQPDFATLLIEYVPDRLCVELKSLKLYIWSYRDEGHFHEAVTNRILDDLVAAVQPRFMRLTAEFNVRGGIWTTVVAEHRAEGWRPPEPVTLPG

SEQ ID NO: 46571 - protein, 158 aa, Inquilinus limosus
  REGION 1..158: note = tr|A0A0A0CY96|A0A0A0CY96_9PROT NADPH-dependent 7-cyano-7-deazaguanine reductase OS=Inquilinus limosus MP06 OX=1398085 GN=queF PE=3 SV=1
MARKSKAQGTEALTQLGQATALPESPEDAVLETVPNPRPKQLYLVRFTAPEFTSLCPITGQPDFAHLVIDYAPAAKIVESKSLKLFLGSFRNHGAFHEDCTVYVAERLIKAMKPRWLRIGGYWYPRGGIPIDVFYQSGPAPEGLWLPDQGVPTYRGRG

SEQ ID NO: 46572 - protein, 156 aa, Inquilinus limosus
  REGION 1..156: note = tr|A0A211ZRQ7|A0A211ZRQ7_9PROT NADPH-dependent 7-cyano-7-deazaguanine reductase OS=Inquilinus limosus; OX = 171674 GN=queF PE=3 SV=1
MARKAKGTEALTQLGQATALPASPEAAVLETVPNPRPKQLYLVRFTAPEFTSLCPITGQPDFAHLVIDYAPAAKIVESKSLKLFLGSFRNHGAFHEDCTVYVAERLIKAMKPRWLRIGGYWYPRGGIPIDVFYQSGPAPDGLWLPDQGVPPYRGRG

SEQ ID NO: 46573 - protein, 154 aa, Insolitispirillum peregrinum
  REGION 1..154: note = tr|A0A1N7MMX7|A0A1N7MMX7_9PROT NADPH-dependent 7-cyano-7-deazaguanine reductase OS=Insolitispirillum peregrinum OX=80876 GN=queF PE=3 SV=1
MTNSDPSGLTQLGTHTALPDDPERAVLETVPNPHPDTRYVTRFTQPEFTSLCPVTGQPDFAHLVIDFIPNQRLVESKSLKLFLGSFRNHGAFHEDCTVYIGKRIAAAIEPHWLRIGGYWYPRGGMPIDVFWQTGEAPAGVWIPEQGVAGYRGRG

SEQ ID NO: 46574 - protein, 167 aa, unidentified
  source 1..167: note = Intestinibacter bartlettii
  REGION 1..167: note = tr|B0A667|B0A667_9FIRM NADPH-dependent 7-cyano-7-deazaguanine reductase OS=Intestinibacter bartlettii DSM 16795 OX=445973 GN=queF PE=3 SV=1
MLETGRQNKELEGLSLLGNQGTKYKFGYDPDILEVFDNKHPNNDYFVKFNCPEFTSLCPITGQPDFATIYISYIPGEKMVESKSLKLYLFSFRNHGDFHEDCMNIIMKDLIKLMAPKYIEVWGKFTPRGGISIDPYCNYGIPGTKYEKMAEHRMMNHDLYPEKVDNR

SEQ ID NO: 46575 - protein, 275 aa, Iodobacter fluviatilis
  REGION 1..275: note = tr|A0A377Q9R8|A0A377Q9R8_9NEIS NADPH-dependent 7-cyano-7-deazaguanine reductase OS=Iodobacter fluviatilis; OX = 537 GN=queF PE=3 SV=1
MSDVEHSPLGKTVSYITEYEPSLLFPISRTGKREEIGVGETLPFMGMDIWNGYELSWLNSRGKPQVAIAIFNIPASSPNIIESKSFKLYLNSFNQTKLETREALQNLLQADLSAAAGANIGVQLIGPEQFHQQRLAELDGYCIDNLDIEVDQYAPQVGLLKCDGGDTTITESLTSNLLKSNCLVTGQPDWASIQISYTGKPINRESLLRYLISFRNHNEFHEQCVERIFVDIMRDCAPMKLSVYARYTRRGGLDINPYRCNFSGPLPSNLRGARQ

SEQ ID NO: 46576 - protein, 275 aa, Iodobacter sp.
  REGION 1..275: note = tr|A0A3S8ZR52|A0A3S8ZR52_9NEIS NADPH-dependent 7-cyano-7-deazaguanine reductase OS=Iodobacter sp. H11R3; OX = 2496266 GN=queF PE=3 SV=1
MSDVEHSPLGKTVSYITEYDPSLLFPISRAGKRQEIGLGETLPFMGMDIWNGYELSWLNSRGKPQVAIAIFNIPASSPNIIESKSFKLYLNSFNQTKLETREALQSLLQADLSTATGTNIGVQLIIPEQFHQQRLTELDGYCIDNLDIEVDQYSPLAGLLKCDSGETTITESLTSNLLKSNCLVTGQPDWASIQISYTGKPINRESLLRYLISFRNHNEFHEQCVERIFVDIMRDCAPIKLAVYARYTRRGGLDINPYRCNFSGPLPSNLRGARQ

SEQ ID NO: 46577 - protein, 275 aa, Iodobacter sp.
  REGION 1..275: note = tr|A0A2G3JCV1|A0A2G3JCV1_9NEIS NADPH-dependent 7-cyano-7-deazaguanine reductase OS=Iodobacter sp. BJB302; OX = 1506510 GN=queF PE=3 SV=1
MSDVELSPLGKTVSYITEYEPSLLFPISRTGKREEIGVGETLPFMGMDIWNGYELSWLNSRGKPQVAIAIFNIPASSPNIIESKSFKLYLNSFNQTKLETREALQKLLQADLSAAAGANVSVQLIGPEQFHQQRLAELDGYCIDNLDIEVNQYAPQAGLLKCDNGDTTITESLTSNLLKSNCLVTGQPDWASIQISYTGKPINRESLLRYLISFRNHNEFHEQCVERIFVDIMRDCAPMKLAVYARYTRRGGLDINPYRCNFSGPLPGNLRGARQ

SEQ ID NO: 46578 - protein, 117 aa, Isosphaera pallida
  REGION 1..117: note = tr|E8QY67|E8QY67_ISOPI NADPH-dependent 7-cyano-7-deazaguanine reductase OS=Isosphaera pallida (strain ATCC 43644 / DSM 9630 / IS1B) OX=575540 GN=queF; PE = 3 SV=1
MSASLLETFPNQFPNREYEVEITCPEFTAVCPKTGQPDFGTIIIRYVPGDKVLELKSLKLYLFSYRDRGIFYEHSINTILDDLVRVVQPRRMTVVGDFRPRGGITSKITAQHQAQAG

SEQ ID NO: 46579 - protein, 115 aa, unidentified
  source 1..115: note = Isosphaeraceae bacterium
  REGION 1..115: note = tr|A0A432MMR0|A0A432MMR0_9BACT NADPH-dependent 7-cyano-7-deazaguanine reductase OS=Isosphaeraceae bacterium GM2012 OX=2080755 GN=queF PE=3 SV=1
MSLETFPNQFPGREYEIEIVCPEFTAVCPKTGQPDFGTITITYVPADLCVELKSLKLYLQGYRNRGIYYEHSINVILDDLVAACQPRRMTVVGQFTPRGGISSRITSRFEDARPR

SEQ ID NO: 46580 - protein, 277 aa, unidentified
  source 1..277: note = Izhakiella australiensis
  REGION 1..277: note = tr|A0A1S8YSD1|A0A1S8YSD1_9ENTR NADPH-dependent 7-cyano-7-deazaguanine reductase OS=Izhakiella australiensis OX=1926881 GN=queF PE=3 SV=1
MHMKTAEITLLGKNTSYVQDYTPDLLESLPRSRGRDEISIKQENLPFSGFDLWTGFELSWLNGKGKPIVAIAEFFIPASSDNLIESKSFKLYLNSFNQTKFATPEKVHSTLEKDLSQAAGSKVQVKLYINLNHYPAITTDIPDECIDHLDINIDNYEFNPDYLINATSEEIVSETLTSNLLKSNCLVTNQPDWGSVIIRYEGKKIDREKLLRYLISFRTHNEFHEQCVERIFTDLNHYCHPEKLTIFARYTRRGGLDINPFRSNFETSLPVDRLIRQ

SEQ ID NO: 46581 - protein, 281 aa, unidentified
  source 1..281: note = Izhakiella australiensis
  REGION 1..281: note = tr|A0A1S8YKF0|A0A1S8YKF0_9ENTR NADPH-dependent 7-cyano-7-deazaguanine reductase OS=Izhakiella australiensis OX=1926881 GN=queF PE=3 SV=1
MSSYQQHQALQSLTLGKPTAYQDRYDPALLQAVPRAMNREPLGLQADSLPFHGADIWTLYELSWLNARGLPQVAVGEVTLDARSVNLIESKSFKLYLNSFNQTKFSSWGEVRATLERDLSACAGGDVSIALFRVQEIEGQPLGHFSGVCIDEQDIAIERYQFDAGYLQHAAGEEIAEEQLVSHLLKSNCLITNQPDWGSVQISYRGPRIDREALLRYLVSFRHHNEFHEQCVERIFNDIQRFCHPEQLSVYARYTRRGGLDINPWRSNGSFQPSHSRLVRQ

SEQ ID NO: 46582 - protein, 281 aa, unidentified
  source 1..281: note = Izhakiella capsodis
  REGION 1..281: note = tr|A0A1I4W8U7|A0A1I4W8U7_9ENTR NADPH-dependent 7-cyano-7-deazaguanine reductase OS=Izhakiella capsodis; OX = 1367852 GN=queF PE=3 SV=1
MSSYQQHQALQSLRLGKPTAYLDRYDPALLQAVPRAMNRDPLGLRADSLPFHGADIWTLYELSWLNKRGLPLVAVGEVTLDASSLNLIESKSFKLYLNSFNQTKFSSMDEVRVTLERDLRACAGGDVSVTLFRVQEIEGQPLGHFSGQCIDEQDIAIDDYRFNADYLQNAVGQKIVEEQLVSHLLKSNCLITNQPDWGSVQIYYRGPQIDREALLRYLVSFRHHNEFHEQCVERIFSDIQRFCQPELLSVYARYTRRGGLDINPWRSNVSFQPTHTRLARQ

SEQ ID NO: 46583 - protein, 281 aa, unidentified
  source 1..281: note = Izhakiella sp.
  REGION 1..281: note = tr|A0A4P8YCL0|A0A4P8YCL0_9ENTR NADPH-dependent 7-cyano-7-deazaguanine reductase OS=Izhakiella sp. KSNA2; OX = 2579935 GN=queF PE=3 SV=1
MSDYDNHQALSGLTLGKTTEYRDTLDAALLQAVPRSLNRDPLGLRAESLPFHGADIWTLYELSWLNERGLPQVAVGHVSINADSPNLIESKSFKLYLNSFNQTRFADWQQVRDTLARDLSACAQGEVEVSLYKLHQLEGEAIARFDGECIDDLPITINDYDFNADWLDQAASGDIVEETLVSHLLKSNCLITHQPDWGSVQIRYRGPRIDREKLLRYLVSFRRHNEFHEQCVERIFSDIQRYCQPEQLSVYARYTRRGGLDINPWRSNVPFQPATGRLVRQ

SEQ ID NO: 46584 - protein, 153 aa, unidentified
  source 1..153: note = Jannaschia faecimaris
  REGION 1..153: note = tr|A0A1H3T117|A0A1H3T117_9RHOB NADPH-dependent 7-cyano-7-deazaguanine reductase OS=Jannaschia faecimaris; OX = 1244108 GN=queF PE=3 SV=1
MQTIYSDLQQLGGKTELPDSPETAMLERVQNPQADIDYCVRFTAPEFTSLCPMTGQPDFAHLVIDYVPGDWLVESKSLKLFLGSFRNHGAFHEDCTISIARRLADELSPRWLRIGGYWYPRGGIPIDVFWQTGAIPEGVWIPDQGVPPYRGRG

SEQ ID NO: 46585 - protein, 280 aa, Janthinobacterium agaricidamnosum
  REGION 1..280: note = tr|A0A3G2E362|A0A3G2E362_9BURK NADPH-dependent 7-cyano-7-deazaguanine reductase OS=Janthinobacterium agaricidamnosum OX=55508 GN=queF PE=3 SV=1
MTTTNDLAEQSPLGKSSAYHTDYAPELLFPIPRQGKRDELELHGTLPFFGLDIWNAYELSWLNQRGKPQVAIAKVSAPADSPNIIESKSFKLYLNSFNQTKLDSPQALLALLQQDLSNGFGAPVQVELTLQEDFGKLKMGEFDGVLLDRLDLEITQYTPSPLLLKAALDEAPVEEKLVSHLLKSNCLVTGQPDWGSVQIVYAGPQIDQESLLRYLIGFREHNEFHEQCVERIFVDILRQCKPQKLSVYARYTRRGGLDINPWRSNFSTGAMPGNLRNARQ

SEQ ID NO: 46586 - protein, 277 aa, Janthinobacterium agaricidamnosum
  REGION 1..277: note = tr|W0V9I4|W0V9I4_9BURK NADPH-dependent 7-cyano-7-deazaguanine reductase OS=Janthinobacterium agaricidamnosum NBRC 102515 = DSM 9628 OX=1349767 GN=queF; PE = 3 SV=1
MTNTADLSPLGKNAAYRSDYAPELLFPIPRQGKRDELALHGTLPFFGLDIWNAYELSWLNLRGKPQVAIARISAPADSPNIIESKSFKLYLNSFNQTRLASPDALLALLQQDLSKGFGAAVQIQLTLQEDFAKLEMGELDGVLLDRLDIEVNQYRPSPQLLKAALDDAPVQEKLVSHLLKSNCLVTGQPDWGSVQIEYAGPQIDQESLLRYLIGFREHNEFHEQCVERIFVDILRQCQPQKLAVYARYTRRGGLDINPWRSNFSTSAPPSNLRCARQ

SEQ ID NO: 46587 - protein, 280 aa, Janthinobacterium lividum
  REGION 1..280: note = tr|A0A5C4NI01|A0A5C4NI01_9BURK NADPH-dependent 7-cyano-7-deazaguanine reductase OS=Janthinobacterium lividum OX=29581 GN=queF PE=3 SV=1
MTTTNDLAEQSPLGKSSAYRTDYAPELLFPIPRQGKRDELELHGTLPFFGLDIWNAYELSWLNQRGKPQVAVAKVSAPADSPNIIESKSFKLYLNSFNQTKLDSPEALLALLKQDLSNGFGAPVQVELTLQEDFGKLKMGEFDGVLLDRLDLEITQYTPSPLLLKAALDEAPVEEKLVSHLLKSNCLVTGQPDWGSVQIDYAGPQIDQESLLRYLIGFREHNEFHEQCVERIFVDILRQCKPQKLSVYARYTRRGGLDINPWRSNFSTGTMPGNLRNARQ

SEQ ID NO: 46588 - protein, 280 aa, Janthinobacterium lividum
  REGION 1..280: note = tr|A0A1S1U0F3|A0A1S1U0F3_9BURK NADPH-dependent 7-cyano-7-deazaguanine reductase OS=Janthinobacterium lividum OX=29581 GN=queF PE=3 SV=1
MTTTNDLAERSPLGKSSAYRSDYAPELLFPIPRQGKRDELELHGTLPFFGLDIWNAYELSWLNQRGKPQVAIAKVSAPADSPNIIESKSFKLYLNSFNQTKLDSPEALLTLLKQDLSNGFGAPVQVELTLQEDFGKLKMGEFDGVLLDRLDLEITQYTPSPLLLKAAFDDAPVEEKLVSHLLKSNCLVTGQPDWGSVQIAYAGPQIDQESLLRYLIGFREHNEFHEQCVERIFVDILRQCKPQKLSVYARYTRRGGLDINPWRSNYSTGAMPGNLRNARQ

SEQ ID NO: 46589 - protein, 280 aa, Janthinobacterium sp.
  REGION 1..280: note = tr|A0A1S6F1M6|A0A1S6F1M6_9BURK NADPH-dependent 7-cyano-7-deazaguanine reductase OS=Janthinobacterium sp. LM6 OX=1938606 GN=queF PE=3 SV=1
MTTTNDLAELSPLGKSSAYRTDYAPELLFPIPRQGKRDELELHGTLPFFGLDIWNAYELSWLNQRGKPQVAIAKVSAPADSPNIIESKSFKLYLNSFNQTKLDSPEALLILLKQDLSKGFGAPVQVELTLQEDFGKLKMGEFDGVLLDRLDLEITQYTPSPQLLRAAFDDAPVEEKLVSHLLKSNCLVTGQPDWGSVQIEYAGPQIDQESLLRYLIGFREHNEFHEQCVERIFVDILRQCKPQKLSVYARYTRRGGLDINPWRSNFSTGAMPGNLRNARQ

SEQ ID NO: 46590 - protein, 277 aa, Janthinobacterium sp.
  REGION 1..277: note = tr|A0A349L3C9|A0A349L3C9_9BURK NADPH-dependent 7-cyano-7-deazaguanine reductase OS=Janthinobacterium sp.; OX = 1871054 GN=queF PE=3 SV=1
MTNTADLSPLGKSAAYRSDYAPELLFPIPRQGKRDELALHGTLPFFGLDIWNAYELSWLNLRGKPQVAIARVTVPADSPNIVESKSFKLYLNSFNQTRLADPEALRALLTQDLSQGFGAPVQVALTLQEAFSEQKMGELEGLLLDRLDVEITHYTPSPLMLTAALDEAPVEEKLVSHLLKSNCLVTGQPDWGSVQIHYAGPQINQESLLKYLIGFREHNEFHEQCVERIFMDILRQCAPQRLAVYARYTRRGGLDINPWRSNFSTATPPSNLRCARQ

SEQ ID NO: 46591 - protein, 280 aa, unidentified
  source 1..280: note = Janthinobacterium svalbardensis
  REGION 1..280: note = tr|A0A290X3A6|A0A290X3A6_9BURK NADPH-dependent 7-cyano-7-deazaguanine reductase OS=Janthinobacterium svalbardensis OX=368607 GN=queF PE=3 SV=1
MTTTNDLAELSPLGKSSAYRSDYAPELLFPIPRQGKRDELELHGTLPFFGLDIWNAYELSWLNQRGKPQVAIAKVSAPADSPNIIESKSFKLYLNSFNQTKLDSPEALLTLLKQDLSNGFGAPVQVELTLQEDFGKLKMGEFDGVLLDRLDLEITQYTPSPLLLKAAFDDAPVEEKLVSHLLKSNCLVTGQPDWGSVQIAYAGPQIDQESLLRYLIGFREHNEFHEQCVERIFVDILRQCKPQKLSVYARYTRRGGLDINPWRSNFSTGTMPGNLRNARQ

SEQ ID NO: 46592 - protein, 275 aa, Jeongeupia sp.
  REGION 1..275: note = tr|A0A1D9BAE1|A0A1D9BAE1_9NEIS NADPH-dependent 7-cyano-7-deazaguanine reductase OS=Jeongeupia sp. USM3; OX = 1906741 GN=queF PE=3 SV=1
MSNEHHSPLGKAVSYKAEYDPSLLFAIPRSGKRDEIGIGATLPFMGVDIWNAYELSWLNMRGKPQIALAVFEIPASSPNIIESKSFKLYLNSFNQTRLASAEALAELLRHDLGDAVGATVRVELIEPEAFDRQRLGELDGYCIDNLDIEVGSYTPQPGLLHCDEADSPVDEVLTSSLLKSNCLVTGQPDWASVQIRYVGQPINRESLLKYLISFRNHNEFHEQCVERIFVDIQRACAPLKLSVYARYTRRGGLDINPYRSNFNAPQPSNARTARQ

SEQ ID NO: 46593 - protein, 165 aa, Jeotgalibacillus alimentarius
  REGION 1..165: note = tr|A0A0C2W3X2|A0A0C2W3X2_9BACL NADPH-dependent 7-cyano-7-deazaguanine reductase OS=Jeotgalibacillus alimentarius OX=135826 GN=queF PE=3 SV=1
MSGRNEKELEGVNLLGEMNVEYSFDYNPGVLEAFDNKHVNRDYFVKFNCPEFTSLCPKTNQPDFATIYISYIPDQKMVESKSLKLYLFSFRNHGDFHEDCMNIIMNDLIELMDPRYIEVWGKFTPRGGISIDPYTNYGKPGTKYEEMAYHRLMNHDMYPEKIDNR

SEQ ID NO: 46594 - protein, 165 aa, Jeotgalibacillus campisalis
  REGION 1..165: note = tr|A0A0C2VSZ5|A0A0C2VSZ5_9BACL NADPH-dependent 7-cyano-7-deazaguanine reductase OS=Jeotgalibacillus campisalis OX=220754 GN=queF PE=3 SV=1
MSGRSDKELEGVNLLGNQGTEYAFNYAPEVLESFDNKHAGRDYFVKFNCPEFTSLCPKTNQPDFATIYISYIPDQKMVESKSLKLYLFSFRNHGDFHEDCMNIIMNDLIELMDPRYIEVWGKFTPRGGISIDPYTNYGKPGTKYEEMAFHRLMNHDMYPETVDNR

SEQ ID NO: 46595 - protein, 165 aa, unidentified
  source 1..165: note = Jeotgalibacillus malaysiensis
  REGION 1..165: note = tr|A0A0B5APF0|A0A0B5APF0_9BACL NADPH-dependent 7-cyano-7-deazaguanine reductase OS=Jeotgalibacillus malaysiensis OX=1508404 GN=queF PE=3 SV=1
MSGRNEKELEGVNLLGEMNVPYSFDYAPEVLEAFDNKHVNRDYFVKFNCPEFTSLCPKTNQPDFATIYISYIPDQKMVESKSLKLYLFSFRNHGDFHEDCMNIIMNDLIELMDPRYIEVWGKFTPRGGISIDPYTNYGKPGTKYEEMAYHRLMNHDMYPEKIDNR

SEQ ID NO: 46596 - protein, 165 aa, Jeotgalibacillus marinus; identical to SEQ ID NO: 44220
  REGION 1..165: note = tr|A0A0M0L1B7|A0A0M0L1B7_9BACL NADPH-dependent 7-cyano-7-deazaguanine reductase OS=Jeotgalibacillus marinus OX=86667 GN=queF PE=3 SV=1

SEQ ID NO: 46597 - protein, 165 aa, unidentified
  source 1..165: note = Jeotgalibacillus proteolyticus
  REGION 1..165: note = tr|A0A2S5G7C6|A0A2S5G7C6_9BACL NADPH-dependent 7-cyano-7-deazaguanine reductase OS=Jeotgalibacillus proteolyticus OX=2082395 GN=queF PE=3 SV=1
MSGRSDKELEGVSLLGNQGTEYSFNYAPQVLESFDNKHAGRDYFVKFNCPEFTSLCPKTNQPDFATIYISYIPDQKMVESKSLKLYLFSFRNHGDFHEDCMNIIMNDLIELMHPRYIEVWGKFTPRGGISIDPYTNYGKPGTKYEEMAFHRLMNHDMYPETVDNR

SEQ ID NO: 46598 - protein, 165 aa, Jeotgalibacillus salarius
  REGION 1..165: note = tr|A0A4Y8LBH3|A0A4Y8LBH3_9BACL NADPH-dependent 7-cyano-7-deazaguanine reductase OS=Jeotgalibacillus salarius OX=546023 GN=queF PE=3 SV=1
MTGRNEKELEGVNLLGEMNVPYSFDYAPEVLEAFDNKHVNRDYFVKFNCPEFTSLCPKTNQPDFATIYISYIPDQRMVESKSLKLYLFSFRNHGDFHEDCMNIIMNDLIKLMDPRYVEVWGKFTPRGGISIDPYVNYGKPGTKYEEMAFHRLMNHDMYPETIDNR

SEQ ID NO: 46599 - protein, 165 aa, Jeotgalibacillus soli
  REGION 1..165: note = tr|A0A0C2S2N5|A0A0C2S2N5_9BACL NADPH-dependent 7-cyano-7-deazaguanine reductase OS=Jeotgalibacillus soli; OX = 889306 GN=queF PE=3 SV=1
MSGRSDKELEGVTLLGNQGVKYSFDYAPEVLESFDNKHQGRDYFVKFNCPEFTSLCPITSQPDFATIYISYIPDVKMVESKSLKLYLFSFRNHGDFHEDCMNIIMNDLIELMDPRYIEVWGKFTPRGGISIDPYTNYGKPGTKYEEMAFHRLMHHDMYPETVDNR

SEQ ID NO: 46600 - protein, 165 aa, Jeotgalibacillus sp.
  REGION 1..165: note = tr|A0A4R5XHJ7|A0A4R5XHJ7_9BACL NADPH-dependent 7-cyano-7-deazaguanine reductase OS=Jeotgalibacillus sp. S-D1 OX=2552189 GN=queF PE=3 SV=1
MSGRSEKELEGVNLLGNQGVNYSFDYAPEVLESFENKHQGRDYFVKFNCPEFTSLCPITSQPDFATIYISYIPDVKMVESKSLKLYLFSFRNHGDFHEDCMNIIMNDLIELMDPRYIEVWGKFTPRGGISIDPYTNYGKPGTKYEEMAYHRLMNHDMYPETVDNR

SEQ ID NO: 46601 - protein, 165 aa, Jeotgalibacillus sp.
  REGION 1..165: note = tr|A0A4Y8LJE6|A0A4Y8LJE6_9BACL NADPH-dependent 7-cyano-7-deazaguanine reductase OS=Jeotgalibacillus sp. R-1-5s-1 OX=2555897 GN=queF PE=3 SV=1
MSGRNEKELEGVNLLGNQGVEYSFNYSPDVLEAFENKHVNRDYFVKFNCPEFTSLCPKTNQPDFATIYISYIPDQKMVESKSLKLYLFSFRNHGDFHEDCMNIILNDLVELMDPRYIEVWGKFTPRGGISIDPYTNYGKPGTKYEEMAYHRLMNHDMYPEKIDNR

SEQ ID NO: 46602 - protein, 162 aa, Jeotgalicoccus halophilus
  REGION 1..162: note = tr|A0A1G9BR41|A0A1G9BR41_9STAP NADPH-dependent 7-cyano-7-deazaguanine reductase OS=Jeotgalicoccus halophilus OX=586411 GN=queF PE=3 SV=1
MTEDYSKDLSLLGNQDVEYSFDYNPGILETFDNGHPGRDYFVKFNCPEFTTLCPMTGQPDFATLYISYVPDLKMVESKALKLYLFSFRNHGGFHENSVNMIVDDLVELMDPKYIEVWGKFTPRGGISIDPYVNYGKPGTKYEQMADHRLMNHDMYPEKIDNR

SEQ ID NO: 46603 - protein, 162 aa, Jeotgalicoccus halotolerans
  REGION 1..162: note = tr|A0A3E0B0C6|A0A3E0B0C6_9STAP NADPH-dependent 7-cyano-7-deazaguanine reductase OS=Jeotgalicoccus halotolerans OX=157227 GN=queF PE=3 SV=1
MTDDYSKDLSLLGNQNVEYKFNYNPEILETFENGHIGRDYFVKFNCPEFTTLCPMTGQPDFATIYISYIPDVKMVESKALKLYLFSFRNHGGFHENSMNMIMDDLIKLMDPKYIEVWGKFTPRGGISIDPYVNYGRPGTKYEEMADHRMMNHDLYPEKIDNR

SEQ ID NO: 46604 - protein, 162 aa, Jeotgalicoccus nanhaiensis
  REGION 1..162: note = tr|A0A4Y9HL26|A0A4Y9HL26_9STAP NADPH-dependent 7-cyano-7-deazaguanine reductase OS=Jeotgalicoccus nanhaiensis OX=568603 GN=queF PE=3 SV=1
MTEDYSKDLSLLGNQNVEYKFDYNPEILETFENGHIGRDYFVKFNCPEFTTLCPMTGQPDFATIYISYIPDVKMVESKALKLYLFSFRNHGGFHENSMNMIMDDLIKLMDPKYIEVWGKFTPRGGISIDPYVNYGRPGTKYEEMADHRMMNHDLYPEKIDNR

SEQ ID NO: 46605 - protein, 162 aa, unidentified
  source 1..162: note = Jeotgalicoccus saudimassiliensis
  REGION 1..162: note = tr|A0A078M3M6|A0A078M3M6_9STAP NADPH-dependent 7-cyano-7-deazaguanine reductase OS=Jeotgalicoccus saudimassiliensis OX=1461582 GN=queF PE=3 SV=1
MTEDYSKDLSLLGNQNVEYKFDYNPEILETFENGHPGRDYFVKFNCPEFTTLCPMTGQPDFATIYISYIPDVKMVESKALKLYLFSFRNHGGFHENSINMIVDDLVELMDPKYIEVWGKFTPRGGISIDPYVNYGRPGTKYETMADHRMMNHDMYPETVDNR

SEQ ID NO: 46606 - protein, 162 aa, Jeotgalicoccus sp.
  REGION 1..162: note = tr|A0A358JW33|A0A358JW33_9STAP NADPH-dependent 7-cyano-7-deazaguanine reductase OS=Jeotgalicoccus sp.; OX = 1871619 GN=queF PE=3 SV=1
MTEDYSKDLSLLGNQNVEYKFDYNPEILETFENGHIGRDYFVKFNCPEFTTLCPMTGQPDFATIYISYIPDVKMVESKALKLYLFSFRNHGGLHENSVNMIVDDLVELMDPKYIEVWGKFTPRGGISIDPYVNYGRPGTKYEQMAEHRMMNHDMYPEKIDNR

SEQ ID NO: 46607 - protein, 154 aa, Jhaorihella thermophila
  REGION 1..154: note = tr|A0A1H5TT81|A0A1H5TT81_9RHOB NADPH-dependent 7-cyano-7-deazaguanine reductase OS=Jhaorihella thermophila OX=488547 GN=queF PE=3 SV=1
MPKTDVSGLTQLGAKVDAPASPEEAVLEKVPASHAGTDYVVRFTAPEFTSICPMTGQPDFAHIVIDYIPGDWLVESKSLKLYLHSFRNHGAFHEDCSIDIGKRLVDLLDPKWLRIGAYWYPRGGIPIDVFWQTGEPPEGVWIPDQGVAPYRGRG

SEQ ID NO: 46608 - protein, 152 aa, unidentified
  source 1..152: note = Jiella sp.
  REGION 1..152: note = tr|A0A4Y8RF38|A0A4Y8RF38_9RHIZ NADPH-dependent 7-cyano-7-deazaguanine reductase OS=Jiella sp. CBS5Q-3; OX = 2558362 GN=queF PE=3 SV=1
MQPGNLSQLGRAAAPAASPDDAVLETVPYTRGDGPPAIVRFTCAEFTSLCPVTGQPDFAHIVIDYAPDARLVESKSLKLFLTSFRNHGAFHEDCTVMIARRVVEATKPLWLRIGGYWYPRGGIPIDVFWQTGPAPDGVYLPEQGVPPYRGRG

SEQ ID NO: 46609 - protein, 148 aa, Kaistia sp.
  REGION 1..148: note = tr|A0A1E4C2U5|A0A1E4C2U5_9RHIZ NADPH-dependent 7-cyano-7-deazaguanine reductase OS=Kaistia sp. SCN 65-12; OX = 1660103 GN=queF PE=3 SV=1
MTTSVLGRPAEIPLDPASAVLDRVPNPHPDIDYLIRFTVPEFTALCPITGQPDFAHLVIDYVADQWMIESKSLKLFMFSYRNHGAFHEATTVEIGKRLVEALAPRWLRIGGYWYPRGGIPIDVFWQTGTAPATLWLPEQGVPGYRGRG

SEQ ID NO: 46610 - protein, 281 aa, unidentified
  source 1..281: note = Kalamiella piersonii
  REGION 1..281: note = tr|A0A3A9IW15|A0A3A9IW15_9GAMM NADPH-dependent 7-cyano-7-deazaguanine reductase OS=Kalamiella piersonii; OX = 2364647 GN=queF PE=3 SV=1
MSLYEKDQALSNLTLGKPTAYHDQYDPSLLQAVPRSLNRTPLGLMPDSLPFTGADIWTLYELSWLNSKGVPQVALGEVVLNATSEHLIESKSFKLYLNSFNQTRFADWGEVRQTLERDLSACAQGDVSVALFRLSEVEGQPIGQFSGYCIDEQDIEIADYSFNADYLADAAGSEVVEETLVSHLLKSNCLITNQPDWGSVMIRYKGPRIDREALLRYLISFRQHNEFHEQCVERIFNDVLRFCQPQQLTVYARYTRRGGLDINPWRSNVPFTPGYSRLARQ

SEQ ID NO: 46611 - protein, 164 aa, Kandleria vitulina
  REGION 1..164: note = tr|A0A0R2HIC4|A0A0R2HIC4_9FIRM NADPH-dependent 7-cyano-7-deazaguanine reductase OS=Kandleria vitulina DSM 20405 OX=1410657 GN=queF PE=3 SV=1
MSRTKEEMKDVTFLGNQNTKYPTDYDPSVLQSFDNKHPGREYFVKFNCPEFTSLCPITGQPDFATVYISYVPNIKMVESKSLKLYLFSFRNHGDFHEDCMNIIMNDLIKLMDPLYIEVWGKFTPRGGISIDPYCNYGKKGTRWEEVAWQRLTHHDLYPEKVDNR

SEQ ID NO: 46612 - protein, 164 aa, Kandleria vitulina; identical to SEQ ID NO: 46611
  REGION 1..164: note = tr|A0A1H2QB69|A0A1H2QB69_9FIRM NADPH-dependent 7-cyano-7-deazaguanine reductase OS=Kandleria vitulina; OX = 1630 GN=queF PE=3 SV=1

SEQ ID NO: 46613 - protein, 273 aa, Kangiella geojedonensis
  REGION 1..273: note = tr|A0A0F6TRG6|A0A0F6TRG6_9GAMM NADPH-dependent 7-cyano-7-deazaguanine reductase OS=Kangiella geojedonensis OX=914150 GN=queF PE=3 SV=1
MNHDDIPLGKDVGYPEQYDPSLLFPVARQLKRDELGLKGSLPFHGSDFWNAYEMSWLNAKGKPQVAIGVFEFAHDTVNIIESKSFKLYLNSYNQTRFEHWEAVLESLQHDLSKAAEGTVSVQLFTLEQYRQQVAITEPESVLIDEIDVEVSNYDYQPSALMAQGEVVQESLQSDLLKSNCLITSQPDWATVLIDYRGPKIDRESLLKYLISFRNHNEFHEQCVERIFVDLMKYCQPQELTVYARYTRRGGLDINPFRTNTTAHKAQNIRLVRQ

SEQ ID NO: 46614 - protein, 278 aa, Kangiella koreensis
  REGION 1..278: note = tr|C7RA26|C7RA26_KANKD NADPH-dependent 7-cyano-7-deazaguanine reductase OS=Kangiella koreensis (strain DSM 16069 / KCTC 12182 / SW-125) OX=523791 GN=queF; PE = 3 SV=1
MQNNDTTNQIPLGKQVEYPSQYQPELLFPVARQLKRVEIDIQGQLPFHGTDIWNAYELSWLNAKGKPQVAIAVFEFDCTSTNIIESKSFKLYLNSLNQSRFADWQAVEKTVTNDLSKAAETSVSVRLFKVEEYNLSVPVKEWQGILLDDLDIEINDYQYQPELLKLQSDEVVSESLYSHLLKSNCLITSQPDWASILIEYKGPKIHQESLLKYLISFRNHNEFHEQCVERVFTDIMRYCKPSELTVYARYTRRGGLDINPWRSNVSGKICHNQRHARQ

SEQ ID NO: 46615 - protein, 283 aa, unidentified
  source 1..283: note = Kangiella profundi
  REGION 1..283: note = tr|A0A2K9AL07|A0A2K9AL07_9GAMM NADPH-dependent 7-cyano-7-deazaguanine reductase OS=Kangiella profundi; OX = 1561924 GN=queF PE=3 SV=1
MQNHDLSKERSSQEIPLGKQVEYPSQYQPELLFPVARQLKRDEINIQGQLPFHGTDIWNAYELSWLNSKGKPQVAIAVFEFDCASTNIIESKSFKLYLNSLNQTRFTDWPTVEKTLTEDLSKAAGATVSVKLYEVEAYNQSVPVNEWQGILLDEQDIEVNSYQYDPELLEVDSEEETSESLYSHLLKSNCLITSQPDWASILIEYKGPKINHESLLKYLISFRNHNEFHEQCVERVFTDILRHCKPSELTVYARYTRRGGLDINPWRSNVKAKLCSNQRHSRQ

SEQ ID NO: 46616 - protein, 273 aa, unidentified
  source 1..273: note = Kangiella sediminilitoris
  REGION 1..273: note = tr|A0A1B3BC93|A0A1B3BC93_9GAMM NADPH-dependent 7-cyano-7-deazaguanine reductase OS=Kangiella sediminilitoris OX=1144748 GN=queF PE=3 SV=1
MTDKTIPLGKEVSYPEEYDASLLFPVARQVKRDELGLDKKLPFHGSDFWNGYELSWLNKKGKPQVAIGVFEFAHDTANIVESKSFKLYLNSFNQARFQSWEEVEKRLHHDLTKAANGEIQVSLYSLSDYQQKFPVIQPEAMLIDELDIEVKDYDYDANLLKTDTGVVSEMLQSDLLKSNCLITSQPDWATVFIEYKGQQINHESLLRYLISFRNHNEFHEQCVERIFTDIMDLCQPEELTVYARYTRRGGLDINPWRSNAKGHTGKNSRLVRQ

SEQ ID NO: 46617 - protein, 274 aa, Kangiella sp.
  REGION 1..274: note = tr|A0A3D8UNI5|A0A3D8UNI5_9GAMM NADPH-dependent 7-cyano-7-deazaguanine reductase OS=Kangiella sp. HD9-110m-PIT-SAG07 OX=2283595 GN=queF PE=3 SV=1
MMNDTNIPLGKEVSYPEVYDPSLLFPVARQFKRDELGLSDDLPFHGSDYWNAYEMSWLNGKGKPQVAIGIFEFAHNTVNIVESKSFKLYLNSYNQTRFDSWQHVLSRLQADLSQAADGQVSIQLLALEQYQSQVPIVSRDAVLIDELDVEINEYDYQPGLLKSSTEIVTERLQSDLLKSNCLITSQPDWASVLIDYTGPKIEHEALLKYLISFRNHNEFHEQCVERIFVDIMQHCQPQELTVYARYTRRGGLDINPFRTNVAGQNAKNIRLIRQ

SEQ ID NO: 46618 - protein, 145 aa, Kangiella sp.
  REGION 1..145: note = tr|A0A2G2KSZ9|A0A2G2KSZ9_9GAMM 7-cyano-7-deazaguanine reductase OS=Kangiella sp.; OX = 1920245 GN=COA86_18045 PE=4 SV=1
MTTKTKTYEAITSSLLLALPNPSSADYEIKIKIPEFTFLGVGNQPDFAQIFLTFYPGDKIIELKALKQYVYQLRDIVVSYERLINIIYDQLMETFVPDRLRLVMNCNPRGGISSHLTIDSDWKSRGGEDKYKDWLGANDEWMRLD

SEQ ID NO: 46619 - protein, 277 aa, Kangiella spongicola
  REGION 1..277: note = tr|A0A318D205|A0A318D205_9GAMM NADPH-dependent 7-cyano-7-deazaguanine reductase OS=Kangiella spongicola; OX = 796379 GN=queF PE=3 SV=1
MSSRLNPLGKDVAYPDTYDAGLLFPVARQLKRDELGLANGLPFHGGDFWNAYEMSWLNAKGKPQVAIGVFEFAHDSVNIIESKSFKLYLNSFNQTRFESWEKVSSVLRTDLEAAAEGAVSVKLFTLKEYHQQTPIIQPEAILIDELDVEITDYDYAPSLLRVDEGSGSGVVKESLQSDLLKSNCLITSQPDWATILIDYKGPRICHEALLKYLISFRNHNEFHEQCVERVFVDIMQYCQPKELTVYARYTRRGGLDINPWRSNVMSSFLRNQRFSRQ

SEQ ID NO: 46620 - protein, 273 aa, unidentified
  source 1..273: note = Kangiellaceae bacterium
  REGION 1..273: note = tr|A0A2E2VNZ9|A0A2E2VNZ9_9GAMM NADPH-dependent 7-cyano-7-deazaguanine reductase OS=Kangiellaceae bacterium OX=2026751 GN=queF PE=3 SV=1
MDWKESLALGKATDYVSTYTPSLLQAVPRQYNREHLGISANNLPFKGHDLWHGYEVSWLNNKGKPQVALLKLTVPCDTPNIVESKSFKLYLNSLNQSRFGSVEQVSECIAADIQQVVGGAVTVILGPVHDTRWQSYPNIDGCCLDGLDIEVDAYQYEPGLLKRGVEKVSEVLYSHLFKSNCLVTHQPDWATVVIDYQGTEIDHESLLRYLISYRMHNEFHEQCVERIYSDIMQRLKPEYLMVQALFTRRGGLDICPVRASALDFSPMSRQIRQ

SEQ ID NO: 46621 - protein, 279 aa, Kerstersia gyiorum
  REGION 1..279: note = tr|A0A171KSP8|A0A171KSP8_9BURK NADPH-dependent 7-cyano-7-deazaguanine reductase OS=Kerstersia gyiorum; OX = 206506 GN=queF PE=3 SV=1
MSHTPLPGATLLGQSVSYPDHYDPTVLHAIPREAARQALGYAAVLPFQGADIWRAYELSWLNARGKPLVATASFVIPADSPNLIESKSFKLYLNSHNQARHASAATLQELLARDLSRVAQAPVQVALQLEAGDMATPPLAELSGQCIDGLDIDIERYDPAPELLACRPDAGTIEETLVSRLLRSNCPVTSQPDWGSVQIQYRGPAMDHAALLRYIVSYRTHTGFHEQCVEQIFRDIMAQCRPEQLRVHACYTRRGGLDINPWRGTHGMPAPDAARTPRQ

SEQ ID NO: 46622 - protein, 273 aa, unidentified
  source 1..273: note = Ketobacter alkanivorans
  REGION 1..273: note = tr|A0A2K9LKS3|A0A2K9LKS3_9GAMM NADPH-dependent 7-cyano-7-deazaguanine reductase OS=Ketobacter alkanivorans OX=1917421 GN=queF PE=3 SV=1
MSDQLNGPLGQSSAYPDQYDPAQLHAIPRKLGRLEIGVDEDSLPFHGEDVWNAYELSWLNPKGKPVVALMFMVVPANSPNIVESKSLKLYLGSYNQTVMASVRQVTDKIAEDIGKVVGAKVRIELTELAWQGKFEVVSLPGRCIDDLDVDVSAYEVDSSLLTTEDHFVQVQLHSHLLRSCCPVTGQPDWASVLIEYSGNRICEEGLLKYLISFRSNQEFHEQCVERIFMDISRQCKPEKLSVYARYTRRGGIDINPFRSSDPRSMANLRLVRQ

SEQ ID NO: 46623 - protein, 271 aa, unidentified
  source 1..271: note = Ketobacter sp.
  REGION 1..271: note = tr|A0A3F2V7C0|A0A3F2V7C0_9GAMM NADPH-dependent 7-cyano-7-deazaguanine reductase OS=Ketobacter sp.; OX = 2083498 GN=queF PE=3 SV=1
MIEHGPLGQKSEHPQQYNPGVLFAIPRRLGRLEIGIGSELPFKGADIWNAYEVSWLTPKGKPVVAVMEMKVPADSSHIVESKSLKLYLGSFNQTGFSGFADVEQCIVKDVSEVVGAPVQVTLLPLTAAHSFTIESMPGRCVDELDIVADEYSVNARLLRVNPDENVNEQLHSHLLRSCCPVTGQPDWGSVLIGYQGNKIDEASLLRYLVSFRNNQEFHEQCVERIYLDIMQQCSPRALSVYARYTRRGGIDINPFRSSEEVDTRNLRLVRQ

SEQ ID NO: 46624 - protein, 273 aa, unidentified; identical to SEQ ID NO: 43839
  source 1..273: note = Ketobacter sp.
  REGION 1..273: note = tr|A0A3L8BM68|A0A3L8BM68_9GAMM NADPH-dependent 7-cyano-7-deazaguanine reductase OS=Ketobacter sp.; OX = 2083498 GN=queF PE=3 SV=1

SEQ ID NO: 46625 - protein, 155 aa, unidentified
  source 1..155: note = Kiloniella litopenaei
  REGION 1..155: note = tr|A0A0M2R7T3|A0A0M2R7T3_9PROT NADPH-dependent 7-cyano-7-deazaguanine reductase OS=Kiloniella litopenaei; OX = 1549748 GN=queF PE=3 SV=1
MTEESIYSNLTQLGGDSKLPDSPEEAVMERVANPQKGSGYVVRFTAPEFTSLCPITGQPDFAHLMIDYVPGDWLVESKSLKLFLGSFRNHGAFHEDCTVSIGKRIEELLEPKWLRIGGYWYPRGGIPIDVFYQSGPAPEGIWIPDQGVPPYRGRG

SEQ ID NO: 46626 - protein, 155 aa, unidentified
  source 1..155: note = Kiloniella spongiae
  REGION 1..155: note = tr|A0A0H2MJD5|A0A0H2MJD5_9PROT NADPH-dependent 7-cyano-7-deazaguanine reductase OS=Kiloniella spongiae; OX = 1489064 GN=queF PE=3 SV=1
MTEESIYSKLTQLGGDSKLPDSPEEAVMERVANPQKGSGYVVRFTAPEFTSLCPITGQPDFAHLMIDYVPGDWLVESKSLKLFLGSFRNHGAFHEDCTVSIGKRIEELLEPKWLRIGGYWYPRGGIPIDVFYQSGPVPEGIWIPDQGVPPYRGRG

SEQ ID NO: 46627 - protein, 157 aa, Kingella denitrificans
  REGION 1..157: note = tr|F0F1A0|F0F1A0_9NEIS NADPH-dependent 7-cyano-7-deazaguanine reductase OS=Kingella denitrificans ATCC 33394 OX=888741 GN=queF PE=3 SV=1
MSRNTEELHGITLLGNQKTEYRSDYAPEVLEAFDNKHQGNDYFVKFVCPEFTSLCPMTGQPDFATIVIRYIPDVKMVESKSLKLYLFSFRNHGDFHEDCVNIIMKDLIALMNPKYIEVFGEFTPRGGIAIHPFANYGRAGTPFEQMARERLFRHDMQ

SEQ ID NO: 46628 - protein, 157 aa, Kingella kingae
  REGION 1..157: note = tr|F5S9U4|F5S9U4_9NEIS NADPH-dependent 7-cyano-7-deazaguanine reductase OS=Kingella kingae ATCC 23330 OX=887327 GN=queF PE=3 SV=1
MSRNQQELNGITLLGNQKTQYPSNYAPEVLESFDNKHPSNDYFVKFVCPEFTSLCPITGQPDFATIVIRYIPDIKMVESKSLKLYLFSFRNHGDFHEDCINIIMKDLIQLMNPKYIEVFGEFTPRGGIAIHPFANYGRENTPFEQLARERLFQHDMQ

SEQ ID NO: 46629 - protein, 157 aa, unidentified
  source 1..157: note = Kingella negevensis
  REGION 1..157: note = tr|A0A238T9E1|A0A238T9E1_9NEIS NADPH-dependent 7-cyano-7-deazaguanine reductase OS=Kingella negevensis; OX = 1522312 GN=queF PE=3 SV=1
MSRNAEELNGVTLLGNQKTQYPTDYAPEMLESFDNKHPTNDYFVKFVCPEFTSLCPITGQPDFATITIRYIPDVKMVESKSLKLYLFSFRNHGDFHEDCVNIIMKDLIKLMNPKYIEVYGDFTPRGGISIMPFANYGRENTPFEQMARERLFKHEMQ

SEQ ID NO: 46630 - protein, 157 aa, Kingella oralis
  REGION 1..157: note = tr|C4GMN4|C4GMN4_9NEIS NADPH-dependent 7-cyano-7-deazaguanine reductase OS=Kingella oralis ATCC 51147 OX=629741 GN=queF PE=3 SV=1
MSRSSQELGGITLLGGQKTEYRADYAPEVLEAFDNKHPDNDYFVKFVCPEFTSLCPITGQPDFATIVIRYIPDVKMVESKSLKLYLFSFRNHGDFHEDCVNVIMKDLIALMNPKYIEVHGIFTPRGGIAIHPFANYGRLGTAFEQIARERLFGHDRQ

SEQ ID NO: 46631 - protein, 156 aa, Kingella potus
  REGION 1..156: note = tr|A0A377R0T0|A0A377R0T0_9NEIS NADPH-dependent 7-cyano-7-deazaguanine reductase OS=Kingella potus; OX = 265175 GN=queF PE=3 SV=1
MTRSSDELRGLSLLGGSTQYPDRYAPEVLEAFDNKHPDNDYFVKFVCPEFTSLCPMTGQPDFATIVIRYIPDMKMVESKSLKLYLFGFRNHGDFHEDCVNIIMKDLISLMNPKYIEVSGIFTPRGGIAIHPFANYGRPETPFAAMAYERLSRHDMQ

SEQ ID NO: 46632 - protein, 179 aa, Kinneretia asaccharophila
  REGION 1..179: note = tr|A0A4R6N3L8|A0A4R6N3L8_9BURK NADPH-dependent 7-cyano-7-deazaguanine reductase OS=Kinneretia asaccharophila OX=582607 GN=queF PE=3 SV=1
MAKTPSTAKPAAPKTTAAAKPIKASKAAKPAPKMREMPPNPPSRPSKELHVFPNPAPERDYVIQFQVPEFTCHCPLTGQPDFAHFTIDMIADKFCVELKSLKMYFWSYRDEGAFHEKVTNTILEDIVKVTNPRFIRITAKWYVRGGIYTNVVVEHRKKGWKPQPKVDLPAHSFESGLLR

SEQ ID NO: 46633 - protein, 136 aa, unidentified
  source 1..136: note = Kiritimatiella glycovorans
  REGION 1..136: note = tr|A0A0G3EJQ2|A0A0G3EJQ2_9BACT NADPH-dependent 7-cyano-7-deazaguanine reductase OS=Kiritimatiella glycovorans OX=1307763 GN=queF PE=3 SV=1
MNKQRYEELKHLGAGEKSYPDTPDRAILETFSNEHPDRVYWITFDSDEFTSLCPVTGQPDFGSIRIEYVPADRCIESKSLKLYLFSFRQVGSFYEDVINRIYSDLHAVLEPRRLVVRGRFTARGGITSTVRVDSAE

SEQ ID NO: 46634 - protein, 138 aa, unidentified
  source 1..138: note = Kiritimatiellaceae bacterium
  REGION 1..138: note = tr|A0A520SSB3|A0A520SSB3_9BACT NADPH-dependent 7-cyano-7-deazaguanine reductase OS=Kiritimatiellaceae bacterium OX=2026752 GN=queF PE=3 SV=1
MSDQERLSQLTLLKKGELKYPMNPDEAELQTFENLNKERNFWITFKTPEFTSLCPLTGQPDFAHITIDYVPDELIVESKSLKLYLFSFRQTGTFYEEIVNRIYTDLYALLQPRKMIVEAEFTPRGGITSIVKIDSTEA

SEQ ID NO: 46635 - protein, 138 aa, unidentified
  source 1..138: note = Kiritimatiellaceae bacterium
  REGION 1..138: note = tr|A0A2E0R4M3|A0A2E0R4M3_9BACT NADPH-dependent 7-cyano-7-deazaguanine reductase OS=Kiritimatiellaceae bacterium OX=2026752 GN=queF PE=3 SV=1
MSDEKRLSQLTLLKKGELKYPMNPDEAELQTFENLNKERNFWITFKTPEFTSLCPLTGQPDFAHITIDYIPDEVIVESKSLKLYLFSFRQTGTFYEEIVNRVYSDLDQLLSPRKLIVEAEFTPRGGITSIVKVDSSEA

SEQ ID NO: 46636 - protein, 281 aa, unidentified
  source 1..281: note = Klebsiella aerogenes
  REGION 1..281: note = tr|A0A0F0PQB2|A0A0F0PQB2_KLEAE NADPH-dependent 7-cyano-7-deazaguanine reductase OS=Klebsiella aerogenes; OX = 548 GN=queF PE=3 SV=1
MSSYDNHQALAGLTLGKSTDYRDTYDASLLQGVPRSLNRDPLGLHADNLPFHGADIWTLYELSWLNAKGLPQVAVGYVELSDTTINLVESKSFKLYLNSFNQTRFADWQEVQATLTRDLSACAQGEVKVSLYRLDELEGQPVAHLHGTCIDDQDIEIDNYQFSADYLQDAASGKVVEETLVSHLLKSNCLITHQPDWGSVQIQYRGPKIDREKLLRYLVSFRHHNEFHEQCVERIFNDVLRFCRPESLSVYARYTRRGGLDINPWRSNGEFVPATGRLARQ

SEQ ID NO: 46637 - protein, 280 aa, unidentified
  source 1..280: note = Klebsiella aerogenes
  REGION 1..280: note = tr|A0A145RTW7|A0A145RTW7_KLEAE NADPH-dependent 7-cyano-7-deazaguanine reductase OS=Klebsiella aerogenes; OX = 548 GN=queF PE=3 SV=1
MSYENHQALTGLTLGKSTDYRDTYDASLLQGVPRSLNRDPLGLHADALPFVGGDIWTLYELSWLNARGLPQVAVGHVELDYASVNLVESKSFKLYLNSFNQTKFNSWDEVQQTLERDLSACAQGNVTVSLYRLHELEGQPIAHFHGTCIDDQDIDVESYEFSTDYLENAAGGKVVDETLVSHLLKSNCLITHQPDWGSVQIQYRGPQIDREKLLRYLVSFRHHNEFHEQCVERIFNDIQRFCQPEKLSVYARYTRRGGLDINPWRTNTDFVPATGRLVRQ

SEQ ID NO: 46638 - protein, 281 aa, unidentified
  source 1..281: note = Klebsiella grimontii
  REGION 1..281: note = tr|A0A4R4DIA8|A0A4R4DIA8_9ENTR NADPH-dependent 7-cyano-7-deazaguanine reductase OS=Klebsiella grimontii; OX = 2058152 GN=queF PE=3 SV=1
MSSYDNHQALTGLTLGKSTDYRDTYDASLLQGVPRSLNRDPLDLHADNLPFHGADIWTLYELSWLNAKGLPQVAVGHVELSDTTVNLVESKSFKLYLNSFNQTRFADWQAVEATLARDLSACAQGEVKVSLYRLDELEGQPVAHLHGTCIDDQDIEIDNYQFSADYLQDAATGKVVEETLVSHLLKSNCLITHQPDWGSVQIQYRGAKIDREKLLRYLVSFRHHNEFHEQCVERIFNDIQRFCQPEALSVYARYTRRGGLDINPWRSNTDFVPATGRLARQ

SEQ ID NO: 46639 - protein, 281 aa, unidentified
  source 1..281: note = Klebsiella grimontii
  REGION 1..281: note = tr|A0A5D1Z4K0|A0A5D1Z4K0_9ENTR NADPH-dependent 7-cyano-7-deazaguanine reductase OS=Klebsiella grimontii; OX = 2058152 GN=queF PE=3 SV=1
MSSYDNHQALAGLTLGKSTDYRDTYDASLLQGVPRSLNRDPLDLHADNLPFHGADIWTLYELSWLNAKGLPQVAVGHVELSDTTVNLVESKSFKLYLNSFNQTRFADWQAVEATLARDLRACAQGEVKVSLYRLDELEGQPVAHLHGTCIDDQDIEIDNYQFSADYLQDAACGKVVEETLVSHLLKSNCLITHQPDWGSVQIQYRGAKIDREKLLRYLVSFRHHNEFHEQCVERIFNDIQRFCQPEALSVYARYTRRGGLDINPWRSNTDFVPATGRLARQ

SEQ ID NO: 46640 - protein, 281 aa, unidentified
  source 1..281: note = Klebsiella michiganensis
  REGION 1..281: note = tr|A0A2J4ZH97|A0A2J4ZH97_9ENTR NADPH-dependent 7-cyano-7-deazaguanine reductase OS=Klebsiella michiganensis OX=1134687 GN=queF PE=3 SV=1
MSSYDNHQALAGLTLGKSTDYRDTYDASLLQGVPRNLNRDPLDLHADNLPFHGADIWTLYELSWLNAKGLPQVAVGHVELSDTTVNLVESKSFKLYLNSFNQTRFADWQAVEATLARDLSACAQGEVKVALYRLDELEGQPVAHLHGTCIDDQDIEIDNYQFSADYLQDAAAGKVVEETLVSHLLKSNCLITHQPDWGSVQIQYRGAKIDREKLLRYLVSFRHHNEFHEQCVERIFNDIQRFCQPEALSVYARYTRRGGLDINPWRSNTDFVPATGRLARQ

SEQ ID NO: 46641 - protein, 281 aa, unidentified
  source 1..281: note = Klebsiella michiganensis
  REGION 1..281: note = tr|A0A249WK46|A0A249WK46_9ENTR NADPH-dependent 7-cyano-7-deazaguanine reductase OS=Klebsiella michiganensis OX=1134687 GN=queF PE=3 SV=1
MSSYDNHQALAGLTLGKSTDYRDTYDASLLQGVPRSLNRDPLDLHADNLPFHGADIWTLYELSWLNAKGLPQVAVGHVELSDTTVNLVESKSFKLYLNSFNQTRFADWQAVEATLARDLSACAQGEVKVALYRLDELEGQPVAHLHGTCIDDQDIEIDNYQFSADYLQDAAAGKVVEETLVSHLLKSNCLITHQPDWGSVQIQYRGAKIDREKLLRYLVSFRHHNEFHEQCVERIFNDIQRFCQPEALSVYARYTRRGGLDINPWRSNTDFVPATGRLARQ

SEQ ID NO: 46642 - protein, 281 aa, Klebsiella oxytoca
  REGION 1..281: note = tr|A0A181XLI1|A0A181XLI1_KLEOX NADPH-dependent 7-cyano-7-deazaguanine reductase OS=Klebsiella oxytoca; OX = 571 GN=queF_2 PE=3 SV=1
MSSYQDHQALSGLTLGKPTAYCDRYDATLLQAVPRSMNREPLGLYPDNLPFHGADIWTLYELSWLNANGLPQVAVGEISLNADSLNLIESKSFKLYLNSFNQTPFADWETVRSTLQRDLSACAQGEVSVTLFSVEQLEGSPIARLAGDCIDQQDIRIDNYEFNADYLQNAAGEEVVEECLVSHLLKSNCLITHQPDWGSVQISYRGGKIDREALLRYLVSFRHHNEFHEQCVERIFNDLMRYCRPQSLTVYARYTRRGGLDINPWRSNVAFAPEHGRLARQ

SEQ ID NO: 46643 - protein, 281 aa, Klebsiella oxytoca
  REGION 1..281: note = tr|A0A2U4DQA4|A0A2U4DQA4_KLEOX NADPH-dependent 7-cyano-7-deazaguanine reductase OS=Klebsiella oxytoca; OX = 571 GN=queF PE=3 SV=1
MSSYDNHQALAGLTLGKSTDYRDTYDASLLQGVPRSLNRDPLGLHADSLPFHGADIWTLYELSWLNAKGLPQVAVGHVELSDTTVNLVESKSFKLYLNSFNQTRFADWQEVEATLARDLSACAQGEVKVSLYRLDELEGQPVAHLHGTCIDDQDIEIDNYQFSADYLQDAAGGKVVEETLVSHLLKSNCLITHQPDWGSVQIRYRGAKIDREKLLRYLVSFRHHNEFHEQCVERIFSDIQRFCQPEALSVYARYTRRGGLDINPWRSNTDFVPAIGRLARQ

SEQ ID NO: 46644 - protein, 281 aa, Klebsiella pneumoniae
  REGION 1..281: note = sp|A6TD67|QUEF_KLEP7 NADPH-dependent 7-cyano-7-deazaguanine reductase OS=Klebsiella pneumoniae subsp. pneumoniae (strain ATCC 700721 / MGH 78578); OX = 272620 GN=queF P E=3 SV=1
MSSYDNHQALAGLTLGKSTDYRDTYDASLLQGVPRSLNRDPLGLHADNLPFHGADIWTLYELSWLNGKGLPQVAVGHVELPDTSLNLVESKSFKLYLNSFNQTRFASWQDVAETLTRDLSACAQGKVKVSLYRLDELEGQPIARLHGTCIDDQDIEIDNYQFSADYLQGAASGKIVEETLVSHLLKSNCLITHQPDWGSVQIQYRGAKIDREQLLRYLVSFRHHNEFHEQCVERIFNDILRFCQPESLSVYARYTRRGGLDINPWRSNGDFSPATGRLARQ

SEQ ID NO: 46645 - protein, 281 aa, Klebsiella pneumoniae
  REGION 1..281: note = tr|A0A422WR37|A0A422WR37_KLEPN NADPH-dependent 7-cyano-7-deazaguanine reductase OS=Klebsiella pneumoniae subsp. pneumoniae OX=72407 GN=queF PE=3 SV=1
MSSYDNKQALAGLTLGKSTDYRDTYDASLLQGVPRSLNRDPLGLHADNLPFHGADIWTLYELSWLNGKGLPQVAVGHVELPDTSLNLVESKSFKLYLNSFNQTRFASWQDVAETLTRDLSACAQGKVKVSLYRLDELEGQPIARLHGTCIDDQDIEIDNYQFSADYLQGAASGKIVEETLVSHLLKSNCLITHQPDWGSVQIQYRGAKIDREQLLRYLVSFRHHNEFHEQCVERIFNDILRFCQPESLSVYARYTRRGGLDINPWRSNGDFSPATGRLARQ

SEQ ID NO: 46646 - protein, 281 aa, unidentified
  source 1..281: note = Klebsiella quasipneumoniae
  REGION 1..281: note = tr|A0A222V9A0|A0A222V9A0_9ENTR NADPH-dependent 7-cyano-7-deazaguanine reductase OS=Klebsiella quasipneumoniae OX=1463165 GN=queF PE=3 SV=1
MSSYDNHQALAGLTLGKSTDYRDTYDASLLQGVPRSLNRDPLGLHADNLPFHGADIWTLYELSWLNGKGLPQVAVGHVELPDTTVNLVESKSFKLYLNSFNQTRFASWQEVEETLTRDLSACAQGEVKVSLYRLDELEGQPIAHLHGACIDDQDIEIDNYQFSADYLQGAASGKIVEETLVSHLLKSNCLITHQPDWGSVQIQYRGAKIDREQLLRYLVSFRHHNEFHEQCVERIFNDILRFCQPESLSVYARYTRRGGLDINPWRSNGDFSPATGRLARQ

SEQ ID NO: 46647 - protein, 281 aa, unidentified; identical to SEQ ID NO: 46646
  source 1..281: note = Klebsiella quasipneumoniae
  REGION 1..281: note = tr|A0A5C6IHS1|A0A5C6IHS1_9ENTR NADPH-dependent 7-cyano-7-deazaguanine reductase OS=Klebsiella quasipneumoniae subsp. similipneumoniae OX=1463164 GN=queF; PE = 3 SV=1

SEQ ID NO: 46648 - protein, 281 aa, unidentified
  source 1..281: note = Klebsiella quasivariicola
  REGION 1..281: note = tr|A0A223U6W7|A0A223U6W7_9ENTR NADPH-dependent 7-cyano-7-deazaguanine reductase OS=Klebsiella quasivariicola OX=2026240 GN=queF PE=3 SV=1
MSSYDNHQALAGLTLGKSTDYRDTYDASLLQGVPRSLNRDPLGLHADNLPFHGADIWTLYELSWLNAKGLPQVAVGHVELPDTSVNLVESKSFKLYLNSFNQTRFASWQDVAETLTRDLSACAQGEVKVSLYRLDELEGQPIAHLHGTCIDDQDIEIDNYQFSADYLQGAASGKIVEETLVSHLLKSNCLITHQPDWGSVQIQYRGAKIDREQLLRYLVSFRHHNEFHEQCVERIFNDILRFCQPESLSVYARYTRRGGLDINPWRSNGDFSPATGRLARQ

SEQ ID NO: 46649 - protein, 281 aa, Klebsiella sp.
  REGION 1..281: note = tr|A0A3G5CYU6|A0A3G5CYU6_9ENTR NADPH-dependent 7-cyano-7-deazaguanine reductase OS=Klebsiella sp. P1CD1; OX = 2267618 GN=queF PE=3 SV=1
MSSYDNHQALAGLTLGKSTDYRDTYDASLLQGVPRSLNRDPLGLHADNLPFHGADIWTLYELSWLNGKGLPQVAVGHVELPDTSVNLVESKSFKLYLNSFNQTRFASWQDVAETLTRDLSACAQGEVKVALYRLDELEGQPIAHLHGACIDDQDIEIDNYQFSTNYLQGAASGKIVEETLVSHLLKSNCLITHQPDWGSVQIQYRGAKIDREQLLRYLVSFRHHNEFHEQCVERIFNDILRFCQPESLSVYARYTRRGGLDINPWRSNGDFSPATGRLARQ

SEQ ID NO: 46650 - protein, 281 aa, Klebsiella sp.; identical to SEQ ID NO: 46641
  REGION 1..281: note = tr|J8W7W3|J8W7W3_9ENTR NADPH-dependent 7-cyano-7-deazaguanine reductase OS=Klebsiella sp. OBRC7; OX = 936565 GN=queF PE=3 SV=1

SEQ ID NO: 46651 - protein, 281 aa, Klebsiella variicola
  REGION 1..281: note = tr|A0A0B7GFY9|A0A0B7GFY9_KLEVA NADPH-dependent 7-cyano-7-deazaguanine reductase OS=Klebsiella variicola; OX = 244366 GN=queF PE=3 SV=1
MSSYDNHQALAGLTLGKSTDYRDTYDASLLQGVPRSLNRDPLGLHADNLPFHGADIWTLYELSWLNGKGLPQVAVGHVELPDTSVNLVESKSFKLYLNSFNQTRFASWQDVAETLTRDLSACAQGEVKVALYRLDELEGQPIAHLHGACIDDQDIEIDNYQFSTDYLQGAASGKIVEETLVSHLLKSNCLITHQPDWGSVQIQYRGAKIDREQLLRYLVSFRHHNEFHEQCVERIFNDILRFCQPESLSVYARYTRRGGLDINPWRSNGDFSPATGRLARQ

SEQ ID NO: 46652 - protein, 281 aa, Klebsiella variicola; identical to SEQ ID NO: 46649
  REGION 1..281: note = tr|A0A4U2WD77|A0A4U2WD77_KLEVA NADPH-dependent 7-cyano-7-deazaguanine reductase OS=Klebsiella variicola; OX = 244366 GN=queF PE=3 SV=1

SEQ ID NO: 46653 - protein, 281 aa, Kluyvera ascorbata
  REGION 1..281: note = tr|A0A3N2SA08|A0A3N2SA08_9ENTR NADPH-dependent 7-cyano-7-deazaguanine reductase OS=Kluyvera ascorbata; OX = 51288 GN=queF PE=3 SV=1
MSSYENHQALSGLTLGKTTDYRDTYDASLLQGVPRSLNRDPLGLHADTLPFHGADIWTLYELSWLNAKGLPQVAVGHVELSHATVNLVESKSFKLYLNSFNQTRFDSWEAVQQTLERDLCACAEGHVTVALYRIDELEGQPIAHFHGSCIDNQDIEIESYEFNADYLDGAAGEKVVQETLVSHLLKSNCLITHQPDWGSVQIQYRGPQIDREKLLRYLVSFRHHNEFHEQCVERIFNDILRFCAPESLSVYARYTRRGGLDINPWRSNGEFVPAIGRLVRQ

SEQ ID NO: 46654 - protein, 281 aa, Kluyvera ascorbata
  REGION 1..281: note = tr|A0A2T2Y3Y7|A0A2T2Y3Y7_9ENTR NADPH-dependent 7-cyano-7-deazaguanine reductase OS=Kluyvera ascorbata; OX = 51288 GN=queF PE=3 SV=1
MSSYDNHQALAGLTLGKTTDYRDTYDASLLQGVPRSLNRDPLGLHADSLPFHGADIWTLYELSWLNAKGLPQVAVGHVELSHETENLVESKSFKLYLNSFNQTRFACWQDVQETLERDLSACAQGKVTVALYRLDEIEGQPIAHFHGSCIDDQDIEIDSYQFNADYLDGAAGEKVVEETLVSHLLKSNCLITHQPDWGSVQIQYRGPKIDREKLLRYLVSFRHHNEFHEQCVERIFNDILRFCAPESLSVYARYTRRGGLDINPWRSNAEFVPAIGRLVRQ

SEQ ID NO: 46655 - protein, 281 aa, Kluyvera cryocrescens
  REGION 1..281: note = tr|A0A2X3DV48|A0A2X3DV48_KLUCR NADPH-dependent 7-cyano-7-deazaguanine reductase OS=Kluyvera cryocrescens; OX = 580 GN=queF PE=3 SV=1
MSSYENHQALSGLTLGKTTDYRDTYDANLLQGVPRSLNRDPLGLHADSLPFHGADIWTLYELSWLNAKGLPQVAVGHVELSHETVNLVESKSFKLYLNSFNQTRFANWEAVQETLERDLSACAQGNVTVALYRLDEVEGQPIAHFHGNCIDDQDIEIESYQFNAEYLKGAAGHKVVQETLVSHLLKSNCLITHQPDWGSVQIQYRGPQIDREKLLRYLVSFRHHNEFHEQCVERIFNDILRFCAPESLSVYARYTRRGGLDINPWRSNSDFAPAIGRLVRQ

SEQ ID NO: 46656 - protein, 281 aa, Kluyvera georgiana
  REGION 1..281: note = tr|A0A248KHU7|A0A248KHU7_9ENTR NADPH-dependent 7-cyano-7-deazaguanine reductase OS=Kluyvera georgiana; OX = 73098 GN=queF PE=3 SV=1
MSSYDNHQALAGLTLGKTTDYRDTYDASLLQGVPRSLNRDPLGLHADSLPFHGADIWTLYELSWLNAKGLPQVAVGHVELSHDTVNLVESKSFKLYLNSFNQTRFARWEDVQETLQRDLSACAEGNVTVALYRLDEIEGQPIAHFHGSCIDDQDIEIDNYQFNADYLDGAAGQKVVQETLVSHLLKSNCLITHQPDWGSVQIQYRGPQIDREKLLRYLVSFRHHNEFHEQCVERIFNDILRFCAPESLSVYARYTRRGGLDINPWRANGEFVPAIGRLVRQ

SEQ ID NO: 46657 - protein, 281 aa, Kluyvera georgiana
  REGION 1..281: note = tr|A0A1B7K5H7|A0A1B7K5H7_9ENTR NADPH-dependent 7-cyano-7-deazaguanine reductase OS=Kluyvera georgiana ATCC 51603 OX=1354264 GN=queF PE=3 SV=1
MSSYDNHQALAGLTLGKTTDYRDTYDASLLQGVPRSLNRDPLGLHADSLPFHGADIWTLYELSWLNAKGLPQVAVGHVELSHATVNLVESKSFKLYLNSFNQTRFASWQAVQETLQRDLSACAQGNVTVALYRLDEIEGQPIAHFHGSCIDDQDIEIDNYQFNADYLDGAAGQKVVQETLVSHLLKSNCLITHQPDWGSVQIQYRGPQIDREKLLRYLVSFRHHNEFHEQCVERIFNDILRFCAPESLSVYARYTRRGGLDINPWRANGEFVPAIGRLVRQ

SEQ ID NO: 46658 - protein, 281 aa, Kluyvera intermedia
  REGION 1..281: note = tr|A0A3S4F8A5|A0A3S4F8A5_KLUIN NADPH-dependent 7-cyano-7-deazaguanine reductase OS=Kluyvera intermedia; OX = 61648 GN=queF PE=3 SV=1
MSSYENHQALSGLTLGKTTDYRDTYDASLLQGVPRSLNRNPLGLHADSLPFHGGDIWTLYELSWLNAKGLPQVAVGHVELSHTTVNLVESKSFKLYLNSFNQTRFASWEAVQETLERDLSTCAQGKVTVALYRLDEVEGQPIAHFHGSCIDGQDIEIDNYQFNADYLDGAAGQKVVQETLVSHLLKSNCLITHQPDWGSVQIQYRGPQIDREKLLRYLVSFRHHNEFHEQCVERIFNDILRFCAPESLSVYARYTRRGGLDINPWRSNTEFVPAIGRLVRQ

SEQ ID NO: 46659 - protein, 281 aa, Kluyvera intermedia
  REGION 1..281: note = tr|A0A1X0X404|A0A1X0X404_KLUIN NADPH-dependent 7-cyano-7-deazaguanine reductase OS=Kluyvera intermedia; OX = 61648 GN=queF PE=3 SV=1
MSSYDNHQALSGLTLGKTTDYRDRYDASLLQGVPRSLNRDPLGLKAESLPFHGADIWTLYELSWLNARGLPQVAVGHVELNYASINLVESKSFKLYLNSFNQTRFASWDEVRDTLERDLSACAQGDVTVALYRLDEIEGQPIAHFHGSCIDDQDIVIDNYAFDANLLTDAASGKVIEETLVSHLLKSNCLITHQPDWGSVQIQYRGPKIDREKLLRYLVSFRHHNEFHEQCVERIFTDIQRFCQPESLSVYARYTRRGGLDINPWRTNTPFIPATGRLVRQ

SEQ ID NO: 46660 - protein, 281 aa, Kluyvera sp.
  REGION 1..281: note = tr|A0A2T3X9K7|A0A2T3X9K7_9ENTR NADPH-dependent 7-cyano-7-deazaguanine reductase OS=Kluyvera sp. Nf5; OX = 2116543 GN=queF PE=3 SV=1
MSSYDNHQALSGLTLGKTTDYRDRYDASLLQGVPRSLNRDPLGLKAENLPFQGADIWTLYELSWLNANGLPQVAVGHVELNYASINLVESKSFKLYLNSFNQTRFASWDEVRETLERDLSACAQGEVSVALYRLDEIEGQPIAHFHGTCIDDQDIVIDNYDFDAALLTDAASGKVVEETLVSHLLKSNCLITHQPDWGSVQIQYRGPKIDREKLLRYLVSFRHHNEFHEQCVERIFTDIQRFCQPESLSVYARYTRRGGLDINPWRTNTRFIPATGRLVRQ

SEQ ID NO: 46661 - protein, 159 aa, unidentified
  source 1..159: note = Komagataeibacter cocois
  REGION 1..159: note = tr|A0A365YZA6|A0A365YZA6_9PROT NADPH-dependent 7-cyano-7-deazaguanine reductase OS=Komagataeibacter cocois OX=1747507 GN=queF PE=3 SV=1
MTSPTPSDDGSQVLTQLGRNTAQPASPEEAVLERVPAPDPDKRYVVRFTAPEFTSLCPVTGQPDFAHIVIDYIPGKWIVESKSLKLFLTSFRNHGAFHEKCSMQIATTLVDLLDPVWLRIGAYWYPRGGMPIDVFWQTGTPPEGTWIPSQDVPGYRGRG

SEQ ID NO: 46662 - protein, 159 aa, unidentified
  source 1..159: note = Komagataeibacter europaeus
  REGION 1..159: note = tr|A0A0M0EI62|A0A0M0EI62_KOMEU NADPH-dependent 7-cyano-7-deazaguanine reductase OS=Komagataeibacter europaeus OX=33995 GN=queF PE=3 SV=1
MNTRPTHDDGSQFLTQLGQNTRQPNSPEEARLERVPAPERGRNYVVRFTAPEFTSLCPVTGQPDFAHIVIDYIPDEWIVESKSLKLFLTSFRNHGAFHEKCSVQIATTLVDLLKPVWLRIGAYWYPRGGMPIDVFWQTGAPPEGVWIPAQDVPGYRGRG

SEQ ID NO: 46663 - protein, 159 aa, unidentified
  source 1..159: note = Komagataeibacter europaeus
  REGION 1..159: note = tr|A0A0D6Q359|A0A0D6Q359_KOMEU NADPH-dependent 7-cyano-7-deazaguanine reductase OS=Komagataeibacter europaeus NBRC 3261 OX=1234669 GN=queF PE=3 SV=1
MNTRPTHDDGSQFLTQLGQNTRQPNSPEEARLERVPAPERGRNYVVRFTAPEFTSLCPVTGQPDFAHIVIDYIPDEWIVESKSLKLFLTSFRNHGAFHEKCSVQIATTLVDLLKPVWLRIGAYWYPRGGMPIDVFWQTGAPPEGVWISAQDVPGYRGRG

SEQ ID NO: 46664 - protein, 165 aa, unidentified
  source 1..165: note = Komagataeibacter hansenii
  REGION 1..165: note = tr|A0A318Q6T8|A0A318Q6T8_KOMHA NADPH-dependent 7-cyano-7-deazaguanine reductase OS=Komagataeibacter hansenii OX=436 GN=queF PE=3 SV=1
MPMTSSPPPAGTPDDGSQLLTQLGRNTTQPASPEDAILERVPAPDADRRYVVRFTAPEFTSLCPVTGQPDFAHIVIDYIPRAWIVESKSLKLFLTSFRNHGSFHEKCSMQIATTLVDLLDPVWLRIGAYWYPRGGMPIDVFWQTGAPPEGTWIPAQDVPGYRGRG

SEQ ID NO: 46665 - protein, 165 aa, unidentified; identical to SEQ ID NO: 46664
  source 1..165: note = Komagataeibacter hansenii
  REGION 1..165: note = tr|D5QJ04|D5QJ04_KOMHA NADPH-dependent 7-cyano-7-deazaguanine reductase OS=Komagataeibacter hansenii ATCC 23769 OX=714995 GN=queF PE=3 SV=1

SEQ ID NO: 46666 - protein, 159 aa, unidentified
  source 1..159: note = Komagataeibacter intermedius
  REGION 1..159: note = tr|A0A0N0MGJ9|A0A0N0MGJ9_9PROT NADPH-dependent 7-cyano-7-deazaguanine reductase OS=Komagataeibacter intermedius AF2 OX=1458464 GN=queF PE=3 SV=1
MNTRPTTDDGSQFLTQLGQNSQQPNSPEEARLERVPAPQRGRNYVVRFTAPEFTSLCPVTGQPDFAHIVIDYIPDEWIVESKSLKLFLTSFRNHGAFHEQCSMQIATTLVDVLKPVWLRIGAYWYPRGGMPIDVFWQTGAPPEGVWIPAQDVPGYRGRG

SEQ ID NO: 46667 - protein, 163 aa, unidentified
  source 1..163: note = Komagataeibacter maltaceti
  REGION 1..163: note = tr|A0A2S3W375|A0A2S3W375_9PROT NADPH-dependent 7-cyano-7-deazaguanine reductase OS=Komagataeibacter maltaceti OX=1203393 GN=queF PE=3 SV=1
MSSPTPPAARPDDGSQALTQLGHTTAQPTSPENAVLERVPAPDADRRYVVRFTAPEFTSLCPVTGQPDFAHIIIDYIPRDWIVESKSLKLFLTSFRNHGAFHEKCSMQIATTLVDLLDPVWLRIGAYWYPRGGMPIDIFWQTGTPPEGTWIPAQDVPGYRGRG

SEQ ID NO: 46668 - protein, 163 aa, unidentified
  source 1..163: note = Komagataeibacter medellinensis
  REGION 1..163: note = tr|G2I6S4|G2I6S4_KOMMN NADPH-dependent 7-cyano-7-deazaguanine reductase OS=Komagataeibacter medellinensis (strain NBRC 3288 / BCRC 11682 / LMG 1693 / Kondo 51) OX=63 4177 GN=queF PE=3 SV=1
MDPFMNTRPIPDDGSRSLTQLGQNATQPSSPEEARLERVPAPERGQHYVIRFTAPEFTSLCPVTGQPDFAHIVIDYIPDEWIVESKSLKLFLTSFRNHGAFHEKCSMQIALTLVDLLKPVWLRIGAYWYPRGGIPIDIFWQTGTAPDGVWVPAQDVPGYRGRG

SEQ ID NO: 46669 - protein, 159 aa, unidentified
  source 1..159: note = Komagataeibacter nataicola
  REGION 1..159: note = tr|A0A1U9RQK2|A0A1U9RQK2_9PROT NADPH-dependent 7-cyano-7-deazaguanine reductase OS=Komagataeibacter nataicola OX=265960 GN=queF PE=3 SV=1
MTSSPTQDDGSQFLTQLGQNSAQPASPEEARLERVPAPDRGRRYVVRFTAPEFTSLCPVTGQPDFAHIVIDYIPDEWIVESKSLKLFLTSFRNHGAFHERCSMQIATTLVDLLQPVWLRIGAYWYPRGGMPIDVFWQTSTPPEGVWIPAQDVPGYRGRG

SEQ ID NO: 46670 - protein, 159 aa, unidentified
  source 1..159: note = Komagataeibacter oboediens
  REGION 1..159: note = tr|A0A318QUZ9|A0A318QUZ9_9PROT NADPH-dependent 7-cyano-7-deazaguanine reductase OS=Komagataeibacter oboediens OX=65958 GN=queF PE=3 SV=1
MNTRPTPDDGSQFLTQLGQNSRQPNSPEDARLERVPAPQRGRNYVVRFTAPEFTSLCPVTGQPDFAHIVIDYIPDEWIVESKSLKLFLTSFRNHGAFHEQCSMQIATTLVDVLKPVWLRIGAYWYPRGGMPIDVFWQTGAPPEGVWIPAQDVPGYRGRG

SEQ ID NO: 46671 - protein, 159 aa, unidentified
  source 1..159: note = Komagataeibacter pomaceti
  REGION 1..159: note = tr|A0A318QC59|A0A318QC59_9PROT NADPH-dependent 7-cyano-7-deazaguanine reductase OS=Komagataeibacter pomaceti OX=2021998 GN=queF PE=3 SV=1
MTSPTPPDDGSQALTQLGRSTAQPASPEEAVLERVPAPDPDKRYVVRFTAPEFTSLCPVTGQPDFAHIVIDYIPGKWIVESKSLKLFLTSFRNHGAFHEKCSMQIATTLVDLLDPVWLRIGAYWYPRGGMPIDVFWQTGTPPEGTWIPAQDVPGYRGRG

SEQ ID NO: 46672 - protein, 159 aa, unidentified
  source 1..159: note = Komagataeibacter rhaeticus
  REGION 1..159: note = tr|A0A070ABY7|A0A070ABY7_9PROT NADPH-dependent 7-cyano-7-deazaguanine reductase OS=Komagataeibacter rhaeticus AF1 OX=1432055 GN=queF PE=3 SV=1
MNNPSSPDDGSRLLTQLGQNTAQPASPEEAELERVPAPERGRHYVVRFTAPEFTSLCPVTGQPDFAHIVIDYIPDEWIVESKSLKLFLTSFRNHGAFHEKCSMQIALTLVDLLRPVWLRIGAYWYPRGGMPIDVFWQTGTPPDGVWIPSQDVPGYRGRG

SEQ ID NO: 46673 - protein, 159 aa, unidentified
  source 1..159: note = Komagataeibacter rhaeticus
  REGION 1..159: note = tr|A0A181CDS1|A0A181CDS1_9PROT NADPH-dependent 7-cyano-7-deazaguanine reductase OS=Komagataeibacter rhaeticus OX=215221 GN=queF PE=3 SV=1
MNNPSPPDDGSRLLTQLGQNTAQPASPEEAELERVPAPERGRHYVVRFTAPEFTSLCPVTGQPDFAHIVIDYIPDEWIVESKSLKLFLTSFRNHGAFHEKCSMQIALTLVDLLRPVWLRIGAYWYPRGGMPIDVFWQTGTPPDGVWIPSQDVPGYRGRG

SEQ ID NO: 46674 - protein, 200 aa, unidentified
  source 1..200: note = Komagataeibacter saccharivorans
  REGION 1..200: note = tr|A0A347WBB1|A0A347WBB1_9PROT NADPH-dependent 7-cyano-7-deazaguanine reductase OS=Komagataeibacter saccharivorans OX=265959 GN=queF PE=3 SV=1
MPPPICKSGENHMPPTRISVDARPDLTASATHLLPPADGCPMNTRPTTDDGSQFLTQLGQNTTQPASPEEARLERVPAPERGRHYVVRFTAPEFTSLCPVTGQPDFAHIVIDYIPDEWIVESKSLKLFLTSFRNHGAFHEKCSVQIATTLVDLLKPVWLRIGAYWYPRGGMPIDVFWQTSTPPEGVWIPAQDVPGYRGRG

SEQ ID NO: 46675 - protein, 159 aa, unidentified
  source 1..159: note = Komagataeibacter sp.
  REGION 1..159: note = tr|A0A371Z0T1|A0A371Z0T1_9PROT NADPH-dependent 7-cyano-7-deazaguanine reductase OS=Komagataeibacter sp. AV 382 OX=2301223 GN=queF PE=3 SV=1
MNTRPTSDDGSQFLTQLGQHTAQPASPEEARLERVPAPERGRNYVVRFTAPEFTSLCPVTGQPDFAHIVIDYIPDEWIVESKSLKLFLTSFRNHGAFHEKCSVQIATTLVDLLKPVWLRIGAYWYPRGGMPIDVFWQTGAPPEGVWIPAQDVPGYRGRG

SEQ ID NO: 46676 - protein, 159 aa, unidentified
  source 1..159: note = Komagataeibacter sp.
  REGION 1..159: note = tr|A0A4P5NQ25|A0A4P5NQ25_9PROT NADPH-dependent 7-cyano-7-deazaguanine reductase OS=Komagataeibacter sp. MSKU9 OX=1932662 GN=queF PE=3 SV=1
MNTRPTPDDGSQFLTQLGQNTRQPNSPEEARLERVPAPERGRNYVVRFTAPEFTSLCPVTGQPDFAHIVIDYIPDEWIVESKSLKLFLTSFRNHGAFHEKCSVQIATTLVELLKPVWLRIGAYWYPRGGMPIDVFWQTGAPPAGVWIPAQDVPGYRGRG

SEQ ID NO: 46677 - protein, 159 aa, unidentified
  source 1..159: note = Komagataeibacter sucrofermentans
  REGION 1..159: note = tr|A0A318QS97|A0A318QS97_9PROT NADPH-dependent 7-cyano-7-deazaguanine reductase OS=Komagataeibacter sucrofermentans OX=1053551 GN=queF PE=3 SV=1
MTANSTPDDGSQFLTQLGQNSAQPASPEEARLERVPAPDRGRHYVVRFTAPEFTSLCPVTGQPDFAHIVIDYIPDEWIVESKSLKLFLTSFRNHGAFHERCSMQIAITLVDLLKPVWLRIGAYWYPRGGMPIDVFWQTGAPPEGVWIPAQDVPGYRGRG

SEQ ID NO: 46678 - protein, 159 aa, unidentified
  source 1..159: note = Komagataeibacter swingsii
  REGION 1..159: note = tr|A0A2V4RLC2|A0A2V4RLC2_9PROT NADPH-dependent 7-cyano-7-deazaguanine reductase OS=Komagataeibacter swingsii OX=215220 GN=queF PE=3 SV=1
MNTRPTPDDGSQFLTQLGQNTRQPNSPEEARLERVPAPERGRNYVVRFTAPEFTSLCPVTGQPDFAHIVIDYIPDEWIVESKSLKLFLTSFRNHGAFHEKCSVQIATTLVDLLKPVWLRIGAYWYPRGGMPIDVFWQTGAPPEGVWIPAQDVPGYRGRG

SEQ ID NO: 46679 - protein, 170 aa, unidentified
  source 1..170: note = Komagataeibacter xylinus
  REGION 1..170: note = tr|A0A2D3HAJ5|A0A2D3HAJ5_KOMXY NADPH-dependent 7-cyano-7-deazaguanine reductase OS=Komagataeibacter xylinus OX=28448 GN=queF PE=3 SV=1
MHPYSRADGSLHEQPVPPDDGSRLLTQLGQNTAQPASPEEAELERVPAPERGRHYVVRFTAPEFTSLCPVTGQPDFAHIVIDYIPDEWIVESKSLKLFLTSFRNHGAFHEKCSMQIALTLVDLLRPVWLRIGAYWYPRGGMPIDVFWQTGTPPDGVWIPSQDVPGYRGRG

SEQ ID NO: 46680 - protein, 159 aa, unidentified
  source 1..159: note = Komagataeibacter xylinus
  REGION 1..159: note = tr|A0A318PM46|A0A318PM46_KOMXY NADPH-dependent 7-cyano-7-deazaguanine reductase OS=Komagataeibacter xylinus OX=28448 GN=queF PE=3 SV=1
MTSSPSQDDGSQFLTQLGQNSAQPASPEEARLERVPAPDRGRRYVVRFTAPEFTSLCPVTGQPDFAHIVIDYIPDEWIVESKSLKLFLTSFRNHGAFHERCSMQIATTLVDLLKPVWLRIGAYWYPRGGMPIDVFWQTGTPPEGVWIPAQDVPGYRGRG

SEQ ID NO: 46681 - protein, 154 aa, unidentified
  source 1..154: note = Kordiimonadales bacterium
  REGION 1..154: note = tr|A0A5A7N693|A0A5A7N693_9PROT NADPH-dependent 7-cyano-7-deazaguanine reductase OS=Kordiimonadales bacterium JCM 17846 OX=1236968 GN=queF PE=3 SV=1
MSNNIYENLSQLGGSASQPEKPEDAILETVANPRPGSDYLVRFTCPEFTSLCPVTGQPDFAHLVIDYAPARLLVESKSLKLYLSSFRNHQAFHEDCTVGIAERLIEELQPKWLRLGGYWYPRGGIPIDVFFQSGKPPLGLWIPDTGVQPYRGRG

SEQ ID NO: 46682 - protein, 154 aa, unidentified
  source 1..154: note = Kordiimonadales bacterium
  REGION 1..154: note = tr|A0A5A7NML9|A0A5A7NML9_9PROT NADPH-dependent 7-cyano-7-deazaguanine reductase OS=Kordiimonadales bacterium JCM 17843 OX=1236965 GN=queF PE=3 SV=1
MSNDIYENLSQLGGSSPMPASPEEATLETVPNPRPGSDYLVRFTCPEFTSLCPVTGQPDFAHLVLDYVPARLLVESKSLKLYLHSFRNHPGFHEDCTVGIAERLIEELQPKWLRLGGYWYPRGGIPIDVFFQSGKPPQNLWIPDHGVQPYRGRG

SEQ ID NO: 46683 - protein, 154 aa, Kordiimonas lacus
  REGION 1..154: note = tr|A0A1G6VM07|A0A1G6VM07_9PROT NADPH-dependent 7-cyano-7-deazaguanine reductase OS=Kordiimonas lacus; OX = 637679 GN=queF PE=3 SV=1
MTKEIYQGLEQLGAKSDAPQTPEEAVLEYVKNPRPKSDYCVRFTCPEFTSLCPVTGQPDFAHLVLDYVPGDSLVESKSLKLFLQSFRNHAAFHEDCTVGIAERLVEEMKPKWLRFGGYWYPRGGIPIDVFYQTGEAPKGVWIPEQDVPTYRGRG

SEQ ID NO: 46684 - protein, 154 aa, Kordiimonas sp.
  REGION 1..154: note = tr|A0A2E1CXS4|A0A2E1CXS4_9PROT NADPH-dependent 7-cyano-7-deazaguanine reductase OS=Kordiimonas sp.; OX = 1970157 GN=queF PE=3 SV=1
MTNTHYDGLSQLGQKTDLPTTPEAAVLEKIPNPHPDVAYNVRFSCPEFTSLCPVTGQPDFAHLVIDYIPAEYLIESKSLKLYLHSFRNHAGFHEKCTVGIAKRLIETLSPLWLRIGGYWYPRGGMPIDVFYQTGQIPEKVWIPEQGVSNYRGRG

SEQ ID NO: 46685 - protein, 132 aa, unidentified
  source 1..132: note = Koribacter versatilis
  REGION 1..132: note = tr|Q1IQL7|Q1IQL7_KORVE NADPH-dependent 7-cyano-7-deazaguanine reductase OS=Koribacter versatilis (strain Ellin345) OX=204669 GN=queF PE=3 SV=1
MPKQPAYTAEHAAAGLDANFPEIEVWPNQFPNYEIEIDVPEFTSVCPKTGLPDFGTLWIRYMPNKSCLELKSLKEYLFTYRNLGIFQENIVNRVLNDVVKATKPVWAEVRGVFNARGGIGTTVVARYPRPKK

SEQ ID NO: 46686 - protein, 281 aa, unidentified
  source 1..281: note = Kosakonia arachidis
  REGION 1..281: note = tr|A0A1I6XHW4|A0A1I6XHW4_9ENTR NADPH-dependent 7-cyano-7-deazaguanine reductase OS=Kosakonia arachidis; OX = 551989 GN=queF PE=3 SV=1
MSSYDNHQALASLTLGKTTDYRDTYDASLLQGVPRSLNRDPLGLTAGNLPFQGADIWTLYELSWLNAKGLPQVAVGHVELDYASMNLVESKSFKLYLNSFNQTRFASWDAVRETLQRDLSACAQGNVSVTLYRIDELEGQPIAHFHGACIDDQDIQIENYAFDAAWLTGAASGKVVEETLVSHLLKSNCLITHQPDWGSVQIQYRGPKIDREKLLRYLVSFRHHNEFHEQCVERIFTDIQRFCQPEKLSVYARYTRRGGLDINPWRTNTDFIPATGRLVRQ

SEQ ID NO: 46687 - protein, 281 aa, unidentified
  source 1..281: note = Kosakonia cowanii
  REGION 1..281: note = tr|A0A3R5ZKY3|A0A3R5ZKY3_9ENTR NADPH-dependent 7-cyano-7-deazaguanine reductase OS=Kosakonia cowanii; OX = 208223 GN=queF PE=3 SV=1
MSSYDNHQALSSLTLGKTTDYRDTYDASLLQGVPRSLNRDPLGLKADNLPFHGADIWTLYELSWLNANGLPQVAVGQVELDYASLNLVESKSFKLYLNSFNQTRFASWDEVRSTLQRDLSACAQGAVSVTLYRVDELEGQPVAHFAGLCIDDQDIAIDNYEFDAALLTDAAHGEVVEETLVSHLLKSNCLITHQPDWGSVQIQYRGAQIDREKLLRYLVSFRHHNEFHEQCVERIFTDIQRFCQPESLSVYARYTRRGGLDINPWRSNTDFVPATGRLARQ

SEQ ID NO: 46688 - protein, 281 aa, unidentified
  source 1..281: note = Kosakonia oryzae
  REGION 1..281: note = tr|A0A1T5G2P9|A0A1T5G2P9_9ENTR NADPH-dependent 7-cyano-7-deazaguanine reductase OS=Kosakonia oryzae; OX = 497725 GN=queF PE=3 SV=1
MSSYDNHQALAGLTLGKTTDYRDTYDASLLQGVPRSLNRDPLGLTAGNLPFHGTDIWTLYELSWLNAKGLPQVAVGHVELDYASVNLVESKSFKLYLNSFNQTRFASWDEVRDTLQRDLSACAQGSVSVALYRIDELEGQPIAHFHGTCIDEQDIEIESYAFDAAWLTDAASGKVVDETLVSHLLKSNCLITHQPDWGSVQIQYRGPKIDREKLLRYLVSFRHHNEFHEQCVERIFTDIQRFCQPEKLSVYARYTRRGGLDINPWRTNTDFIPATGRLVRQ

SEQ ID NO: 46689 - protein, 281 aa, unidentified
  source 1..281: note = Kosakonia oryzendophytica
  REGION 1..281: note = tr|A0A1C4AW26|A0A1C4AW26_9ENTR NADPH-dependent 7-cyano-7-deazaguanine reductase OS=Kosakonia oryzendophytica OX=1005665 GN=queF PE=3 SV=1
MSSYDNHQALSGLTLGKTTSYRDTYDATLLQGVPRSLNRDPLGLTANNLPFRGADIWTLYELSWLNAKGLPQVAVGHVELDYASLNLVESKSFKLYLNSFNQTRFASWDEVRATLERDLSACAQGLVTVALYRLDELEGQPVAHFHGTCIDDQDIAVDNYAFDAALLTDAASGKVVEETLVSHLLKSNCLITHQPDWGSVQIQYRGPKIDREKLLRYLVSFRHHNEFHEQCVERIFTDIQRFCQPEKLSVYARYTRRGGLDINPWRTNTDFIPATGRLVRQ

SEQ ID NO: 46690 - protein, 281 aa, unidentified
  source 1..281: note = Kosakonia oryziphila
  REGION 1..281: note = tr|A0A1C4DSK7|A0A1C4DSK7_9ENTR NADPH-dependent 7-cyano-7-deazaguanine reductase OS=Kosakonia oryziphila; OX = 1005667 GN=queF PE=3 SV=1
MSSYDNHQALAGLTLGKTTDYRDTYDASLLQGVPRSLNRDPLGLTAGNLPFQGADIWTLYELSWLNAKGLPQVAVGHVELDYASVNLVESKSFKLYLNSFNQTRFASWDEVRETLQRDLSACAQGNVSVALYRIDELEGQPIAHFHGTCIDDQDIEIENYTFDAAWLTGAASGKVVEETLVSHLLKSNCLITHQPDWGSVQIQYRGPKIDREKLLRYLVSFRHHNEFHEQCVERIFTDIQRFCHPEKLSVYARYTRRGGLDINPWRTNTDFIPATGRLVRQ

SEQ ID NO: 46691 - protein, 281 aa, unidentified; identical to SEQ ID NO: 46688
  source 1..281: note = Kosakonia radicincitans
  REGION 1..281: note = tr|A0A1V0LIJ5|A0A1V0LIJ5_9ENTR NADPH-dependent 7-cyano-7-deazaguanine reductase OS=Kosakonia radicincitans DSM 16656 OX=1177180 GN=queF PE=3 SV=1

SEQ ID NO: 46692 - protein, 281 aa, unidentified
  source 1..281: note = Kosakonia radicincitans
  REGION 1..281: note = tr|A0A5C1PF10|A0A5C1PF10_9ENTR NADPH-dependent 7-cyano-7-deazaguanine reductase OS=Kosakonia radicincitans OX=283686 GN=queF PE=3 SV=1
MSSYDNHQALAGLTLGKTTDYRDTYDASLLQGVPRSLNRDPLGLTAGNLPFHGTDIWTLYELSWLNAKGLPQVAVGHVELDYASVNLVESKSFKLYLNSFNQTRFASWDEVRDTLQRDLSACAQGSVSVALYRIDELEGQPIAHFHGTCIDEQDIEIESYAFDAAWLTNAASGKVVDETLVSHLLKSNCLITHQPDWGSVQIQYRGPKIDREKLLRYLVSFRHHNEFHEQCVERIFTDIQRFCQPEKLSVYARYTRRGGLDINPWRTNTDFIPATGRLVRQ

SEQ ID NO: 46693 - protein, 281 aa, unidentified
  source 1..281: note = Kosakonia sp.
  REGION 1..281: note = tr|A0A3G9BPB6|A0A3G9BPB6_9ENTR NADPH-dependent 7-cyano-7-deazaguanine reductase OS=Kosakonia sp. CCTCC M2018092 OX=2492396 GN=queF PE=3 SV=1
MSSYDNHQALSGLTLGKTTDYRDTYDASLLQGVPRSLNRDPLGLKADNLPFHGADIWTLYELSWLNANGLPQVAVGQVELDYASLNLVESKSFKLYLNSFNQTRFASWDEVRSTLQRDLSACAQGAVSVTLYRVDELEGEPVARFAGLCIDDQDIAIDNYEFDAALLTDAASDEVVEETLVSHLLKSNCLITHQPDWGSVQIQYRGSQIDREKLLRYLVSFRHHNEFHEQCVERIFTDIQRFCQPESLSVYARYTRRGGLDINPWRSNTDFVPATGRLARQ

SEQ ID NO: 46694 - protein, 281 aa, unidentified
  source 1..281: note = Kosakonia sp.
  REGION 1..281: note = tr|A0A4R0HG94|A0A4R0HG94_9ENTR NADPH-dependent 7-cyano-7-deazaguanine reductase OS=Kosakonia sp. WCHEs120001 OX=2529380 GN=queF PE=3 SV=1
MSSYDNHQALAGLTLGKTTDYRDTYDASLLQGVPRSLNRDPLGLKAESLPFRGADIWTLYELSWLNAKGLPQVAVGHVELDHASINLVESKSFKLYLNSFNQTRFASWQEVHDTLQRDLSACAQGHVSVVLYRIDELEGQPVAHFHGTCIDDQDIAIESYDFDAALLTDAASGKVVEETLVSHLLKSNCLITHQPDWGSVQIQYHGAKIDREKLLRYLVSFRHHNEFHEQCVERIFTDIQRFCQPEKLSVYARYTRRGGLDINPWRTNTDFVPATGRLVRQ

SEQ ID NO: 46695 - protein, 128 aa, Kosmotoga arenicorallina
  REGION 1..128: note = tr|A0A182C7N9|A0A182C7N9_9BACT NADPH-dependent 7-cyano-7-deazaguanine reductase OS=Kosmotoga arenicorallina S304 OX=1453497 GN=queF PE=3 SV=1
MPEAEGKIFNFESKEKIRADFLEAVPFDGREEYVKIETEEFSAVCPFSGLPDIAKVTIEYYPEGGKIVELKSLKYYFISFRNVGVYQEEATKIIYEDLKKLLQTNRIKVTMVYNIRGGILTTTSMGTL

SEQ ID NO: 46696 - protein, 130 aa, unidentified
  source 1..130: note = Kosmotoga pacifica
  REGION 1..130: note = tr|A0A0G2ZD63|A0A0G2ZD63_9BACT NADPH-dependent 7-cyano-7-deazaguanine reductase OS=Kosmotoga pacifica; OX = 1330330 GN=queF PE=3 SV=1
MPKAEGKIFTFEGKDKIRADFLEAVPFDGPEEYIKIETDEFSAVCPFSGLPDIAKVTIEYYPEGGKIVELKSLKYYFISFRNVGVYQEEATKIVYEDLKKLLETNRIKVTMIYNIRGGILTTTSIGSLDK

SEQ ID NO: 46697 - protein, 156 aa, Kozakia baliensis
  REGION 1..156: note = tr|A0A1D8UXE7|A0A1D8UXE7_9PROT NADPH-dependent 7-cyano-7-deazaguanine reductase OS=Kozakia baliensis; OX = 153496 GN=queF PE=3 SV=1
MTTSQNDLDALSQLGKHAVPPDSPEKATLERVPSPHRGRQYVVRFTAPEFTSLCPVTGQPDFAHIVIDYIPNEWIVESKSLKLYLTSFRNHGAFHEDCSVTIATKLVEVLSPVWLRIGAYWYPRGGIPIDVFWQTGAPPENVWIPAQDVPGYRGRG

SEQ ID NO: 46698 - protein, 156 aa, Krasilnikovia cinnamomea
  REGION 1..156: note = tr|A0A4Q7ZIL8|A0A4Q7ZIL8_9ACTN NADPH-dependent 7-cyano-7-deazaguanine reductase OS=Krasilnikovia cinnamomea OX=349313 GN=queF PE=3 SV=1
MSDIKNLTLLGAASTSYTYEEPASNQLETFDYQSSATQAVGFITSEFTSLCPKTGQPDFARIEIVYVPRRRGIESKSLKLYLFRYRNHGAFHEDCISKILRDVVEAIEPWYIKVIGDFTPRGGIAIKPVSVFYAPTANRNEIDTTIRNYHQATFNR

SEQ ID NO: 46699 - protein, 139 aa, Kroppenstedtia eburnea; identical to SEQ ID NO: 45617
  REGION 1..139: note = tr|A0A1N7Q267|A0A1N7Q267_9BACL NADPH-dependent 7-cyano-7-deazaguanine reductase OS=Kroppenstedtia eburnea; OX = 714067 GN=queF PE=3 SV=1

SEQ ID NO: 46700 - protein, 147 aa, Ktedonobacter racemifer
  REGION 1..147: note = tr|D6TZN5|D6TZN5_9CHLR NADPH-dependent 7-cyano-7-deazaguanine reductase OS=Ktedonobacter racemifer DSM 44963 OX=485913 GN=queF PE=3 SV=1
MENEQQRVPGRYGFDEIKSNRLEPWPNAYPESKYVVHFEIPEFTCLCPRSGFPDFATIIIDYVPGPSVVELKSLKLYINSYRERQISHEASANEILNDLVTLLSPRWMRVVGDFTVRGNIKTIIFAEHEESGYNGPRPEYRRYQQYV

SEQ ID NO: 46701 - protein, 146 aa, Ktedonobacter sp.
  REGION 1..146: note = tr|A0A1Q6YXP9|A0A1Q6YXP9_9CHLR NADPH-dependent 7-cyano-7-deazaguanine reductase OS=Ktedonobacter sp. 13_2_20CM_53_11 OX=1805233 GN=queF PE=3 SV=1
MDEQHNRIPGRYGRDEIEESQLEIWPNAYPERDYVIHLEIPEFTCLCPRSGFPDFATITADYVPDQQVVELKSLKLYINTYRNRQISHETAANTILNDLVALLSPRWMRVVADFTVRGNIKTIIFAEHSTSGYQGPHPEYRRYFSG

SEQ ID NO: 46702 - protein, 146 aa, Ktedonobacter sp.; identical to SEQ ID NO: 46701
  REGION 1..146: note = tr|A0A1Q7UR64|A0A1Q7UR64_9CHLR NADPH-dependent 7-cyano-7-deazaguanine reductase OS=Ktedonobacter sp. 13_1_20CM_4_53_11 OX=1805225 GN=queF PE=3 SV=1

SEQ ID NO: 46703 - protein, 146 aa, unidentified
  source 1..146: note = Ktedonobacterales bacterium
  REGION 1..146: note = tr|A0A4V0Z0G7|A0A4V0Z0G7_9CHLR NADPH-dependent 7-cyano-7-deazaguanine reductase OS=Ktedonobacterales bacterium SCAWS-G2 OX=2509675 GN=queF PE=3 SV=1
MQESERVMGSYGLEEIKANKLEPWPNPHPERDYVTHFEIPEFTCLCPRSGFPDFATIVIDYVPGPSVVELKSLKLYINGYRNRQISHEDATNVILDDLVALLSPRWMRVVGDFTVRGNIKTVIFTEYAQPDYQGPRPEYRRYLTAL

SEQ ID NO: 46704 - protein, 166 aa, Kurthia sp.
  REGION 1..166: note = tr|A0A433RXN4|A0A433RXN4_9BACL NADPH-dependent 7-cyano-7-deazaguanine reductase OS=Kurthia sp. 3B1D; OX = 1562256 GN=queF PE=3 SV=1
MTQRTDEQGLSDLTLLGNQHTNYAFNYAPEVLEAVDNLHAERDFFVKFNCPEFTSLCPMTKQPDFATVYISYIPDKKMVESKSLKLYLFSFRNHGDFHEDCMNKIMDDLINLLEPRYIEVWGKFTPRGGLSIDPWCNYGRPGTKYEDMAMHRLMNHDMYPEKVDNR

SEQ ID NO: 46705 - protein, 274 aa, Kushneria avicenniae
  REGION 1..274: note = tr|A0A1I1IQS3|A0A1I1IQS3_9GAMM NADPH-dependent 7-cyano-7-deazaguanine reductase OS=Kushneria avicenniae; OX = 402385 GN=queF PE=3 SV=1
MSDDLKDAPLGQASAYITEYDPSLLYPIARNINRASLDLDEDDLPFEGEDEWQAFELSWLTPTGKPVVAIARFRVPADSMNLIESKSWKLYLNSFNQTRFASSVEVRRVLRQDLSRVVDAEVEVTLFGVDDMALAPGRLPGLCLDDLEVEVDTYQPDPELIITDSEIVEETVHSHLLKSNCPVTGQPDWGSVLIRYRGPALDHHALLAYIISFREHQEFHEHCVERMFMDILREAEPDQLLVMARYVRRGGLDISPWRALPGETPIKTLRLMRQ

SEQ ID NO: 46706 - protein, 274 aa, Kushneria indalinina
  REGION 1..274: note = tr|A0A3D9DUN3|A0A3D9DUN3_9GAMM NADPH-dependent 7-cyano-7-deazaguanine reductase OS=Kushneria indalinina DSM 14324 OX=1122140 GN=queF PE=3 SV=1
MSDDLKDAPLGHTSAYITEYDPSLLYPIARSANRASLDLDEDDLPFEGEDEWQAFELSWLTPTGKPVVAIARFRVPADSTWLIESKSWKLYLNSFNQTRFASSVEVRRVLRQDLSRVVDAEVEVTLFGVDDMALAPGRLPGLCLDDLEVEVDTYQPDPELIITDNEIVEETVHSHLLKSNCPVTGQPDWGSVLIRYRGPALDHHALLAYIISFREHQEFHEHCVERMFMDILREAEPDQLLVMARYVRRGGLDISPWRSLPGETPIKTLRLMRQ

SEQ ID NO: 46707 - protein, 274 aa, unidentified
  source 1..274: note = Kushneria konosiri
  REGION 1..274: note = tr|A0A2Z2HE88|A0A2Z2HE88_9GAMM NADPH-dependent 7-cyano-7-deazaguanine reductase OS=Kushneria konosiri; OX = 698828 GN=queF PE=3 SV=1
MSDDLKDAPLGQTSAYITEYDPTLLYPIARSANRASLDLDEDDLPFEGEDEWQAFELSWLTPTGKPVVAIARFRVPASSTYLIESKSWKLYLNSFNQTRFASSVEVRRVLRQDLSQVVDAEVEVTLFGVDDMALAPGRLPGICLDDLEVEVDTYQPDPELIITDNEIVEETVHSHLLKSNCPVTGQPDWGSVLIRYRGPALDHHALLAYIISFREHQEFHEHCVERMFMDILREAEPDQLLVMARYVRRGGLDISPWRAMPGETPIKTLRLMRQ

SEQ ID NO: 46708 - protein, 274 aa, Kushneria marisflavi
  REGION 1..274: note = tr|A0A240USN5|A0A240USN5_9GAMM NADPH-dependent 7-cyano-7-deazaguanine reductase OS=Kushneria marisflavi; OX = 157779 GN=queF PE=3 SV=1
MSDDLKDAPLGQTSAYITEYDPTLLYPIARSVNRASLDLDEDDLPFEGEDEWQAFELSWLTPTGKPVVAIARFRVPASSTHLIESKSWKLYLNSFNQTRFASSVEVRRVLRQDLSRVVDAEVEVTLFGVDDMALAPGRLPGICLDDLDVEVDTYQPDPELIITDNEIIEETVHSHLLKSNCPVTGQPDWGSVLIRYRGPALDHHALLAYIISFREHQEFHEHCVERMFMDILREAEPDQLLVMARYVRRGGLDISPWRAMPGETPIKTLRLMRQ

SEQ ID NO: 46709 - protein, 274 aa, unidentified
  source 1..274: note = Kushneria phyllosphaerae
  REGION 1..274: note = tr|A0A2R8CNU3|A0A2R8CNU3_9GAMM NADPH-dependent 7-cyano-7-deazaguanine reductase OS=Kushneria phyllosphaerae OX=2100822 GN=queF PE=3 SV=1
MSDDLKDAPLGQTSAYITEYDPSLLFPIARSVNRASLDLDEDDLPFEGEDEWQAFELSWLTPTGKPVVAIARFRVPASSTHLIESKSWKLYLNSFNQTRFASSVEVRRVLRQDLSRVVDAEVEVTLFGVDDMALAPGRLPGLCLDDLEVEVDTYQPDPELIITDNEIVEETVHSHLLKSNCPVTGQPDWGSVLIRYRGPALDHHALLAYIISFREHQEFHEHCVERMFMDILREAEPDQLLVMARYVRRGGLDISPWRALPGETPIKTLRLMRQ

SEQ ID NO: 46710 - protein, 275 aa, Kushneria sinocarnis
  REGION 1..275: note = tr|A0A420WTF4|A0A420WTF4_9GAMM NADPH-dependent 7-cyano-7-deazaguanine reductase OS=Kushneria sinocarnis; OX = 595502 GN=queF PE=3 SV=1
MSDELLDGAPLGQASAYPDHYDAALLYAIDRATTREALDIDEDELPFEGEDEWQAFELSWLEPRGKPVVAIARFRVPAESPRLIESKSWKLYLNSFNQQRFASSVEVRRTLKRDLTEATGAEVEVTLFGVDDAALAPARLPGRCLDELDIEIDTFTPEPSFLITGDEVVEETLHSHLLKSNCPVTGQPDWGSVLIRYRGPVLDHHGLLAYIVSFRNHQDFHEHCVERMFTDIMREANPERLLVMARYVRRGGLDINPWRATPGEQPPETLRLTRQ

SEQ ID NO: 46711 - protein, 275 aa, Kushneria sp.
  REGION 1..275: note = tr|A0A1S1NUQ2|A0A1S1NUQ2_9GAMM NADPH-dependent 7-cyano-7-deazaguanine reductase OS=Kushneria sp. YCWA18; OX = 657387 GN=queF PE=3 SV=1
MSDELLEGAPLGQSSAYPDHYDPALLYPIERAVTRETLDIDEDELPFEGEDEWQAFELSWLEPRGKPVVAIARFRVPAESPRLIESKSWKLYLNSFNQQRFASSVEVRRALKRDLSEAAGAEVEVTLFGVDDAALAPARMPGQCLDELDIEIDTFTPEPAFLITGDEVVEETLHSHLLKSNCPVTGQPDWGSVLIRYRGPVLDHHGLLAYIVSFRNHQDFHEHCVERMFTDIMREANPERLLVMARYVRRGGLDINPWRATPGEQPPEALRLTRQ

SEQ ID NO: 46712 - protein, 141 aa, unidentified
  source 1..141: note = Kyrpidia spormannii
  REGION 1..141: note = tr|A0A2K8N868|A0A2K8N868_9BACL NADPH-dependent 7-cyano-7-deazaguanine reductase OS=Kyrpidia spormannii; OX = 2055160 GN=queF PE=3 SV=1
MSTTPSKELEVVPNPHPDRDYEVRIECPEFTALCPKTGQPDFAVIYFRYIPGPSIVELKSLKLYLWSFRDEGHFHEDVTNRILKDFVAAAQPRWLEVIGEFNVRGGIYTTVRAVYQDPGWTPDPSVAQSLAAPAWPRRRSG

SEQ ID NO: 46713 - protein, 141 aa, unidentified
  source 1..141: note = Kyrpidia tusciae
  REGION 1..141: note = tr|D5WSL9|D5WSL9_KYRT2 NADPH-dependent 7-cyano-7-deazaguanine reductase OS=Kyrpidia tusciae (strain DSM 2912 / NBRC 15312 / T2) OX=562970 GN=queF PE=3; SV = 1
MSTKPSKELEVVPNPHPDRDYEVRIECPEFTALCPKTGQPDFAVIYFRYIPGPWIVELKSLKLYLWSFRDEGHFHEDVTNRILKDFVTAAQPRWLEVIGEFNVRGGIYTTVRAVYQDPGWTPDPSVAQSLVAPAWPRRRSG

SEQ ID NO: 46714 - protein, 155 aa, Labrenzia aggregata
  REGION 1..155: note = tr|A0NZ72|A0NZ72_LABAI NADPH-dependent 7-cyano-7-deazaguanine reductase OS=Labrenzia aggregata (strain ATCC 25650 / DSM 13394 / JCM 20685 / NBRC 16684 / NCIMB 2208 /IAM 12614) OX=384765 GN=queF PE=3 SV=1
MSDKSIYENLTQLGSSTELPDDPDKAVLEKVPNPQAGTGYMVRFVAPEFTSLCPITGAPDFAHLVIDYVPRDFLVESKSLKLFLGSFRNHGAFHEDCTVSIGKRLVDLLDPEWLRIGGYWYPRGGIPIDVFYQTGPAPDGVWIPDQGVAPYRGRG

SEQ ID NO: 46715 - protein, 155 aa, Labrenzia aggregata
  REGION 1..155: note = tr|A0A0M6Y8Z9|A0A0M6Y8Z9_9RHOB NADPH-dependent 7-cyano-7-deazaguanine reductase OS=Labrenzia aggregata; OX = 187304 GN=queF PE=3 SV=1
MSDKSIYKNLTQLGSSTELPDDPDKAVLEKVPNPQAGTGYMVRFVAPEFTSLCPITGAPDFAHLVIDYVPRDFLVESKSLKLFLGSFRNHGAFHEDCTVSIGKRLVDLLDPEWLRIGGYWYPRGGIPIDVFYQTGPAPDGVWIPDQGVAPYRGRG

SEQ ID NO: 46716 - protein, 155 aa, Labrenzia alba
  REGION 1..155: note = tr|A0A0M6ZVC0|A0A0M6ZVC0_9RHOB NADPH-dependent 7-cyano-7-deazaguanine reductase OS=Labrenzia alba; OX = 311410 GN=queF PE=3 SV=1
MSDKSIYENLTQLGASTDLPGDPDEAVLEKVPNPQAGTGYMVRFVAPEFTSLCPITGAPDFAHLVIDYVPEEFLVESKSLKLFLGSFRNHGAFHEDCTVSIGKRLVDLLDPQWLRIGGYWYPRGGIPIDVFYQTGPAPDGVWIPDQGVQSYRGRG

SEQ ID NO: 46717 - protein, 155 aa, Labrenzia alba
  REGION 1..155: note = tr|A0A0M6Z2E0|A0A0M6Z2E0_9RHOB NADPH-dependent 7-cyano-7-deazaguanine reductase OS=Labrenzia alba; OX = 311410 GN=queF PE=3 SV=1
MSDKSIYENLTQLGTSTELPDDPEKAVLEKVPNPQAGTKYMVRLAAPEFTSLCPITGAPDFAHLVIDYVPKDFLVESKSLKLFLGSFRNHGAFHEDCTVSIGKRLVDLLDPEWLRIGGYWYPRGGIPIDVFYQTGPAPDGVWIPEQGVAPYRGRG

SEQ ID NO: 46718 - protein, 155 aa, Labrenzia alexandrii
  REGION 1..155: note = tr|A0A5E8GTH7|A0A5E8GTH7_LABAD NADPH-dependent 7-cyano-7-deazaguanine reductase OS=Labrenzia alexandrii (strain DSM 17067 / NCIMB 14079 / DFL-11) OX=244592; GN = queF P E=3 SV=1
MSDKSIYENLTQLGASTELPDSPENAVLEKVPNPQAGTKYMVRFVSPEFTSLCPLTSAPDFAHLVIDYVPKDFLVESKSLKLFLGSFRNHGAFHEDCTVSIGKRLVDLLDPEWLRIGGYWYPRGGIPIDVFYQTGPAPEEVWIPEQGVQPYRGRG

SEQ ID NO: 46719 - protein, 155 aa, Labrenzia alexandrii
  REGION 1..155: note = tr|A0A0M7AJV4|A0A0M7AJV4_9RHOB NADPH-dependent 7-cyano-7-deazaguanine reductase OS=Labrenzia alexandrii; OX = 388408 GN=queF PE=3 SV=1
MSDKSIYENLTQLGASTELPDSPENAVLEKVPNPQAGTKYMVRFVAPEFTSLCPLTSAPDFAHLVIDYVPKDFLVESKSLKLFLGSFRNHGAFHEDCTVSIGKRLVDLLDPEWLRIGGYWYPRGGIPIDVFYQTGPAPEEVWIPEQGVQPYRGRG

SEQ ID NO: 46720 - protein, 154 aa, Labrenzia sp.
  REGION 1..154: note = tr|A0A163TYY1|A0A163TYY1_9RHOB NADPH-dependent 7-cyano-7-deazaguanine reductase OS=Labrenzia sp. OB1; OX = 1561204 GN=queF PE=3 SV=1
MSEDIYSNLKQLGGETRIPESPEAAELERVPNPQADVAYNVRFTAPEFTSLCPMTGQPDFAHLVIDYVPGSWLVESKSLKLFLTSFRNHGAFHEDCTISIARRLADFLDPQWLRIGGYWYPRGGIPIDVFWQTGPMPDGVWIPDQGVPPYRGRG

SEQ ID NO: 46721 - protein, 155 aa, Labrenzia sp.; identical to SEQ ID NO: 46714
  REGION 1..155: note = tr|U7FQI4|U7FQI4_9RHOB NADPH-dependent 7-cyano-7-deazaguanine reductase OS=Labrenzia sp. C1B10; OX = 1397530 GN=queF PE=3 SV=1

SEQ ID NO: 46722 - protein, 155 aa, unidentified
  source 1..155: note = Labrenzia suaedae
  REGION 1..155: note = tr|A0A1M7N4N3|A0A1M7N4N3_9RHOB NADPH-dependent 7-cyano-7-deazaguanine reductase OS=Labrenzia suaedae; OX = 735517 GN=queF PE=3 SV=1
MSDKSIYENLTQLGSSTALPQTPEDAVLEKVPNPQAGTGYMVRFVAPEFTSLCPITGAPDFAHLVIDYVPGDFLVESKSLKLFLGSFRNHGAFHEDCTVSIGKRLVDLLNPQWLRIGGYWYPRGGIPIDVFYQTGPAPEGVWIPDQGVPPYRGRG

SEQ ID NO: 46723 - protein, 153 aa, Labrys neptuniae
  REGION 1..153: note = tr|A0A5C1WPI7|A0A5C1WPI7_9RHIZ NADPH-dependent 7-cyano-7-deazaguanine reductase OS=Labrys neptuniae; OX = 376174 GN=queF PE=3 SV=1
MQSFDPSTLQLGSDSKIPASPEEARLDRVPNPQADTLYLARFTCPEFTSLCPVTGQPDFAHLVIDYAPKDWLVESKSLKLYLTSFRNHGAFHEDCTVAVGRRLVELLEPHWLRIGGYWYPRGGIPIDVFWQTGKPPEELWLPDQGVPTYRGRG

SEQ ID NO: 46724 - protein, 153 aa, Labrys okinawensis
  REGION 1..153: note = tr|A0A2S9QBK8|A0A2S9QBK8_9RHIZ NADPH-dependent 7-cyano-7-deazaguanine reductase OS=Labrys okinawensis; OX = 346911 GN=queF PE=3 SV=1
MPSFDPSTLQLGSESKIPSSPEEARLDRVPNPQADTLYLARFTCPEFTSLCPVTGQPDFAHLVIDYAPKDWLVESKSLKLYLTSFRNHGAFHEDCTVAVGRRLVDLLEPRWLRIGGYWYPRGGIPIDVFWQTGKPPEELWLPDQGVPSYRGRG

SEQ ID NO: 46725 - protein, 162 aa, Laceyella sacchari
  REGION 1..162: note = tr|A0A4R4AI93|A0A4R4AI93_LACSH NADPH-dependent 7-cyano-7-deazaguanine reductase OS=Laceyella sacchari; OX = 37482 GN=queF PE=3 SV=1
MSEKRQELQLHALGAKTDYVFQYNPDVLETFDNKHPGTDYFVKFNCPEFTSLCPITNQPDFATIYISYVPDQKLVESKSLKLYLFSYRNHGDFHENCIVTIMKDLIEKMDPKYIEVWGKFLPRGGISIDPYANYGKPGTRWERIAEQRLAQHDLYPERVDNR

SEQ ID NO: 46726 - protein, 162 aa, Laceyella sacchari
  REGION 1..162: note = tr|A0A2I7SV42|A0A2I7SV42_LACSH NADPH-dependent 7-cyano-7-deazaguanine reductase OS=Laceyella sacchari; OX = 37482 GN=queF PE=3 SV=1
MSEKRQELQLHALGAKTDYVFQYNPDVLETFDNKHPDTDYFVKFNCPEFTSLCPITNQPDFATIYISYVPDQKLVESKSLKLYLFSYRNHGDFHENCIVTIMKDLIKKMDPKYIEVWGKFLPRGGISIDPYANYGKPGTRWERIAEQRLAQHDLYPERVDNR

SEQ ID NO: 46727 - protein, 162 aa, Laceyella sediminis; identical to SEQ ID NO: 46725
  REGION 1..162: note = tr|A0A2T0YHU3|A0A2T0YHU3_9BACL NADPH-dependent 7-cyano-7-deazaguanine reductase OS=Laceyella sediminis; OX = 573074 GN=queF PE=3 SV=1

SEQ ID NO: 46728 - protein, 166 aa, Lachnobacterium bovis
  REGION 1..166: note = tr|A0A1H3LQT3|A0A1H3LQT3_9FIRM NADPH-dependent 7-cyano-7-deazaguanine reductase OS=Lachnobacterium bovis DSM 14045 OX=1122142 GN=queF PE=3 SV=1
MSTLRKKEEMKDVTLLGNKNVKYAMDYAPEVLETFDNKHPENDYFVKFNCPEFTSLCPITSQPDFATIYISYVPDKKMVESKSLKLYLFSFRNHGDFHEDCMNIIMKDLIKLMDPKYIEVWGKFTPRGGISIDPYCNYGKKGTVWEKVAFDRLVNHDMYPEKVDNR

SEQ ID NO: 46729 - protein, 166 aa, Lachnobacterium bovis
  REGION 1..166: note = tr|A0A1H9UNB0|A0A1H9UNB0_9FIRM NADPH-dependent 7-cyano-7-deazaguanine reductase OS=Lachnobacterium bovis; OX = 140626 GN=queF PE=3 SV=1
MSSSRKKEEMKDVTLLGNRNVKYAMDYAPEVLETFDNKHPENDYFVKFNCPEFTSLCPITSQPDFATIYISYVPDKKMVESKSLKLYLFSFRNHGDFHEDCMNIIMKDLVKLMDPKYIEVWGKFTPRGGISIDPYCNYGKKGTVWEKVAFDRLVNHDLYPEKIDNR

SEQ ID NO: 46730 - protein, 165 aa, unidentified
  source 1..165: note = Lachnoclostridium sp.
  REGION 1..165: note = tr|A0A1Y4NKU8|A0A1Y4NKU8_9FIRM NADPH-dependent 7-cyano-7-deazaguanine reductase OS=Lachnoclostridium sp. An169 OX=1965569 GN=queF PE=3 SV=1
MSGRSKEELSGVSLLGNQKVSYPMDYAPEMLETFPNKHPENDYFVKFNCPEFTSLCPMTGQPDFATIYISYVPGERMVESKSLKLYLFSFRNHGDFHEDCVNIIMKDLIRLMDPKYIEVWGKFTPRGGISIDPYCNYGKPGTCWEKVAFERLTHHDLYPEKVDNR

SEQ ID NO: 46731 - protein, 160 aa, unidentified
  source 1..160: note = Lachnoclostridium sp.
  REGION 1..160: note = tr|A0A3B9K4F7|A0A3B9K4F7_9FIRM NADPH-dependent 7-cyano-7-deazaguanine reductase OS=Lachnoclostridium sp.; OX = 2028282 GN=queF PE=3 SV=1
MRENEGLTKLGTHQTSYKMDYAPEVLETFSNKHPDNDYFVKFNCPEFTSLCPITGQPDFATIYISYVPGERMVESKSLKLYLFSFRNHGDFHEDVVNIIMKDLIKLMDPKYIEVWGKFLPRGGLSIDPYCNYGKPGTKWEDVAWERLKSHDLYPERVDNR

SEQ ID NO: 46732 - protein, 166 aa, Lachnospira multipara
  REGION 1..166: note = tr|A0A1H5UEA9|A0A1H5UEA9_9FIRM NADPH-dependent 7-cyano-7-deazaguanine reductase OS=Lachnospira multipara; OX = 28051 GN=queF PE=3 SV=1
MSTTRKPEERENVTLLGQAGVKYKSDYAPEVLETFVNKHPGNDYFVKFNCPEFTSLCPITGQPDFATIYISYVPGELMVESKSLKLYLFSFRNHGDFHEDCVNIIMKDLIKLMDPKYIEVWGKFTPRGGISIDPYCNYGKKGTKWEEVAFDRLTHHDMYPEKVDNR

SEQ ID NO: 46733 - protein, 160 aa, Lachnospira pectinoschiza
  REGION 1..160: note = tr|A0A174YRM5|A0A174YRM5_9FIRM NADPH-dependent 7-cyano-7-deazaguanine reductase OS=Lachnospira pectinoschiza OX=28052 GN=queF PE=3 SV=1
MSREDEGLKQLGNKTKYSMDYAPGVLETFENKHPDNDYFVKFNCPEFTSLCPITGQPDFATIYISYIPDKLMVESKSLKLYLFSFRNHGDFHEDCVNIIMKDLIRLMQPRYIEVWGKFTPRGGISIDPYCNYGKEGTAFEDMAKQRLLWHDMNPEKVDNR

SEQ ID NO: 46734 - protein, 166 aa, Lachnospira pectinoschiza; identical to SEQ ID NO: 46732
  REGION 1..166: note = tr|A0A1G9WWE2|A0A1G9WWE2_9FIRM NADPH-dependent 7-cyano-7-deazaguanine reductase OS=Lachnospira pectinoschiza OX=28052 GN=queF PE=3 SV=1

SEQ ID NO: 46735 - protein, 164 aa, unidentified
  source 1..164: note = Lachnospiraceae bacterium
  REGION 1..164: note = tr|A0A1H2V064|A0A1H2V064_9FIRM NADPH-dependent 7-cyano-7-deazaguanine reductase OS=Lachnospiraceae bacterium KHCPX20 OX=1855375 GN=queF PE=3 SV=1
MESDKRERGSLTQLGSQGTKYATDYDPSLLESFDNKHPGNDYFVKFNCPEFTSLCPITGQPDFATIYISYVPDVKMVESKSLKLYLFSFRNHGDFHEDCVNKIMKDLIALMDPKYIEVWGKFTPRGGISIDPYCNYGKKGTKWEEVAFDRLAHHDMYPEKVDNR

SEQ ID NO: 46736 - protein, 156 aa, unidentified; identical to SEQ ID NO: 45768
  source 1..156: note = Lachnospiraceae bacterium
  REGION 1..156: note = tr|R9J5B5|R9J5B5_9FIRM NADPH-dependent 7-cyano-7-deazaguanine reductase OS=Lachnospiraceae bacterium 3-1 OX=397288 GN=queF PE=3 SV=1

SEQ ID NO: 46737 - protein, 165 aa, unidentified
  source 1..165: note = Lachnotalea glycerini
  REGION 1..165: note = tr|A0A255M7V5|A0A255M7V5_9FIRM NADPH-dependent 7-cyano-7-deazaguanine reductase OS=Lachnotalea glycerini; OX = 1763509 GN=queF PE=3 SV=1
MTGRIKEETTGITHLGNQGTKYQMDYNPSVLETFVNKHQENDYFVKFNCPEFTSLCPITGQPDFASIAISYVPNVRMVESKSLKLYLFSFRNHGDFHEDCINIIMKDLIALMEPKYIEVWGRFTPRGGISIDPYCNYGQAATKWEEIAFKRLAYHDLNTNKTDII

SEQ ID NO: 46738 - protein, 278 aa, unidentified
  source 1..278: note = Lacimicrobium alkaliphilum
  REGION 1..278: note = tr|A0A0U3AIB5|A0A0U3AIB5_9ALTE NADPH-dependent 7-cyano-7-deazaguanine reductase OS=Lacimicrobium alkaliphilum OX=1526571 GN=queF PE=3 SV=1
MTDAHTPASLTHLSLGKTSEYIDQYSPQLLQPVPRSLNREELGIVQRQPFTGVDIWNGYELSWLNPKGKPCVAVLQAYVPASSPNLIESKSFKLYLNSFNQWKVRDSEELQQILIQDLSQCAGADVEVKLYSLDDIQAFQIHAGEGELLDNLDIEVDQYHPEPGILQCGDSVVQRQHISHLLKSNCLITQQPDWGSVSIHYQGREIFADSLLRYLITFRQHNEFHEQCVERIFCDILRQCQPEKLSVYARYTRRGGLDISPFRSNFEANPQFERLIRQ

SEQ ID NO: 46739 - protein, 174 aa, Lactobacillus aquaticus
  REGION 1..174: note = tr|A0A0R2CVS4|A0A0R2CVS4_9LACO NADPH-dependent 7-cyano-7-deazaguanine reductase OS=Lactobacillus aquaticus DSM 21051 OX=1423725 GN=queF PE=3 SV=1
MKNIHHSRTSNELAGVTELGSNETHYSSDYDPSVLETFVNKHPQNDYLVTFDGYEFTSLCPKTGQPDFANVFISYIPTEKMVESKSLKLYLFSFRNHGDFHEDCMNIILDDLYKLMNPKYIEVLGLFTPRGGISIYPFVNRVNPDFETEELRNLAFQRKLNFLGNIQNYGRAIR

SEQ ID NO: 46740 - protein, 174 aa, Lactobacillus capillatus
  REGION 1..174: note = tr|A0A0R1MGU7|A0A0R1MGU7_9LACO NADPH-dependent 7-cyano-7-deazaguanine reductase OS=Lactobacillus capillatus DSM 19910 OX=1423731 GN=queF PE=3 SV=1
MENKHHSRTANELTGVTELGSTETKYATDYDPSVLETFINKHPQNDYLVTFDGYEFTSLCPKTGQPDFANVFISYIPTEKMVESKSLKLYLFSFRNHGDFHEDCMNIILDDLYKLMNPKYIEVLGLFTPRGGISIYPFVNRVNPTFKTAELQQLAFQRKLQFLGNVQSYGRSIR

SEQ ID NO: 46741 - protein, 175 aa, Lactobacillus hordei
  REGION 1..175: note = tr|A0A0R1MQA1|A0A0R1MQA1_9LACO NADPH-dependent 7-cyano-7-deazaguanine reductase OS=Lactobacillus hordei DSM 19519 OX=1423759 GN=queF PE=3 SV=1
MNKTTSPSRKPSELEGVTQLGNQHTSYPQDYTPQVLETFINKHPENDYLVTFDGYEFTSLCPKTGQPDFANVFISYIPTEKMVESKSLKLYLFSFRNHGDFHEDCMNIILNDLYKLMNPKYIEVFGLFTPRGGISIYPFVNRVNPSFSNNEIEQLAFQRKLQFLGNIQNYGRSIR

SEQ ID NO: 46742 - protein, 175 aa, Lactobacillus hordei
  REGION 1..175: note = tr|A0A3S6QVR3|A0A3S6QVR3_9LACO NADPH-dependent 7-cyano-7-deazaguanine reductase OS=Lactobacillus hordei; OX = 468911 GN=queF PE=3 SV=1
MNKTTSPSRKPSELEGVTQLGNQHTSYPQDYTPQVLETFINKHPENDYLVTFDGYEFTSLCPKTGQPDFANVFISYIPTEKMVESKSLKLYLFSFRNHGDFHEDCMNIILDDLYKLMNPKYIEVFGLFTPRGGISIYPFVNRVNPSFSNNEIEQLAFQRKLQFLGNIQNYGRSIR

SEQ ID NO: 46743 - protein, 175 aa, Lactobacillus mali
  REGION 1..175: note = tr|J0L2Z3|J0L2Z3_9LACO NADPH-dependent 7-cyano-7-deazaguanine reductase OS=Lactobacillus mali KCTC 3596 = DSM 20444 OX=1046596 GN=queF PE=3 SV=1
MNKTTSPSRMPSEMEDITQLGKQHTSYPQDYTPQVLETFINKHPENDYLVTFDGYEFTSLCPKTGQPDFANVFISYIPTEKMVESKSLKLYLFSFRNHGDFHEDCMNIILDDLYKLMNPKYIEVFGLFTPRGGISIYPFVNRVNPDFSNNEIEQLAFQRKLQFLGNIQNYGRSIR

SEQ ID NO: 46744 - protein, 175 aa, Lactobacillus mali; identical to SEQ ID NO: 46743
  REGION 1..175: note = tr|A0A0R2FHT8|A0A0R2FHT8_9LACO NADPH-dependent 7-cyano-7-deazaguanine reductase OS=Lactobacillus mali; OX = 1618 GN=queF PE=3 SV=1

SEQ ID NO: 46745 - protein, 177 aa, Lactobacillus satsumensis
  REGION 1..177: note = tr|A0A0R1UV86|A0A0R1UV86_9LACO NADPH-dependent 7-cyano-7-deazaguanine reductase OS=Lactobacillus satsumensis DSM 16230 = JCM 12392 OX=1423801 GN=queF PE=3; SV = 1
MSKNTTTQSSRTKTEFGHVSHLGSTHTAYAADYDPTLLETFVNKHPENDYLVSFDAYEFTSLCPKTGQPDFAKVYLSYIPTQNMVESKSLKLYLFSFRNHGDFHEDCMNIILNDLYQLMNPKYIEVLGLFTPRGGISIYPFVNRVNPEFETPELKELAFQRKVNVLNQLPQYKNFVR

SEQ ID NO: 46746 - protein, 174 aa, Lactobacillus sucicola
  REGION 1..174: note = tr|A0A023CXK8|A0A023CXK8_9LACO NADPH-dependent 7-cyano-7-deazaguanine reductase OS=Lactobacillus sucicola DSM 21376 = JCM 15457 OX=1423806 GN=queF PE=3 SV=1
MAHTHHSRTPNELAGVTELGCNKTQYPNDYDPSVLETFINKHPQNDYLVTFDGYEFTSLCPKTGQPDLANVFISYIPTEKMVESKSLKLYLFSFRNHGDFHEDCMNIILDDLYKLMNPKYIEVLGLFTPRGGISIYPFVNRVNPAFETEELRNLAFQRKLQFLSNVPSYGRAIR

SEQ ID NO: 46747 - protein, 174 aa, Lactobacillus uvarum
  REGION 1..174: note = tr|A0A0R1PWW6|A0A0R1PWW6_9LACO NADPH-dependent 7-cyano-7-deazaguanine reductase OS=Lactobacillus uvarum DSM 19971 OX=1423812 GN=queF PE=3 SV=1
MKKTHHSRTSNELAGVTELGSNETHYSDDYDPSVLETFVNKHPQNDYLVTFDGYEFTSLCPKTGQPDFANVFISYIPTEKMVESKSLKLYLFSFRNHGDFHEDCMNIILDDLYKLMNPKYIEVLGLFTPRGGISIYPFVNRVNPAFETEELSNLAFQRKLHFLGNVQSYGRAIR

SEQ ID NO: 46748 - protein, 176 aa, Lactobacillus vini
  REGION 1..176: note = tr|A0A0R2CD64|A0A0R2CD64_9LACO NADPH-dependent 7-cyano-7-deazaguanine reductase OS=Lactobacillus vini DSM 20605 OX=1133569 GN=queF PE=3 SV=1
MQKFNSFTSRTPQEFGNVSQLGNKQTKYPQDYDPSVLETFVNKHPDHDYLVSFDAYEFTSLCPKTGQPDFAKVYLSYIPTQKMVESKSLKLYLFGFRNHGDFHEDCMNIILNDLNRLMDPKYIEVFGLFTPRGGISIYPFVNRVNPKYETDELKQLAFHRKLQFLNQLPTYKNAVR

SEQ ID NO: 46749 - protein, 117 aa, unidentified
  source 1..117: note = Lacunisphaera limnophila
  REGION 1..117: note = tr|A0A1D8AUP9|A0A1D8AUP9_9BACT NADPH-dependent 7-cyano-7-deazaguanine reductase OS=Lacunisphaera limnophila OX=1838286 GN=queF PE=3 SV=1
MADKSILETFPNPAPKRDFLIEHTHHEFTSLCPMTGHPDFADITVRYVADKTCVELKSLKLYFHAYRNKGIFFEGATNQICDDIGAALKPRSLTIIANWKARGGFSSRVTCEWKKKR

SEQ ID NO: 46750 - protein, 117 aa, unidentified
  source 1..117: note = Lacunisphaera sp.
  REGION 1..117: note = tr|A0A4Q1C7V2|A0A4Q1C7V2_9BACT NADPH-dependent 7-cyano-7-deazaguanine reductase OS=Lacunisphaera sp. TWA-58 OX=2508720 GN=queF PE=3 SV=1
MADPKILETFPNPAPHRDFLIEHTHHEFTSVCPMTGHPDFADITVSYVADKKCVELKSLKLYFHAFRNEGIFFEAVTNKICDDLGNALKPRSLKIISKWKARGGFSSVVTAEWKKKK

SEQ ID NO: 46751 - protein, 286 aa, unidentified
  source 1..286: note = Lampropedia cohaerens
  REGION 1..286: note = tr|A0A0U1Q172|A0A0U1Q172_9BURK NADPH-dependent 7-cyano-7-deazaguanine reductase OS=Lampropedia cohaerens; OX = 1610491 GN=queF PE=3 SV=1
MAAPTPTDAATVLGRDVSYPTQYDPTLLHPIPRLAARQQLGIGLQRLPFVGADTWTAFELSWLGPRGKPQVAIAQFTFPSETANIIESKSLKLYLNSLNHTRFEDAAAVRETLRRDLSEAAWRGSASSAAVGVRLIEPAEFAAEQVAELDGLDLDRLDVDCEDYLPQPQWLRSAAGEPAVTETLTSRLLKSNCPVTGQPDWASIQIRYHGAPIDQAGLLRYIVSFRNHTGFHENCVERIFVDIWQRCQPVHLAVYARYTRRGGLDINPFRANAPQALPLNRRTARQ

SEQ ID NO: 46752 - protein, 283 aa, Lampropedia hyalina
  REGION 1..283: note = tr|A0A1M5DC30|A0A1M5DC30_9BURK NADPH-dependent 7-cyano-7-deazaguanine reductase OS=Lampropedia hyalina DSM 16112 OX=1122156 GN=queF PE=3 SV=1
MSDPLHHAPLGKTTIYPSQYDPGLLCPIPRLAQRQALGIGLARLPFVGADFWTAFELSWLNPRGKPQVALAQFTFPCETPHIIESKSFKLYLNSFNQSVFENSEQVRECLRRDLGEAAWRGSDAGASIGVQLIDPAAFDQEAVQELDGLDLDRLDVECSRYEPAPELLRSHRDQAQVSETLTSRLLKSNCPVTGQPDWASLQIRYHGFPIDQACLLQYIVSYRNHNGFHEDCVERIFVDIWQRCQPSQLSVYARYTRRGGLDINPLRSSSPGRMPPSIRTARQ

SEQ ID NO: 46753 - protein, 284 aa, unidentified
  source 1..284: note = Lampropedia puyangensis
  REGION 1..284: note = tr|A0A4S8EXK5|A0A4S8EXK5_9BURK NADPH-dependent 7-cyano-7-deazaguanine reductase OS=Lampropedia puyangensis OX=1330072 GN=queF PE=3 SV=1
MPVTATDLPLGKEVAYPQTYQPQLLCPIPRLAQRQALGIGLDRLPFMGADVWTAFELSWLNARGKPQVAIAHLTFPCETPNIVESKSLKLYLNSLNNSVFADKAAVRDCIRKDLSEAAWRGSPLPTGSIGVRIIEPASFDAEPIHELSGLDLDRLDVECSHYTPQPNLLFSQQEQSHTTETLTSRLLKSNCPVTGQPDWASLQISYSGHPIDQAGLLQYIVSFRNHTGFHENCVEQIFIDIWQRCAPLELSVQARYTRRGGLDINPLRSSKPHALPANIRTARQ

SEQ ID NO: 46754 - protein, 293 aa, Lampropedia sp.
  REGION 1..293: note = tr|A0A4S5BKE2|A0A4S5BKE2_9BURK NADPH-dependent 7-cyano-7-deazaguanine reductase OS=Lampropedia sp. YIM MLB12 OX=2562762 GN=queF PE=3 SV=1
MAAPHDSTGPAGASDASLPLGKDVAYPSSYQPDLLFPIPRQIQRDSLGVGTQRLPFVGADNWTAFELSWLNLRGKPQVALAHLTFPCETTNIVESKSLKLYLNSLNQARFADAAAVRDCLRKDLSEAAWRGSGQTSSIGVRVIEAEDFDAEPVQELSGLDLDRLDIECEHYTPRPDLLRSDHSRAHVSETLTSRLLKSNCPVTGQPDWASVQISYSGPPIDQASLLQYIVSFRNHTGFHENCVEQMFIDIWQRCAPLQLSIQARYTRRGGLDINPFRSSNPQTLPANIRTARQ

SEQ ID NO: 46755 - protein, 143 aa, Laribacter hongkongensis
  REGION 1..143: note = tr|A0A248LHY1|A0A248LHY1_9NEIS NADPH-dependent 7-cyano-7-deazaguanine reductase OS=Laribacter hongkongensis OX=168471 GN=queF PE=3 SV=1
MNLHDELKSLGSGKTEYRYDQPDAALLERFPNPYNRPEINPNQVSGKLNITCPEFTSLCPITGQPDFATIVIDMEPAEWCVESKSLKLYLGSFRMHGEFHEACICRICNDLVNLLHPKWIRVEGRFTPRGGIPLWPVAEWNAA

SEQ ID NO: 46756 - protein, 143 aa, Laribacter hongkongensis
  REGION 1..143: note = tr|C1D6K7|C1D6K7_LARHH NADPH-dependent 7-cyano-7-deazaguanine reductase OS=Laribacter hongkongensis (strain HLHK9) OX=557598 GN=queF PE=3 SV=1
MNLHDELKSLGSGKTEYRYDQPDAALLERFPNPYNRPEINPNQVSGKLNITCPEFTSLCPITGQPDFAIIVIDMEPAEWCVESKSLKLYLGSFRMHGEFHEACICRICNDLVNLLHPKWIRVEGRFTPRGGIPLWPVAEWNAA

SEQ ID NO: 46757 - protein, 156 aa, Lautropia mirabilis
  REGION 1..156: note = tr|E7RZV6|E7RZV6_9BURK NADPH-dependent 7-cyano-7-deazaguanine reductase OS=Lautropia mirabilis ATCC 51599 OX=887898 GN=queF PE=3 SV=1
MRTPEDLQGITHLGSQKTQYRSDYAPEVLEAFDNKHPDNDYFVKFVCPEFTSLCPITGQPDFATIVIRYIPGQKMVESKSLKLYLFSFRNHGDFHEDCVNVIMKDLIKLMQPKYIEVFGEFTPRGGIAIHPFANHGQPGTSFEQLARERLFAYDRP

SEQ ID NO: 46758 - protein, 156 aa, Lautropia sp.
  REGION 1..156: note = tr|A0A426FM19|A0A426FM19_9BURK NADPH-dependent 7-cyano-7-deazaguanine reductase OS=Lautropia sp. KCOM 2505 OX=2490857 GN=queF PE=3 SV=1
MRTPSELHGITHLGSQGTEYRADYAPDVLEAFDNKHPDNDYFVKFVCPEFTGLCPITGQPDFATIIIRYIPAQKMVESKSLKLYLFSFRNHGDFHEDCINIIMKDLIALMDPKYIEVFGEFTPRGGIAIHPFANYGKPGTRFEELARERLFFHDQQ

SEQ ID NO: 46759 - protein, 142 aa, Lautropia sp.
  REGION 1..142: note = tr|A0A3B8R9E2|A0A3B8R9E2_9BURK NADPH-dependent 7-cyano-7-deazaguanine reductase OS=Lautropia sp.; OX = 2053568 GN=queF PE=3 SV=1
MTSSRPSNKLDRFPNPQSARDYVIHMEIPEFTCLCPLTGQPDFAVFELDYIPNDWCVELKALKMFMWSYRDQGAFHEAVTNEILDALVALIAPRYMRLTSRWYVRGGIYTTIAAEHRKRGWKAPTPVALAPLKSEPVRPFSH

SEQ ID NO: 46760 - protein, 169 aa, Lawsonia intracellularis
  REGION 1..169: note = tr|Q1MS80|Q1MS80_LAWIP NADPH-dependent 7-cyano-7-deazaguanine reductase OS=Lawsonia intracellularis (strain PHE/MN1-00) OX=363253 GN=folE PE=3; SV = 1
MTEITHSGDQTTHLKILGKGSIGHQGPPSSSLLETFGNLYPHRPYVITIAFPEYTSLCPVTGQPDFGTIVVEYIPHERCIESKSFKLYLIAFRNHQTFMETVTNTILEDMVTVLDPLWCRVKGLFEPRGATHLHVFAEHIKEVEEKEKQEALHTVIFNWKQQYLPHSWK

SEQ ID NO: 46761 - protein, 137 aa, unidentified
  source 1..137: note = Lebetimonas natsushimae
  REGION 1..137: note = tr|A0A292Y9P2|A0A292Y9P2_9PROT NADPH-dependent 7-cyano-7-deazaguanine reductase OS=Lebetimonas natsushimae OX=1936991 GN=queF PE=3 SV=1
MNELKYGEKEIIEFNPQNLEIWPNKNKKNYLIKITLPEFMCKCPRSGYPDFATVYLEYIPDEWVVELKALKLYINSFMNRYISHEDSANEIFDTLYNKLKPKYMKITMDFNPRGNVHTVIEIDSERIEKYENNGTKE

SEQ ID NO: 46762 - protein, 280 aa, Leclercia adecarboxylata
  REGION 1..280: note = tr|A0A4U9IGX7|A0A4U9IGX7_9ENTR NADPH-dependent 7-cyano-7-deazaguanine reductase OS=Leclercia adecarboxylata OX=83655 GN=queF PE=3 SV=1
MSYENHDALSGLTLGKSTAYRDTYDASLLQGVPRSLNRDPLGLKADALPFHGGDIWTLYELSWLNARGLPQVAVGHVELDYTSVNLVESKSFKLYLNSFNQTRFDSWEAVQHTLERDLSACAQGKVTVALYRIDELEGQPIAHFHGTCIDEQDIEIDNYQFDTAWLENAASGKVVEETLVSHLLKSNCLITHQPDWGSVQIQYRGAKIDREKLLRYLVSFRNHNEFHEQCVERIFNDILQFCQPETLSVYARYTRRGGLDINPWRSNSDFVPAIGRLVRQ

SEQ ID NO: 46763 - protein, 280 aa, Leclercia adecarboxylata
  REGION 1..280: note = tr|A0A3E1ZSP2|A0A3E1ZSP2_9ENTR NADPH-dependent 7-cyano-7-deazaguanine reductase OS=Leclercia adecarboxylata OX=83655 GN=queF PE=3 SV=1
MSYENHDALSGLTLGKSTAYRDTYDASLLQGVPRSLNRDPLGLKADALPFHGGDIWTLYELSWLNARGLPQVAVGHVELDYTSVNLVESKSFKLYLNSFNQTRFDSWEAVQRTLERDLSACAQGKVTVALYRIDELKGQPIAHFHGTCIDEQDIEIDNYQFDTAWLENAASGKVVEETLVSHLLKSNCLITHQPDWGSVQIQYRGAKIDREKLLRYLVSFRNHNEFHEQCVERIFNDILQFCQPETLSVYARYTRRGGLDINPWRSNSDFVPAIGRLVRQ

SEQ ID NO: 46764 - protein, 280 aa, Leclercia sp.
  REGION 1..280: note = tr|A0A345C6S3|A0A345C6S3_9ENTR NADPH-dependent 7-cyano-7-deazaguanine reductase OS=Leclercia sp. W17; OX = 2282309 GN=queF PE=3 SV=1
MSYENHDALSGLTLGKSTAYRDIYDASLLQGVPRSLNRDPLGLKADALPFHGGDIWTLYELSWLNARGLPQVAVGHVELDYTSVNLVESKSFKLYLNSFNQTRFESWEAVQRTLERDLSACAQGKVTVALYRIDELEGQPIAHFHGTCIDDQDIEIDNYQFDTAWLEKSASGKVVEETLVSHLLKSNCLITHQPDWGSVQIQYRGAKIDREKLLRYLVSFRNHNEFHEQCVERIFNDILRFCQPESLSVYARYTRRGGLDINPWRSNTDFVPAIGRLVRQ

SEQ ID NO: 46765 - protein, 280 aa, Leclercia sp.; identical to SEQ ID NO: 45884
  REGION 1..280: note = tr|A0A0J6MHA5|A0A0J6MHA5_9ENTR NADPH-dependent 7-cyano-7-deazaguanine reductase OS=Leclercia sp. LK8; OX = 1628210 GN=queF PE=3 SV=1

SEQ ID NO: 46766 - protein, 416 aa, Legionella adelaidensis
  REGION 1..416: note = tr|A0A0W0R4N7|A0A0W0R4N7_9GAMM NADPH-dependent 7-cyano-7-deazaguanine reductase OS=Legionella adelaidensis OX=45056 GN=queF PE=3 SV=1
MKYYKIKDISRVTALSVRSLQYYDDIGLLKPSLRTDAGYRLYSERDLIRLQQVVTLKFLGFSLTAIRKILEGPEFEVLNSMHIQAEALKEKAAHINEAARLTTYIASQLEAGEHVNWHSALQIVNILESNRMSEALEKRYQMKPEQSELGKSSNYDSQYNPERLFAIPREAKRKEIGVNPENLPFYGFDCWNHYEVSWLNAKGKPVVAIAEIIYDCSTPNLIESKSLKLYFNSFNNTHFKDSEELKLTVERDLSSRLGGEAHVRILSLKDEELATLQAAPSGECIDDLDVTCSIYLVEPAYLSVEDKKVEEILYSDLLKSNCLVTNQPDWGSVQIAYTGQKINREGLLKYLVSFRNHNEFHEQCIERIFVDIMNRCKPEKLTVYGRYTRRGGLDINPYRTTEKVNMQGLNYRLVRQ

SEQ ID NO: 46767 - protein, 416 aa, Legionella anisa
  REGION 1..416: note = tr|A0A2Z3KRK8|A0A2Z3KRK8_9GAMM NADPH-dependent 7-cyano-7-deazaguanine reductase OS=Legionella anisa; OX = 28082 GN=queF PE=3 SV=1
MKYYQIKEISQMTSLTIRSLQYYDEIGLLKPTKRSMSGYRLYSETDLIRLQQITTLKFLGFSLSTIKKIMDNPHFDVMTSMGIQARELTEKAARINEAASLLTYISSQVEMNQAVNWKSTAKIIEILELNTMNDHVLQKYQSEAEQSELGKKSAYDETYNPDRLYPIPRAGKRQEIGVDPVQLPFYGFDCWNHYEVSWLNAKGKPMVAIAELFYDCSSPNLIESKSLKLYFNSFNNTRIQSVSELENTIKKDLQERVGAEVWVHVHLLEATTQFAAQQPLKGESLDDLDIECSIYLVEPSFLSVGDEIVEETLFSNLLKSNCLVTNQPDWGSVQITYKGKKINREGLLKYLVSYRNHNEFHEQCIERIFVDIMNYCMPEKLTVYGRYTRRGGLDINPYRSTEKTSFAGKNVRLVRQ

SEQ ID NO: 46768 - protein, 416 aa, Legionella beliardensis
  REGION 1..416: note = tr|A0A378I423|A0A378I423_9GAMM NADPH-dependent 7-cyano-7-deazaguanine reductase OS=Legionella beliardensis OX=91822 GN=queF PE=3 SV=1
MKYYQIKDISRRTSLTVRSLQYYDEIGLLKPSKRSAVGYRLYSEKDLLLLQQITTLKYLGFSLKQIKKIMSNPSFDVIKSLGIQAQELREQAAKINEAASLLDYIASQAEMKQPINWQSITKIIEILELNTMNNHVVNKYQMLHKESELGKKSDYDSTYNPSRLYPIPRAGKRQEIGIDPASLPFVGFDCWNHYEVSWLNEKGKPIVGIAEIIYDCNSPKLIESKSLKLYFNSFNNMKINSKLELESIIQNDLEKRIESEVLIKIYSLEEARQFTTIQPFTGESLDVLDVECSVYLVEPNFLSTSHELVEEILYSDLLKSNCLVTNQPDWGSVQIAYKGRKINREGLLKYLISFRNHNEFHEQCIERIFVDLMKYCKPEKLTVYGRYTRRGGLDINPYRSTEKTSINDKNFRLIRQ

SEQ ID NO: 46769 - protein, 285 aa, Legionella birminghamensis
  REGION 1..285: note = tr|A0A378IAS2|A0A378IAS2_9GAMM NADPH-dependent 7-cyano-7-deazaguanine reductase OS=Legionella birminghamensis OX=28083 GN=queF PE=3 SV=1
MSLLLGKKYQSQPDESELGQSSQYDTHYNPDRLFAVSREGKRSEIGVDSSSLPFYGFDCWNHYEVSWLNEKGKPVVALAEIIYDCETPNIIESKSLKLYFNSFNNTRIKDSETLRQIVARDLSARIGGKVDVRILSLKDKELSFIQSMPAGECIDELDVTCSVYLVEPNYLFTEGEKVEEVLYSDLLKSNCLVTKQPDWGSVQIAYTGKQINREGLLKYLISFRNHNEFHEQCIERIFVHILNRCKPEKLTVYGRYTRRGGLDINPYRSTEKTVVKGLNQRLVRQ

SEQ ID NO: 46770 - protein, 276 aa, Legionella brunensis
  REGION 1..276: note = tr|A0A0W0SLL3|A0A0W0SLL3_9GAMM NADPH-dependent 7-cyano-7-deazaguanine reductase OS=Legionella brunensis; OX = 29422 GN=queF PE=3 SV=1
MKAFDNLEKSPLGRTVNYSNRYDNSLLFRICRKEKRRDIGLSQTLPFYGEDIWNAYELSWLNPKGKPIVALATIIVPADSSYIFESKSLKLYLNSLNSTCFASEQEIRTIIENDLSNLVNKRITVALGSLEDSRLHVINLPTGINIDHRDIETYCYYYTQEFLSTSGEYVIETLHSNLLRSNCPITNQPDWGTIFINYEGQQINHDGLLKYIISLRENHEFHEHCIERIFNDILKKCSPNKLSVYARYTRRGGIDINPWRSTPGFNVETNFRLVRQ

SEQ ID NO: 46771 - protein, 277 aa, Legionella brunensis
  REGION 1..277: note = tr|A0A0W0SD57|A0A0W0SD57_9GAMM NADPH-dependent 7-cyano-7-deazaguanine reductase OS=Legionella brunensis; OX = 29422 GN=queF PE=3 SV=1
MSENQLHSSPLGQKTVYIETYNNSLLFPISRQPKRDAVGIYEQSLPFHGYDLWTAFELSWLNEKGKPVVAVADIIIPCDSPNLIESKSFKLYLNSFNNTHFSSKEIVQKTLVHDLSKVVGREVSVAIYYPTSFDNSQIGRLEGFCLDDLDINCSEYRVNSTLLKTVDEEVQNITLYSHLLKSNCPVTGQPDWGSVVIKYSGLRIDNETLLQYLVSFRNHNEFHEQCVERIFMDLMKYCHPAKLTVYARYTRRGGLDINPIRSNEMIEPPTNTRLYRQ

SEQ ID NO: 46772 - protein, 416 aa, Legionella busanensis
  REGION 1..416: note = tr|A0A378JNH3|A0A378JNH3_9GAMM NADPH-dependent 7-cyano-7-deazaguanine reductase OS=Legionella busanensis; OX = 190655 GN=queF PE=3 SV=1
MKYYQVKEVSRMTSLTVRSLQYYDEIGLLRPTKRSVSGYRLYSEKDLLILQQIITLKYLGFSLEEIKKCIENPNFNLNASLKIQADELHAKAAQINEAASLLTYIASQIEMGSLVNWQSTAKIIEILELNKMSDQILSKYEAINNESELGKKSDYDLTYNPDRLYPIPRAGKRQEIGINSSALPFFGFDCWNHYEVSWLNEKGKPMVGVAEIIYDCRSPKLIESKSLKLYFNSFNNTKIKDKFALESIVKNDLEKRIDAEVSVTIYSLAEARQFKVIESCEGETIDNLDVECSIYQVEPSFLSVTDEEVEEILYSDLLKSNCLVTNQPDWGSVQIAYKGKKINREALLKYLISFRNHNEFHEQCIERIFVDIMTYCKPEQLTVYGRYTRRGGLDINPYRSTENTLHDGKNKRLIRQ

SEQ ID NO: 46773 - protein, 416 aa, Legionella cherrii
  REGION 1..416: note = tr|A0A0W0S4T7|A0A0W0S4T7_9GAMM NADPH-dependent 7-cyano-7-deazaguanine reductase OS=Legionella cherrii; OX = 28084 GN=queF PE=3 SV=1
MRYYQIKEISQLTSLTVRSLQYYDEIGLLKPTKRLENGYRLYSEMDLMRLQQITTLKFLGFSLSTIKKIMENPNFDVMTSIGIQARELTEKAARINEAASLLTYISSQMEMNQPVNWKSTAKIIEILELNTMNDEVLQQYQSDAEQSELGKKSAYDETYNPNRLYPIPRAGKRQEIGVDPTRLPFYGFDCWNHYEVSWLNAKGKPMVGIAELFYECSSPNLIESKSLKLYFNSFNNTRIPSVSELENTIKKDLQERVGAEVWVKIHHVDSFDQCSIQQSLVGDSLDQLDIECSVYLVEPAFLSVGNEIVEETLYSNLLKSNCLVTNQPDWGSVQIAYKGKQINREGLLKYLVSYRNHNEFHEQCIERIFVDIMNYCKPEQLTVYGRYTRRGGLDINPYRSTEKTSFIGKNLRLIRQ

SEQ ID NO: 46774 - protein, 416 aa, Legionella cincinnatiensis
  REGION 1..416: note = tr|A0A378IGR5|A0A378IGR5_9GAMM NADPH-dependent 7-cyano-7-deazaguanine reductase OS=Legionella cincinnatiensis OX=28085 GN=queF PE=3 SV=1
MKFYRIKEMSQMTALTIRSLQYYDDIGLLKPTKRSDNGYRFYSEQDLIRLQQITTLKFFGFSLSTIKKIIENPNFDILTSVIIQARELKEKATRINEAASLLNYISSQMEMNQPVNWKSTAKIIEILELNNMNDLVLKKYQAVEEKSELGKKSNYDDTYNPNRLYPIPRAGKRHEIGIDPAQLPFYGFDCWNHYEVSWLNPKGKPMVAIAELYYDCSSPNLIESKSLKLYFNSFNNTRIQNTSELENIIKRDLQERVEAEVWVNIHLLGNANQFTVQPSFIGECLDELDIECSVYLVEPSFLSVSNEIVEETLYSNLLKSNCLVTNQPDWGSIQISYKGKKINREGLLQYLVSFRNHNEFHEQCIERIFVDIMNRCQPELLTVYGRYTRRGGLDINPYRSTEKNSFLGKNVRLVRQ

SEQ ID NO: 46775 - protein, 284 aa, unidentified
  source 1..284: note = Legionella clemsonensis
  REGION 1..284: note = tr|A0A222P5G3|A0A222P5G3_9GAMM NADPH-dependent 7-cyano-7-deazaguanine reductase OS=Legionella clemsonensis OX=1867846 GN=queF PE=3 SV=1
MNDAVFKKYSSVSELELGKKSDYDATYNPNRLYPIPRVGKRQEIGIDPFKLPFFGFDCWNHYEVSWLNEKGKPMIGIGEIFYDCNSPKLIESKSLKLYFNSFNNTKIKNIEHLENTIKKDLEERIEAPVFVTIYPLEQAKQFAVTQTLAGESIDNLDIECSVYEVEPSFLTVENVMVEEVLYSDLLKSNCLVTHQPDWGSVQIAYKGRKINREGLLKYLVSFRNHNEFHEQCIERIFVDIMSLCKPEILTVYGRYTRRGGLDINPYRSTGSVVFDKQNLRLIRQ

SEQ ID NO: 46776 - protein, 278 aa, unidentified
  source 1..278: note = Legionella donaldsonii
  REGION 1..278: note = tr|A0A378J613|A0A378J613_9GAMM NADPH-dependent 7-cyano-7-deazaguanine reductase OS=Legionella donaldsonii; OX = 45060 GN=queF_1 PE=3 SV=1
MIMARINNLENSPLGKKTVYSTRYDKSLLFSITRRERRQEIKIPSILPFQGEDIWNAYEFSWLNGKGKPVIALATFIVPAESPRIFESKSLKLYLHSFNASRFNSEREVSKILCKDLSEVVGVPVLVTLQHWEYSPLATILLPAGINLDHYDLSTNRYTYAPEFLETAPFFDKELLYSNLLKSNCPITSQPDWATIFIRYEGRKIKHEGLLKYIISLRNHDEFHEHCVERIFMDILNHCKPEKLLVYARYTRRGGIDINPQRATLGFALPENLRQPRQ

SEQ ID NO: 46777 - protein, 276 aa, unidentified
  source 1..276: note = Legionella donaldsonii
  REGION 1..276: note = tr|A0A378JF86|A0A378JF86_9GAMM NADPH-dependent 7-cyano-7-deazaguanine reductase OS=Legionella donaldsonii; OX = 45060 GN=queF_2 PE=3 SV=1
MSEDYLHASPLGRRSAYIDNYDNSLLFPIARQTKREGIGVGLSLPFTGYDIWTAFELSWLNQKGKPVVAIADIIMPCESVNLIESKSLKLYLNSFNNTIFDSAETVRETIASDLSKAAGSVVQVVLYKAEGFIEAPIGQLEGLCLDELDISCSEYKVNPQLLNVSTEKVENIALYSHLLKSNCLMTGQPDWGSIAITYSGPRISNESLLQYLVSFRNHNEFHEQCVERIFMDLMTYCQPDELTVYARYTRRGGLDINPIRSTKPVVPPANIRLYRQ

SEQ ID NO: 46778 - protein, 253 aa, Legionella drancourtii
  REGION 1..253: note = tr|G9EJC3|G9EJC3_9GAMM NADPH-dependent 7-cyano-7-deazaguanine reductase OS=Legionella drancourtii LLAP12 OX=658187 GN=queF PE=3 SV=1
MFAIPRDAKRKEIGVDPNELPFYGFDCWNHYEVSWLNEKGKPIVALAEIIYDCATVYLIESKSLKLYFNSFNNTQFKNSEEVKLAIERDLAKRVGGEVQVRILSLKEKEPAMIEAVSQGECIDDLDVTCSVYLVEPEYLFVEDKQIEEVLYSDLLKSNCLVTNQPDWGSVQIAYTGKQINREGLLKYLVSFRNHNEFHEQCIERIFVDIMHRCKPEKLTVYGRYTRRGGLDINPYRSTEKVESQGLNLRLIRQ

SEQ ID NO: 46779 - protein, 265 aa, Legionella drozanskii
  REGION 1..265: note = tr|A0A0W0SMI9|A0A0W0SMI9_9GAMM NADPH-dependent 7-cyano-7-deazaguanine reductase OS=Legionella drozanskii LLAP-1 OX=1212489 GN=queF PE=3 SV=1
MAEIKEVNDSSLGKKTFYEPYYNPNKLFPISRKTQRDELSISSTPPFFGYDSWNHYEVSWLNEKGKPIFALAEIIYSCHSPFLIESKSLKLYFNSFNNTKFSSLQAVQRQIIYDIEEKIGARVAVQINPFRREETLYFEGKCLDELDVDCSIYTVTPSLLTVEKTQVNEKLYSNLLKSNCLVTNQPDWASVQIIYSGKKINHAGLLRYLVSFRNHNEFAEHCIERIFMDVMRFCQPEELTVFGRYSRRGGLAVNPFRTTKKELKL

SEQ ID NO: 46780 - protein, 276 aa, Legionella drozanskii
  REGION 1..276: note = tr|A0A0W0SQ62|A0A0W0SQ62_9GAMM NADPH-dependent 7-cyano-7-deazaguanine reductase OS=Legionella drozanskii LLAP-1 OX=1212489 GN=queF PE=3 SV=1
MAVDDLTSSPLGQRSIYIDNYDDTLLFPISRQPKRDAIAIRHPLPFKGYDIWTAFELSWLNEKCKPVVAVADIIIPCDSPNIIESKSFKLYLNSFNNTRFSSPELVRDLIQRDLSKAAGLPVEVIMYSPQEFTNSPIGQFDGFYLDELDIVCSEYKVNAELLQTSQVYVNNYSAYSHLLKSNCPVTGQPDWGSVSINYSGPQIEPNTLLQYLVSFRNHNEFHEQCVERIFMDIMARCQPEELTVYARYTRRGGLDINPIRSTNLIAPPRNSRLYRQ

SEQ ID NO: 46781 - protein, 416 aa, Legionella erythra
  REGION 1..416: note = tr|A0A0W0TPY5|A0A0W0TPY5_LEGER NADPH-dependent 7-cyano-7-deazaguanine reductase OS=Legionella erythra; OX = 448 GN=queF PE=3 SV=1
MRYYQIKEISRLTSLSVRSLQYYDERGLLKPSKRSDAGYRLYSDADLLRLQQIVTLKYLGFSLNEIKKTLNDPQFDIQKSLVVQARLLAEKARQLKEASALLTYIASQREAQQAVNWRSTAEIIAILELSNMNNGVDKYNNQADDSELGRKSEYDASYNPQRLYPIPRAGKRREIGINPAHELPFYGFDGWNHYEVSWLNEKGKPIVAVAEIDYDCRTPMLIESKSLKLYFNSFNNTRFKSLTDVVNIIKSDLEQRVQGDVRVAVHPLGSGVILPLYERFNGECIDHLDVACSTYTVEPSFLTATGEPVEETLYSDLLKSNCLVTNQPDWGSVQISYKGQKINREGLLKYLVSFRNHNEFHEQCIERIFIDIMRQCQPDELTVYGRYTRRGGLDINPYRSTKQPVRQGLNFRLPRQ

SEQ ID NO: 46782 - protein, 416 aa, Legionella fallonii
  REGION 1..416: note = tr|A0A098G953|A0A098G953_9GAMM NADPH-dependent 7-cyano-7-deazaguanine reductase OS=Legionella fallonii LLAP-10 OX=1212491 GN=queF PE=3 SV=1
MKEYKIKEISKLTSLSIRTLQYYDDIDLLKPSRRSEADYRLYSEDDLLRLQQITTLKYLGCSLAAIRNIIQHPGFNLKKSLALQATVLAEQAQKINEASALLNYIAAQINAGHPVNWYSTTQIIHILESSTMSKELKNNYQNMANQSELGQKSEYDATYNPERLYAIPRAPKRKEINLDPITLSFHGFDCWNHYEVSWLNPKGKPMVAIAVISYDCHSPFIIESKSLKLYFNSFNNHVFSDVQAVEQTVRQDLSRCIDAEATVSITPLTDLKNQTLHSSFSGTCLDTLDIECSSYMVDSSFLTTSNEQVEEVLYSDLLKSNCLVTNQPDWGSVQIAYKGKKLNHEGLLKYLVSFRNHNEFHEQCIERIFTDIMTLCQPESLTVYGRYTRRGGLDINPFRSTEPCSIGDKNIRLIRQ

SEQ ID NO: 46783 - protein, 278 aa, Legionella feeleii
  REGION 1..278: note = tr|A0A0W0TZV2|A0A0W0TZV2_9GAMM NADPH-dependent 7-cyano-7-deazaguanine reductase OS=Legionella feeleii; OX = 453 GN=queF_2 PE=3 SV=1
MIMARINNLENSPLGKKTVYSSSYDKSLLFGITRRERGQEINIPPILPFHGEDIWNAYEFSWLNCKGKPVIALATFIVPAESPRIFESKSLKLYLHSFNASRFNHESQVSAILCNDLSEVAGAPVLVTLQNWEYSSLAKIFLPVGINLDHNDLSTDRYTYAPEFLEASPFFDKELLYSNLLKSNCPITSQPDWATLFIHYEGRKIKHEGLLKYIISLRNHDEFHEHCVERIFMDILNHCKPEKLLVYARYTRRGGIDINPQRATPGFALPENLRQPRQ

SEQ ID NO: 46784 - protein, 276 aa, Legionella feeleii
  REGION 1..276: note = tr|A0A378ISD5|A0A378ISD5_9GAMM NADPH-dependent 7-cyano-7-deazaguanine reductase OS=Legionella feeleii; OX = 453 GN=queF_1 PE=3 SV=1
MSEHYLHASPLGRRSAYIDNYDNSLLFPIARQTKREGIGIGLSLPFTGYDIWTAFELSWLNQKGKPVVAVADIIMPCESVNLIESKSLKLYLNSFNNTIFDSAETVQETIASDLSKAAGSVVQVVLYKAEGFIEAPIGQLEGLCLDELDISCSEYKVNPRLLNVSTEKVENVVLYSHLLKSNCLMTGQPDWGSIAITYSGPRISNESLLRYLVSFRNHNEFHEQCVERIFMDLMAYCQPDELTVYARYTRRGGLDINPIRSTKPVAPPANIRLYRQ

SEQ ID NO: 46785 - protein, 285 aa, Legionella geestiana
  REGION 1..285: note = tr|A0A0W0TU94|A0A0W0TU94_9GAMM NADPH-dependent 7-cyano-7-deazaguanine reductase OS=Legionella geestiana; OX = 45065 GN=queF PE=3 SV=1
MPDFSHPPVINAAEDSELGKKSLYESAYNPHKLFPIPRAGKRQEIGILSDKLPFYGFDRWNHYEVSWLNPKGKPMVGIAEIIYDCHTPCIIESKSLKLYFNSFNNTTIADAKTLEAIVREDLEARVQGPVSVKIHALSRFAERAMLAHFEGESIDALDVSCSVYQVEPAFLAAGLNTVEEVLCSDLLKSNCLVTHQPDWGSVQIAYKGPQIDREGLLKYLVSFREHNEFHEQCIERIFIDILNRCKPQVLTVTGFYTRRGGLDINPCRSTEPDFQPVDTLRLVRQ

SEQ ID NO: 46786 - protein, 415 aa, Legionella gratiana
  REGION 1..415: note = tr|A0A378JCI4|A0A378JCI4_9GAMM NADPH-dependent 7-cyano-7-deazaguanine reductase OS=Legionella gratiana; OX = 45066 GN=queF PE=3 SV=1
MKYYQIKEISQMTSLSIRSLQYYDEVGLLKPTKRSDSGYRLYSEADLLILQQIITLKFLGFSLSTIKEILANPNFNLAESMSLQARELSEKANKINEAASLLTYIASQLEINQPINWQSSAKIIEILELNTMNDAVLKKYQSVNKSELGKKSDYDSTYNPNRLYPILRAGKRQEIGIDPANPPFVGFDCWNHYEVSWLNEKGKPMIGIGEIFYDCNSPKLIESKSLKLYFNSFNNTQIKSIDELENTIKKDLEARIEAPVLVTIYPLQQAKQYSVSQMLTGECIDHLDVECSVYLVEPSFLSVHDVVVEESLYSDLLKSNCLVTNQPDWGSVQITYKGKKINREGLLKYLVSFRNHNEFHEQCIERIFVDIMNYCKPEVLTVYGRYTRRGGLDINPYRSTKNSAFDRKNIRLVRQ

SEQ ID NO: 46787 - protein, 278 aa, Legionella hackeliae
  REGION 1..278: note = tr|A0A0A8UT69|A0A0A8UT69_LEGHA NADPH-dependent 7-cyano-7-deazaguanine reductase OS=Legionella hackeliae; OX = 449 GN=queF PE=3 SV=1
MSEKQLESSPLGQKTVYIETYNNTLLFPISRQPKRDAIGIMAQQNLPFKGYDLWTAFELSWLNEKGKPVVAVADIVIPCDSPNLIESKSFKLYLNSFNNTHFSSVESVQQTIIHDLSKVAGRQVSVTIYSPEDFNNSKISHFEGFCLDEMDINCNEYRVNSKLLKAHHDKVENSSLYSHLLKSNCPVTGQPDWGSVAINYSGHRIDNEALLQYLVSFRNHNEFHEQCVERIFMDIMHYCQPTELTVYARYTRRGGLDINPIRSNKEIKQPVNIRLYRQ

SEQ ID NO: 46788 - protein, 282 aa, Legionella israelensis
  REGION 1..282: note = tr|A0A516N1B9|A0A516N1B9_9GAMM NADPH-dependent 7-cyano-7-deazaguanine reductase OS=Legionella israelensis; OX = 454 GN=queF PE=3 SV=1
MNDMLKYQSANESELGKKSAYESSYNPNRLYPIPRMSKRQEIGIDPVHLPFVGFDCWNHYEVSWLNKKGKPMVGIGEIIYDCHSPKLIESKSLKLYFNSFNNTKIRSISELENIIQKDLEKCTGSPVFIKIYPLEQAKKFALSQSLSGECIDHLDVECSVYLVEPSFLTVHDEMVEETLYSDLLKSNCLVTHQPDWGSIQIAYKGQKINREGLLKYLVSYRNHNEFHEQCIERIFVDIMNHCKPEILTVYGRYTRRGGLDINPYRSTASTSVERKNTRLIRQ

SEQ ID NO: 46789 - protein, 282 aa, Legionella israelensis
  REGION 1..282: note = tr|A0A0W0VMR6|A0A0W0VMR6_9GAMM NADPH-dependent 7-cyano-7-deazaguanine reductase OS=Legionella israelensis; OX = 454 GN=queF PE=3 SV=1
MNDMLKYQSANESELGKKSAYESSYNPNRLYPIPRMSKRQEIGIDPVHLPFVGFDYWNHYEVSWLNKKGKPMVGIGEIIYDCHSPKLIESKSLKLYFNSFNNTKIRSISELENIIQKDLEKCTGSPVFIKIYPLEQAKKFALSQSLSGECIDHLDVECSVYLVEPSFLTVHDEMVEETLYSDLLKSNCLVTHQPDWGSIQIAYKGQKINREGLLKYLVSYRNHNEFHEQCIERIFVDIMNHCKPEILTVYGRYTRRGGLDINPYRSTVGTSVERKNTRLIRQ

SEQ ID NO: 46790 - protein, 285 aa, Legionella jamestowniensis
  REGION 1..285: note = tr|A0A0W0UKC0|A0A0W0UKC0_9GAMM NADPH-dependent 7-cyano-7-deazaguanine reductase OS=Legionella jamestowniensis OX=455 GN=queF PE=3 SV=1
MNDAVLKKYSAVSESELGKKSDYDSAYNPSRLYPIPRAGKRQEMGVDPVNPPFFGFDCWNHYEVSWLNEKGKPMVGIGEIFYDCNSPKLIESKSLKLYFNSFNNTRINHITDLENTIKKDLEERIEAPVSVNIYPLEEAKQFTVTQTLTGECIDHLDVACSVYIVEPSFLSVEEIVVEEVLYSDLLKSNCLVTNQPDWGSVQIAYKGKQINREGLLKYLVSYRNHNEFHEQCIERIFVDIMKHCQPEMLTVYGRYTRRGGLDINPYRSTENTVFDKQKNIRLIRQ

SEQ ID NO: 46791 - protein, 278 aa, Legionella jordanis
  REGION 1..278: note = tr|A0A0W0VFK5|A0A0W0VFK5_9GAMM NADPH-dependent 7-cyano-7-deazaguanine reductase OS=Legionella jordanis; OX = 456 GN=queF PE=3 SV=1
MSDKELYSSPLGQKTTYVETYNSSLLFPISRGPKREDIGINNQQLPFYGYDLWTAYELSWLNNKGKPVVAVADILIPCDSPNLIESKSLKLYLNSFNNSHFDSTETVVQTLVNDLSKSAGSPVNVTIFPPEHFSLSRIEDMNGFCLDELDVRCDEYQVNSSLLTIEGESVVNDYSVYSHLLKSNCPVTGQPDWGTLAITYSGPRINNDSLLKYIVSFRNHNEFHEQCVERIFTDLMTHCQAKELCVYARYTRRGGLDINPIRSSSYIAPPRNIRLYRQ

SEQ ID NO: 46792 - protein, 277 aa, Legionella lansingensis
  REGION 1..277: note = tr|A0A0W0VPD3|A0A0W0VPD3_9GAMM NADPH-dependent 7-cyano-7-deazaguanine reductase OS=Legionella lansingensis OX=45067 GN=queF PE=3 SV=1
MFEKELHFSPLGQKTVYIETYNNSLLFPISRQPKRDAIGVSSQALPFHGYDLWTAFELSWLNEKGKPVVAVADIIIPCDSPNLIESKSFKLYLNSFNNTHFSSAVAVQETLVHDLSKVAGEDVKVSIYHPESFESCTIGHMEGICLDDLDISCNEYRVNSSMLKTSTEIVENVSLYSHLLKSNCPVTGQPDWGSIAITYSGPRVDNEALLQYLVSFRNHNEFHEQCVERIFIDLMTYCHPDKLTVYARYTRRGGLDINPIRSNQAIKPPSNIRLYRQ

SEQ ID NO: 46793 - protein, 152 aa, Legionella lansingensis
  REGION 1..152: note = tr|A0A0W0V741|A0A0W0V741_9GAMM NADPH-dependent 7-cyano-7-deazaguanine reductase OS=Legionella lansingensis OX=45067 GN=queF PE=4 SV=1
MTEVFATYKDIDSSILIGLPNPAKEAYEIKIKVPEFTFLGMKQQPDFATIFLTMYPNEKIIELRSLKNYVYQLRSIVISYERLINVVYDHLYTTYKPARLRLVMNFNPRGGISSKLTIDSDWKIRGGADIYSKWNEHDNSWINEYDSSWINV

SEQ ID NO: 46794 - protein, 280 aa, Legionella londiniensis
  REGION 1..280: note = tr|A0A0W0VJR9|A0A0W0VJR9_9GAMM NADPH-dependent 7-cyano-7-deazaguanine reductase OS=Legionella londiniensis OX=45068 GN=queF PE=3 SV=1
MVKDDHCKEASNSPLGKKITYVSEYAPELLFPIPRKGKRDEIKVPEPLPFFGFDTWNAYEVSWLNPKGKPQNAIVQFDISCHSVNLIESKSFKLYLNSFNNTRLVSVDELRARLLKDIKRAVDGDVLITLHTLDDLLSQKIETFEGTCLDFLDIEPDSYQVNPQLLSAKENRKVKETLYSHLLKSNCLVTGQPDWGSIQISYTGAKIDEAGLLKYLISFRNHNEFHEQCVERIFMDIQTYCKPSELIVTARYTRRGGLDINPTRSSIPISPVKNIRMARQ

SEQ ID NO: 46795 - protein, 416 aa, Legionella longbeachae
  REGION 1..416: note = tr|D3HPN3|D3HPN3_LEGLN NADPH-dependent 7-cyano-7-deazaguanine reductase OS=Legionella longbeachae serogroup 1 (strain NSW150) OX=661367 GN=queF PE=3 SV=1
MKFYQIKEISQMTALSIRSLQYYDDIGLLKPAKRSASGYRLYSDQDLIRLQQITTLKFLGFSLSTTKKIIENPNFDLMTSMPIQARELKEKAARINEVASLLNYISSQMEMNQPVNWKSTAKIIEILELNNMNDLVLKKYQDVEEKSELGKKSIYDDSYNPNRLYPIPRSGKRQEIGIEPTQLPFYGFDCWNHYEVSWLNAKGKPMVAIAEIYYDCSSPNLIESKSLKLYFNSFNNTRIQNVSELQNIVKRDLQERIEAEVGVNIYLLDNVNQFAIQPSFIGECIDDLDIECSVYHVEPSFLSVGTESVTETLYSNLLKSNCLVTNQPDWGSIQISYKGKKISREGLLRYLVSFRNHNEFHEQCIERIFVDIMNRCQPELLTVYGRYTRRGGLDINPYRSTEKNLFPGTNVRLVRQ

SEQ ID NO: 46796 - protein, 285 aa, Legionella longbeachae
  REGION 1..285: note = tr|A0A378KZZ8|A0A378KZZ8_LEGLO NADPH-dependent 7-cyano-7-deazaguanine reductase OS=Legionella longbeachae; OX = 450 GN=queF PE=3 SV=1
MNDLVFEKHSIGNTLELGKTSDYESTYNPNRLYPIPRAAKRQDIGIDPAHPPFLGFDCWNHYEVSWLNEKGKPVVAIAEIVYDCNSPMLIESKSLKLYFNSFNNTIFKSIEELENIIKRDLETRINADVLVCIHPLTRAQVITLQDSFTGESIDDLDVECSVYMVEPSFLSVSNEDVEEVLYSDLLKSNCLVTNQPDWGSVQIAYKGKKINREGLLKYLVSYRNHNEFHEQCIERIFVDIMTHCKPESLTVYGRYTRRGGLDINPYRSTERALFENSKNTRLIRQ

SEQ ID NO: 46797 - protein, 415 aa, unidentified
  source 1..415: note = Legionella maceachernii
  REGION 1..415: note = tr|A0A0W0VYY1|A0A0W0VYY1_9GAMM NADPH-dependent 7-cyano-7-deazaguanine reductase OS=Legionella maceachernii OX=466 GN=queF PE=3 SV=1
MNYYQIKEISQMTSLSIRSLQYYDEVGLLKPTKRSDSGYRLYSEADLLILQQIITLKFLGFSLSTIKEIIGNPNFNLAASMSLQARELSEKANKINEAASLLTYIASQLEINQPINWQSSAKIIEILELNTMSDPVLKKYQAASESELGKKSDYDSTYNPNRLYPISRAGKRQEIGIDPVHPPFVGFDCWNHYEVSWLNAKGKPMVGIGEIFYDCNSPKLIESKSLKLYFNSFNNTKIKSISELENTIKKDLEVRIEAPVLVKIYLLEQAKHYTVSQIPKGECIDHLDVECSVYLVEPSFLSVHDVVVEERLYSDLLKSNCLVTNQPDWGSIQIAYKGKKINREGLLKYLVSFRNHNEFHEQCIERIFVDIMNYCKPEVLTVYGRYTRRGGLDINPYRSTENSAFDRENIRLVRQ

SEQ ID NO: 46798 - protein, 284 aa, unidentified
  source 1..284: note = Legionella maceachernii
  REGION 1..284: note = tr|A0A0W0W4L3|A0A0W0W4L3_9GAMM NADPH-dependent 7-cyano-7-deazaguanine reductase OS=Legionella maceachernii OX=466 GN=queF PE=3 SV=1
MNNSVLNKYQSVNESELGKKSAYDSTYNPDRLYPIPRAGKRQEIGIDPANPPFVGFDCWNHYEVSWLNEKGKPLVGIGEIFYDCNSPKLIESKSLKLYFNSFNNTRIKNIDALENTIKKDLEERIEAPVLVKIYPLEQAKQSSISSALKGECLDHLDVECSIYLIEPAFLSVDDIVVEEVLYSNLLKSNCLITHQPDWGSVQIAYKGKKINREGLLKYLISYRNHNEFHEQCIERIFVDIMNYCKPEQLTVYGRYTRRGGLDINPYRTTGNTAFDKENNRLVRQ

SEQ ID NO: 46799 - protein, 276 aa, unidentified
  source 1..276: note = Legionella massiliensis
  REGION 1..276: note = tr|A0A078L384|A0A078L384_9GAMM NADPH-dependent 7-cyano-7-deazaguanine reductase OS=Legionella massiliensis OX=1034943 GN=queF_1 PE=3 SV=1
MTNFSSLKDSPLGKTSKSAANYDKSLLFALDRSENRRELDLVSPLPFHGSDIWNLYELSWLNLQGKPIVAMARLTVPADSPRIFESKSLKLYLNSLHNLRFANGDELCKLIVADLSELCGTNLMLSLEPLTALSSSPLSSPEGLNLDDYDIHTDCYSYHPQFLSSSEKFCEEILYSNLLRSNCPITNQPDWATLVIRYEGRQIDHPGLLKYIISLREHNEFHEHCIERIFVDLMKHCGPENLLVSARYTRRGGIDINPQRATLAYGLEGNRRLIRQ

SEQ ID NO: 46800 - protein, 276 aa, unidentified
  source 1..276: note = Legionella massiliensis
  REGION 1..276: note = tr|A0A078KWM9|A0A078KWM9_9GAMM NADPH-dependent 7-cyano-7-deazaguanine reductase OS=Legionella massiliensis OX=1034943 GN=queF_2 PE=3 SV=1
MSAQDLSSSPLGQRSIYIDNYDDTLLFPISRQPKRDAIAVSLPLPFKGYDIWTAFELSWLNEKCKPVVAIGDIIIPCNSPNIIESKSFKLYLNSFNNTRFASVDVVRDLIKRDLSKAAGAEVEVLIYLANDFANAKIAQFEGIYLDDLDISYSAYKVKADILVTDEQRVENCSVYSHLLKSNCPVTGQPDWGSISINYSGPRINNESLLQYLVSFRNHNEFHEQCVERIFMDVMERCQPETLTVYARYTRRGGLDINPIRSSEAIEPPLNLRLYRQ

SEQ ID NO: 46801 - protein, 280 aa, Legionella moravica
  REGION 1..280: note = tr|A0A378K2G7|A0A378K2G7_9GAMM NADPH-dependent 7-cyano-7-deazaguanine reductase OS=Legionella moravica; OX = 39962 GN=queF PE=3 SV=1
MEFELEQNRKLELGKKSDYEAHYNADKLFPIPREGKRLEIGINPEQLPFWGFDAWNHYEVSWLNSKGKPVVAVAEIVYDCHSPNIIESKSLKLYFNTFNNTRFDSIADVEHTVINDLSHSLKSDVHVRINQLGNAHTTGLQNAFNGETIDSLDISCSVYSVDPSFLTVEEEQVEEVLYSDLLKSNCLVTYQPDWGSVQINYKGPKINREGLLRYIVSFRNHNEFHEQCIERIFVDIMAQCAPQELTVYGRYTRRGGLDINPYRSTIKPDLNAKNIRLVRQ

SEQ ID NO: 46802 - protein, 261 aa, Legionella nautarum
  REGION 1..261: note = tr|A0A0W0WN97|A0A0W0WN97_9GAMM NADPH-dependent 7-cyano-7-deazaguanine reductase OS=Legionella nautarum; OX = 45070 GN=queF PE=3 SV=1
MKEENDSLLGKSTVYEPYYNPEQLFSISRRAQREELGISSTPPFFGCDKWNHYELSWLNEKGKPIFALAEIIYSCHSPFLIESKSLKLYFNSFNNTKFASSEAVQRQIINDLEKKIAAKVIVKINPFHGEEIQPFEGICLDELDVACSIYTVDPLLLTVEKALVKEQLYSNLLKSNCLVTNQPDWASVQIIYSGKKINHAGLLRYLVSFRNHNEFAEHCIERIFMDIMRFCKPEELTVFGRYSRRGGLAINPLRTTKKSYY

SEQ ID NO: 46803 - protein, 276 aa, Legionella nautarum
  REGION 1..276: note = tr|A0A0W0WUE1|A0A0W0WUE1_9GAMM NADPH-dependent 7-cyano-7-deazaguanine reductase OS=Legionella nautarum; OX = 45070 GN=queF PE=3 SV=1
MIVDDLTSSPLGQRSIYIDNYDDTLLFPISRQPKREAIDIRQPLPFKGYDIWTAFELSWLNEKCKPVVAVADIIIPCDSPNIIESKSFKLYLNSFNNTRFSSPELVREIIQRDLSKVAGLTVEVLMYSPQEFANSPIGQFEGFYLDELDIGCSEYKVNAELLQTSQVYVNNYSVYSHLLKSNCPVTGQPDWGSVLINYSGPQIDANRLLQYLVSFRNHNEFHEQCVERIFMDIRSRCQPEELTVYARYTRRGGLDINPIRSTNIIAPPRNSRLYRQ

SEQ ID NO: 46804 - protein, 285 aa, Legionella oakridgensis; identical to SEQ ID NO: 46796
  REGION 1..285: note = tr|A0A0W0WXZ2|A0A0W0WXZ2_9GAMM NADPH-dependent 7-cyano-7-deazaguanine reductase OS=Legionella oakridgensis OX=29423 GN=queF PE=3 SV=1

SEQ ID NO: 46805 - protein, 195 aa, Legionella oakridgensis
  REGION 1..195: note = tr|W0BEA6|W0BEA6_9GAMM QueF_N domain-containing protein OS=Legionella oakridgensis ATCC 33761 = DSM 21215; OX = 1268635 GN=Loa_01490 PE=4 SV=1
MELGKTSDYESTYNPNRLYPIPRAAKRQDIGIDPAHPPFLGFDCWNHYEVSWLNEKGKPVVAIAEIVYDCNSPMLIESKSLKLYFNSFNNTIFKSIEELENIIKRDLETRINADVLVCIHPLTRAQVITLQDSFTGESIDDLDVECSVYMVEPSFLSVSNEDVEEVLYSDLLKSNCLVTNQPDWGSVQIAYKGKK

SEQ ID NO: 46806 - protein, 416 aa, Legionella parisiensis
  REGION 1..416: note = tr|A0A1E5JQE6|A0A1E5JQE6_9GAMM NADPH-dependent 7-cyano-7-deazaguanine reductase OS=Legionella parisiensis; OX = 45071 GN=queF PE=3 SV=1
MKYYQIKEISHMTSLTIRSLQYYDEIGLLKPTKRSISGYRLYSEADLIRLQQITTLKFLGFSLSTIKKIMENPHFDLMMSIGIQARELTEKAARINEAASLLTYISSQMEMNQPVNWKSTAKIIEILELNTMNDQILQKYQSEAEQSELGKKSAYDETYNPDRLYPIPRAGKRQEIGVDPVQLPFYGFDCWNHYEVSWLNARGKPMVAIAELFYDCSSPNLIESKSLKLYFNSFNNTRIQNVRELENTIKKDLQERIGAEVGVHVHLLESTSQFAIQQPLIGELLDDLDIECSIYLVEPSFLTVSDEIVEETLFSNLLKSNCLVTDQPDWGSVQITYKGKKINREGLLKYLVSYRNHNEFHEQCIERIFVDIMNYCKPEKLTVYGRYTRRGGLDINPYRSTEKSTFAGKNLRLVRQ

SEQ ID NO: 46807 - protein, 415 aa, Legionella pneumophila; identical to SEQ ID NO: 46797
  REGION 1..415: note = tr|A0A128SHH2|A0A128SHH2_LEGPN NADPH-dependent 7-cyano-7-deazaguanine reductase OS=Legionella pneumophila; OX = 446 GN=queF_1 PE=3 SV=1

SEQ ID NO: 46808 - protein, 285 aa, Legionella pneumophila
  REGION 1..285: note = tr|A0A128Z452|A0A128Z452_LEGPN NADPH-dependent 7-cyano-7-deazaguanine reductase OS=Legionella pneumophila; OX = 446 GN=queF PE=3 SV=1
MNKELESIYQNIANQSELGQTANYDSYYNPKRLYPIPRAPKRQEINLDPNSTTFYGFDCWNHYEVSWLNSKGKPVVAMAVISYDCHSPCIIESKSLKLYFNSLNNSTFPDVETVVQTISKDLSYCIGSEVAVNVYPLSEIASQTIYAAFDGVCLDKLDIECSVYHVMPDFLSTSSELVEEVLYSDLLKSNCLVTNQPDWGSVQIIYKGKKINHEGLLKYLISFRNHNEFHEQCIERIFADIMRFCQPESLTVYGRYTRRGGLDINPIRSTEPCAFDGQNIRLIRQ

SEQ ID NO: 46809 - protein, 278 aa, Legionella quateirensis
  REGION 1..278: note = tr|A0A378KY29|A0A378KY29_9GAMM NADPH-dependent 7-cyano-7-deazaguanine reductase OS=Legionella quateirensis OX=45072 GN=queF PE=3 SV=1
MEFELEHQLELGKKSEYEAQYNADKLFPIPREGKRLEIGINPDQLPFWGFDTWNHYEVSWLNAKGKPIVAVAEIVYDCHSPNIIESKSLKLYFNTFNNTQFDSIADVERTIINDLSQRLKSEVSVTIQQLGNSKTIAFQNSFDGESIDSLDIACSVYSVDPSLLTVEDHLVEETLYSDLLKSNCLVTYQPDWGSVQISYKGPKINREGLLKYIVSFRNHNEFHEQCIERIFVDIMNQCKPEKLTVYGRYTRRGGLDINPYRSTIKPEPNAKNIRLVRQ

SEQ ID NO: 46810 - protein, 284 aa, Legionella quinlivanii
  REGION 1..284: note = tr|A0A0W0XU17|A0A0W0XU17_9GAMM NADPH-dependent 7-cyano-7-deazaguanine reductase OS=Legionella quinlivanii; OX = 45073 GN=queF PE=3 SV=1
MNELSMENYKIPQESELGQSSEYDDHYNPERLFAIARAPKRREIGIEPKVLPFYGFDCWNHYEVSWLNEKGKPVVAIAEIIYDCATPNIIESKSLKLYFNSFNNTRFKDNEAVKQIVKQDLEQCVEGDVQVRILSLTDSGYNHIELSAAGECLDDLDVTCSVYQVEPGYLCTETLRVEEILYSDLLKSNCLVTNQPDWATVQIAYTGKQINREGLLKYLVSFRNHNEFHEQCIERIFADIMNRCQPEKLTVYGRYTRRGGLDINPYRSTEKLNSKELNFRLVRQ

SEQ ID NO: 46811 - protein, 284 aa, Legionella quinlivanii
  REGION 1..284: note = tr|A0A364LLR3|A0A364LLR3_9GAMM NADPH-dependent 7-cyano-7-deazaguanine reductase OS=Legionella quinlivanii; OX = 45073 GN=queF PE=3 SV=1
MNELSVENYKNPQQSELGQSSEYDDHYNPERLFAIARAPKRKEIGIDPMALPFYGFDCWNHYEVSWLNEKGKPVVAIAEIIYDCATPNIIESKSLKLYFNSFNNTRFKDNEAVKQIVKQDLAQRVGGDVQVRILGLTESGYNHIEPSAAGECLDDLDVACSVYLVEPNFLYTEDQRVEEILYSDLLKSNCLVTNQPDWATVQIAYTGMKIDREGLLKYLVSFRNHNEFHEQCIERIFADIMNRCQPEKLTVYGRYTRRGGLDINPYRSTEKLRSQALNFRLIRQ

SEQ ID NO: 46812 - protein, 284 aa, Legionella rubrilucens
  REGION 1..284: note = tr|A0A0W0XZH7|A0A0W0XZH7_9GAMM NADPH-dependent 7-cyano-7-deazaguanine reductase OS=Legionella rubrilucens; OX = 458 GN=queF PE=3 SV=1
MNPVKEQYNHAADASELGRKSDYDASYNPLRLYPIPRAGKRQEIGIHPEQLPFYGFDCWNHYEVSWLNEKGKPIVAMAEIDYDCRTPMLVESKSLKLYFNSFNNTRFKSLAEVVNTIKNDLEQRVQGEVRVAVHPLGSGMILPLYEHFNGDCIDHLDVECSTYTVEPSFLTATGEWVEETLYSDLLKSNCLVTNQPDWGSVQISYKGKKINREGLLQYLVSFRNHNEFHEQCIERIFIDIMRQCQPDELTVYGRYTRRGGLDINPYRSTKQPVRQGLNFRLPRQ

SEQ ID NO: 46813 - protein, 416 aa, Legionella sainthelensi
  REGION 1..416: note = tr|A0A0W0YNY8|A0A0W0YNY8_9GAMM NADPH-dependent 7-cyano-7-deazaguanine reductase OS=Legionella sainthelensi OX=28087 GN=queF PE=3 SV=1
MKFYQIKQISQMTALTIRSLQYYDDIGLLKPAKRTASGYRLYSEQDLIRLQQITTLKFLGFSLSTIRKIIENPNFDVIASVIIQARELKEKAARINEAASLLNYISSQMAMNQPVNWKSTAKIIEILELNNMNDLVLKKYKTLEEESELGRKSSYDDAYNPNRLYPIARAGKRQEIGINPSQLPFYGFDCWNHYEVSWLNAKGKPMVAIAELYYDCSSPYLIESKSLKLYFNSFNNTRIPNANELQNIVKRDLQERIGAEVWVNIYLLDNVKQFAIQPSFMGECIDELDVECSVYLVEPSFLSVSDETIEETLYSNLLKSNCLVTNQPDWGSIQISYRGKKINREGLLQYLVSFRNHNEFHEQCIERIFVDIMNRCQPELLTVYGRYTRRGGLDINPYRSTEKNLFLGKNIRLPRQ

SEQ ID NO: 46814 - protein, 416 aa, Legionella sainthelensi
  REGION 1..416: note = tr|A0A2H5FJR9|A0A2H5FJR9_9GAMM NADPH-dependent 7-cyano-7-deazaguanine reductase OS=Legionella sainthelensi OX=28087 GN=queF PE=3 SV=1
MKFYQIKQISQMTALTIRSLQYYDDIGLLKPSKRTASGYRLYSEQDLIRLQQITTLKFLGFSLSTIKKIIENPNFDVIASVIIQARELKEKAARINEAASLLNYISSQMEMNQPVNWKSTAKIIEILELNNMNDLVLKKYQTLEEESELGKKSNYDDAYNPNRLYPIARAGKRQEIGINPSQLPFHGFDCWNHYEVSWLNAKGKPMVAIAELYYDCSSPYLIESKSLKLYFNSFNSTRIPHVNELQNIVKRDLQERIGAEVWVNIYLLDNVKQFAIQPSFIGECIDELDVECSVYLVEPSFLSVCDETIEETLYSNLLKSNCLVTNQPDWGSIQISYKGKKINREGLLQYLVSFRNHNEFHEQCIERIFVDIMNRCQPEVLTVYGRYTRRGGLDINPYRSTEKNLFLGKNIRLVRQ

SEQ ID NO: 46815 - protein, 416 aa, Legionella santicrucis
  REGION 1..416: note = tr|A0A0W0Z1P1|A0A0W0Z1P1_9GAMM NADPH-dependent 7-cyano-7-deazaguanine reductase OS=Legionella santicrucis; OX = 45074 GN=queF PE=3 SV=1
MKFYQIKEISQMTSLTIRSLQYYDDIGLLKPAKRSDSGYRFYSEQDLIRLQQITTLKFLGFSLSTIKKIIENPNFDIMTSVIIQARELKEKAARINEAASLLNYISSQMEMNQPVNWKSTAKIIEILELNNMNDLVLKKYQAVEEKSELGKKSNYDDIYNPNRLYPIPRDGKRHEIGIDPAQLPFYGFDCWNHYEVSWLNPKGKPMVAIAELYYDCSSPNLIESKSLKLYFNSFNNTRIQNISELENIIKKDLQERVGADVAVNIYLLDNATQFVVQPSFVGECLDDLDVECSVYLVEPSFLSISNEVVEETLYSNLLKSNCLVTNQPDWGSIQISYKGKKINREGLLQYLVSFRNHNEFHEQCIERIFVDIMNRCQPELLTVYGRYTRRGGLDINPYRSTEKNPFLGKNVRLVRQ

SEQ ID NO: 46816 - protein, 277 aa, Legionella shakespearei
  REGION 1..277: note = tr|A0A0W0Z880|A0A0W0Z880_9GAMM NADPH-dependent 7-cyano-7-deazaguanine reductase OS=Legionella shakespearei DSM 23087 OX=1122169 GN=queF PE=3 SV=1
MSLENAHLELGKKSEYKAIYNAEKLFPIPRAEKRIEIGIDPQSPPFYGFDAWNHYEVSWLDAKGKPVVATAEIIYDCHTPNIIESKSLKLYFNTFNNTQFASVADVENTVIKDLSHNVEGEVTVAIQQLRKGAVLPLDTSFKGECIDDLDVTCSMYSVDPSLLTTEDEVVEEVLSSDLLKSNCLVTYQPDWGSVQIEYKGPKINREGLLKYIVSFRNHNEFHEQCIERIFVDIMAQCKPQELTVYGRYTRRGGLDINPYRSTKKPSLAVKNLRLLRQ

SEQ ID NO: 46817 - protein, 229 aa, Legionella sp.
  REGION 1..229: note = tr|A0A1Q4D7L5|A0A1Q4D7L5_9GAMM NADPH-dependent 7-cyano-7-deazaguanine reductase QueF (Fragment); OS = Legionella sp. 40-6 OX=1895903 GN=BGO90_08120 PE=4 SV=1
MNHADEKLEYESELGQKSTYDATYNPQRLYPISRESKRQELGIDSTKLPFYGYDCWNHYEVSWLNPKGKPVVAIAEIIYDCQSPKIIESKSLKLYFNSFNNAKMTSFGAVEELVKKDLQERLDTEVLVKLTPLSQSPLQQIASSFSGECLDELDITCDIYQVEPLFLKTSEEEVTEVLYSDLLKSNCLVTQQPDWGSVQISYSGKKIDREGLLKYLVSFRNHNEFHEQC

SEQ ID NO: 46818 - protein, 284 aa, Legionella sp.
  REGION 1..284: note = tr|A0A1Q3U6U3|A0A1Q3U6U3_9GAMM NADPH-dependent 7-cyano-7-deazaguanine reductase OS=Legionella sp. 39-23; OX = 1895902 GN=queF PE=3 SV=1
MSDPVLKKYQAASESELGKKSDYDSTYNPNRLYPIPRAGKRQEIGIDPAHPPFVGFDCWNHYEVSWLNEKGKPVVGIGEIFYDCNSPKLIESKSLKLYFNSFNNTKIKSIDELENTIKKDLEARVESPVLVKIYSLEQASQYAASQMLTGECIDHLDVECFVYLVEPSFLSVQDVVVEEQLYSDLLKSNCLVTNQPDWGSVYIAYKGKKIDREGLLKYLVSYRNHNEFHEQCIERIFVDIMNYCKPEVLTVYGRYTRRGGLDINPYRSSKNNTFDRKNIRLIRQ

SEQ ID NO: 46819 - protein, 281 aa, Legionella spiritensis
  REGION 1..281: note = tr|A0A0W0Z817|A0A0W0Z817_LEGSP NADPH-dependent 7-cyano-7-deazaguanine reductase OS=Legionella spiritensis; OX = 452 GN=queF PE=3 SV=1
MSEQYQGQTSDSELGKKSEYDDTYNPDRLYPIARSGKRSEIGIDPNRLPFYGFDCWNHYEVSWLNDKGKPVVAIAEILYNCSSPFLIESKSLKLYFNSLNNTKFKHKREVEVMIKDDLEQRVQSDVAVTIHELGQYSGWSMSEAFQGVCLDALDIECSTYQVDPSLLSASGDSVEEVLYSDLLKSNCLVTGQPDWGSVQIAYRGQQIHREGLLQYIVSFRNHNEFHEQCIERIFVDVMKRCHPEELTVYGRYTRRGGLDINPLRSSRPVSWPNRNIRLLRQ

SEQ ID NO: 46820 - protein, 416 aa, unidentified
  source 1..416: note = Legionella steelei
  REGION 1..416: note = tr|A0A0W0ZM43|A0A0W0ZM43_9GAMM NADPH-dependent 7-cyano-7-deazaguanine reductase OS=Legionella steelei; OX = 947033 GN=queF PE=3 SV=1
MKYYQIKEISQMTSLTIRSLQYYDEIGLLKPTKRSDSGYRLYCERDLIRLQQITTLKFLGFSLSTIKKIIESPGFDVAASVGIQARELTEKAARINEAASLLTYISSQLEMNQSVNWKSTAKIIEILELNTMNDQVLQKYQAEAEQSELGKKSAYDDTYNPNRLYPIPRAGKRQEIGVDPSKLPFYGFDCWNHYEVSWLNAKGKPMVAIAELFYECNSPNLIESKSLKLYFNSFNNTRIHSVSELENTIKRDLQERVGAEVWVNIHLLDSTNQFAIQPSFAGDLLDDLDIECSIYHVEPSFLFVSEELVEESLYSNLLKSNCLVTNQPDWGSVQIAYKGKKINREGLLKYLVSFRNHNEFHEQCIERIFVDIMNYCQPEQLTVYGRYTRRGGLDINPYRSTEKSSFVGKNLRLVRQ

SEQ ID NO: 46821 - protein, 415 aa, Legionella steigerwaltii
  REGION 1..415: note = tr|A0A378PGP3|A0A378PGP3_9GAMM NADPH-dependent 7-cyano-7-deazaguanine reductase OS=Legionella steigerwaltii OX=460 GN=queF_2 PE=3 SV=1
MNYYQIKEISQMTSLSIRSLQYYDEVGLLKPTKRSDSGYRLYSEADLLILQQIITLKFLGFSLSTIKEIIGNPNFNLAASMSLQARELSEKANKINEAASLLTYIASQLEINQPINWQSSAKIIEILELNTMSDPVLKKYQAASESELGKKSDYDSTYNPNRLYPIPRAGKRQEIGIDPAHPPFVGFDCWNHYEVSWLNEKGKPVVGIGEIFYDCNSPKLIESKSLKLYFNSFNNTKIKSIDELENTIKKDLEARVESPVLVKIYSLEQASQYAASQMLTGECIDHLDVECFVYLVEPSFLSVQDVVVEEQLYSDLLKSNCLVTNQPDWGSVYIAYKGKKIDREGLLKYLVSYRNHNEFHEQCIERIFVDIMNYCKPEVLTVYGRYTRRGGLDINPYRSSKNNTFDRKNIRLIRQ

SEQ ID NO: 46822 - protein, 416 aa, Legionella steigerwaltii
  REGION 1..416: note = tr|A0A378L654|A0A378L654_9GAMM NADPH-dependent 7-cyano-7-deazaguanine reductase OS=Legionella steigerwaltii OX=460 GN=queF_1 PE=3 SV=1
MKYYQIKEISQMTSLTIRSLQYYDEIDLLKPAKRSEGGYRLYSEMDLIRLQQITTLKFLGFSLSTIKKIMENPSFDVMTSIGIQARELTEKAARINEAASLLNYISSQMEMNQPVNWKSTAKIIEILELNTMNDQVLQQYQSEAEKSELGKKSSYDETYNPNRLYPIPRAGKRQEIGVDPTQLPFHGFDCWNHYEVSWLNAKGKPMVAIAELFYECNSPNLIESKSLKLYFNSFNNTRIQSVNELERIIKNDLQERVGAEVWINIHPLNSSNQFELQQSFAGDSLDLLDIECSVYLVEPSFLSVGDEMVEETLYSNLLKSNCLVTNQPDWGSVQITYKGKRINREGLLRYLVSYRNHNEFHEQCIERIFVDIMNYCKPEKLTVYGRYTRRGGLDINPYRSTEKTSFTDKNLRLVRQ

SEQ ID NO: 46823 - protein, 415 aa, Legionella taurinensis
  REGION 1..415: note = tr|A0A3A5L182|A0A3A5L182_9GAMM NADPH-dependent 7-cyano-7-deazaguanine reductase OS=Legionella taurinensis; OX = 70611 GN=queF PE=3 SV=1
MRYYQIKEISRLTSLSVRSLQYYDERGLLKPSKRSDAGYRLYSDADLLRLQQIVTLKYLGFSLNEIKKTLNDPQFDIQKSLVVQARLLAEKARQLKEASALLTYIAAQREAKQAVNWRSTAEIIAILELSSMNPVKEQYNHAADASELGRKSDYDASYNPLRLYPIPRAGKRQEIGIHPEQLPFYGFDCWNHYEVSWLNEKGKPIVAMAEIDYDCRTPMLVESKSLKLYFNSFNNTRFKSLAEVVNTIKNDLEQRVQGEVRVAVHPLGSGMTLPLYEHFNGECIDNLDVECSIYTVEPSFLTVTGEWVEETLYSDLLKSNCLVTNQPDWGSVQISYKGQKINREGLLQYLVSFRNHNEFHEQCIERIFIDIMRQCQPEELTVYGRYTRRGGLDINPYRSTKQPVRQGLNFRLPRQ

SEQ ID NO: 46824 - protein, 416 aa, Legionella tucsonensis
  REGION 1..416: note = tr|A0A0W0ZZN6|A0A0W0ZZN6_9GAMM NADPH-dependent 7-cyano-7-deazaguanine reductase OS=Legionella tucsonensis; OX = 40335 GN=queF PE=3 SV=1
MKYYQIKEISQMTSLTIRSLQYYDEICLLKPTKRSISGYRLYSETDLIRLQQITTLKFLGFSLSMIKKIMENPHFDVMTSIGIQARELTEKAMRINEAASLLTYISTQMEMNQQVNWKSTAKIIEILELNTMNDRVLQKYQSEAEQSELGKKSAYDETYNPDRLYPIPRAGKRQEIGVDPVQLPFYGFDCWNHYEVSWLNAKGKPMVAIAELFYDCSSPNLIESKSLKLYFNSFNNTRIQNVNELENTIKKDLQKCVGAEVWVHIHLLEETIEFAVQKPLIGESLDELDIECSIYLVEPSFLSISDEIVEETLFSNLLKSNCLVTSQPDWGSVQITYEGKKINREGLLKYLISYRNHNEFHEQCIERIFVDIMNYCKPEKLTVYGRYTRRGGLDINPYRSTEKTSFAGKNVRLARQ

SEQ ID NO: 46825 - protein, 211 aa, Legionella wadsworthii
  REGION 1..211: note = tr|A0A378LUC4|A0A378LUC4_9GAMM GTP cyclohydrolase; OS = Legionella wadsworthii OX=28088 GN=queF PE=4 SV=1
MVAIAELLYDCSSPNIIESKSLKLYFNSFNNTRINNVETLKDTITKDLQERVGAEVVVKIYPLDAANQHAVQPSLDGESLDHLDIECSEYLVDPSTLTASDELVEESLFSNLLKSNCLVTNQPDWGSVQIIYKGKKINREGLLKYIISYRNHNEFHEQCIERIFIDIMNYCKPEKLTVYGRYTRRGGLDINPYRSTEKTSFAGKNLRLVRQ

SEQ ID NO: 46826 - protein, 285 aa, Legionella waltersii
  REGION 1..285: note = tr|A0A0W1AN03|A0A0W1AN03_9GAMM NADPH-dependent 7-cyano-7-deazaguanine reductase OS=Legionella waltersii; OX = 66969 GN=queF PE=3 SV=1
MDTSISKNTLEQANDSALGKTVIYDQDYNPSLLFPISRSGKRQEIGIDPQNIPFYGLDYWNHYEVSWLNSKGKPEVAIAEIAYDCSSPNIVESKSLKLYFNSFNNSRFASASEVKAIVQQDLEKAIASAVSVKLLMLDNSSTAHLDKNFKGECIDELDIECSIYTVHPEFLSVGTELVEETLYSNLLKSNCLVTNQPDWGSVQIQYKGNQINREGLLKYLVSFRNHNEFHEQCIERIYVDIMRYCKPVELTVYGRYTRRGGLDINPYRSSKSVGLKGINLRLVRQ

SEQ ID NO: 46827 - protein, 416 aa, Legionella worsleiensis
  REGION 1..416: note = tr|A0A0W1AKB6|A0A0W1AKB6_9GAMM NADPH-dependent 7-cyano-7-deazaguanine reductase OS=Legionella worsleiensis OX=45076 GN=queF PE=3 SV=1
MKYYQIKEISRMTSLTARSLQYYDEIGLLQPAKRSDSGYRLYSETDLLQLQQIITLKFLGFSLSAIKKILDNPSFDVMVSIAIQARELREKALKLNEASSLLTYIASQMDAKQPVNWNSTAKIIEILEVNTMNDQLLKKYQTSASHTELGKQSQYDSSYNPDRLYAIPRAGKRKEIGIDPDQLPFSGFDCWNHYEVSWLNEKGKPMVAIAELFYDCNSPYLIESKSLKLYFNSFNNTKFNSMNDVEKTVAKDLQERVGREVWVAIYPLSHSKNNALLPSFEGECLDDLDITCSVYMVDPNFLSVSDETVEEILYSDLLKSNCLVTNQPDWGSVQIEYKGKKINREGLLKYLISFRNHNEFHEQCIERIFMDIMRLCQPESLTVYGRYTRRGGLDINPYRSTEKSIMDGKNFRLVRQ

SEQ ID NO: 46828 - protein, 280 aa, Legionella worsleiensis
  REGION 1..280: note = tr|A0A0W1AFF9|A0A0W1AFF9_9GAMM NADPH-dependent 7-cyano-7-deazaguanine reductase OS=Legionella worsleiensis OX=45076 GN=queF PE=3 SV=1
MEFELEQNRKLELGKKSDYEAHYNADKLFPIPREGKRLEIGINPEQLPFWGFDAWNHYEVSWLNSKGKPVVAVAEIVYDCHSPNIIESKSLKLYFNTFNNTRFDSIADVEHTIINDLSHSLKSDVHVRINQLGNAHTTGLQNAFNGESIDSLDISCSVYSVDPSFLTVEEEQVEEVLYTDLLKSNCLVTYQPDWGSVQIHYKGPKINKEGLLRYIVSFRNHNEFHEQCIERIFVDIMKQCKPQELTVYGRYTRRGGIDINPYRSTQKPDFNVQNIRLIRQ

SEQ ID NO: 46829 - protein, 280 aa, unidentified
  source 1..280: note = Legionellaceae bacterium
  REGION 1..280: note = tr|A0A2E5YA17|A0A2E5YA17_9GAMM NADPH-dependent 7-cyano-7-deazaguanine reductase OS=Legionellaceae bacterium OX=2026753 GN=queF PE=3 SV=1
MSKIDVSFRENLELGRQSSTDLTYNPARLLPIERTHNRQTIGITTADLPFKGQDYWNHYEVSWLNQKGKPQVGIGEISYDCRSPKLIESKSLKLYFNSLNQTSFDDIATLERIICQDLELCLETPVSVRIHTLENSSNFSSIQNFDGVCLDTLDIACTTYEVEPNFLTTESLYIEESVYSNLLKSNCLVTHQPDWGSVQISYKGRQINHEGLLQYLVSFRNHNEFHEHCIERIFMDILKRCQPEELTVYGRYTRRGGIDINPYRTTKHRADVNNQRFIRQ

SEQ ID NO: 46830 - protein, 277 aa, unidentified
  source 1..277: note = Legionellales bacterium
  REGION 1..277: note = tr|A0A1G0X3Q2|A0A1G0X3Q2_9GAMM NADPH-dependent 7-cyano-7-deazaguanine reductase OS=Legionellales bacterium RIFCSPHIGHO2_12_FULL_37_14 OX=1798568 GN=queF; PE = 3 SV=1
MQTKAEQSELGRSASYDAHYNPERLFAIPRAAKRKEIGINPNLLPFYGFDCWNHYEVSWLNEKGKPMVAVAEIIYDCKTPFLVESKSLKLYFNSFNNTKFSNAEDIRQTVEKDLSLCLLGDVQVRILSLADKPLLEIHAALEGECIDSLDVTCSTYLVDPSYLSVEENKVEEVLCSDLLKSNCLVTNQPDWGSVQISYTGKQINKAGLLQYLVSFRNHNEFHEQCIERIFVDIMQFCKPEKLSVYGRYTRRGGLDINPYRSTEKIAAEGLNYRLVRQ

SEQ ID NO: 46831 - protein, 280 aa, unidentified; identical to SEQ ID NO: 46829
  source 1..280: note = Legionellales bacterium
  REGION 1..280: note = tr|A0A3D0RB26|A0A3D0RB26_9GAMM NADPH-dependent 7-cyano-7-deazaguanine reductase OS=Legionellales bacterium OX=2026754 GN=queF PE=3 SV=1

SEQ ID NO: 46832 - protein, 154 aa, unidentified
  source 1..154: note = Leisingera aquaemixtae
  REGION 1..154: note = tr|A0A0N7M594|A0A0N7M594_9RHOB NADPH-dependent 7-cyano-7-deazaguanine reductase OS=Leisingera aquaemixtae; OX = 1396826 GN=queF PE=3 SV=1
MSDSIYSNLKQLGGDTIVPQSPEEAELERVQNPQADVAYNVRFTAPEFTSLCPMTGQPDFAHLVIDYVPGDWLVESKSLKLFLTSFRNHGAFHEDCTVSIARRLADFLEPQWLRIGGYWYPRGGIPIDVFWQTGPMPEGVWIPDQGVPPYRGRG

SEQ ID NO: 46833 - protein, 154 aa, Leisingera methylohalidivorans
  REGION 1..154: note = tr|V9VS05|V9VS05_9RHOB NADPH-dependent 7-cyano-7-deazaguanine reductase OS=Leisingera methylohalidivorans DSM 14336 OX=999552 GN=queF PE=3 SV=1
MSDSIYSNLKQLGGDTILPASPQEAELERVQNPQADVAYNVRFTAPEFTSLCPMTGQPDFAHLVIDYVPGEWLVESKSLKLFLTSFRNHGAFHEDCTVSIARRLADFLEPQWLRIGGYWYPRGGIPIDVFWQTGPMPEGVWIPDQGVPPYRGRG

SEQ ID NO: 46834 - protein, 154 aa, Leisingera sp.
  REGION 1..154: note = tr|A0A0B4BYW3|A0A0B4BYW3_9RHOB NADPH-dependent 7-cyano-7-deazaguanine reductase OS=Leisingera sp. ANG-Vp; OX = 1577896 GN=queF PE=3 SV=1
MSDSIYSNLKQLGGDTIVPQSPEQAELERVQNPQGDVAYNVRFTAPEFTSLCPMTGQPDFAHLVIDYVPGEWLVESKSLKLFLTSFRNHGAFHEDCTVSIARRLADFLEPQWLRIGGYWYPRGGIPIDVFWQTGPMPEGVWIPDQGVPPYRGRG

SEQ ID NO: 46835 - protein, 154 aa, Leisingera sp.
  REGION 1..154: note = tr|A0A481PL29|A0A481PL29_9RHOB NADPH-dependent 7-cyano-7-deazaguanine reductase OS=Leisingera sp. NJS204; OX = 2508307 GN=queF PE=3 SV=1
MSDSIYSNLKQLGGDTVVPASPEQAELERVQNPQSDTAYNVRFTAPEFTSLCPMTGQPDFAHLVIDYVPGEWLVESKSLKLFLTSFRNHGAFHEDCTVSIARRLADFLQPQWLRIGGYWYPRGGIPIDVFWQTGPMPEGVWIPDQGVPPYRGRG

SEQ ID NO: 46836 - protein, 280 aa, unidentified
  source 1..280: note = Lelliottia amnigena
  REGION 1..280: note = tr|A0A3S5XU04|A0A3S5XU04_LELAM NADPH-dependent 7-cyano-7-deazaguanine reductase OS=Lelliottia amnigena; OX = 61646 GN=queF PE=3 SV=1
MSYENHQALTGLTLGKTTDYRDTYDASLLQGVPRSLNRDPLGLSADALPFVGGDIWTLYELSWLNARGLPQVAVGHVELDYASVNLVESKSFKLYLNSFNQTRFDSWDDVQHTLERDLSACAQGNVTVALYRLNELEGQPIAHFHGACIDDQDIEIDNYEFSTDYLENATGGNVVEETLVSHLLKSNCLITHQPDWGSVQIQYRGPKIDREKLLRYLVSFRHHNEFHEQCVERIFNDIQRFCQPEKLSVYARYTRRGGLDINPWRTNTDFAPAIGRLVRQ

SEQ ID NO: 46837 - protein, 280 aa, unidentified
  source 1..280: note = Lelliottia amnigena
  REGION 1..280: note = tr|A0A1A9FF97|A0A1A9FF97_LELAM NADPH-dependent 7-cyano-7-deazaguanine reductase OS=Lelliottia amnigena; OX = 61646 GN=queF PE=3 SV=1
MTDENHQALTGLTLGKSTDYRDTYDASLLQGVPRSLNRDPLGLRANALPFTGGDIWTLYELSWLNARGLPQVAVGHVELDYASVNLVESKSFKLYLNSFNQTRFDSWEEVQRTMERDLSACAQGKVTVALYRIHELEGQPIAHFHGACIDDQAIEIDSYAFSTAYLENAADGKVVEETLVSHLLKSNCLITHQPDWGSVQIQYRGPKIDREKLLRYLVSFRHHNEFHEQCVERIFNDIQRFCQPETLSVYARYTRRGGLDINPWRTNTDFVPATGRLVRQ

SEQ ID NO: 46838 - protein, 280 aa, unidentified; identical to SEQ ID NO: 45883
  source 1..280: note = Lelliottia nimipressuralis
  REGION 1..280: note = tr|A0A1J5VQF1|A0A1J5VQF1_9ENTR NADPH-dependent 7-cyano-7-deazaguanine reductase OS=Lelliottia nimipressuralis OX=69220 GN=queF PE=3 SV=1

SEQ ID NO: 46839 - protein, 280 aa, unidentified
  source 1..280: note = Lelliottia nimipressuralis
  REGION 1..280: note = tr|A0A2L2JG93|A0A2L2JG93_9ENTR NADPH-dependent 7-cyano-7-deazaguanine reductase OS=Lelliottia nimipressuralis OX=69220 GN=queF PE=3 SV=1
MSYENHQALTGLTLGKSTDYRDTYDASLLQGVPRSLNRDPLGLHADALPFVGGDIWTLYELSWLNARGLPQVAVGHVELDYASVNLVESKSFKLYLNSFNQTKFNSWEDVQHTLERDLSACAQGKVSVSLYRLHELEGQPVAHFNGTCIDDQDIEVENYEFSADYLENAASGKVVEETLVSHLLKSNCLITHQPDWGSVQIQYRGPKIDREKLLRYLVSFRHHNEFHEQCVERIFSDIQRFCQPEKLSVYARYTRRGGLDINPWRTNTDFVPATGRLVRQ

SEQ ID NO: 46840 - protein, 280 aa, unidentified
  source 1..280: note = Lelliottia sp.
  REGION 1..280: note = tr|A0A2S5C9K5|A0A2S5C9K5_9ENTR NADPH-dependent 7-cyano-7-deazaguanine reductase OS=Lelliottia sp. 7254-16; OX = 2080842 GN=queF PE=3 SV=1
MSYENHQALSGLTLGKTTAYRDTYDASLLQGVPRSLNRDPLGLKVDTLPFVGGDIWTLYELSWLNARGLPQVAVGHVELDYASLNLVESKSFKLYLNSFNQTQFDSWEDVQRTLERDLSACAQGKVTVALYRLNELEGQPVAHFHGTCIDDQDITIESYEFSTDYLHNAAGEKVVEETLVSHLLKSNCLITHQPDWGSVQIQYRGPKIDREKLLRYLVSFRHHNEFHEQCVERIFNDIQRFCHPEKLSVYARYTRRGGLDINPWRTNTDFVPATGRLVRQ

SEQ ID NO: 46841 - protein, 284 aa, Leminorella grimontii
  REGION 1..284: note = tr|A0A085HMV0|A0A085HMV0_9GAMM NADPH-dependent 7-cyano-7-deazaguanine reductase OS=Leminorella grimontii ATCC 33999 = DSM 5078 OX=1005999 GN=queF PE=3 SV=1
MSHNYENHQALSGLTLGKETGYVDRYDAALLQPVPRSLNREPLGLLPENLPFTGADIWTLYELSWLNASGVPQVAVGEVRIDANSLNLIESKSFKLYLNSFNQTHFDSWKDVEHTLRRDLSLCAQGDVDIRLFKLAELENAPIGAFAGECIDEQDIVIDSYDFNDRLLENAAARGAPLVEETLVSHLLKSNCLITHQPDWGSLQISYRGPKIDREALLRYVVSFRHHNEFHEQCVERIFHDIQRYCRPEALTVYARYTRRGGLDINPYRTNRPFTPSVQRLARQ

SEQ ID NO: 46842 - protein, 284 aa, Leminorella grimontii; identical to SEQ ID NO: 46841
  REGION 1..284: note = tr|A0A485A8C4|A0A485A8C4_9GAMM NADPH-dependent 7-cyano-7-deazaguanine reductase OS=Leminorella grimontii; OX = 82981 GN=queF PE=3 SV=1

SEQ ID NO: 46843 - protein, 285 aa, Leminorella richardii
  REGION 1..285: note = tr|A0A2X4UAW5|A0A2X4UAW5_9GAMM NADPH-dependent 7-cyano-7-deazaguanine reductase OS=Leminorella richardii; OX = 158841 GN=queF PE=3 SV=1
MTHHYQDNQALSELTLGKETRYIDRYDAALLQPVPRSLNREPLGLKQGSLPFTGADIWTLYELSWLNAGGVPQVAVGEVRVNADSQNLIESKSFKLYLNSFNQTRFDSWRDIEYTLRRDLSGCAQGDVDVRLFTLSELENTPVGTLSGECIDGQDITINDYDFNERLLENAVKPGSTETVEETLVSHVLKSNCLITHQPDWGSLQIHYCGPKIDREALLRYIVSFRHHNEFHEQCVERIFHDIQRYCHPKALTVYARYTRRGGLDINPYRTNQPFTPSTLRLARQ

SEQ ID NO: 46844 - protein, 164 aa, unidentified
  source 1..164: note = Lentibacillus amyloliquefaciens
  REGION 1..164: note = tr|A0A0U4FR93|A0A0U4FR93_9BACI NADPH-dependent 7-cyano-7-deazaguanine reductase OS=Lentibacillus amyloliquefaciens OX=1472767 GN=queF PE=3 SV=1
MTERRDDLQDLTQLGNQGTSYQFNYTPDVLEAIDNLHPDRDYFVKFNCPEFTTLCPQTGQPDFATVYISYIPDQKIVESKSLKLYLFSFRNHGDFHEDCINIIMNDLIDLLDPRYIEVWGKFTPRGGISIDPYCNYGKPGTKYEQMADHRLMNHDLYPEKVDNR

SEQ ID NO: 46845 - protein, 162 aa, Lentibacillus halodurans
  REGION 1..162: note = tr|A0A1I0YFE1|A0A1I0YFE1_9BACI NADPH-dependent 7-cyano-7-deazaguanine reductase OS=Lentibacillus halodurans OX=237679 GN=queF PE=3 SV=1
MEGRRDEDLQDLSQLGSQGTAYQFDYTPDVLETFDNKHPDRDYFVKFNCPEFTTLCPKTGQPDFGIVYISYIPERKMVESKSLKLYLFSFRNHGDFHEDSMNIIMNDLIDLMDPRYIEVWGKFTPRGGISIDPYCNYGKPDTRFEEMAAHRLMNHDLYPAYN

SEQ ID NO: 46846 - protein, 165 aa, Lentibacillus persicus
  REGION 1..165: note = tr|A0A1I1YM74|A0A1I1YM74_9BACI NADPH-dependent 7-cyano-7-deazaguanine reductase OS=Lentibacillus persicus; OX = 640948 GN=queF PE=3 SV=1
MKNRHDPNLQNLSQLGSQGTAYQFDYTPDVLETFENQHPERDYFVKFNCPEFTTLCPKTGQPDFGTVYISYIPDEKMVESKSLKLYLFSFRNHGDFHEDSMNIIMNDLIELMEPRYIEVWGKFTPRGGISIDPYCNYGKPGTKYEKMADHRLINHDLYPEKVDNR

SEQ ID NO: 46847 - protein, 165 aa, Lentibacillus sp.
  REGION 1..165: note = tr|A0A4V1UYG3|A0A4V1UYG3_9BACI NADPH-dependent 7-cyano-7-deazaguanine reductase OS=Lentibacillus sp. SSKP1-9 OX=2510307 GN=queF PE=3 SV=1
MTGRHEENLEDLSLLGNQGTVYQFDYTPEVLETFENKHPDRDYFVKFNCPEFTTLCPKTNQPDFGTVYISYIPDANMVESKSLKLYLFSFRNHGDFHEDCMNIIMNDLIDLMDPRYIEVWGKFTPRGGISIDPFCNYGKPGTRFEEMAAHRLMNHDLYPEKVDNR

SEQ ID NO: 46848 - protein, 139 aa, Lentisphaera araneosa
  REGION 1..139: note = tr|A6DL68|A6DL68_9BACT NADPH-dependent 7-cyano-7-deazaguanine reductase OS=Lentisphaera araneosa HTCC2155 OX=313628 GN=queF PE=3 SV=1
MSEKERLNDLTLLSKNENNYFTSPDDAPLEVFDNLYVGRDYKITFNCPEFTALCPVTSQPDFGKITITYIADKKCVESKSLKMYLFAFRNHNSFHEEVVNRILEDIVAVCDPREITVYGEFMPRGGISLDIEASHKKES

SEQ ID NO: 46849 - protein, 278 aa, unidentified
  source 1..278: note = Lentisphaerae bacterium
  REGION 1..278: note = tr|A0A1G0WEM6|A0A1G0WEM6_9BACT NADPH-dependent 7-cyano-7-deazaguanine reductase QueF OS=Lentisphaerae bacterium GWF2_38_69 OX=1798570 GN=A2X47_06610 PE=4 SV=1
MSQTINNSLLGKSSDYSLRYEPGILFPVPRLESRKDLNCNLNPLPFTGYDIWSAYELSYLNIKGKPQCFLGFIIFPYNTENIIESKSLKLYLNSLSEKKFKNNKEFANLITKDLSNVSKGNVIIKIFTENDFISANIAKFEGTCLDVADIEFSDYKINKKLVCLENDNLTNETLYTNLFKSNCPVTGQPDWASVQVSYFGKTISRENLLRYLVSYRTHSAFHENCVENIFCDIMESCNPEKLTVYARFTRRGGLDINPIRTNDSERTLPCIKTRLFRQ

SEQ ID NO: 46850 - protein, 181 aa, unidentified
  source 1..181: note = Lentisphaerae bacterium
  REGION 1..181: note = tr|A0A1V5UZR3|A0A1V5UZR3_9BACT NADPH-dependent 7-cyano-7-deazaguanine reductase OS=Lentisphaerae bacterium ADurb.Bin242 OX=1852900 GN=queF PE=3 SV=1
MVKYFSRICFANLHYNVILWEKYGMPNGKGIPMTQKKKSPASAEPHASLTLLNRSHTEYPDSPGKARIETFSNAYPERNYVITFDCPEFTSLCPVTNQPDFGHIVIRYVADRLCLESKALKLYLFSFRNHHSFHEEAVNRILTDLRKACSPRWMEVTGDFMPRGGIAIHVCAEEGDSSLKK

SEQ ID NO: 46851 - protein, 144 aa, unidentified
  source 1..144: note = Lentisphaerales bacterium
  REGION 1..144: note = tr|A0A524MQL7|A0A524MQL7_9BACT NADPH-dependent 7-cyano-7-deazaguanine reductase OS=Lentisphaerales bacterium OX=2448604 GN=queF PE=3 SV=1
MAKRKRQTSGRLSLLGKSVTPVPASPQEATLEAFENKSRQRDYIVRFDCPEFTSLCPITGQPDFGSITIEYVPARLCLESKSLKLYLFAYRNEGIFHEEVVNRILRDVVKAIKPRSARIEGTFRPRGGISITVRAAYPTAEGLN

SEQ ID NO: 46852 - protein, 145 aa, unidentified
  source 1..145: note = Lentisphaeria bacterium
  REGION 1..145: note = tr|A0A352N230|A0A352N230_9BACT NADPH-dependent 7-cyano-7-deazaguanine reductase OS=Lentisphaeria bacterium OX=2053569 GN=queF PE=3 SV=1
MKKLDSRRFARLTQLKASRTSFPGNPQNANVEVFENLFPERNYEIEFVCPEFTSLCPVTGQPDFGEISVKYIPDRLCVESKSLKLFLFSFRNFNTFHEEAVNIIADRINEACSPRWLQVSGRFHPRGGISINVKVEKTRKGFRHK

SEQ ID NO: 46853 - protein, 147 aa, unidentified
  source 1..147: note = Lentisphaeria bacterium
  REGION 1..147: note = tr|A0A3D1UW59|A0A3D1UW59_9BACT NADPH-dependent 7-cyano-7-deazaguanine reductase OS=Lentisphaeria bacterium OX=2053569 GN=queF PE=3 SV=1
MQTSAGKKALPHSSLTLLNRNHTEYPDSPDKAKIETFDNAYPQRNYVITFDCPEYSSLCPVTNQPDYGHITVRYIADKKCIESKALKLYLFSFRNFNTFHEESVNRILTDLVKACRPRWMEVTGDFMPRGGIAIHVRAEEGDSSLVK

SEQ ID NO: 46854 - protein, 143 aa, unidentified
  source 1..143: note = Leptolyngbya antarctica
  REGION 1..143: note = tr|A0A2W4WKU9|A0A2W4WKU9_9CYAN NADPH-dependent 7-cyano-7-deazaguanine reductase OS=Leptolyngbya antarctica OX=268115 GN=queF PE=3 SV=1
MTIAPAPTSQYGDRAIHQAAIEPLEKWPNPSENVYTIHLEHPEFTALCPRSGYPDFGTIVVDYCPGPWVVELKAFKLYINSFRDQRVSHEAVANAIADRLWEELQPRGLRVIGDYTRRGGVKTVIAVKKGSCNEFEPYTANAL

SEQ ID NO: 46855 - protein, 131 aa, unidentified
  source 1..131: note = Leptolyngbya boryana
  REGION 1..131: note = tr|A0A1Z4JI44|A0A1Z4JI44_LEPBY NADPH-dependent 7-cyano-7-deazaguanine reductase OS=Leptolyngbya boryana NIES-2135 OX=1973484 GN=queF PE=3 SV=1
MTQAQDHPEVKYGERLIEEGSLITFPNPRPGRRYTINITLPEFTCKCPFSGYPDFATIYVSYVPDQRVVELKAIKLYINSYRDRYISHEEAANQILDDIVAACDPLEISIKADYTPRGNVHTVVEVTHTKV

SEQ ID NO: 46856 - protein, 131 aa, unidentified; identical to SEQ ID NO: 46855
  source 1..131: note = Leptolyngbya boryana
  REGION 1..131: note = tr|A0A024F9G5|A0A024F9G5_LEPBY NADPH-dependent 7-cyano-7-deazaguanine reductase OS=Leptolyngbya boryana; OX = 1184 GN=orf131 PE=3 SV=1

SEQ ID NO: 46857 - protein, 135 aa, unidentified
  source 1..135: note = Leptolyngbya foveolarum
  REGION 1..135: note = tr|A0A2W4U7X5|A0A2W4U7X5_9CYAN NADPH-dependent 7-cyano-7-deazaguanine reductase OS=Leptolyngbya foveolarum OX=47253 GN=queF PE=3 SV=1
MTTQDISKTASDDPTLYGERAIEAGSLITFPNPRPGREYTIDITLPEFTCKCPFSGYPDFATIHIHYVPDEKVVELKAIKLYINSYRDRHISHEESINLIMDDFVAACDPRSVTIKGDFLPRGNVHTVIEVAHQK

SEQ ID NO: 46858 - protein, 145 aa, unidentified
  source 1..145: note = Leptolyngbya frigida
  REGION 1..145: note = tr|A0A2T1DZQ4|A0A2T1DZQ4_9CYAN NADPH-dependent 7-cyano-7-deazaguanine reductase OS=Leptolyngbya frigida ULC18 OX=2107698 GN=queF PE=3 SV=1
MIHPETQPFSTAEFETQAQTSEPKYGERHIAQGELITFPNPRIGRRYDIHITLPEFTCKCPFSGYPDFATIYLSYVPNQRVVELKAIKLYINSYRDRYISHEESVNQILDDFVAACDPLEVKIKGDFLPRGNVHTVIEVTHQKDA

SEQ ID NO: 46859 - protein, 139 aa, Leptolyngbya sp.
  REGION 1..139: note = tr|K9F2S6|K9F2S6_9CYAN NADPH-dependent 7-cyano-7-deazaguanine reductase OS=Leptolyngbya sp. PCC 7375 OX=102129 GN=queF PE=3 SV=1
MTDTTFPKATPTEKIKYGERAIEENHLITFPNPRPGRQYDVNITLPEFTCKCPFSGYPDFATIYITYTPNEKVVELKAIKLYINGYRDRYISHEESINQIMDDFIAAADPLKFKIKGDFQPRGNVHTTVEIAYEKPTTV

SEQ ID NO: 46860 - protein, 143 aa, Leptolyngbya sp.
  REGION 1..143: note = tr|A0A2W7A2F5|A0A2W7A2F5_9CYAN NADPH-dependent 7-cyano-7-deazaguanine reductase OS=Leptolyngbya sp.; OX = 47254 GN=queF PE=3 SV=1
MTIAPAPTSQYGDRAIHQAAIEPLEKWPNPSENVYTIHLEHPEFTALCPRSGYPDFGTIVVDYCPGPWVVELKAFKLYINSFRDQRVSHETVANAIADRLWEELQPRGLRVIGDYTRRGGVKTVIAVKKGNCNEFEPYTANAL

SEQ ID NO: 46861 - protein, 125 aa, unidentified
  source 1..125: note = Leptolyngbya valderiana
  REGION 1..125: note = tr|A0A166TII6|A0A166TII6_9CYAN NADPH-dependent 7-cyano-7-deazaguanine reductase OS=Leptolyngbya valderiana BDU 20041 OX=322866 GN=queF PE=3 SV=1
MPDPSLLEAFPTPVDTPFTVEHVAEEFTSLCPKTGHPDFGEVVVVFQPAAGSSGGLCVELKSLKVYLQSFRNEGIFYEAVTNRIRDDLCELMQPTWLRVTTHWRGRGGIRSVIKADHGTVPPNVA

SEQ ID NO: 46862 - protein, 147 aa, unidentified
  source 1..147: note = Leptolyngbya valderiana
  REGION 1..147: note = tr|A0A166TKT5|A0A166TKT5_9CYAN NADPH-dependent 7-cyano-7-deazaguanine reductase OS=Leptolyngbya valderiana BDU 20041 OX=322866 GN=queF PE=3 SV=1
MSDLHSVSNSISENETAETATEVKYGEREIQEGKLITFPNPRVGRRYEIQITLPEFTCKCPFSGYPDFATIEITYVPDERVVELKAIKLYINSYRDRYISHEESANQILDDFVAACDPLEVRLKADFSPRGNVHTVIEVQHVKGDSL

SEQ ID NO: 46863 - protein, 133 aa, Leptonema illini
  REGION 1..133: note = tr|H2CH62|H2CH62_9LEPT NADPH-dependent 7-cyano-7-deazaguanine reductase OS=Leptonema illini DSM 21528 OX=929563 GN=queF PE=3 SV=1
MDLHLSETYDGKQDHIRDLVLPDIEVFQNIYSDRDYRIELEFPEFTAICPKTGLPDFGVVYLSYVPDQHCLELKSLKEYFFAYRNIGIFHENVVNRICEDVAHACKPRELDVRAVYNVRGGITTTVSTSYKAK

SEQ ID NO: 46864 - protein, 133 aa, unidentified
  source 1..133: note = Leptospira adleri
  REGION 1..133: note = tr|A0A2M9YU95|A0A2M9YU95_9LEPT NADPH-dependent 7-cyano-7-deazaguanine reductase OS=Leptospira adleri; OX = 2023186 GN=queF PE=3 SV=1
METINPETYDGRQDHIPALKTPEIESFTNVYEGKDYTIDFTVPEFTAVCPKTGLPDFGIIEISYVPTNRCIELKSFKEYILSYRNVGIFHEFVVNKILDDLVKAIDPKYLKVIGDYNPRGGIKTIVTREYKRA

SEQ ID NO: 46865 - protein, 133 aa, Leptospira alexanderi
  REGION 1..133: note = tr|V6HZ34|V6HZ34_9LEPT NADPH-dependent 7-cyano-7-deazaguanine reductase OS=Leptospira alexanderi serovar Manhao 3 str. L 60 OX=1049759 GN=queF PE=3 SV=1
METNHPETYDGRQDHIPSLKTPEIESFTNVYEGKDYTIDFTVPEFTAVCPKTGLPDFGVIFISYIPTGRCIELKSFKEYILSYRNVGIFHEFLVNKIMEDLIAAIDPKYLKVIGDYNPRGGIKTVVTREYSKT

SEQ ID NO: 46866 - protein, 183 aa, unidentified
  source 1..183: note = Leptospira alstonii
  REGION 1..183: note = tr|M6D4L6|M6D4L6_9LEPT NADPH-dependent 7-cyano-7-deazaguanine reductase OS=Leptospira alstonii serovar Sichuan str. 79601 OX=1218565 GN=queF PE=3 SV=1
MSVLPTEINYGNFLLDIHSTLLEDFDTNSRSGKRIFVVEKSKSLVIKELSMETNHPETYDGRQDHIPALKTPEIESFTNVYEGKDYTIDFTVPEFTAVCPKTGLPDFGVIFISYIPTSRCIELKSFKEYILSYRNVGIFHEFLVNKILEDLIAAIDPKYLKVIGDYNARGGIKTIVTREYTKA

SEQ ID NO: 46867 - protein, 180 aa, unidentified
  source 1..180: note = Leptospira alstonii
  REGION 1..180: note = tr|T0FPZ9|T0FPZ9_9LEPT NADPH-dependent 7-cyano-7-deazaguanine reductase OS=Leptospira alstonii serovar Pingchang str. 80-412 OX=1218564 GN=queF PE=3 SV=1
MPTEINYGNFLLDIHSTLLEDFDTNSRSGKRIFVVEKSKSLVIKELSMETNHPETYDGRQDHIPALKTPEIESFTNVYEGKDYTIDFTVPEFTAVCPKTGLPDFGVIFISYIPTSRCIELKSFKEYILSYRNVGIFHEFLVNKILEDLIAAIDPKYLKVIGDYNARGGIKTIVTREYTKA

SEQ ID NO: 46868 - protein, 137 aa, unidentified
  source 1..137: note = Leptospira andrefontaineae
  REGION 1..137: note = tr|A0A4R9H2I7|A0A4R9H2I7_9LEPT NADPH-dependent 7-cyano-7-deazaguanine reductase OS=Leptospira andrefontaineae OX=2484976 GN=queF PE=3 SV=1
MSHQQESIGISAYEGRQDHIPSLKLPEIESFANVYEGKDYTIDFTIPEFTAVCPKTGLPDFGVIEISYIPKAKCIELKSLKEYILAYRNLGIFHENVVNHILEDLIQSVDPKYIKVKGDYNLRGGIKTIVTREYTSK

SEQ ID NO: 46869 - protein, 133 aa, unidentified
  source 1..133: note = Leptospira bandrabouensis
  REGION 1..133: note = tr|A0A4Z1ARK7|A0A4Z1ARK7_9LEPT NADPH-dependent 7-cyano-7-deazaguanine reductase OS=Leptospira bandrabouensis OX=2484903 GN=queF PE=3 SV=1
MSEKKSESSYEDKQDHIPSWKTPEIEWFANVYAGKEYNIEFTIPEFTAVCPKTGLPDFGTIYIDYIPRDKCVELKSLKEYMMSYRNIGIFHENVVNKILEDFVSAVDPMYVKVVGDYNVRGGVKTIVKREYKA

SEQ ID NO: 46870 - protein, 133 aa, unidentified
  source 1..133: note = Leptospira barantonii
  REGION 1..133: note = tr|A0A5F2BV78|A0A5F2BV78_9LEPT NADPH-dependent 7-cyano-7-deazaguanine reductase OS=Leptospira barantonii; OX = 2023184 GN=queF PE=3 SV=1
METNHPETYDGRQDHIPSLKTPEIESFTNVYGGKDYTIDFTVPEFTAVCPKTGLPDFGVIYVSYIPTQRCIELKSFKEYILSYRNVGIFHEFLVNKIMEDLISSIDPKYLKVIGDYNARGGIKTVVTREYKKA

SEQ ID NO: 46871 - protein, 133 aa, unidentified
  source 1..133: note = Leptospira barantonii
  REGION 1..133: note = tr|A0A2M9YX84|A0A2M9YX84_9LEPT NADPH-dependent 7-cyano-7-deazaguanine reductase OS=Leptospira barantonii; OX = 2023184 GN=queF PE=3 SV=1
METNHPETYDGRQDHIPSLKTPEIESFTNVYEGKDYTIDFTVPEFTAVCPKTGLPDFGVIYVSYIPTQRCIELKSFKEYILSYRNVGIFHEFLVNKIMEDLISSIDPKYLKVIGDYNARGGIKTVVSREYKKA

SEQ ID NO: 46872 - protein, 133 aa, Leptospira biflexa
  REGION 1..133: note = tr|B0SR20|B0SR20_LEPBP NADPH-dependent 7-cyano-7-deazaguanine reductase OS=Leptospira biflexa serovar Patoc (strain Patoc 1 / ATCC 23582 / Paris); OX = 456481 GN=queF P E=3 SV=1
MSEKKSESSYEDKQDHIPAWTTPAIEWFANVYAGKEYNIEFTIPEFTAVCPKTGLPDFGTIYIEYIPREKCAELKSLKEYMMAYRNVGIFHENVVNKILEDFVKAIDPLYAKVIGDYNVRGGVKTVVKREYKA

SEQ ID NO: 46873 - protein, 133 aa, Leptospira biflexa; identical to SEQ ID NO: 46872
  REGION 1..133: note = tr|A0A5F2CB66|A0A5F2CB66_LEPBI NADPH-dependent 7-cyano-7-deazaguanine reductase OS=Leptospira biflexa; OX = 172 GN=queF PE=3 SV=1

SEQ ID NO: 46874 - protein, 133 aa, Leptospira borgpetersenii
  REGION 1..133: note = tr|A0A0E3BNB3|A0A0E3BNB3_LEPBO NADPH-dependent 7-cyano-7-deazaguanine reductase OS=Leptospira borgpetersenii serovar Ballum OX=280505 GN=queF PE=3 SV=1
MKTNHPESYDGRQDHIPSLKTPEIESFTNVYEGKDYTIDFTVPEFTAVCPKTGLPDFGVIYVSYIPTKRCIELKSFKEYILSYRNVGVFHEFLVNKIMEDLIAAIDPKYLKVIGDYNARGGIKTVVTREYNKI

SEQ ID NO: 46875 - protein, 133 aa, Leptospira borgpetersenii
  REGION 1..133: note = tr|M6WAD2|M6WAD2_LEPBO NADPH-dependent 7-cyano-7-deazaguanine reductase OS=Leptospira borgpetersenii serovar Pomona str. 200901868 OX=1192866; GN = queF PE=3 SV=1
MKTNHPETYDGRQDHIPSLKTPEIESFTNVYEGKDYTIDFTVPEFTAVCPKTGLPDFGVIYVSYVPTKRCIELKSFKEYILSYRNVGVFHEFLVNKIMEDLIAAIDPKYLKVIGDYNARGGIKTVVTREYNKI

SEQ ID NO: 46876 - protein, 133 aa, unidentified
  source 1..133: note = Leptospira bourretii
  REGION 1..133: note = tr|A0A4R9IM36|A0A4R9IM36_9LEPT NADPH-dependent 7-cyano-7-deazaguanine reductase OS=Leptospira bourretii; OX = 2484962 GN=queF PE=3 SV=1
MSEKKSESSYEDKQDHIPSWKTPEIEWFANVYAGKEYNIEFTIPEFTAVCPKTGLPDFGTIYIDYIPRDKCVELKSLKEYMMSYRNIGIFHENVVNKILEDFVLAVNPIYVKVVGDYNVRGGVKTIVKREYKA

SEQ ID NO: 46877 - protein, 133 aa, unidentified
  source 1..133: note = Leptospira bouyouniensis
  REGION 1..133: note = tr|A0A4R9HJA5|A0A4R9HJA5_9LEPT NADPH-dependent 7-cyano-7-deazaguanine reductase OS=Leptospira bouyouniensis OX=2484911 GN=queF PE=3 SV=1
MSEKKSESSYEDKQDHIPSWSTPPIDWFANVYAGKEYNIEFTIPEFTAVCPKTGLPDFGTIYIEYIPRDKCVELKSLKEYMMAYRNVGIFHENVVNKILEDFVGAVDPMYVKVIGDYNVRGGVKTVVKREYKA

SEQ ID NO: 46878 - protein, 133 aa, unidentified
  source 1..133: note = Leptospira brenneri
  REGION 1..133: note = tr|A0A5F1Z3Z0|A0A5F1Z3Z0_9LEPT NADPH-dependent 7-cyano-7-deazaguanine reductase OS=Leptospira brenneri; OX = 2023182 GN=queF PE=3 SV=1
MSEKKSESSYEDKQDHIPSWKTPEIEWFANVYAGKEYNIEFTIPEFTAVCPKTGLPDFGSIFIEYIPRERCVELKSLKEYMMAYRNVGIFHENVVNKILEDFVAAVDPIYVKVVGDYNVRGGVKTIVKREYKA

SEQ ID NO: 46879 - protein, 133 aa, unidentified
  source 1..133: note = Leptospira brenneri
  REGION 1..133: note = tr|A0A2M9Y2B4|A0A2M9Y2B4_9LEPT NADPH-dependent 7-cyano-7-deazaguanine reductase OS=Leptospira brenneri; OX = 2023182 GN=queF PE=3 SV=1
MSEKKSESSYEDKQDHIPSWKTPEIEWFANVYAGKEYNIEFTIPEFTAVCPKTGLPDFGSIFIEYIPRERCVELKSLKEYMMAYRNVGIFHENVVNKILEDFVSAVDPIYVKVVGDYNVRGGVKTIVKREYKA

SEQ ID NO: 46880 - protein, 139 aa, Leptospira broomii
  REGION 1..139: note = tr|T0G9T4|T0G9T4_9LEPT NADPH-dependent 7-cyano-7-deazaguanine reductase OS=Leptospira broomii serovar Hurstbridge str. 5399 OX=1049789 GN=queF PE=3 SV=1
MDDRQQETGASSYDGRQDHIPTLKLPEIESFANVYEGKDYTIDFTIPEFTAVCPKTGLPDFGTIEISYVPRDRCIELKSLKEYILAFRNLGIFHENVVNRILEDLVKSVEPKFVRVKGDYNLRGGIKTVVTREYRLEGN

SEQ ID NO: 46881 - protein, 133 aa, unidentified
  source 1..133: note = Leptospira congkakensis
  REGION 1..133: note = tr|A0A4Z1AHN0|A0A4Z1AHN0_9LEPT NADPH-dependent 7-cyano-7-deazaguanine reductase OS=Leptospira congkakensis OX=2484932 GN=queF PE=3 SV=1
MSEKKSESSYEDKQDHIPSWKTPEIEWFANVYAGKEYNIEFTIPEFTAVCPKTGLPDFGSIFIEYIPRERCVELKSLKEYMMSYRNVGIFHENVVNKILEDFVQAVDPLYVKVVGDYNVRGGVKTIVKREFKA

SEQ ID NO: 46882 - protein, 133 aa, unidentified
  source 1..133: note = Leptospira dzianensis
  REGION 1..133: note = tr|A0A5F2BTB2|A0A5F2BTB2_9LEPT NADPH-dependent 7-cyano-7-deazaguanine reductase OS=Leptospira dzianensis; OX = 2484905 GN=queF PE=3 SV=1
METTHPETYDGRQDHIPGLKTPEIESFTNVYEGKDYTIDFTVPEFTAVCPKTGLPDFGVIYVSYIPTKRCIELKSFKEYILSYRNVGIFHEFLVNKIMEDLIQAVEPKYLKVIGDYNARGGIKTIVTREYSKD

SEQ ID NO: 46883 - protein, 133 aa, unidentified
  source 1..133: note = Leptospira dzianensis
  REGION 1..133: note = tr|A0A5F2E3P1|A0A5F2E3P1_9LEPT NADPH-dependent 7-cyano-7-deazaguanine reductase OS=Leptospira dzianensis; OX = 2484905 GN=queF PE=3 SV=1
METTHPETYDGRQDHIPGLKTPEIESFTNVYEGKDYTIDFTVPEFTAVCPKTGLPDFGVIYVSYIPTKRCIELKSFKEYILSYRNVGIFHEFLVNKIMEDLIQAVEPKYLKVIGDYNARGGIKTVVTREYSKA

SEQ ID NO: 46884 - protein, 137 aa, unidentified
  source 1..137: note = Leptospira dzoumogneensis
  REGION 1..137: note = tr|A0A4Z1ABT1|A0A4Z1ABT1_9LEPT NADPH-dependent 7-cyano-7-deazaguanine reductase OS=Leptospira dzoumogneensis OX=2484904 GN=queF PE=3 SV=1
MSNQQESIGISAYEGRQDHIPSLKLPEIESFANVYEGKDYTIDFTIPEFTAVCPKTGLPDFGVIEISYIPKAKCIELKSLKEYILAYRNLGIFHENVVNHILEDLVQSVDPKYIKVKGDYNLRGGIKTIVTREYTSK

SEQ ID NO: 46885 - protein, 133 aa, unidentified
  source 1..133: note = Leptospira ellinghausenii
  REGION 1..133: note = tr|A0A2P2DB71|A0A2P2DB71_9LEPT NADPH-dependent 7-cyano-7-deazaguanine reductase OS=Leptospira ellinghausenii OX=1917822 GN=queF PE=3 SV=1
MSEKKSESSYEDKQDHIPSWTTPPIEWFANVYVGREYNIEFTIPEFTAVCPKTGLPDFGTIFIEYIPREKCAELKSLKEYMMSYRNVGIFHENVVNKILEDFVKAVDPIYVKVIGDYNVRGGVKTVVKREYKA

SEQ ID NO: 46886 - protein, 133 aa, unidentified
  source 1..133: note = Leptospira elllisii
  REGION 1..133: note = tr|A0A2N0BGJ5|A0A2N0BGJ5_9LEPT NADPH-dependent 7-cyano-7-deazaguanine reductase OS=Leptospira elllisii; OX = 2023197 GN=queF PE=3 SV=1
METTNPETYDGRQDHIPALKTPEIESFTNVYGGKDYTIDFTVPEFTAVCPKTGLPDFGTIYVSYVPTDRCVELKSFKEYILSYRNVGIFHEFVVNKILDDLVQAIDPKYLKVIGDYNARGGIKTIVTREYVKA

SEQ ID NO: 46887 - protein, 139 aa, Leptospira fainei; identical to SEQ ID NO: 46880
  REGION 1..139: note = tr|S3V1F0|S3V1F0_9LEPT NADPH-dependent 7-cyano-7-deazaguanine reductase OS=Leptospira fainei serovar Hurstbridge str. BUT 6 OX=1193011 GN=queF PE=3 SV=1

SEQ ID NO: 46888 - protein, 139 aa, unidentified
  source 1..139: note = Leptospira fletcheri
  REGION 1..139: note = tr|A0A4R9GLC2|A0A4R9GLC2_9LEPT NADPH-dependent 7-cyano-7-deazaguanine reductase OS=Leptospira fletcheri; OX = 2484981 GN=queF PE=3 SV=1
MDDRQQETGASSYEGRQEHIPTLKLPDIESFANVYEGKDYTIDFTIPEFTAVCPKTGLPDFGTIEISYIPSDKCVELKSLKEYILAYRNLGIFHENVVNRILEDFVKSVRPKYVKVRGDYNLRGGIKTVVTREFRSEAG

SEQ ID NO: 46889 - protein, 139 aa, unidentified
  source 1..139: note = Leptospira fluminis
  REGION 1..139: note = tr|A0A4R9GKD5|A0A4R9GKD5_9LEPT NADPH-dependent 7-cyano-7-deazaguanine reductase OS=Leptospira fluminis; OX = 2484979 GN=queF PE=3 SV=1
MDDRQQETGASSYEGRQEHIPTLKLPDIESFANVYEGKDYTIDFTIPEFTAVCPKTGLPDFGTIEISYVPSDRCVELKSLKEYILAYRNLGIFHENVVNRILEDLIKSVRPKYARVRGDYNLRGGIKTVVTREFRSEAD

SEQ ID NO: 46890 - protein, 133 aa, unidentified
  source 1..133: note = Leptospira gomenensis
  REGION 1..133: note = tr|A0A5F1YCR2|A0A5F1YCR2_9LEPT NADPH-dependent 7-cyano-7-deazaguanine reductase OS=Leptospira gomenensis; OX = 2484974 GN=queF PE=3 SV=1
METNNPETYDGRQDHIPALKTPEIESFTNVYGGRDYTIDFTVPEFTAVCPKTGLPDFGTIYVSYVPTDRCVELKSFKEYILSYRNVGIFHEFVVNKILDDLVKAIDPKSLKVIGDYNARGGIKTIVTREYKKA

SEQ ID NO: 46891 - protein, 137 aa, unidentified
  source 1..137: note = Leptospira haakeii
  REGION 1..137: note = tr|A0A2N0BXB5|A0A2N0BXB5_9LEPT NADPH-dependent 7-cyano-7-deazaguanine reductase OS=Leptospira haakeii; OX = 2023198 GN=queF PE=3 SV=1
MSHQQESIGISAYEGRQDHIPSLKLPEIESFANVYEGKDYTIDFTIPEFTAVCPKTGLPDFGVIEISYIPKAKCIELKSLKEYILAYRNLGIFHENVVNRILEDLIQSVDPKYIKVKGDYNLRGGIKTVVSREYTSK

SEQ ID NO: 46892 - protein, 133 aa, unidentified
  source 1..133: note = Leptospira harrisiae
  REGION 1..133: note = tr|A0A2N0ANN5|A0A2N0ANN5_9LEPT NADPH-dependent 7-cyano-7-deazaguanine reductase OS=Leptospira harrisiae; OX = 2023189 GN=queF PE=3 SV=1
MSEKKSESSYEDKQDHIQSWKTPEIEWFANVYAGKEYNIEFTIPEFTAVCPKTGLPDFGTIYIDYIPRDRCVELKSLKEYMMSFRNIGIFHENVVNKILEDFVLAVDPLYVKVVGDYNVRGGVKTVVKREYKA

SEQ ID NO: 46893 - protein, 137 aa, unidentified
  source 1..137: note = Leptospira hartskeerlii
  REGION 1..137: note = tr|A0A2M9XF13|A0A2M9XF13_9LEPT NADPH-dependent 7-cyano-7-deazaguanine reductase OS=Leptospira hartskeerlii OX=2023177 GN=queF PE=3 SV=1
MSQQQESIGISAYEGRQDHIPSLKLPEIESFANVYEGKDYTIDFTIPEFTAVCPKTGLPDFGIIEISYIPKAKCIELKSLKEYILAFRNLGIFHENVVNRILEDLIQSVDPKYIRVKGDYNLRGGIKTIVTREYTSK

SEQ ID NO: 46894 - protein, 133 aa, unidentified
  source 1..133: note = Leptospira idonii
  REGION 1..133: note = tr|A0A4R9LXR9|A0A4R9LXR9_9LEPT NADPH-dependent 7-cyano-7-deazaguanine reductase OS=Leptospira idonii; OX = 1193500 GN=queF PE=3 SV=1
MSEKKSASLYEDKQDHIPSWKTPEIEWFANVYSGKDYKIEFTIPEFTAVCPKTGLPDFGTIFIEYSPNEKCIELKSLKEYMMAFRSVGIFHENVVNKVLEDLVQAVNPKYLKVVGDYNIRGGVKTIVSREYKQ

SEQ ID NO: 46895 - protein, 133 aa, unidentified
  source 1..133: note = Leptospira ilyithenensis
  REGION 1..133: note = tr|A0A4R9LMW0|A0A4R9LMW0_9LEPT NADPH-dependent 7-cyano-7-deazaguanine reductase OS=Leptospira ilyithenensis OX=2484901 GN=queF PE=3 SV=1
MSEKKSVSLYEDKQDHIPAWKTPEIEWFANVYSGREYKIEFTIPEFTAVCPKTGLPDFGTIFIEYSPKEKCIELKSLKEYVLAFRNVGIFHENVVNKILEDLIQAVDPNYLKVIGDYNIRGGVKTIVSREYKK

SEQ ID NO: 46896 - protein, 139 aa, Leptospira inadai
  REGION 1..139: note = tr|V6HC32|V6HC32_9LEPT NADPH-dependent 7-cyano-7-deazaguanine reductase OS=Leptospira inadai serovar Lyme str. 10 OX=1049790 GN=queF PE=3 SV=1
MDDRQQETGASSYDGRQDHIPALKLPEIESFANVYEGKDYTIDFTIPEFTAVCPKTGLPDFGTIEISYIPRDRCIELKSLKEYILAFRNLGIFHENVVNRILEDLVKSVEPKFIRVKGDYNLRGGIKTVVTREYRLEGK

SEQ ID NO: 46897 - protein, 133 aa, Leptospira interrogans
  REGION 1..133: note = tr|M3ICN9|M3ICN9_LEPIT NADPH-dependent 7-cyano-7-deazaguanine reductase OS=Leptospira interrogans serovar Copenhageni str. LT2050 OX=1001598 GN=queF PE=3; SV = 1
MKTNHPETYDGRQDHIPSLQTPEIESFTNVYEGKDYTIDFTVPEFTAVCPKTGLPDFGVILVSYIPNKRCIELKSFKEYILSYRNVGIFHEFLVNKILEDVIKSIDPKYLKVIGDYNARGGIKTIVTREYKKP

SEQ ID NO: 46898 - protein, 133 aa, Leptospira interrogans; identical to SEQ ID NO: 46897
  REGION 1..133: note = sp|Q72RB6|QUEF_LEPIC NADPH-dependent 7-cyano-7-deazaguanine reductase OS=Leptospira interrogans serogroup Icterohaemorrhagiae serovar copenhageni (strain Fiocruz L1- 130) OX=267671 GN=queF PE=3 SV=1

SEQ ID NO: 46899 - protein, 133 aa, unidentified
  source 1..133: note = Leptospira jelokensis
  REGION 1..133: note = tr|A0A4Z1A721|A0A4Z1A721_9LEPT NADPH-dependent 7-cyano-7-deazaguanine reductase OS=Leptospira jelokensis; OX = 2484931 GN=queF PE=3 SV=1
MSEKKSESSYEDKQDHIPSWSTPPIEWFANVYSGKEYNIEFTIPEFTAVCPKTGLPDFGTIYIEYIPRDKCVELKSLKEYMMAYRNVGIFHENVVNKILEDFVKAVDPIYAKVIGDYNVRGGVKTVVKREYKA

SEQ ID NO: 46900 - protein, 133 aa, unidentified
  source 1..133: note = Leptospira jelokensis
  REGION 1..133: note = tr|A0A5F2B2N1|A0A5F2B2N1_9LEPT NADPH-dependent 7-cyano-7-deazaguanine reductase OS=Leptospira jelokensis; OX = 2484931 GN=queF PE=3 SV=1
MSEKKSESSYEDKQDHIPSWSTPPIEWFANVYAGKEYNIEFTIPEFTAVCPKTGLPDFGTIYIEYIPRDKCAELKSLKEYMMAYRNVGIFHENVVNKILEDFVKAVDPIYAKVIGDYNVRGGVKTVVKREYKA

SEQ ID NO: 46901 - protein, 137 aa, unidentified; identical to SEQ ID NO: 46868
  source 1..137: note = Leptospira johnsonii
  REGION 1..137: note = tr|A0A2P2CYI6|A0A2P2CYI6_9LEPT NADPH-dependent 7-cyano-7-deazaguanine reductase OS=Leptospira johnsonii; OX = 1917820 GN=queF PE=3 SV=1

SEQ ID NO: 46902 - protein, 133 aa, unidentified
  source 1..133: note = Leptospira kanakyensis
  REGION 1..133: note = tr|A0A4R9HV64|A0A4R9HV64_9LEPT NADPH-dependent 7-cyano-7-deazaguanine reductase OS=Leptospira kanakyensis; OX = 2484968 GN=queF PE=3 SV=1
MSEKKSESSYEDKQDHIPSWKTPEIEWFANVYAGKEYNIEFTIPEFTAVCPKTGLPDFGSIFIEYIPRMRCVELKSLKEYMMSYRNVGIFHENVVNKILEDFVQAVDPLYVKVVGDYNVRGGVKTIVRREYKA

SEQ ID NO: 46903 - protein, 133 aa, unidentified
  source 1..133: note = Leptospira kemamanensis
  REGION 1..133: note = tr|A0A4R9JV85|A0A4R9JV85_9LEPT NADPH-dependent 7-cyano-7-deazaguanine reductase OS=Leptospira kemamanensis OX=2484942 GN=queF PE=3 SV=1
MSEKKSESSYEDKQDHIPSWTTPPIEWFANVYAGREYNIEFTIPEFTAVCPKTGLPDFGTIFIEYIPREKCAELKSLKEYMMSYRNVGIFHENVVNKILEDFVKAVDPLYVKVIGDYNVRGGVKTVVKREYKA

SEQ ID NO: 46904 - protein, 133 aa, Leptospira kirschneri
  REGION 1..133: note = tr|M6I4Z6|M6I4Z6_9LEPT NADPH-dependent 7-cyano-7-deazaguanine reductase OS=Leptospira kirschneri serovar Bim str. 1051 OX=1049941 GN=queF PE=3 SV=1
MKTNHPEIYDGRQDHIPSLQTPEIESFTNVYEGKDYTIDFTVPEFTAVCPKTGLPDFGVILVSYIPNKRCIELKSFKEYILSYRNVGIFHEFLVNKILEDLIKSVDPKYLKVIGDYNARGGIKTIVTREYIRP

SEQ ID NO: 46905 - protein, 167 aa, Leptospira kirschneri
  REGION 1..167: note = tr|M6XAL6|M6XAL6_9LEPT NADPH-dependent 7-cyano-7-deazaguanine reductase OS=Leptospira kirschneri str. 200801925 OX=1193046 GN=queF PE=3 SV=1
MDNHSKPLLDFAIDSGKRIFAITRSKNLVIKELSMKTNHPEIYDGRQDHIPSLQTPEIESFTNVYEGKDYTIDFTVPEFTAVCPKTGLPDFGVILVSYIPNKRCIELKSFKEYILSYRNVGIFHEFLVNKILEDLIKSVDPKYLKVIGDYNARGGIKTIVTREYIRP

SEQ ID NO: 46906 - protein, 133 aa, Leptospira kmetyi
  REGION 1..133: note = tr|A0A2M9XM34|A0A2M9XM34_9LEPT NADPH-dependent 7-cyano-7-deazaguanine reductase OS=Leptospira kmetyi; OX = 408139 GN=queF PE=3 SV=1
METNHPETYDGRQDHIPSLKTPEIESFTNVYEGKDYTIDFTVPEFTAVCPKTGLPDFGVIYVSYIPTKRCIELKSFKEYILSYRNVGIFHEFLVNKILDDLIASVDPKYLKVIGDYNARGGIKTVVTREYKKA

SEQ ID NO: 46907 - protein, 133 aa, unidentified
  source 1..133: note = Leptospira kobayashii
  REGION 1..133: note = tr|A0A2P2DNQ8|A0A2P2DNQ8_9LEPT NADPH-dependent 7-cyano-7-deazaguanine reductase OS=Leptospira kobayashii; OX = 1917830 GN=queF PE=3 SV=1
MSEKKSVSLYEDKQDHIPSWKTPEIEWFANVYSGREYKIEFTIPEFTAVCPKTGLPDFGTIFIEYSPNEKCIELKSLKEYVLAFRNVGIFHENVVNKILEDLIQAVDPNYLKVIGDYNIRGGVKTIVSREYKK

SEQ ID NO: 46908 - protein, 137 aa, unidentified; identical to SEQ ID NO: 46868
  source 1..137: note = Leptospira koniamboensis
  REGION 1..137: note = tr|A0A4R9JAU3|A0A4R9JAU3_9LEPT NADPH-dependent 7-cyano-7-deazaguanine reductase OS=Leptospira koniamboensis OX=2484950 GN=queF PE=3 SV=1

SEQ ID NO: 46909 - protein, 137 aa, unidentified
  source 1..137: note = Leptospira langatensis
  REGION 1..137: note = tr|A0A5F1ZXE4|A0A5F1ZXE4_9LEPT NADPH-dependent 7-cyano-7-deazaguanine reductase OS=Leptospira langatensis; OX = 2484983 GN=queF PE=3 SV=1
MSHEQESTGISTYEGRQDHIPSLRLPEIESFANVYEGKDYTIDFTIPEFTAVCPKTGLPDFGVIEISYIPKAKCIELKSLKEYILAYRNLGIFHENVVNHILEDLVQSIDPKYIRVKGDYNIRGGIKTIVTREYGSR

SEQ ID NO: 46910 - protein, 133 aa, unidentified
  source 1..133: note = Leptospira levettii
  REGION 1..133: note = tr|A0A2N0AYA3|A0A2N0AYA3_9LEPT NADPH-dependent 7-cyano-7-deazaguanine reductase OS=Leptospira levettii; OX = 2023178 GN=queF PE=3 SV=1
MSEKKSESSYEDKQDHIPSWTTPPIEWFANVYAGREYNIEFTIPEFTAVCPKTGLPDFGTIFIEYIPREKCAELKSLKEYMMSYRNVGIFHENVVNKILEDFVKAVDPIYVKVIGDYNVRGGVKTVVKREYRA

SEQ ID NO: 46911 - protein, 137 aa, Leptospira licerasiae
  REGION 1..137: note = tr|I0XS65|I0XS65_9LEPT NADPH-dependent 7-cyano-7-deazaguanine reductase OS=Leptospira licerasiae serovar Varillal str. VAR 010 OX=1049972 GN=queF PE=3 SV=1
MSHQQESIGISTYEGRQDHIPSLKLPEIESFANVYEGKDYTIDFTIPEFTAVCPKTGLPDFGVIEISYIPKAKCIELKSLKEYILAYRNLGIFHENVVNRILEDLIQSVDPKYIKVKGDYNLRGGIKTIVTREYTSK

SEQ ID NO: 46912 - protein, 137 aa, Leptospira licerasiae
  REGION 1..137: note = tr|A0A5F2DUQ1|A0A5F2DUQ1_9LEPT NADPH-dependent 7-cyano-7-deazaguanine reductase OS=Leptospira licerasiae; OX = 447106 GN=queF PE=3 SV=1
MSHQQESIGISTYEGRQDHIPNLKLPEIESFANVYEGKDYTIDFTIPEFTAVCPKTGLPDFGVIEISYIPKAKCIELKSLKEYILAYRNLGIFHENVVNRILEDLIQSVDPKYIKVKGDYNLRGGIKTIVTREYTSK

SEQ ID NO: 46913 - protein, 133 aa, unidentified; identical to SEQ ID NO: 46910
  source 1..133: note = Leptospira macculloughii
  REGION 1..133: note = tr|A0A2N0CG84|A0A2N0CG84_9LEPT NADPH-dependent 7-cyano-7-deazaguanine reductase OS=Leptospira macculloughii OX=2023202 GN=queF PE=3 SV=1

SEQ ID NO: 46914 - protein, 133 aa, unidentified
  source 1..133: note = Leptospira macculloughii
  REGION 1..133: note = tr|A0A2N0C8Y3|A0A2N0C8Y3_9LEPT NADPH-dependent 7-cyano-7-deazaguanine reductase OS=Leptospira macculloughii OX=2023202 GN=queF PE=3 SV=1
MSEKKSESSYEDKQDHIPSWKTPEIEWFANVYAGKEYNIEFTIPEFTAVCPKTGLPDFGSIFIEYIPRDRCVELKSLKEYMMSYRNVGIFHENVVNKILEDFVHAVDPLYVKVVGDYNVRGGVKTIVRREYKA

SEQ ID NO: 46915 - protein, 133 aa, unidentified
  source 1..133: note = Leptospira mayottensis
  REGION 1..133: note = tr|A0A3Q9DVA9|A0A3Q9DVA9_9LEPT NADPH-dependent 7-cyano-7-deazaguanine reductase OS=Leptospira mayottensis 200901116 OX=1192864 GN=queF PE=3 SV=1
METNHPETYDGRQDHIPSLKTPEIESFTNVYEGKDYTIDFTVPEFTAVCPKTGLPDFGVIYVSYIPTQRCIELKSFKEYILSYRNVGIFHEFLVNKIMEDLIAAIDPKYLKVIGDYNPRGGIKTVVTREYNKI

SEQ ID NO: 46916 - protein, 133 aa, unidentified; identical to SEQ ID NO: 46915
  source 1..133: note = Leptospira mayottensis
  REGION 1..133: note = tr|A0A5F2DZF7|A0A5F2DZF7_9LEPT NADPH-dependent 7-cyano-7-deazaguanine reductase OS=Leptospira mayottensis; OX = 1137606 GN=queF PE=3 SV=1

SEQ ID NO: 46917 - protein, 133 aa, Leptospira meyeri; identical to SEQ ID NO: 46914
  REGION 1..133: note = tr|A0A5F1ZKU9|A0A5F1ZKU9_LEPME NADPH-dependent 7-cyano-7-deazaguanine reductase OS=Leptospira meyeri; OX = 29508 GN=queF PE=3 SV=1

SEQ ID NO: 46918 - protein, 133 aa, Leptospira meyeri
  REGION 1..133: note = tr|A0A4R8MV70|A0A4R8MV70_LEPME NADPH-dependent 7-cyano-7-deazaguanine reductase OS=Leptospira meyeri; OX = 29508 GN=queF PE=3 SV=1
MSEKKSESSYEDKQDHIPSWKTPEIEWFANVYAGKEYNIEFTIPEFTAVCPKTGLPDFGSIFIEYIPRDRCVELKSLKEYMMSYRNVGIFHENVVNKILEDFVQAVDPLYVKVVGDYNVRGGVKTIVRREYKA

SEQ ID NO: 46919 - protein, 133 aa, unidentified
  source 1..133: note = Leptospira montravelensis
  REGION 1..133: note = tr|A0A4Z0ZKN8|A0A4Z0ZKN8_9LEPT NADPH-dependent 7-cyano-7-deazaguanine reductase OS=Leptospira montravelensis OX=2484961 GN=queF PE=3 SV=1
MSEKKSESSYEDKQDHIPSWKTPEIEWFANVYAGKEYNIEFTIPEFTAVCPKTGLPDFGTIYIDYIPRDRCVELKSLKEYMMSFRNIGIFHENVVNKILEDFVLAVDPLYVKVVGDYNVRGGVKTVVKREYKA

SEQ ID NO: 46920 - protein, 133 aa, unidentified
  source 1..133: note = Leptospira mtsangambouensis
  REGION 1..133: note = tr|A0A5F2DMC5|A0A5F2DMC5_9LEPT NADPH-dependent 7-cyano-7-deazaguanine reductase OS=Leptospira mtsangambouensis OX=2484912 GN=queF PE=3 SV=1
MSEKKSESSYEDKQDHIPSWKTPEIEWFANVYAGKEYNIEFTIPEFTAVCPKTGLPDFGTIYIDYIPRDKCVELKSLKEYMMSYRNVGIFHENVVNKILEDFVLAVNPMYVKVVGDYNVRGGVKTIVKREYKA

SEQ ID NO: 46921 - protein, 137 aa, unidentified; identical to SEQ ID NO: 46868
  source 1..137: note = Leptospira neocaledonica
  REGION 1..137: note = tr|A0A2N0A3J5|A0A2N0A3J5_9LEPT NADPH-dependent 7-cyano-7-deazaguanine reductase OS=Leptospira neocaledonica OX=2023192 GN=queF PE=3 SV=1

SEQ ID NO: 46922 - protein, 133 aa, Leptospira noguchii
  REGION 1..133: note = tr|M6V8P6|M6V8P6_9LEPT NADPH-dependent 7-cyano-7-deazaguanine reductase OS=Leptospira noguchii; OX = 28182 GN=queF PE=3 SV=1
MKTNHSEIYDGRQDHIPSLQTPEIESFTNVYEGKDYTIDFTVPEFTAVCPKTGLPDFGVILVSYIPNKRCIELKSFKEYILSYRNVGIFHEFLVNKILEDLINSIDPKYIKVIGDYNARGGIKTIVTREYTKP

SEQ ID NO: 46923 - protein, 133 aa, Leptospira noguchii; identical to SEQ ID NO: 46922
  REGION 1..133: note = tr|T0F9R9|T0F9R9_9LEPT NADPH-dependent 7-cyano-7-deazaguanine reductase OS=Leptospira noguchii serovar Panama str. CZ214 OX=1001595 GN=queF PE=3 SV=1

SEQ ID NO: 46924 - protein, 133 aa, unidentified
  source 1..133: note = Leptospira noumeaensis
  REGION 1..133: note = tr|A0A4R9IF05|A0A4R9IF05_9LEPT NADPH-dependent 7-cyano-7-deazaguanine reductase OS=Leptospira noumeaensis; OX = 2484964 GN=queF PE=3 SV=1
MSEKKSESSYEDKQDHIPSWKTPEIEWFANVYAGKEYNIEFTIPEFTAVCPKTGLPDFGTIYIDYIPRMRCVELKSLKEYMMSFRNIGIFHENVVNKILEDFVLAVDPLYVKVVGDYNVRGGVKTVVKREYKA

SEQ ID NO: 46925 - protein, 134 aa, unidentified
  source 1..134: note = Leptospira ognonensis
  REGION 1..134: note = tr|A0A4R9JXW7|A0A4R9JXW7_9LEPT NADPH-dependent 7-cyano-7-deazaguanine reductase OS=Leptospira ognonensis; OX = 2484945 GN=queF PE=3 SV=1
MSEKKSASLYEDKQDHIPEWKTPQIEWFENVYSGREYTIEFTIPEFTAVCPKTGLPDFGQIFIEYSPREKCLELKSLKEYFLAFRNVGIFHENVVNKVLEDLVAAVDPYSLKVVGDYNVRGGVKTVVRREYRDK

SEQ ID NO: 46926 - protein, 133 aa, unidentified
  source 1..133: note = Leptospira perdikensis
  REGION 1..133: note = tr|A0A4R9JD79|A0A4R9JD79_9LEPT NADPH-dependent 7-cyano-7-deazaguanine reductase OS=Leptospira perdikensis; OX = 2484948 GN=queF PE=3 SV=1
MSEKKSESSYEDKQDHIPSWKTPEIEWFANVYAGKEYNIEFTIPEFTAVCPKTGLPDFGSIFIEYIPRERCVELKSLKEYMMSYRNVGIFHENVVNKILEDFVAAVNPLFVKVVGDYNVRGGVKTIVRREYKA

SEQ ID NO: 46927 - protein, 140 aa, unidentified
  source 1..140: note = Leptospira perolatii
  REGION 1..140: note = tr|A0A2M9ZJ50|A0A2M9ZJ50_9LEPT NADPH-dependent 7-cyano-7-deazaguanine reductase OS=Leptospira perolatii; OX = 2023191 GN=queF PE=3 SV=1
MEHRPNQPGISSYEGRQDHIPSMELPEIESFANVYEGKDYTIDFTIPEFTAICPKTGLPDFGIIQIVYIPTTRCLELKSLKEYILAYRNLGIFHENVVNRILEDIVKSVHPKYLKVSGDYNLRGGIKTVVTREYSAEGSK

SEQ ID NO: 46928 - protein, 133 aa, unidentified; identical to SEQ ID NO: 46864
  source 1..133: note = Leptospira putramalaysiae
  REGION 1..133: note = tr|A0A4R9L0P9|A0A4R9L0P9_9LEPT NADPH-dependent 7-cyano-7-deazaguanine reductase OS=Leptospira putramalaysiae OX=2484984 GN=queF PE=3 SV=1

SEQ ID NO: 46929 - protein, 134 aa, unidentified
  source 1..134: note = Leptospira ryugenii
  REGION 1..134: note = tr|A0A2P2DWQ9|A0A2P2DWQ9_9LEPT NADPH-dependent 7-cyano-7-deazaguanine reductase OS=Leptospira ryugenii; OX = 1917863 GN=queF PE=3 SV=1
MSEKKSNSLYEDRQDHIPQLETPKIEWFQNVYAGEEYKVEFTIPEFTAVCPKTGLPDFGTIMIEYIPREKCLELKSLKEYFLAYRNIGIFHENVVNKVLEDLVKAVDPMYLKVVGDYNVRGGVKTIVRREYIAT

SEQ ID NO: 46930 - protein, 137 aa, unidentified; identical to SEQ ID NO: 46868
  source 1..137: note = Leptospira saintgironsiae
  REGION 1..137: note = tr|A0A2M9YD80|A0A2M9YD80_9LEPT NADPH-dependent 7-cyano-7-deazaguanine reductase OS=Leptospira saintgironsiae OX=2023183 GN=queF PE=3 SV=1

SEQ ID NO: 46931 - protein, 133 aa, Leptospira santarosai
  REGION 1..133: note = tr|M6ZL91|M6ZL91_9LEPT NADPH-dependent 7-cyano-7-deazaguanine reductase OS=Leptospira santarosai str. 200702252 OX=1049977 GN=queF PE=3 SV=1
MGTNHPEIYDGRQDHIPALQTPEIESFTNVYEGKDYTIDFTVPEFTAVCPKTGLPDFGVILVSYIPTKRCIELKSFKEYILSYRNVGIFHEFLVNKIMEDLIKAVDPKYLKVIGDYNSRGGIKTIVTREYTKS

SEQ ID NO: 46932 - protein, 133 aa, Leptospira santarosai; identical to SEQ ID NO: 46931
  REGION 1..133: note = tr|A0A0E2E2S0|A0A0E2E2S0_9LEPT NADPH-dependent 7-cyano-7-deazaguanine reductase OS=Leptospira santarosai str. JET OX=1193057 GN=queF PE=3 SV=1

SEQ ID NO: 46933 - protein, 137 aa, unidentified
  source 1..137: note = Leptospira sarikeiensis
  REGION 1..137: note = tr|A0A4R9K397|A0A4R9K397_9LEPT NADPH-dependent 7-cyano-7-deazaguanine reductase OS=Leptospira sarikeiensis OX=2484943 GN=queF PE=3 SV=1
MSHQQESIGISAYEGRQDHIPNLKLPEIESFANVYEGKDYTIDFTIPEFTAVCPKTGLPDFGVIEISYIPKAKCIELKSLKEYILAYRNLGIFHENVVNHILEDLVQSVDPKFIRVKGDYNLRGGIKTIVTREYQSK

SEQ ID NO: 46934 - protein, 137 aa, unidentified
  source 1..137: note = Leptospira selangorensis
  REGION 1..137: note = tr|A0A4V6QKH9|A0A4V6QKH9_9LEPT NADPH-dependent 7-cyano-7-deazaguanine reductase OS=Leptospira selangorensis OX=2484982 GN=queF PE=3 SV=1
MSHQQESIGISAYEGRQDHIPSLKLPEIESFANVYEGKDYTIDFTIPEFTAVCPKTGLPDFGVIEISYIPKAKCIELKSLKEYILAYRNLGIFHENVVNRILEDLIQSVDPKYIKVKGDYNLRGGIKTVVSREYSSK

SEQ ID NO: 46935 - protein, 137 aa, unidentified
  source 1..137: note = Leptospira semungkisensis
  REGION 1..137: note = tr|A0A4R9FLL0|A0A4R9FLL0_9LEPT NADPH-dependent 7-cyano-7-deazaguanine reductase OS=Leptospira semungkisensis OX=2484985 GN=queF PE=3 SV=1
MSHEQESTGISTYEGRQDHIPSLRLPEIESFANVYEGKDYTIDFTIPEFTAVCPKTGLPDFGVIEISYIPKAKCIELKSLKEYILAYRNLGIFHENVVNHILEDLVQSIDPKYILVKGDYNIRGGIKTIVTREYGSR

SEQ ID NO: 46936 - protein, 132 aa, Leptospira sp.
  REGION 1..132: note = tr|A0A2M8HFZ7|A0A2M8HFZ7_9LEPT NADPH-dependent 7-cyano-7-deazaguanine reductase OS=Leptospira sp. OX=178; GN = queF PE=3 SV=1
MSEKNPSSYEGKQSHIPELIMPKIEVFANVYPGKDFQIDFTIPEFTAICPKTGLPDFGILEISYKPNISCIELKSLKEYVLSFRNIGIFHENVVNKLLEDLVDACQPFYLKVRGDFNPRGGIKTIVTREYKP

SEQ ID NO: 46937 - protein, 133 aa, Leptospira sp.; identical to SEQ ID NO: 46874
  REGION 1..133: note = tr|M6DZX8|M6DZX8_9LEPT NADPH-dependent 7-cyano-7-deazaguanine reductase OS=Leptospira sp. serovar Kenya str. Sh9 OX=1242991 GN=queF PE=3 SV=1

SEQ ID NO: 46938 - protein, 133 aa, unidentified; identical to SEQ ID NO: 46864
  source 1..133: note = Leptospira stimsonii
  REGION 1..133: note = tr|A0A396Z7A5|A0A396Z7A5_9LEPT NADPH-dependent 7-cyano-7-deazaguanine reductase OS=Leptospira stimsonii; OX = 2202203 GN=queF PE=3 SV=1

SEQ ID NO: 46939 - protein, 133 aa, unidentified
  source 1..133: note = Leptospira terpstrae
  REGION 1..133: note = tr|N1VXY8|N1VXY8_9LEPT NADPH-dependent 7-cyano-7-deazaguanine reductase OS=Leptospira terpstrae serovar Hualin str. LT 11-33 = ATCC 700639 OX=1257025; GN = queF PE=3 SV =1
MSEKKSESSYEDKQDHIPSWKTPEIEWFANVYAGKEYNIEFTIPEFTAVCPKTGLPDFGSIFIEYIPRERCVELKSLKEYMMAFRNVGIFHENVVNKILEDFVQAVVPIYVKVIGDYNVRGGVKTIVKREYKA

SEQ ID NO: 46940 - protein, 133 aa, unidentified
  source 1..133: note = Leptospira tipperaryensis
  REGION 1..133: note = tr|A0A1D7UWP2|A0A1D7UWP2_9LEPT NADPH-dependent 7-cyano-7-deazaguanine reductase OS=Leptospira tipperaryensis OX=2564040 GN=queF PE=3 SV=1
METINPETYDGRQDHIPALKTPEIESFTNVYEGKDYTIDFTVPEFTAVCPKTGLPDFGIIEISYVPTNRCIELKSFKEYILSYRNIGIFHEFVVNKILDDLIKAIDPKYLKVIGDYNPRGGIKTIVTREYKKA

SEQ ID NO: 46941 - protein, 133 aa, unidentified
  source 1..133: note = Leptospira vanthielii
  REGION 1..133: note = tr|N1VXT9|N1VXT9_9LEPT NADPH-dependent 7-cyano-7-deazaguanine reductase OS=Leptospira vanthielii serovar Holland str. Waz Holland = ATCC 700522 OX=1218591; GN = queF PE =3 SV=1
MSEKKSESSYEDKQDHIPSWKTPEIEWFANVYAGKEYNIEFTIPEFTAVCPKTGLPDFGSIFIEYIPRDRCVELKSLKEYMMSYRNVGIFHENVVNKILEDFVAAVNPMYVKVVGDYNVRGGVKTIVKREYKA

SEQ ID NO: 46942 - protein, 133 aa, unidentified; identical to SEQ ID NO: 46941
  source 1..133: note = Leptospira vanthielii
  REGION 1..133: note = tr|A0A4R9LDK5|A0A4R9LDK5_9LEPT NADPH-dependent 7-cyano-7-deazaguanine reductase OS=Leptospira vanthielii; OX = 293085 GN=queF PE=3 SV=1

SEQ ID NO: 46943 - protein, 133 aa, Leptospira weilii
  REGION 1..133: note = tr|M6Q271|M6Q271_9LEPT NADPH-dependent 7-cyano-7-deazaguanine reductase OS=Leptospira weilii str. UI 13098 OX=1088542 GN=queF PE=3 SV=1
METNHPETYDGRQDHIPSLKTPEIESFTNVYEGKDYTIDFTVPEFTAVCPKTGLPDFGVIFISYIPTGRCIELKSFKEYILSYRNVGIFHEFLVNKIMEDLVAAIDPKYLKVIGDYNPRGGIKTVVTREYNKS

SEQ ID NO: 46944 - protein, 133 aa, Leptospira weilii; identical to SEQ ID NO: 46943
  REGION 1..133: note = tr|M6L9T1|M6L9T1_9LEPT NADPH-dependent 7-cyano-7-deazaguanine reductase OS=Leptospira weilii str. LNT 1234 OX=1088541 GN=queF PE=3 SV=1

SEQ ID NO: 46945 - protein, 133 aa, Leptospira wolbachii
  REGION 1..133: note = tr|R9A4L4|R9A4L4_9LEPT NADPH-dependent 7-cyano-7-deazaguanine reductase OS=Leptospira wolbachii serovar Codice str. CDC OX=1218599 GN=queF PE=3 SV=1
MSEKKSESSYEDKQDHIPSWKTPEMEWFANVYAGKEYNIEFTIPEFTAVCPKTGLPDFGSIFIEYIPRERCVELKSLKEYMMSYRNVGIFHENVVNKILEDFVSAVDPLYVKVVGDYNVRGGVKTIVKREYKA

SEQ ID NO: 46946 - protein, 115 aa, Leptospira wolffii
  REGION 1..115: note = tr|S3VTH7|S3VTH7_9LEPT NADPH-dependent 7-cyano-7-deazaguanine reductase OS=Leptospira wolffii serovar Khorat str. Khorat-H2 OX=1193069 GN=queF PE=3 SV=1
MKLPEIESFANVYEGKDYTIDFTIPEFTAVCPKTGLPDFGVIEISYIPKAKCVELKSLKEYILAYRNLGIFHENVVNHILEDLVRAVDPKYVRVKGDYNLRGGIKTIVTREFGKI

SEQ ID NO: 46947 - protein, 137 aa, Leptospira wolffii
  REGION 1..137: note = tr|A0A2M9Z6X5|A0A2M9Z6X5_9LEPT NADPH-dependent 7-cyano-7-deazaguanine reductase OS=Leptospira wolffii; OX = 409998 GN=queF PE=3 SV=1
MSHRQEPTEISAYEGRQDHIPSLKLPEIESFANVYEGKDYTIDFTIPEFTAVCPKTGLPDFGVIEISYIPKAKCVELKSLKEYILAYRNLGIFHENVVNHILEDLVRAVDPKYIRVKGDYNLRGGIKTIVTREFGKI

SEQ ID NO: 46948 - protein, 133 aa, unidentified; identical to SEQ ID NO: 46899
  source 1..133: note = Leptospira yanagawae
  REGION 1..133: note = tr|A0A4R9IUK0|A0A4R9IUK0_9LEPT NADPH-dependent 7-cyano-7-deazaguanine reductase OS=Leptospira yanagawae; OX = 293069 GN=queF PE=3 SV=1

SEQ ID NO: 46949 - protein, 133 aa, unidentified; identical to SEQ ID NO: 46899
  source 1..133: note = Leptospira yanagawae
  REGION 1..133: note = tr|A0A5E8HJ86|A0A5E8HJ86_9LEPT NADPH-dependent 7-cyano-7-deazaguanine reductase OS=Leptospira yanagawae serovar Saopaulo str. Sao Paulo = ATCC 700523 OX=1249483; GN = q ueF PE=3 SV=1

SEQ ID NO: 46950 - protein, 133 aa, unidentified; identical to SEQ ID NO: 46882
  source 1..133: note = Leptospira yasudae
  REGION 1..133: note = tr|A0A418A729|A0A418A729_9LEPT NADPH-dependent 7-cyano-7-deazaguanine reductase OS=Leptospira yasudae; OX = 2202201 GN=queF PE=3 SV=1

SEQ ID NO: 46951 - protein, 138 aa, unidentified
  source 1..138: note = Leptospiraceae bacterium
  REGION 1..138: note = tr|A0A357J0Z6|A0A357J0Z6_9LEPT NADPH-dependent 7-cyano-7-deazaguanine reductase OS=Leptospiraceae bacterium OX=2026757 GN=queF PE=3 SV=1
MSEDTNIHTGAYEGRQDHVRDLKFPEIEVFANIYPGKSYRIDMEIPEFTAICPKTGLPDFGILYLAYKPAEFCLELKSLKEYVTAYRNVGIFHENVVNRMLDDLVKACKPRWMRLHGDYNVRGGIKTRVTATYSAPNE

SEQ ID NO: 46952 - protein, 135 aa, unidentified
  source 1..135: note = Leptospiraceae bacterium
  REGION 1..135: note = tr|A0A2E5RZ72|A0A2E5RZ72_9LEPT NADPH-dependent 7-cyano-7-deazaguanine reductase OS=Leptospiraceae bacterium OX=2026757 GN=queF PE=3 SV=1
MNDDAKIHTGSYEGRQDQVRSLDFPEIEVFQNIYSDKTYRIDMEIPEFTAICPKTGLPDFGILYLSYKPAEFCLELKSLKEYVTAYRDVGIFHENVVNRILDDLVKACKPRWMRLHGDYNVRGGIKTRVTATYSA

SEQ ID NO: 46953 - protein, 135 aa, Leptospirillum ferriphilum
  REGION 1..135: note = tr|A0A059XTK9|A0A059XTK9_9BACT NADPH-dependent 7-cyano-7-deazaguanine reductase OS=Leptospirillum ferriphilum YSK OX=1441628 GN=queF PE=3 SV=1
MPKKTPYGETAIQQNQLEKWPAPESTVPLEIRISYPEFTCLCPRSGYPDFATIHLRYRPSGFIVELKSFKLYLNSFRNRAISHEETAATLFRDLENLLKPEFLEIVADFNVRGNVKTVITLHSGMGKTPEKDRPL

SEQ ID NO: 46954 - protein, 149 aa, Leptospirillum ferriphilum
  REGION 1..149: note = tr|A0A094W827|A0A094W827_9BACT NADPH-dependent 7-cyano-7-deazaguanine reductase OS=Leptospirillum ferriphilum OX=178606 GN=queF PE=3 SV=1
MPSSKKEKKSSTQSTLKKTAYGETAIQQNQLEKWPAPESTAPLEIRISYPEFTCLCPRSGYPDFATIHLRYRPSGFIVELKSLKLYLNSFRNRAISHEETAATLFRDLENLLRPDFLEIVADFNVRGNVKTVITLHSGMGKTPEKDGIS

SEQ ID NO: 46955 - protein, 141 aa, unidentified
  source 1..141: note = Leptospirillum ferrodiazotrophum
  REGION 1..141: note = tr|C6HU12|C6HU12_9BACT NADPH-dependent 7-cyano-7-deazaguanine reductase OS=Leptospirillum ferrodiazotrophum OX=412449 GN=queF PE=3 SV=1
MAPPKKTKTTEASTSYGEQAIETNRLEGWPNPEKEQSYRIHLSYPEFTCLCPRSGYPDFATIEINYVPDRTIVELRSLKLYLNGFRNRRISHEAAINTIFRDLHELLSPREMDVTGDFNVRGNLKTVIRVDTEMNPKKRKR

SEQ ID NO: 46956 - protein, 146 aa, Leptospirillum ferrooxidans
  REGION 1..146: note = tr|I0IPG4|I0IPG4_LEPFC NADPH-dependent 7-cyano-7-deazaguanine reductase OS=Leptospirillum ferrooxidans (strain C2-3) OX=1162668 GN=queF PE=3 SV=1
MSKKHVPSHIPIPASPYGTQAIQEAILEPWPNPAPEEIYETNISYPEFTCLCPRSGYPDFATILIRYRPAQKIVELKSLKLYLNSFRDRAISHEAVTALIYRDLMNLLEPSFLEVKGDFNVRGNVKTVISIDSEMRKATGKSSKKR

SEQ ID NO: 46957 - protein, 149 aa, Leptospirillum sp.
  REGION 1..149: note = tr|A0A0K0WQV1|A0A0K0WQV1_9BACT NADPH-dependent 7-cyano-7-deazaguanine reductase OS=Leptospirillum sp. Group II 'CF-1' OX=1660083 GN=queF PE=3 SV=1
MPSFKKEKKSATKTIPKKTPYGETAIQQNQLEKWPAPESTVPLEIRISYPEFTCLCPRSGYPDFATIHLRYRPSGFIVELKSFKLYLNSFRNRAISHEETAATLFRDLENLLKPEFLEIVADFNVRGNVKTVITLHSGMGKTPEKDRPL

SEQ ID NO: 46958 - protein, 149 aa, Leptospirillum sp.; identical to SEQ ID NO: 46954
  REGION 1..149: note = tr|B6ANH7|B6ANH7_9BACT NADPH-dependent 7-cyano-7-deazaguanine reductase OS=Leptospirillum sp. Group II '5-way CG' OX=419541 GN=queF PE=3 SV=1

SEQ ID NO: 46959 - protein, 282 aa, Leptothrix cholodnii
  REGION 1..282: note = tr|B1Y274|B1Y274_LEPCP NADPH-dependent 7-cyano-7-deazaguanine reductase OS=Leptothrix cholodnii (strain ATCC 51168 / LMG 8142 / SP-6) OX=395495 GN=queF; PE = 3 SV=1
MSQLPDPNPNADASPLGRASSYRDTYDASLLYPMSRQPKRDEIGLSGELPFMGCDLWTAYELSWLTPRGKPQVALLNLTVPCESPAIVESKSFKLYLNSFNMSRYESSDAVRELLVGDLSAAFGVRVGVKLVPPELFDAQPIHELSGRNLDRLDIECDRYTPAPELLSANHDELPVEETLTSHLLKSNCLVTGQPDWGSVQISYSGAQIDEAGLLRYLVSFRQHNEFHEQCVERIYMDIWQRCRPTTLQVYARYTRRGGLDINPWRTSHPAAPPVNVRTARQ

SEQ ID NO: 46960 - protein, 302 aa, Leptothrix mobilis
  REGION 1..302: note = tr|A0A4Q7LSR4|A0A4Q7LSR4_9BURK NADPH-dependent 7-cyano-7-deazaguanine reductase OS=Leptothrix mobilis; OX = 47994 GN=queF PE=3 SV=1
MTDMNDLNDTTAAPSLLAAHTHTHTPPHHDPADSPLGRVSAYRDTYAPELLYPIERQPKRDEIGVIGALPFMGCDLWTAYELSWLNLRGKPQVALAQFTVPCESPAIVESKSFKLYLNSFNMSRFESADVVRELLQRDLSAAFGQRVGVKVLSAYDFAAQRIEELDGVDLDRLDLDCDAYEPAPELLTAAFDEKPVTETLTSGLLKSNCLVTGQPDWGSVQIRYSGPQIDQAGLLRYLVSFRQHNEFHEQCVERIYMDVLTRCKPVQLQVYARYTRRGGLDINPWRTSHPATPPRNLRTARQ

SEQ ID NO: 46961 - protein, 273 aa, Leptothrix ochracea
  REGION 1..273: note = tr|I4Z4Y7|I4Z4Y7_9BURK NADPH-dependent 7-cyano-7-deazaguanine reductase OS=Leptothrix ochracea L12 OX=735332 GN=queF PE=3 SV=1
MITDSPLGQAVTYSDAYDPTLLFSLPRADKRTDIGIQGQPPFVGADLWTAYELSWLNTKGKPQVALAHFVIPSDSISIIESKSLKLYLNSFNMSRFDAHEVVQQHLITDLSTACGLRVGVRLTLPDQFHTQVIAPLHGLDLDRLDLECTHYTPTPDLLSADHTEPPVTETFVSHLLKSNCLITHQPDWGSVQITYTGATIDQAGLLRYLVSYRGHDEFHEQCVERIFMDIWTRCRPSKLSVYARYTRRGGLDINPYRCSHPAALPSNARTARQ

SEQ ID NO: 46962 - protein, 154 aa, unidentified
  source 1..154: note = Leucothrix pacifica
  REGION 1..154: note = tr|A0A317C906|A0A317C906_9GAMM NADPH-dependent 7-cyano-7-deazaguanine reductase OS=Leucothrix pacifica; OX = 1247513 GN=queF PE=3 SV=1
MSDNIYQDLQQLGGDTVLPDTPENAILESVKNPQADVDYMIRFTAPEFTSLCPMTSQPDFAHLVIDYIPDQLLVESKSLKLFLGSFRNHGAFHEDCTVSIARRLIEEIKPKWIRIGGYWYPRGGIPIDVFFAQGEIPKGVWVPEQGVAGYRGRG

SEQ ID NO: 46963 - protein, 154 aa, Leucothrix sp.
  REGION 1..154: note = tr|A0A317CG59|A0A317CG59_9GAMM NADPH-dependent 7-cyano-7-deazaguanine reductase OS=Leucothrix sp. IMCC9719 OX=1481894 GN=queF PE=3 SV=1
MSDNIYQNLEQLGGATVLPDDPKTAILESVQNPQADVDYVVRFTAPEFTSLCPMTAQPDFAHLVIDYIPDQLLVESKSLKLFLGAFRNHGAFHEDCTVSIARRLIDEINPKWLRIGGYWYPRGGIPIDVFYAFGEVPKGVWLPEQGVAGYRGRG

SEQ ID NO: 46964 - protein, 154 aa, unidentified
  source 1..154: note = Liberibacter asiaticus
  REGION 1..154: note = tr|C6XHS4|C6XHS4_LIBAP NADPH-dependent 7-cyano-7-deazaguanine reductase OS=Liberibacter asiaticus (strain psy62) OX=537021 GN=queF PE=3 SV=1
MSEITLNGLSILGGKAKPCDDPNEALLERIPSQNKNLNYVVRFTIPEFTSLCPVTSQPDFAHMILDYIPKDWLIESKSLKLFMASFRNHHSFHEDCTIYIARRLVTILDPKWLRIGAYWYPRGGIPIDIFWQTSAPPEGVFLPNQDVPQYRGRG

SEQ ID NO: 46965 - protein, 154 aa, unidentified
  source 1..154: note = Liberibacter crescens
  REGION 1..154: note = tr|L0EW63|L0EW63_LIBCB NADPH-dependent 7-cyano-7-deazaguanine reductase OS=Liberibacter crescens (strain BT-1) OX=1215343 GN=queF PE=3 SV=1
MHKKDTPSLSILGEKTTFSDSPETALLEKIPSTYKELCYVVRFTAPEFTSLCPVTSQPDFAYIIIDYVPNKWLVESKSFKLFLTSFRNHRAFHEDCSLYIAQRLVTLLEPQWLRICAYWYPRGGIPIDVFWQTSSPPKGALIPDPGVPTYRGRG

SEQ ID NO: 46966 - protein, 154 aa, unidentified
  source 1..154: note = Liberibacter solanacearum
  REGION 1..154: note = tr|E4UCZ3|E4UCZ3_LIBSC NADPH-dependent 7-cyano-7-deazaguanine reductase OS=Liberibacter solanacearum (strain CLso-ZC1) OX=658172 GN=queF PE=3 SV=1
MSEIILDGLSILGRKAKIHDNPKEAPLEKIPSNHKDCNYVVRFTIPEFTSLCPVTSQPDFAHIIIDYIPQNWLIESKSLKLFTTSFRNYPSFHEDCSIYIAKRLVQVLEPKWLRIGAYWYPRGGMPIDIFWQTSSPPKGIFLPNQDVPQYRGRG

SEQ ID NO: 46967 - protein, 163 aa, unidentified
  source 1..163: note = Lihuaxuella thermophila
  REGION 1..163: note = tr|A0A1H8C1E8|A0A1H8C1E8_9BACL NADPH-dependent 7-cyano-7-deazaguanine reductase OS=Lihuaxuella thermophila OX=1173111 GN=queF PE=3 SV=1
MGSNRGDLNLKLLGNKETEYLFEYNPDVLEVFDNKHPDTDYFVKFNCPEFTSLCPITSQPDFATIYISYVPDQKLVESKSLKLYLFSFRNHGDFHENCIVTIMKDLIKAMDPKYIEVWGKFLPRGGISIDPYVNYGKKGTKWEKIAEERLAKHDLYPETVDNR

SEQ ID NO: 46968 - protein, 155 aa, unidentified
  source 1..155: note = Limimaricola cinnabarinus
  REGION 1..155: note = tr|U2Z6S7|U2Z6S7_9RHOB NADPH-dependent 7-cyano-7-deazaguanine reductase OS=Limimaricola cinnabarinus LL-001 OX=1337093 GN=queF PE=3 SV=1
MSDKSIYDGLTMLGGATVQPQTPEEAVLERVPNPQSDVDYAVRFTAPEFTSLCPLTGQPDFAHLVLDYVPGDWLVESKSLKLFLTSFRNHGAFHEDCTVSIARRLVDTLSPRWLRLGGYWYPRGGIPIDVFYQTGEPPKGVWIPDAGVPGYRGRG

SEQ ID NO: 46969 - protein, 155 aa, unidentified
  source 1..155: note = Limimaricola cinnabarinus
  REGION 1..155: note = tr|A0A2G1MD85|A0A2G1MD85_9RHOB NADPH-dependent 7-cyano-7-deazaguanine reductase OS=Limimaricola cinnabarinus OX=1125964 GN=queF PE=3 SV=1
MSEKSIYDGLTMLGGTTVQPQSPEEAVLERVPNPQSDVDYAVRFTAPEFTSLCPLTGQPDFAHLVLDYVPGDWLVESKSLKLFLTSFRNHGAFHEDCTVSIARRLVDTLSPRWLRLGGYWYPRGGIPIDVFYQTGEPPKGVWIPDAGVPGYRGRG

SEQ ID NO: 46970 - protein, 155 aa, unidentified
  source 1..155: note = Limimaricola hongkongensis
  REGION 1..155: note = tr|A0A017H7P8|A0A017H7P8_9RHOB NADPH-dependent 7-cyano-7-deazaguanine reductase OS=Limimaricola hongkongensis DSM 17492 OX=1122180 GN=queF PE=3 SV=1
MSEKSIYDDLTMLGGQTVQPQSPEEAVLERVPNPQADVDYAVRFTAPEFTSLCPLTGQPDFAHLVIDYVPGDWLVESKSLKLFLTSFRNHGAFHEDCTVSIARRLVDTLDPKWLRLGGYWYPRGGIPIDVFYQTGEPPRGVWIPETGVPGYRGRG

SEQ ID NO: 46971 - protein, 155 aa, unidentified
  source 1..155: note = Limimaricola pyoseonensis
  REGION 1..155: note = tr|A0A1G7IT90|A0A1G7IT90_9RHOB NADPH-dependent 7-cyano-7-deazaguanine reductase OS=Limimaricola pyoseonensis OX=521013 GN=queF PE=3 SV=1
MTDKSIYDGLTVLGGETRQPQSPEEAVLERVPNPQADVDYAVRFTAPEFTSLCPLTGQPDFAHLVIDYVPGDWLVESKSLKLFLTSFRNHGAFHEDCTVSIARRLCETLSPKWLRLGGYWYPRGGIPIDVFYQTGAVPAGVWIPETGVAPYRGRG

SEQ ID NO: 46972 - protein, 155 aa, unidentified
  source 1..155: note = Limimaricola soesokkakensis
  REGION 1..155: note = tr|A0A1X6ZZL2|A0A1X6ZZL2_9RHOB NADPH-dependent 7-cyano-7-deazaguanine reductase OS=Limimaricola soesokkakensis OX=1343159 GN=queF PE=3 SV=1
MSDKSIYDGLTMLGGQTVQPQSPEEAVLERVPNPQSDVDYAVRFTAPEFTSLCPLTGQPDFAHLVIDYVPGDWLVESKSLKLFLTSFRNHGAFHEDCTVSIGRRLVDTLSPKWLRLGGYWYPRGGIPIDVFYQTGEPPKGVWIPDAGVPGYRGRG

SEQ ID NO: 46973 - protein, 151 aa, unidentified
  source 1..151: note = Limimonas halophila
  REGION 1..151: note = tr|A0A1G7SHM3|A0A1G7SHM3_9PROT NADPH-dependent 7-cyano-7-deazaguanine reductase OS=Limimonas halophila; OX = 1082479 GN=queF PE=3 SV=1
MSTDEPSHLGRASGIPARPEDAVLDVVADPHPDETYLVRFTCPEFTSLCPITGQPDFAHLVIDYVPDRHLLESKALKLYLHSFRNHGAFHEACTVGIAKRLMAAANPVWLRLGGYWYPRGGIPIDIFYQSGEPPAGLWLPEPGVQPYRGRG

SEQ ID NO: 46974 - protein, 139 aa, Limnobacter sp.
  REGION 1..139: note = tr|A0A151QKI8|A0A151QKI8_9BURK NADPH-dependent 7-cyano-7-deazaguanine reductase OS=Limnobacter sp. CACIAM 66H1 OX=1813033 GN=queF PE=3 SV=1
MSNKPSRDLQTFPNPNPDRPYHVHIEVPEFTCLCPLTGQPDFATLVIDYLPNQKNVELKSLKMYMWSYREEGAFHEAVTNKILDDLVAATDPRYMKLTAKWYVRGGVYTTVVAEHRHAGFQPLPKVELDSISTMNPTRG

SEQ ID NO: 46975 - protein, 139 aa, Limnobacter sp.
  REGION 1..139: note = tr|A0A520T9J7|A0A520T9J7_9BURK NADPH-dependent 7-cyano-7-deazaguanine reductase OS=Limnobacter sp.; OX = 2003368 GN=queF PE=3 SV=1
MSNKPSRDLQTFPNPNPDRPYHVHIEVPEFTCLCPLTGQPDFATLVIDYLPNQKNVELKSLKMYMWSYREEGAFHEAVTNKILDDLVAATDPRYMKLTAKWYVRGGVYTTVVAEHRHSGFQPLPKVELDSISTMNPTRG

SEQ ID NO: 46976 - protein, 284 aa, unidentified
  source 1..284: note = Limnobaculum parvum
  REGION 1..284: note = tr|A0A2Y9U1K2|A0A2Y9U1K2_9ENTR NADPH-dependent 7-cyano-7-deazaguanine reductase OS=Limnobaculum parvum; OX = 2172103 GN=queF PE=3 SV=1
MTSHYQDNQVLSTLKLGKETAYIDHYDASLLQPVPRSLNRDPLGLSATALPFHGADIWTLYELSWLNSRGLPQVAVGEVHIDANSVNLVESKSFKLYLNSFNQTPFNSWEDVQQVLTRDLSLCAQGAVIVKLFRLEQLTGETIGIFDGECIDDQPIAITHYDFDDTLLEQATEKYTPVVEETLVSHLLKSNCLITHQPDWGSVEIRYRGPQINREALLRYIVSFRHHNEFHEQCVERIFNDIQRYCHPESLSVYARYTRRGGLDINPYRTNTQFVPETKRLARQ

SEQ ID NO: 46977 - protein, 281 aa, Limnohabitans curvus
  REGION 1..281: note = tr|A0A315ELS3|A0A315ELS3_9BURK NADPH-dependent 7-cyano-7-deazaguanine reductase OS=Limnohabitans curvus; OX = 323423 GN=queF PE=3 SV=1
MNTPEQSQLGKSSSYVDQYDASLLFPIPRQTKRDEIGITGQPPFFGADLWTAYELSWLNTRGKPQVALARITVPAESTHIIESKSFKLYLNSFNNTRIDDIAELQTRLRQDLSAAIWQGEPVKASVGVQLVLPENFDREPVHELDGLSLDRLDLDCDQYQPNPELLTANFNEAPTTETLTSNLLKSNCLVTGQPDWGSVRISYTGPQIDQAGLLRYIVSFRNHNEFHEQCVERIFMDITRRCKPLRLEVYARYTRRGGLDINPWRTSHPQAVPSNVRTARQ

SEQ ID NO: 46978 - protein, 281 aa, Limnohabitans parvus
  REGION 1..281: note = tr|A0A315E6G9|A0A315E6G9_9BURK NADPH-dependent 7-cyano-7-deazaguanine reductase OS=Limnohabitans parvus II-B4 OX=1293052 GN=queF PE=3 SV=1
MNSPEQSQLGKSSAYVDQYDASLLFPIPRATKRAEIGVTGQPVFFGADLWTAFELSWLNTKGKPQVALAHITVPAESTHIVESKSFKLYLNSFNNTQLESAEVVRDMIRRDISAAIWHGGVVQASVGVKLLLQEHFDAEPVHELDGLNLDRMDIECTRYQPAPELLSANAEELPVSETLVSHLLKSNCLVTGQPDWGSVQITYSGPQIDQAGLLQYIVSFRNHNEFHEQCVERIFMDIWTRCKPTQLTVYARYTRRGGLDINPWRTSAPGKLPPNVRTARQ

SEQ ID NO: 46979 - protein, 281 aa, Limnohabitans planktonicus
  REGION 1..281: note = tr|A0A2T7UB65|A0A2T7UB65_9BURK NADPH-dependent 7-cyano-7-deazaguanine reductase OS=Limnohabitans planktonicus II-D5 OX=1293045 GN=queF PE=3 SV=1
MNTPEQSQLGKSSAYVDQYDASLLFPIPRATKRAEIGVTGQPVFFGADLWTAFELSWLNTKGKPQVALAHITVPAESTHIVESKSFKLYLNSFNNTRLESADVVRDMIRRDISAAIWHGGTMQASVGVKLLLQEQFDAEPVHELDGLNLDRMDIECSRYQPAPDLLSATADEAPVTETLVSHLLKSNCLVTGQPDWGSVQITYSGPQIDQAGLLQYIVSFRNHNEFHEQCVERIFMDIWTRCKPTKLTVYARYTRRGGLDINPWRTSAPGALPPNVRTARQ

SEQ ID NO: 46980 - protein, 285 aa, Limnohabitans sp.
  REGION 1..285: note = tr|A0A315BUJ2|A0A315BUJ2_9BURK NADPH-dependent 7-cyano-7-deazaguanine reductase OS=Limnohabitans sp. MMS-10A-160 OX=1835766 GN=queF PE=3 SV=1
MSTPNNTPEQSQLGKSSAYVDQYDASLLFPIPRATKRAEIGITAQPVFFGADLWTAFELSWLNTKGKPQVALAHITVPAESTHIVESKSFKLYLNSFNNTRIDSADEVRDRIRRDISAAIWHGSAVQASVGVKLLMPEMFDAEPVHEMDGLNLDRMDIECSRYQPAPDLLSATADEAPVSETLVSHLLKSNCLVTGQPDWGSVQITYSGPQIDQAGLLQYIVSFRNHNEFHEQCVERIFMDIWTRCKPTKLTVYARYTRRGGLDINPWRTSAPGAVPPNVRTARQ

SEQ ID NO: 46981 - protein, 281 aa, Limnohabitans sp.
  REGION 1..281: note = tr|A0A2M6VZA8|A0A2M6VZA8_9BURK NADPH-dependent 7-cyano-7-deazaguanine reductase OS=Limnohabitans sp. 15K; OX = 1100706 GN=queF PE=3 SV=1
MNSPEQSQLGKSSAYVDQYDAGLLFPIPRATKRAEIGVTGQPVFFGADLWTAFELSWLNTKGKPQVALAHITVPAESTHIVESKSFKLYLNSFNNTRLESADAVRDMIRRDISAAIWQGGAVQASVGVKLLLQEQFDTEPVHELDGLNLDRMDIECTRYEPAPDLLNANAEELPVTETLVSHLLKSNCLVTGQPDWGSVQITYSGPQIEQAGLLQYIVSYRNHNEFHEQCVERIFMDIWTRCKPTQLTVYARYTRRGGLDINPWRTSAPGKLPPNVRTARQ

SEQ ID NO: 46982 - protein, 142 aa, unidentified
  source 1..142: note = Limnoraphis robusta
  REGION 1..142: note = tr|A0A0F5YHF5|A0A0F5YHF5_9CYAN NADPH-dependent 7-cyano-7-deazaguanine reductase OS=Limnoraphis robusta CS-951 OX=1637645 GN=queF PE=3 SV=1
MSNSPVEQNVFHSSEVGEVKYGEREIQQGQLITFPNPRVGRRYEVSISLPEFTCKCPFSGYPDFATLHLTYVPNERVVELKSLKLYINSYRDRYISHEESINQILDDFLEACDPLEVKIVGDFNPRGNVHTCVEVRHQRPDD

SEQ ID NO: 46983 - protein, 157 aa, unidentified; identical to SEQ ID NO: 44126
  source 1..157: note = Limnospira indica
  REGION 1..157: note = tr|H1W5Z9|H1W5Z9_9CYAN NADPH-dependent 7-cyano-7-deazaguanine reductase OS=Limnospira indica PCC 8005 OX=376219 GN=queF PE=3 SV=1

SEQ ID NO: 46984 - protein, 130 aa, unidentified
  source 1..130: note = Limnothrix rosea
  REGION 1..130: note = tr|A0A1Q4R6K8|A0A1Q4R6K8_9CYAN NADPH-dependent 7-cyano-7-deazaguanine reductase OS=Limnothrix rosea IAM M-220 OX=454133 GN=queF PE=3 SV=1
MTESPETQEFKYGEREIEAGKLVTFPNPRPGRRYTINISLPEYTCKCPFSGYPDFATIYVSYVPDQKVVELKAIKLYINSYRDRYISHEEGVNQILDDLVAACDPLEMTIKGDYKPRGNVHTVVEVTHKK

SEQ ID NO: 46985 - protein, 137 aa, unidentified
  source 1..137: note = Limnothrix sp.
  REGION 1..137: note = tr|A0A372DH67|A0A372DH67_9CYAN NADPH-dependent 7-cyano-7-deazaguanine reductase OS=Limnothrix sp. CACIAM 69d OX=1890733 GN=queF PE=3 SV=1
MSQATADTAHEPVKYGERQIEEGQLITFPNPRPGRIYHVQISLPEFTCKCPFSGYPDFAKISIDYVPDQKVVELKAIKLYINSYRDRYISHEESINQILDDFVAAADPLEATIVGDFNPRGNVHTVVEVRHQKPAQA

SEQ ID NO: 46986 - protein, 137 aa, unidentified; identical to SEQ ID NO: 46985
  source 1..137: note = Limnothrix sp.
  REGION 1..137: note = tr|A0A1C0VIU3|A0A1C0VIU3_9CYAN NADPH-dependent 7-cyano-7-deazaguanine reductase OS=Limnothrix sp. P13C2; OX = 1880902 GN=queF PE=3 SV=1

SEQ ID NO: 46987 - protein, 163 aa, unidentified
  source 1..163: note = Listeria booriae
  REGION 1..163: note = tr|A0A099WB52|A0A099WB52_9LIST NADPH-dependent 7-cyano-7-deazaguanine reductase OS=Listeria booriae; OX = 1552123 GN=queF PE=3 SV=1
MRNQDELAGVTHLGNQGTEYRMDYAPEVLEAFPNKHPDNDYFVKFNCPEFTSLCPMTGQPDFATIYISYVPGEKMVESKSLKLYLFSFRNHGDFHEDCINIIMKDLIKLMGPKYIEVWGKFTPRGGISIDPYANYGKPGTRFEEVAMHRLMNHDMYPEKVDNR

SEQ ID NO: 46988 - protein, 163 aa, unidentified
  source 1..163: note = Listeria cornellensis
  REGION 1..163: note = tr|W7CBP9|W7CBP9_9LIST NADPH-dependent 7-cyano-7-deazaguanine reductase OS=Listeria cornellensis FSL F6-0969 OX=1265820 GN=queF PE=3 SV=1
MRNQDELAGVTHLGNQGTEYSMDYAPEVLEAFPNKHPDNDYFVKFNCPEFTSLCPMTGQPDFATIYISYVPGEKMVESKSLKLYLFSFRNHGDFHEDCINIIMKDLIELMGPKYIEVWGKFTPRGGISIDPYANYGKPGTRWEEVAMHRLMNHDMYPEKVDNR

SEQ ID NO: 46989 - protein, 163 aa, unidentified
  source 1..163: note = Listeria grandensis
  REGION 1..163: note = tr|W7B046|W7B046_9LIST NADPH-dependent 7-cyano-7-deazaguanine reductase OS=Listeria grandensis FSL F6-0971 OX=1265819 GN=queF PE=3 SV=1
MRKQEELAGVTHLGNQGTEYSMDYAPEVLEAFPNKHPDNDYFVKFNCPEFTSLCPMTGQPDFATIYISYVPGEKMVESKSLKLYLFSFRNHGDFHEDCINIIMKDLIKLMEPKYIEVWGKFTPRGGISIDPYANYGKPDTRWDEVAMHRLMNHDMYPEKVDNR

SEQ ID NO: 46990 - protein, 163 aa, Listeria rocourtiae
  REGION 1..163: note = tr|A0A4R6ZL38|A0A4R6ZL38_9LIST NADPH-dependent 7-cyano-7-deazaguanine reductase OS=Listeria rocourtiae; OX = 647910 GN=queF PE=3 SV=1
MRNQDELAGVTHLGNQGTAYSMDYAPEVLEAFPNKHPNNDYFVKFNCPEFTSLCPMTGQPDFATIYISYVPGEKMVESKSLKLYLFSFRNHGDFHEDCINIIMKDLIELMGPKYIEVWGKFTPRGGISIDPYANYGKPDTRWEKVAMHRLMNHDMYPEKVDNR

SEQ ID NO: 46991 - protein, 163 aa, Listeria sp.
  REGION 1..163: note = tr|A0A3N9TS52|A0A3N9TS52_9LIST NADPH-dependent 7-cyano-7-deazaguanine reductase OS=Listeria sp. SHR_NRA_18 OX=2269046 GN=queF PE=3 SV=1
MRNQDELAGVTHLGNQGTEYRMDYAPEVLEAFPNKHPDNDYFVKFNCPEFTSLCPMTGQPDFATIYISYVPGEMMVESKSLKLYLFSFRNHGDFHEDCINIIMKDLIELMGPKYIEVWGKFTPRGGISIDPYANYGKPDSRFEEVAMHRLMNHDMYPEKVDNR

SEQ ID NO: 46992 - protein, 163 aa, unidentified; identical to SEQ ID NO: 46991
  source 1..163: note = Listeriaceae bacterium
  REGION 1..163: note = tr|A0A099W662|A0A099W662_9LIST NADPH-dependent 7-cyano-7-deazaguanine reductase OS=Listeriaceae bacterium FSL A5-0209 OX=1497679 GN=queF PE=3 SV=1

SEQ ID NO: 46993 - protein, 285 aa, unidentified
  source 1..285: note = Litorilituus sediminis
  REGION 1..285: note = tr|A0A4P6PB81|A0A4P6PB81_9GAMM NADPH-dependent 7-cyano-7-deazaguanine reductase OS=Litorilituus sediminis; OX = 718192 GN=queF PE=3 SV=1
MATYQNAKELSTLTLGKATQYCSEYNANLLQGVPRSLNRDDLALCNESLPFYGEDVWYGYELSWLNPKGKPQVAVAEFRFPCTSPNIIESKSFKLYLNSFNQSKFASREEVEKVLTKDLSEVAGASAIVKLFSVDDCPALEIKSADKTSYCIDDEDITVTHYDFDAQLLANAQQQDSENTQEQLVSHLLKSNCLITNQPDWASIYITYTGKKINHGALLKYLISFREHNEFHEQCVERIFCDLQQFCQLEQLTVFARYTRRGGLDINPFRSTHLDSAPHGRTLRQ

SEQ ID NO: 46994 - protein, 283 aa, unidentified
  source 1..283: note = Litorilituus sp.
  REGION 1..283: note = tr|A0A502KLQ6|A0A502KLQ6_9GAMM NADPH-dependent 7-cyano-7-deazaguanine reductase OS=Litorilituus sp. RZ04; OX = 2491017 GN=queF PE=3 SV=1
MTPYQNASQLKELTLGKKTDYTSEYDPKLLQAVPRSLNRDDLALNEANLPFIGEDVWYGYELSWLNNKGKPVVALVEFRFACTSPNIVESKSFKLYLNSFNQTKFNDIEEVKSYLEKDLSATSGTKATVTLFPVDNCPALEIADEKAVCIDDLDISIEDYQFNAEHLLNSQSNHSQIKEHNIVSHLLKSNCLITNQPDWASIYIHYTGKEISQEQLLTYLISFRQHNEFHEQCVERIFCDLQQYCQLEALTVYARYTRRGGLDINPFRSTHVATAPWGRTLRQ

SEQ ID NO: 46995 - protein, 152 aa, Litorimonas taeanensis
  REGION 1..152: note = tr|A0A420WKC1|A0A420WKC1_9RHOB NADPH-dependent 7-cyano-7-deazaguanine reductase OS=Litorimonas taeanensis; OX = 568099 GN=queF PE=3 SV=1
MTDRYDELNQLGQMKGLPKSPEEAVLERVKNPCSEPYMIRLVAPEFTSICPVTGQPDFAHLVVDYCPDKWIVESKAFKLYLGSFRNHGDFHEACTTGIGQRLVKELSPKWLRIGGYWYPRGGIPIDVFYQFGEAPKGLWIPEQGVPPYRGRG

SEQ ID NO: 46996 - protein, 153 aa, Loktanella sp.
  REGION 1..153: note = tr|A0A1H9HE02|A0A1H9HE02_9RHOB NADPH-dependent 7-cyano-7-deazaguanine reductase OS=Loktanella sp. DSM 29012 OX=1881056 GN=queF PE=3 SV=1
METIYSDLKQLGDQTKLPNTPEEAVLERVANPQADIAYCVRFTAPEFTSLCPMTGQPDFAHLVIDYVPGDYLVESKSLKLFLGSFRNHGAFHEDCTISIARRLVDFLNPQWLRIGGYWYPRGGIPIDVFWQTGAVPQNVWIPDQGVPPYRGRG

SEQ ID NO: 46997 - protein, 154 aa, Loktanella sp.
  REGION 1..154: note = tr|A0A0F4RJH0|A0A0F4RJH0_9RHOB NADPH-dependent 7-cyano-7-deazaguanine reductase OS=Loktanella sp. S4079; OX = 579483 GN=queF PE=3 SV=1
MSDDIYSNLKQLGGATVMPASPEDAELERVPNPQADVLYNVRFTAPEFTSLCPMTGQPDFAHLVIDYVPGDWLVESKSLKLFLGSFRNHGAFHEDCTISIARRLVAFLDPKWLRIGGYWYPRGGIPIDVFWQTGQMPEGVWIPDQGVPPYRGRG

SEQ ID NO: 46998 - protein, 280 aa, Lonepinella koalarum
  REGION 1..280: note = tr|A0A5D1ZLN2|A0A5D1ZLN2_9PAST NADPH-dependent 7-cyano-7-deazaguanine reductase OS=Lonepinella koalarum; OX = 53417 GN=queF PE=3 SV=1
MMYSNNASLKNLKLGQKTEYRAIYDRTLLQPVPRSLNRDALGITQQQPFSFGADIWTAYEISWLNPKGLPQVAIADIEIDYRSQNLIESKSFKLYLNSFNQTKFASFEQVQNTIQQDLAQCADGDVKVRLNSLEFYNQQKLDDFIGECIDYQDIEVTDYAFDAHYLQDCTNNTYVEETLVSHLLKSNCLITSQPDWGSVQIHYVGKQINREKLLRYLISFRQHNEFHEQCVERIFNDLMHYAQPQKLTVYARYTRRGGLDINPFRSNFETIPNNQRLARQ

SEQ ID NO: 46999 - protein, 279 aa, Lonepinella koalarum
  REGION 1..279: note = tr|A0A4R1KT14|A0A4R1KT14_9PAST NADPH-dependent 7-cyano-7-deazaguanine reductase OS=Lonepinella koalarum; OX = 53417 GN=queF PE=3 SV=1
MYSNNASLKNLKLGQKTEYRAIYDRTLLQPVPRSLNRDALGITQQQPFSFGADIWTAYEISWLNPKGLPQVAIADIEIDYRSQNLIESKSFKLYLNSFNQTKFASFEQVQNTIQQDLAQCADGDVKVRLNSLEFYNQQKLDDFIGECIDYQDIEVTDYAFDAHYLQDCTNNTYVEETLVSHLLKSNCLITSQPDWGSVQIHYVGKQINREKLLRYLISFRQHNEFHEQCVERIFNDLMHYAQPQKLTVYARYTRRGGLDINPFRSNFETIPNNQRLARQ

SEQ ID NO: 47000 - protein, 166 aa, unidentified
  source 1..166: note = Longibacter salinarum
  REGION 1..166: note = tr|A0A2A8D012|A0A2A8D012_9BACT NADPH-dependent 7-cyano-7-deazaguanine reductase OS=Longibacter salinarum; OX = 1850348 GN=queF PE=3 SV=1
MSASNNTDLEQVYREMEEEAVRHTRIALEHMKEYGIEPEGEVRPFLPPSERNEEIKRLPYEHETRQVVTYETEPGEFSALCPFSGLPDFGTLRIEYVPGDWIVELKSLKYYVVSWRQIGAAQEDLTPIIFQDLMKHLKNPEYLVVETEYNVRGGINTTCTIDSREQ

SEQ ID NO: 47001 - protein, 152 aa, Longilinea arvoryzae
  REGION 1..152: note = tr|A0A0S7BF88|A0A0S7BF88_9CHLR NADPH-dependent 7-cyano-7-deazaguanine reductase OS=Longilinea arvoryzae; OX = 360412 GN=queF PE=3 SV=1
MTQEDVSGLTILGGQAQPSKKLEAFPNRAPDRFYLVSLHTSEFTCLCPKTGQPDFATIHVDYVPDQKVIESKSFKLYLWSYRNEGAFHEHVVNQILDDLQKVLDAHWIRVTGEFNIRGGIGIKVEAEHTRTPAARLQWMQRAADAAAASGQE

SEQ ID NO: 47002 - protein, 164 aa, unidentified
  source 1..164: note = Longimonas halophila
  REGION 1..164: note = tr|A0A2H3NL87|A0A2H3NL87_9BACT NADPH-dependent 7-cyano-7-deazaguanine reductase OS=Longimonas halophila; OX = 1469170 GN=queF PE=3 SV=1
MSSSTPSPSSPTEWVEQAAEHTEAALEYMRQFGVEPEGHIRPFLPPDTRQDHIDRIPYTHDVRQRVVYKTEPGEFSARCPFSGLPDFGTVEVTYVPGDWILELKSLKYYFMSWRDIGAAQEDITALLFEDLMAELENPARLTITTEYNVRGGINTTCTVDSTNQ

SEQ ID NO: 47003 - protein, 280 aa, unidentified
  source 1..280: note = Lonsdalea britannica
  REGION 1..280: note = tr|A0A1X3RV07|A0A1X3RV07_9GAMM NADPH-dependent 7-cyano-7-deazaguanine reductase OS=Lonsdalea britannica; OX = 1082704 GN=queF PE=3 SV=1
MHITEKDKITHLGVRSSYPDQYDPELLEALPRANGRELVGLTDAELPFTGYDLWTAFELSWLNKKGKPMVGVAEFHVPASSVNLIESKSFKLYLNSFNQTRMRDIETLLSTLVTDLSAAAQGQVKVNIYPGLTGYPAQIDGLPGTVIDDLDIEVNDYSFNPDYLKYAVAENAPTVSETLSSNLLKSNCLVTYQPDWGSVVIKYEGKKIDPECLLRYLISFRQHNEFHEQCVERIFNDIQRYCQPQKLTVFARYTRRGGLDINPFRSNFEDSHTVGRLVRQ

SEQ ID NO: 47004 - protein, 280 aa, unidentified
  source 1..280: note = Lonsdalea iberica
  REGION 1..280: note = tr|A0A1X3RY03|A0A1X3RY03_9GAMM NADPH-dependent 7-cyano-7-deazaguanine reductase OS=Lonsdalea iberica; OX = 1082703 GN=queF PE=3 SV=1
MHITEKDKITHLGVRSSYPDQYDPELLEALPRANGRELVGLTDADLPFTGYDLWTAFELSWLNKKGKPMVGIAEFQVPASSVNLIESKSFKLYLNSFNQTRMRDIETLLSTLVADLSAAAQGQVKVNIYPGLTGYPAQIDALPGTVIDDLDIEVNDYSFNPEYLKYAVSENAPTVSETLSSNLLKSNCLVTYQPDWGSVVIKYEGRKIDPECLLRYLISFRQHNEFHEQCVERIFNDIQRYCQPQKLTVFARYTRRGGLDINPFRSNFEDSHAVGRLVRQ

SEQ ID NO: 47005 - protein, 280 aa, unidentified
  source 1..280: note = Lonsdalea populi
  REGION 1..280: note = tr|A0A3N0UHE9|A0A3N0UHE9_9GAMM NADPH-dependent 7-cyano-7-deazaguanine reductase OS=Lonsdalea populi; OX = 1172565 GN=queF PE=3 SV=1
MHITGKDKITHLGVRSSYPDQYDPELLEALPRANGRELVGLTDAGLPFTGYDLWTAFELSWLNKKGKPMVGVAEFQVPASSVNLIESKSFKLYLNSFNQTRMRDIETLLSTLVTDLSAAAQGQVKVNIYPGLTGYPAHIDSLPGTVIDDLDIEVNDYSFNPDYLKYAVSENAPTVSETLSSNLLKSNCLVTYQPDWGSVVIKYEGRKIDPEYLLRYLISFRQHNEFHEQCVERIFSDIQRYCQPQKLTVFARYTRRGGLDINPFRSNFEDSHAVGRLVRQ

SEQ ID NO: 47006 - protein, 280 aa, unidentified
  source 1..280: note = Lonsdalea quercina
  REGION 1..280: note = tr|A0A1H4D7M8|A0A1H4D7M8_9GAMM NADPH-dependent 7-cyano-7-deazaguanine reductase OS=Lonsdalea quercina; OX = 71657 GN=queF PE=3 SV=1
MHITENDKITHLGVRSNYPDQYDPELLEALPRANGRELVGLTDADLPFTGYDLWTAFELSWLNKKGKPMVGIAEFQVPASSVNLIESKSFKLYLNSFNQTRMRDIETLLSTLVTDLSAAAQGQVKVNIYPGLSGYPAQIDGLPGTVIDDLDIEVNDYSFNPEYLKYAVSENAPIISETLSSNLLKSNCLVTYQPDWGSVVINYEGKKIDPECLLRYLISFRQHNEFHEQCVERIFNDIQRYCQPQKLTVFARYTRRGGLDINPFRSNFEDSHAVGRLVRQ

SEQ ID NO: 47007 - protein, 165 aa, unidentified
  source 1..165: note = Lucifera butyrica
  REGION 1..165: note = tr|A0A498R9C0|A0A498R9C0_9FIRM NADPH-dependent 7-cyano-7-deazaguanine reductase OS=Lucifera butyrica; OX = 1351585 GN=queF PE=3 SV=1
MPRNQDELTGITLLGNQNTQYNYSYAPEVLETFDNKHPDNDYWVKFNCPEFTSLCPITGQPDFATIYISYIPEIRMVESKSLKLYLLSFRNHGDFHEDVVNIIMKDLIKVMQPRYIEVWGKFLPRGGISIDPYCNYGKPDTRYQELAWHRLREHDLHFMDKVDNR

SEQ ID NO: 47008 - protein, 267 aa, unidentified
  source 1..267: note = Luminiphilus syltensis
  REGION 1..267: note = tr|B8KRQ4|B8KRQ4_9GAMM NADPH-dependent 7-cyano-7-deazaguanine reductase OS=Luminiphilus syltensis NOR5-1B OX=565045 GN=NOR51B_1476 PE=4 SV=1
MVDRVLGSRVDAPTRYSPEILEPVERQRGDERLSPMLGADVWHLYELSWLSREGWPTAFVGALAIPASSPRTVESKSLKLYLNSLNFHRFDNERAAVSTIMRDVQAVVGASVDLTIAAPTELAQWTREPAGVCIDDVFSGALVAADWGASRKTPFSQGEDRVSETLISHQLRSLCPVTGQPDWGTLVVDYSGYRLDPAELLSFVCSFREHQDFHEHCVEQIYKKLFGDLSPEALTVTAYYQRRGGIDITPWRGHEKLDAPLWRMGRQ

SEQ ID NO: 47009 - protein, 275 aa, unidentified
  source 1..275: note = Luteibacter pinisoli
  REGION 1..275: note = tr|A0A4Y5Z7J6|A0A4Y5Z7J6_9GAMM NADPH-dependent 7-cyano-7-deazaguanine reductase OS=Luteibacter pinisoli; OX = 2589080 GN=queF PE=3 SV=1
MSSPDHSPLGKATTYADRYDASLLFPIPRQAKRDEIGVDGAALPFHGVDIWNGYELSWLDPRGKPMVAVAEFRFPATTPNIVESKSFKLYLNSFAQETLGSRDDLRDTLVRDLSAASGGPVEVALHAPEELNGVPLHEPEGILLDDQELAFDSYGPPRPDFLSTHEGEVREVLVSHLLRSNCPVTGQPDWGSVQISYTGAPIDRAGLLRYLVSFRRHTEFHEQCVERIFMDLSERCAPRALAVYARYTRRGGLDINPFRSTDPAAEPGNPRGARQ

SEQ ID NO: 47010 - protein, 275 aa, Luteibacter rhizovicinus
  REGION 1..275: note = tr|A0A0G9HFQ1|A0A0G9HFQ1_9GAMM NADPH-dependent 7-cyano-7-deazaguanine reductase OS=Luteibacter rhizovicinus DSM 16549 OX=1440763 GN=queF PE=3 SV=1
MSSPDHSPLGKATVYADRYDAGLLYPIPRQGKRDEIGVSADALPFHGVDVWNGYELSWLDLRGKPVVAVAEFRFPATTPNIVESKSFKLYLNSFAQERLADAAAVGAILVRDLSAAAGGPAEVILRAPGDLDGTPIGEPEGALLDVQELDFDSYGPPRPDFLATHEGDAREVLVSHLLRSNCPVTGQPDWGSVQIAYTGAPIDRAGLLRYLVSFRSHTEFHEQCVERIFMDIRERCAPRELAVYARYTRRGGLDINPFRSTDPAAVPGNPRGARQ

SEQ ID NO: 47011 - protein, 275 aa, Luteibacter rhizovicinus
  REGION 1..275: note = tr|A0A4R3YJF5|A0A4R3YJF5_9GAMM NADPH-dependent 7-cyano-7-deazaguanine reductase OS=Luteibacter rhizovicinus OX=242606 GN=queF PE=3 SV=1
MSSPEHSPLGKSTVYADRYDASLLFPIPRQGKRDDLGVTHPLPFHGMDVWNGYELSWIDDRGKPVVAVAEFRVPATTPNIVESKSFKLYLNSFAQERMVSADALRTVLERDLSQAAGGPVSVVLRSPGDIEGTLIAEPEGILLDAQDLAIDHYGPPRADFLSAPAGPIVTEALVSHLLRSNCPVTGQPDWGSVQVRYTGAPIDRAGLLRYIVSFRNHTEFHEQCVERMFMDISQRCAPRELTVYARYTRRGGLDINPFRSTDPTARPANPRGARQ

SEQ ID NO: 47012 - protein, 285 aa, Luteibacter sp.
  REGION 1..285: note = tr|A0A1T5AXC0|A0A1T5AXC0_9GAMM NADPH-dependent 7-cyano-7-deazaguanine reductase OS=Luteibacter sp. 22Crub2.1 OX=1283288 GN=queF PE=3 SV=1
MAAFTAAVAAMSSPEHSPLGKSTVYADRYDAGLLFPIPRQGKRDEIGVAEAALPFHGVDVWNGYELSWLDKRGKPHVAVAEFRFPATTPNIVESKSFKLYLNSFAQERVADAATLRQTLVRDLSAAAGGPVGIVLHAPGELDGTPISEPEGLLLDTQELDFDSYGPPRADFLVANDGDAREVLVSHLLRSNCPVTGQPDWGSVQIAYTGKPIDRAGLLRYLVSFRNHTEFHEQCVERIFMDVTARCAPRELSVYARYTRRGGLDINPFRSTDPAAVPANPRGARQ

SEQ ID NO: 47013 - protein, 285 aa, Luteibacter sp.
  REGION 1..285: note = tr|A0A1I0QIY9|A0A1I0QIY9_9GAMM NADPH-dependent 7-cyano-7-deazaguanine reductase OS=Luteibacter sp. 329MFSha OX=1798239 GN=queF PE=3 SV=1
MAVCTQLQTAMSSPEHSPLGKTTTYADRYDAGLLFPIPRQGKRDEIGVDGADLPFHGVDVWNGYELSWLDMRGKPVVAVAEFRFPATTPNIVESKSFKLYLNSFAQERMAGPDIVHDTLQRDLSAAAGGRAEVWLRAPNELDGCPLGEPEGQLLDDQDLDFDSYGPPRADFLGTLDGDASETVVSHLLRSNCPVTGQPDWGSVQIAYTGQRIDHAGLLRYLVSFRSHTEFHEQCVERIFMDIRARCAPRELSVYARYTRRGGLDINPFRSTDANAVPGNPRGARQ

SEQ ID NO: 47014 - protein, 275 aa, Luteibacter yeojuensis
  REGION 1..275: note = tr|A0A561GXB7|A0A561GXB7_9GAMM NADPH-dependent 7-cyano-7-deazaguanine reductase OS=Luteibacter yeojuensis; OX = 345309 GN=queF PE=3 SV=1
MSSPDHSPLGKATVYADRYDAGLLFPIPRQGKRDEIGVREGALPFHGEDLWNGYELSWLDARGKPHVAVAEFRFPATTPNIVESKSFKLYLNGFAQERVPDAATLRDTLMRDLSAAAAGPVDVTLHAPDELRGTPIGEPEGSLLDALDIDFDSYGPPRPDFLHAGEGDVREVLVSHLLRSNCPVTGQPDWGSVQVAYAGAPIDHAGLLRYLVSFRSHTEFHEQCVERIFMDLSERCAPRELTVYARYTRRGGLDINPFRSTDPSAKPTNPRGARQ

SEQ ID NO: 47015 - protein, 275 aa, Luteibacter yeojuensis
  REGION 1..275: note = tr|A0A0F3KQV1|A0A0F3KQV1_9GAMM NADPH-dependent 7-cyano-7-deazaguanine reductase OS=Luteibacter yeojuensis; OX = 345309 GN=queF PE=3 SV=1
MSSPDHSPLGKATTYADRYDASLLFPIPRQAKRDEIGVDGAALPFHGVDIWNGYELSWLGPRGKPMVAVAEFRFPATTPHIIESKSFKLYLNSFAQETIASRDVLADTLARDLSAAAGGPATVVLRAPEELNGEPLHEPEGVLLDDQDLDFDSYGPPRADFLATHGGEAREVLVSHLLRSNCPVTGQPDWGSVQVSYTGAPIDRAGLLRYLVSFRRHTEFHEQCVERIFMDLRERCAPRELSVYARYTRRGGLDINPFRSTAAGAQPGNPRGARQ

SEQ ID NO: 47016 - protein, 274 aa, Luteimonas aestuarii
  REGION 1..274: note = tr|A0A4R5TPK5|A0A4R5TPK5_9GAMM NADPH-dependent 7-cyano-7-deazaguanine reductase OS=Luteimonas aestuarii; OX = 453837 GN=queF PE=3 SV=1
MPTPEDSLLGREVAYPAHYDPALLFPIPRAPARAETGIGADAALPFIGHDRWHAYELSWLDGRGKPVVETATITVPATTPHLVESKSLKLYLNSLNGTRFDEADAVRSRIAADLSQATGAVVEVAFGLPPFTDGEANDATCIDALEVDIDHYGPPDAGLLRAEDGHVVEETLRSDLLKSNCPVTGQPDWAGVRIAYRGPRIDREGLLRYVVSFRDHAGFHEQCVERMFVDLLARCRPERLSVEARYTRRGGLDINPWRATPGHAAPVAIRDLRQ

SEQ ID NO: 47017 - protein, 269 aa, unidentified
  source 1..269: note = Luteimonas cucumeris
  REGION 1..269: note = tr|A0A562KUV5|A0A562KUV5_9GAMM NADPH-dependent 7-cyano-7-deazaguanine reductase OS=Luteimonas cucumeris; OX = 985012 GN=queF PE=3 SV=1
MTSAIPLGRDVAYPAHYDPSLLFPIARALGRTALDMHGAALPFIGHDRWQAYELSWLDARGKPRVGTATIQVPCESPNLIESKSLKLYLNSFNAHRCDGDAAVLATIAADLSRAAGAQVTVAFGLPAIVEDDAAQSIDDLDIAIDRYGPPDPHWLQADAQSIVEETLGSALLKSNCPVTGQPDWASLRIAYRGPRLDRAGLLRYLVSFRDHAEFHEQCVERIFVDLVARCRPQALSVEARYTRRGGLDINPWRATPGHAPPLPARDARQ

SEQ ID NO: 47018 - protein, 270 aa, Luteimonas marina
  REGION 1..270: note = tr|A0A5C5U7Z1|A0A5C5U7Z1_9GAMM NADPH-dependent 7-cyano-7-deazaguanine reductase OS=Luteimonas marina; OX = 488485 GN=queF PE=3 SV=1
MSRPEDSQLGREVAYPRHYDPALLFPIPRASGRSELGLGAALPFTGHDRWHAYELSWLDARGKPVVATATITVPADSPNLVESKSLKLYLNSLNAERFDEAQAVRARIAADLSQAAGAEVAVAFGLPPFAGDDDVPCIDALDVEIDGYGPPDAGLLHADPGDLVEETLRSDLLKSNCPVTGQPDWAGVRIAYRGPRIDRAGLLRYIVSFRDHAGFHEQCVEHLFVDLLARCRPQALSVEARYTRRGGLDINPWRATPGLPAPAARRDLRQ

SEQ ID NO: 47019 - protein, 289 aa, Luteimonas sp.
  REGION 1..289: note = tr|A0A518N4D7|A0A518N4D7_9GAMM NADPH-dependent 7-cyano-7-deazaguanine reductase OS=Luteimonas sp. Gr-4; OX = 1176533 GN=queF PE=3 SV=1
MTSELPLGRDVAYPRAYDPALLFPIARDAGRDALGIAGDALPFTGHDRWHAYELSWLDRRGKPVVATATFTVPADSPRLVESKSLKLYLNSLNSERFAGVDDVRARIAADLSAAAGGAVAVVFGLPPVEGGDRRGAERNPCVTRELEGDASPAPISIDGLDVACDEYDAPNPSLLSADAHDRAHELLHSDLLKSNCPVTGQPDWASVRIAYRGPRIDRAGLLRYLVSFREHAEFHEQCVERIFVDLLACCRPEELSVEARYTRRGGLDINPWRATPGLAAPTPARDPRQ

SEQ ID NO: 47020 - protein, 279 aa, Luteimonas sp.
  REGION 1..279: note = tr|A0A290XBA3|A0A290XBA3_9GAMM NADPH-dependent 7-cyano-7-deazaguanine reductase OS=Luteimonas sp. 100111; OX = 2006110 GN=queF PE=3 SV=1
MSSEFDTAAAPPIPLGREVAYPRHYDPGLLFPIARTLGRAELGIAEALPFTGHDRWHAYELGWLDGRGKPVVATATITVPGDSPSLVESKSLKLYLNSLNHTRFDDADAVRTRIAADLSQAAGATVDVSYGLPPMAAAASGEVSIDDLDIEITSYGPPDAALLAADADGDAVVEERLASSLLKSNCPVTGQPDWASLHIAYRGPRIDRASLLRYLVSFRDHAEFHEQCVERVFVDLMARCHPETLSVEARYTRRGGLDINPWRATPAHAAPPARRDERQ

SEQ ID NO: 47021 - protein, 277 aa, unidentified
  source 1..277: note = Luteimonas terrae
  REGION 1..277: note = tr|A0A4R5U922|A0A4R5U922_9GAMM NADPH-dependent 7-cyano-7-deazaguanine reductase OS=Luteimonas terrae; OX = 1530191 GN=queF PE=3 SV=1
MSSHASDAAAPPIPLGREVAYPRHYDPGLLFPIARTLGRAEIGIGDALPFIGHDRWHAYELSWLDGRGKPVVATATITVPGNSPHLVESKSLKLYLNSLNHTRFDTADAVRARVIADLSASAGALVDVVFGLPAMADAAQDGDSIDDLDVEIASYGPPDASLLAADAGDIVEERLQSALLKSNCPVTGQPDWASLHIAYRGPRIDRAALLRYLVSFRDHAEFHEQCVERVFVDLRARCGCTALSVEARYTRRGGLDINPWRATPGHPAPVRLRDERQ

SEQ ID NO: 47022 - protein, 115 aa, unidentified
  source 1..115: note = Luteitalea pratensis
  REGION 1..115: note = tr|A0A143PW03|A0A143PW03_9BACT NADPH-dependent 7-cyano-7-deazaguanine reductase OS=Luteitalea pratensis; OX = 1855912 GN=queF PE=3 SV=1
MASAGIETFPNPRPGRPYEIETRCPEFTSMCPVTGLPDFGEIRITYVPDATCIELKSLKYYLLDFRNKGVFYEALTNQILDDLVASCAPLRMTVVGDFTPRGGIRTTVTATYQKD

SEQ ID NO: 47023 - protein, 114 aa, unidentified
  source 1..114: note = Lutibaculum baratangense
  REGION 1..114: note = tr|V4RGE8|V4RGE8_9RHIZ NADPH-dependent 7-cyano-7-deazaguanine reductase OS=Lutibaculum baratangense AMV1 OX=631454 GN=queF PE=3 SV=1
MRFTAPEFTSLCPITGQPDFAHLVIDYVPGDWLVESKSLKLYLMSFRNHGAFHEDCTVSIGRRLAELLAPQWLRVGGYWYPRGGIPIDVFFQTGRAPGDVWIPDQGVPPYRGRG

SEQ ID NO: 47024 - protein, 126 aa, Lyngbya aestuarii
  REGION 1..126: note = tr|U7QR92|U7QR92_9CYAN NADPH-dependent 7-cyano-7-deazaguanine reductase OS=Lyngbya aestuarii BL J; OX = 1348334 GN=queF PE=3 SV=1
MYGEREIQEGHLITFPNPRVGRRYEVSISLPEFTCKCPFSGYPDFATLHLAYVPNQRVVELKSLKLYINSYRDRYISHEESINQILDDFVGACDPLEVKLVGDFNPRGNVHTCIEVQHQRSDSSSQ

SEQ ID NO: 47025 - protein, 138 aa, Lyngbya confervoides; identical to SEQ ID NO: 46305
  REGION 1..138: note = tr|A0A0C1YPK6|A0A0C1YPK6_9CYAN NADPH-dependent 7-cyano-7-deazaguanine reductase OS=Lyngbya confervoides BDU141951 OX=1574623 GN=queF PE=3 SV=1

SEQ ID NO: 47026 - protein, 147 aa, Lyngbya sp.
  REGION 1..147: note = tr|A0YR56|A0YR56_LYNSP NADPH-dependent 7-cyano-7-deazaguanine reductase OS=Lyngbya sp. (strain PCC 8106) OX=313612 GN=queF PE=3 SV=1
MSNLPAEQEQNVFPSSEPEELMYGEREIQEGHLITFPNPRVGRRYEVSISLPEFTCKCPFSGYPDFATLHLTYVPNQRVVELKSLKLYINSYRDRYISHEESINQILDDFVGACDPLEVKLVGDFNPRGNVHTCIEVQHQRSESSSQ

SEQ ID NO: 47027 - protein, 166 aa, unidentified
  source 1..166: note = Lysinibacillus acetophenoni
  REGION 1..166: note = tr|A0A285U9J6|A0A285U9J6_9BACI NADPH-dependent 7-cyano-7-deazaguanine reductase OS=Lysinibacillus acetophenoni OX=614649 GN=queF PE=3 SV=1
MSGRSHEEGLKDLTLLGNQGTKYAFNYAPEVLESVDNLHSNRDYFVKFNCPEFTSLCPLTNQPDFATMYISYIPDKKIVESKSLKLYLFSFRNHGDFHEDCVNIIMNDLIQLLDPRYIEVWGKFTPRGGISIDPWCNYGKPGTKYEEMANYRLMNHDLNPEKIDNR

SEQ ID NO: 47028 - protein, 166 aa, Lysinibacillus boronitolerans
  REGION 1..166: note = tr|A0A0A3JE04|A0A0A3JE04_9BACI NADPH-dependent 7-cyano-7-deazaguanine reductase OS=Lysinibacillus boronitolerans JCM 21713 = 10a = NBRC 103108 OX=1294264; GN = queF PE= 3 SV=1
MSGRSHEEGLKDLTLLGNQGTKYSYDYAPEVLEAVDNLHANRDYFVKFNCPEFTSLCPLTNQPDFATMYISYIPDKKIVESKSLKLYLFSFRNHGDFHEDCVNIIMNDLITLLDPRYIEVWGKFTPRGGISIDPWCNYGKPGTKYEEIANYRLMNHDLNPEKIDNR

SEQ ID NO: 47029 - protein, 166 aa, unidentified
  source 1..166: note = Lysinibacillus chungkukjangi
  REGION 1..166: note = tr|A0A318TSF4|A0A318TSF4_9BACI NADPH-dependent 7-cyano-7-deazaguanine reductase OS=Lysinibacillus chungkukjangi OX=1202712 GN=queF PE=3 SV=1
MSGRKNEEGLNDLKLLGNQNTQYPSDYAPEVLEAVDSLHSNRDYFVKFNCPEFTSLCPITGQPDFATMYISYIPDQKIVESKSLKLYLFSFRNHGDFHEDCVNIIMNDLISLLDPRYIEVWGKFTPRGGISIDPWCNYGKPGTKYEEMANYRLMNHDLNPEKVDNR

SEQ ID NO: 47030 - protein, 166 aa, unidentified
  source 1..166: note = Lysinibacillus composti
  REGION 1..166: note = tr|A0A3N9U6Y3|A0A3N9U6Y3_9BACI NADPH-dependent 7-cyano-7-deazaguanine reductase OS=Lysinibacillus composti OX=720633 GN=queF PE=3 SV=1
MSGRNHEEGLKDLTLLGNQNTKYSFDYAPEVLEAVDNLHSNRDYFVKFNCPEFTSLCPLTHQPDFATMYISYIPDKKIVESKSLKLYLFSFRNHGDFHEDCVNIIMNDLIKLLDPRYIEVWGKFTPRGGISIDPWCNYGKPGTKYEEIANYRLMNHDLNPEKIDNR

SEQ ID NO: 47031 - protein, 166 aa, unidentified
  source 1..166: note = Lysinibacillus endophyticus
  REGION 1..166: note = tr|A0A494YYL1|A0A494YYL1_9BACI NADPH-dependent 7-cyano-7-deazaguanine reductase OS=Lysinibacillus endophyticus OX=1978490 GN=queF PE=3 SV=1
MSGRGHEEGLKDLTLLGNQNTKYAFEYAPEVLEAVDNLHSNRDYFVKFNCPEFTSLCPLTNQPDFATMYISYIPDKKIVESKSLKLYLFSFRNHGDFHEDCVNIIMNDLIKLLDPRYIEVWGKFTPRGGISIDPWCNYGRPGTKYEEMANYRLMNHDLNPEKIDNR

SEQ ID NO: 47032 - protein, 166 aa, Lysinibacillus fusiformis
  REGION 1..166: note = tr|A0A1E4R814|A0A1E4R814_9BACI NADPH-dependent 7-cyano-7-deazaguanine reductase OS=Lysinibacillus fusiformis OX=28031 GN=queF PE=3 SV=1
MSGRSHEEGLKDLTLLGNQGTNYSFEYAPEVLEAVDNLHSNRDYFVKFNCPEFTSLCPLTNQPDFATMYISYIPDKKIVESKSLKLYLFSFRNHGDFHEDCVNIIMNDLITLLDPRYIEVWGKFTPRGGISIDPWCNYGKPGTKYEEIANYRLMNHDLNPEKIDNR

SEQ ID NO: 47033 - protein, 166 aa, Lysinibacillus fusiformis
  REGION 1..166: note = tr|D7WZC7|D7WZC7_9BACI NADPH-dependent 7-cyano-7-deazaguanine reductase OS=Lysinibacillus fusiformis ZC1 OX=714961 GN=queF PE=3 SV=1
MSGRSHEEGLKDLTLLGNQGTKYSYDYAPEVLEAVDNLHANRDYFVKFNCPEFTSLCPLTNQPDFATMYISYIPDKKIVESKSLKLYLFSFRNHGDFHEDCVNIIMNDLIALLDPRYIEVWGKFTPRGGISIDPWCNYGKPGTKYEEIANYRLMNHDLNPEKIDNR

SEQ ID NO: 47034 - protein, 166 aa, unidentified
  source 1..166: note = Lysinibacillus halotolerans
  REGION 1..166: note = tr|A0A3M8H405|A0A3M8H405_9BACI NADPH-dependent 7-cyano-7-deazaguanine reductase OS=Lysinibacillus halotolerans OX=1368476 GN=queF PE=3 SV=1
MSGRNHEEGLKDLTLLGNQNTQYSFDYAPEVLEAVDNLHSNRDYFVKFNCPEFTSLCPLTHQPDFATMYISYIPDKKIVESKSLKLYLFSFRNHGDFHEDCVNIIMNDLIKLLDPRYIEVWGKFTPRGGISIDPWCNYGKPGTKYEEMAHYRLMNHDLNPEKIDNR

SEQ ID NO: 47035 - protein, 166 aa, Lysinibacillus macroides
  REGION 1..166: note = tr|A0A0N0CUZ2|A0A0N0CUZ2_9BACI NADPH-dependent 7-cyano-7-deazaguanine reductase OS=Lysinibacillus macroides OX=33935 GN=queF PE=3 SV=1
MSSRTEQEGLGDLTLLGNQQTKYPVQYAPEVLEAVESLHTERDYFVKFNCPEFTSLCPITQQPDFATMYISYIPDKKLVESKSLKLYLFSFRNHGDFHEDCVNIIMNDLIKLLDPRYIEVWGKFTPRGGISIDPWCNYGRSETKYEKIADYRLMNHDLYPEKIDNR

SEQ ID NO: 47036 - protein, 166 aa, unidentified
  source 1..166: note = Lysinibacillus manganicus
  REGION 1..166: note = tr|A0A0A3IRY9|A0A0A3IRY9_9BACI NADPH-dependent 7-cyano-7-deazaguanine reductase OS=Lysinibacillus manganicus DSM 26584 OX=1384049 GN=queF PE=3 SV=1
MSGRSHEDGLKDLTLLGNQGTNYAFNYSPEVLESVDNLHSNRDYFVKFNCPEFTSLCPLTNQPDFATMYISYIPDKKIVESKSLKLYLFSFRNHGDFHEDCVNIIMNDLIKLLDPRYIEVWGKFTPRGGISIDPWCNYGRPGTKYEEIANYRLMNHDLNPEKIDNR

SEQ ID NO: 47037 - protein, 166 aa, unidentified
  source 1..166: note = Lysinibacillus massiliensis
  REGION 1..166: note = tr|A0A0A3J1W6|A0A0A3J1W6_9BACI NADPH-dependent 7-cyano-7-deazaguanine reductase OS=Lysinibacillus massiliensis 4400831 = CIP 108448 = CCUG 49529 OX=1211035; GN = queF P E=3 SV=1
MSGRKNTEGLEDLTLLGNQNTQYASDYAPEVLESVDSLHSNRDYFVKFNCPEFTSLCPITGQPDFATIYISYIPDKKIVESKSLKLYLFSFRNHGDFHEDCVNIIMNDLIKLLDPRYIEVWGKFTPRGGISIDPWCNYGKPGTKFEEMANYRLMNHDLNPEKVDNR

SEQ ID NO: 47038 - protein, 166 aa, unidentified
  source 1..166: note = Lysinibacillus odysseyi
  REGION 1..166: note = tr|A0A0A3IIA8|A0A0A3IIA8_9BACI NADPH-dependent 7-cyano-7-deazaguanine reductase OS=Lysinibacillus odysseyi 34hs-1 = NBRC 100172 OX=1220589 GN=queF PE=3 SV=1
MSGRSQQEGLEELTLLGNQNVKYSFDYAPEVLEAVDNLHTNRDYFVKFNCPEFTSLCPITSQPDFATMYISYIPDKKIVESKSLKLYLFSFRNHGDFHEDCVNIIMDDLIKLMDPRYIEVWGKFTPRGGISIDPWCNYGRPGTKYEEMAQYRLMNHDLNPETIDNR

SEQ ID NO: 47039 - protein, 165 aa, unidentified
  source 1..165: note = Lysinibacillus saudimassiliensis
  REGION 1..165: note = tr|A0A078MKG8|A0A078MKG8_9BACI NADPH-dependent 7-cyano-7-deazaguanine reductase OS=Lysinibacillus saudimassiliensis OX=1461583 GN=queF PE=3 SV=1
MSGRSEENLEGLTLLGNQNTNYLFEYAPEVLEAVPNLHTGRDFFVKFNCPEFTSLCPMTGQPDFATMYLSFIPDELLVESKSLKLYLFSFRNHGDFHEDCVNIIMNDLIQLINPRYIEVWGKFTPRGGLSIDPWCNYGRPGTKYEKMAEHRLMNHDMYPEKIDNR

SEQ ID NO: 47040 - protein, 166 aa, unidentified
  source 1..166: note = Lysinibacillus sinduriensis
  REGION 1..166: note = tr|A0A0A3IHI0|A0A0A3IHI0_9BACI NADPH-dependent 7-cyano-7-deazaguanine reductase OS=Lysinibacillus sinduriensis BLB-1 = JCM 15800 OX=1384057 GN=queF PE=3 SV=1
MSGRKDTEGLNDLTLLGNQKTQYATDYAPEVLEAVESLHSNRDYFVKFNCPEFTSLCPITGQPDFATMYISYIPDQKIVESKSLKLYLFSFRNHGDFHEDCVNIIMNDLIKLLDPRYIEVWGKFTPRGGISIDPWCNYGKPGTKYEEMADYRLMNHDLYPEKIDNR

SEQ ID NO: 47041 - protein, 165 aa, Lysinibacillus sp.; identical to SEQ ID NO: 44743
  REGION 1..165: note = tr|A0A544UPN6|A0A544UPN6_9BACI NADPH-dependent 7-cyano-7-deazaguanine reductase OS=Lysinibacillus sp. SDF0063 OX=2133753 GN=queF PE=3 SV=1

SEQ ID NO: 47042 - protein, 166 aa, Lysinibacillus sp.
  REGION 1..166: note = tr|A0A4R7U6K1|A0A4R7U6K1_9BACI NADPH-dependent 7-cyano-7-deazaguanine reductase OS=Lysinibacillus sp. YR326 OX=1855296 GN=queF PE=3 SV=1
MAGRNEEQGLQDLTLLGNQNTKYLFEYSPEILEAVDNLHTKNDFFVKFNCPEFTSLCPMTGQPDFATMYISFIPDKKLVESKSLKLYLFSFRNHGDFHEDCVNIIMNDLIKLIEPRYIEVWGKFTPRGGLSIDPWCNYGRPGTKYEKMAEHRLMNHDMYPEKVDNR

SEQ ID NO: 47043 - protein, 166 aa, Lysinibacillus sphaericus
  REGION 1..166: note = tr|R7ZDQ6|R7ZDQ6_LYSSH NADPH-dependent 7-cyano-7-deazaguanine reductase OS=Lysinibacillus sphaericus OT4b.31 OX=1285586 GN=queF PE=3 SV=1
MSGRSHEEGLKDLTLLGNQGTQYSYEYAPEVLEAVDNLHSNRDYFVKFNCPEFTSLCPLTNQPDFATMYISYIPDKKIVESKSLKLYLFSFRNHGDFHEDCVNIIMNDLIKLLDPRYIEVWGKFTPRGGISIDPWCNYGKPETKYEEIANYRLMNHDLNPEKIDNR

SEQ ID NO: 47044 - protein, 162 aa, Lysinibacillus sphaericus
  REGION 1..162: note = tr|A0A1D8JF41|A0A1D8JF41_LYSSH NADPH-dependent 7-cyano-7-deazaguanine reductase OS=Lysinibacillus sphaericus OX=1421 GN=queF PE=3 SV=1
MRKSDTKDLTLLGNQETTYNYEYDPDILETFNNQHTENDYFVKFNIPEFTSLCPMTGQPDFATIYISYMPEIKMVESKSLKLYIGSFRNHDGFHEDCANTIMKDLIKLMDPKYIEVWAKFTPRGGISIDPYCNYGKPGTIYEDMARERMFKHDMYPETVDNR

SEQ ID NO: 47045 - protein, 166 aa, unidentified
  source 1..166: note = Lysinibacillus telephonicus
  REGION 1..166: note = tr|A0A431UIT2|A0A431UIT2_9BACI NADPH-dependent 7-cyano-7-deazaguanine reductase OS=Lysinibacillus telephonicus OX=1714840 GN=queF PE=3 SV=1
MSGRSHEEGLKDLTLLGNQGTKYLFEYAPEVLEAVDNLHSNRDYFVKFNCPEFTSLCPLTHQPDFATIYISYIPDKKIVESKSLKLYLFSFRNHGDFHEDCVNIIMNDLIKLLEPRYIEVWGKFTPRGGISIDPWCNYGKPGTKYEEMANYRLMNHDLNPEKIDNR

SEQ ID NO: 47046 - protein, 166 aa, Lysinibacillus xylanilyticus; identical to SEQ ID NO: 47042
  REGION 1..166: note = tr|A0A0K9F6C9|A0A0K9F6C9_9BACI NADPH-dependent 7-cyano-7-deazaguanine reductase OS=Lysinibacillus xylanilyticus OX=582475 GN=queF PE=3 SV=1

SEQ ID NO: 47047 - protein, 166 aa, unidentified
  source 1..166: note = Lysinibacillus xyleni
  REGION 1..166: note = tr|A0A285SLG9|A0A285SLG9_9BACI NADPH-dependent 7-cyano-7-deazaguanine reductase OS=Lysinibacillus xyleni; OX = 614648 GN=queF PE=3 SV=1
MSGRGHEEGLKDLTLLGNQNTKYAFNYAPEVLEAVDNLHSNRDYFVKFNCPEFTSLCPLTNQPDFATMYISYIPDKKIVESKSLKLYLFSFRNHGDFHEDCVNIIMNDLIKLLDCRYIEVWGKFTPRGGISIDPWCNYGRPGTKYEEMANYRLMNHDLNPEKIDNR

SEQ ID NO: 47048 - protein, 274 aa, unidentified
  source 1..274: note = Lysobacter aestuarii
  REGION 1..274: note = tr|A0A508AN04|A0A508AN04_9GAMM NADPH-dependent 7-cyano-7-deazaguanine reductase OS=Lysobacter aestuarii; OX = 1706195 GN=queF PE=3 SV=1
MDPVSNPPSLPLGRHVDYPRHYDAGLLFPIARATGRRAIGLDGDALPFVGVDRWHAYELSWLDPRGKPCMATATFEVPADSPCLVESKSLKLYLNSFNATAFDDAESVRERIASDLSATAGAPVAVAFGLPPLVADGEGEDIDAIEVEVDAYGPPEAGLLRADAGHEVAETLRSGLLKSNCPVTGQPDWATVVIAYRGPRLDRAALLRYLVSFRDHAEFHEQCVERIFADLLARTRPASLSVEARYTRRGGLDINPWRATPGRERPTATRDTRQ

SEQ ID NO: 47049 - protein, 270 aa, Lysobacter antibioticus
  REGION 1..270: note = tr|A0A0S2FI55|A0A0S2FI55_9GAMM NADPH-dependent 7-cyano-7-deazaguanine reductase OS=Lysobacter antibioticus OX=84531 GN=queF PE=3 SV=1
MTTHDLPLGRHVDYPREYDASLLFPIARSLGRAHIGLADDALPFVGIDRWHAYELSWLDARGKPRVGTATLSVPATSPQLIESKSLKLYLNSFNATRFDDDAVVLATIARDLSAAAGAPVEVAFGLPPIDTADGVESIDELDVAIDDYGPPNAEHLAADAGEIVEETLGSALLKSNCPVTGQPDWARVVIAYRGPKLDRAGLLRYLVSFRDHAEFHEQCVERIHSDLSRRCQPQWLSVEARYTRRGGLDINPWRGSPGRARPSVGRDERQ

SEQ ID NO: 47050 - protein, 273 aa, unidentified
  source 1..273: note = Lysobacter arseniciresistens
  REGION 1..273: note = tr|A0A0A0F0J4|A0A0A0F0J4_9GAMM NADPH-dependent 7-cyano-7-deazaguanine reductase OS=Lysobacter arseniciresistens ZS79 OX=913325 GN=queF PE=3 SV=1
MTSSDLPLGRQVDYPHGYDASLLFPIARSLGRGEIGLGDAAALPFAGHDRWHAYELGWLDRLGKPRVATATLTVPADSPNLVESKSLKLYLNSFNASRFDDDDAVRERIADDLSRVAGAPVAVAFGLPGFDRADDARVHCIDDLPVTIDHYGPPRADFLQADATGIVEETLSSALLKSNCPVTGQPDWARVLVAYRGPRIDRAGLLRYLVSFRDHCEFHEQCVERIFIDLMQRVAPDQLSVEARYTRRGGLDINPWRATPGTAAPAAGRDLRQ

SEQ ID NO: 47051 - protein, 270 aa, Lysobacter capsici
  REGION 1..270: note = tr|A0A108UAE3|A0A108UAE3_9GAMM NADPH-dependent 7-cyano-7-deazaguanine reductase OS=Lysobacter capsici AZ78 OX=1444315 GN=queF PE=3 SV=1
MTSHDLPLGRHVDYPREYDASLLFPIERSLGRAHLGLRDDALPFVGYDRWHAYELSWLDRRGKPRVGTATVSVPATSPHLIESKSLKLYLNSFNATAFDDEAAVLTTIARDLSAAAGATVQVASGLPAIGADEPSESIDELDVAIDDYGPPKAEHLAIESDTLVEERLSSGLLKSNCPVTGQPDWARVTLAYRGPKLDRAALLRYLISFRDHAEFHEQCVERIHADLSQRTAPQWLSVEARYTRRGGLDINPWRGSPGLSPPRAGRDERQ

SEQ ID NO: 47052 - protein, 270 aa, Lysobacter capsici
  REGION 1..270: note = tr|A0A291A815|A0A291A815_9GAMM NADPH-dependent 7-cyano-7-deazaguanine reductase OS=Lysobacter capsici; OX = 435897 GN=queF PE=3 SV=1
MTSHDLPLGRHVDYPREYDASLLFPIERALGRAHLGLRDDALPFVGYDRWHAYELSWLDRRGKPRVGTATVSVPATSPHLIESKSLKLYLNSFNATAFDDEAAVLTTIARDLSAAAGAAVQVASGLPAIGADEPSESIDELDVAIDDYGPPRAEHLAIESDTLVEERLSSALLKSNCPVTGQPDWGRVTLAYRGPKLDRAALLRYLISFRDHAEFHEQCVERIHSDLSQRTAPQWLSVEARYTRRGGLDINPWRGSPGLSPPRAGRDERQ

SEQ ID NO: 47053 - protein, 271 aa, Lysobacter concretionis
  REGION 1..271: note = tr|A0A0A0EMS3|A0A0A0EMS3_9GAMM NADPH-dependent 7-cyano-7-deazaguanine reductase OS=Lysobacter concretionis Ko07 = DSM 16239 OX=1122185 GN=queF PE=3 SV=1
MPLGRHVDYPREYDASLLFPIARALGRNEIGLAGAGPHDAGLPFIGSDRWHAYELGWLDGRGKPRVATATLSIPAASPHLIESKSLKLYLNSFNATRFDDDEAVRARIAADLAQVAGSAVEVVFGLPPIDEQTEMAESLDELPIAFDHYGPPQPDFLQSDADEVVEESLTSALLKSNCPVTGQPDWARVRIDYRGPRLDRAGLLRYLVSFRDHAGFHEQCVEQIFHDLMQRARPQHLSVQARYTRRGGLDINPWRATPGFAAPAAGRDLRQ

SEQ ID NO: 47054 - protein, 278 aa, Lysobacter daejeonensis
  REGION 1..278: note = tr|A0A0A0EQF7|A0A0A0EQF7_9GAMM NADPH-dependent 7-cyano-7-deazaguanine reductase OS=Lysobacter daejeonensis GH1-9 OX=1385517 GN=queF PE=3 SV=1
MTTQDNSVAGSALGRHVDYPQGYDPGLLYPIARTLGRHAIGLRDAALPFIGHDRWHAYELSWLDAKGKPQVATATFEVPAEAPNLIESKSLKLYLNSFNASRFDGAEAVLAHIAEDLSRVAGAPVRVAFGLPPMVDAGDAEDAISIDALDVAIDHYGPPRTAFIAIDADGVVEETLASALLKSNCPVTGQPDWAHVRIAYRGPRLDRVGLLRYLVSFRDHAEFHEQCVERIFSDLLVHARPERLSVEARYTRRGGLDINPWRATPNCVTAVARREARQ

SEQ ID NO: 47055 - protein, 269 aa, Lysobacter defluvii
  REGION 1..269: note = tr|A0A0A0M9X4|A0A0A0M9X4_9GAMM NADPH-dependent 7-cyano-7-deazaguanine reductase OS=Lysobacter defluvii IMMIB APB-9 = DSM 18482 OX=1385515 GN=queF PE=3 SV=1
MSSDLPLGRQVEYPREYDASLLFPIPRANGRDEIGLAGAALPFHGHDRWHAYELGWLDLRGKPVVATATLTVPATSPRLVESKSLKLYLNSFNASRFADPEDVRARIAADLSTCAGAPVTVTFGLPGFDDTAGGTCIDGLDVAIDRYGPPDATLLSADAASVVEETLTSNLLKSNCPVTGQPDWARVSISYRGPRLDREALLRYLVSFRDHCEFHEQCVERIFLDLVRVAAPEWLSVEARYTRRGGLDINPWRASPGVPPPAAGRDLRQ

SEQ ID NO: 47056 - protein, 271 aa, Lysobacter dokdonensis
  REGION 1..271: note = tr|A0A0A2WDU9|A0A0A2WDU9_9GAMM NADPH-dependent 7-cyano-7-deazaguanine reductase OS=Lysobacter dokdonensis DS-58 OX=1300345 GN=queF PE=3 SV=1
MTSSELPLGRAVDYPRHYDPGLLFPIPRAVGRSALSIAGDTLPFVGHDRWHAYELSWLDGRGKPMVATATFTVPADSPHLVESKSLKLYLNSFNSSRFDSADDVRARIASDLARSAGAPVDVHFGLPPMIGDEDDVVDLDALAIDIDDYGPPNAGHLACDAGDIVEARVRSALLKSNCPVTGQPDWAEVRIEYRGPRIDAAGLLRYLVSFRDHAEFHEQCVERIHTDLVARCAPEQLSVEALYTRRGGLDINPWRATPGSAPPLAVRALRQ

SEQ ID NO: 47057 - protein, 270 aa, Lysobacter enzymogenes
  REGION 1..270: note = tr|A0A0S2DQJ4|A0A0S2DQJ4_LYSEN NADPH-dependent 7-cyano-7-deazaguanine reductase OS=Lysobacter enzymogenes; OX = 69 GN=queF PE=3 SV=1
MTAHELPLGRHVDYPREYDASLLFPIARALGREHIGVDDAAPPFVGHDRWHAYELSWLDGRGKPRVATATVSVPATSPHLIESKSLKLYLNSFNSSRFDSAQAVLDTIAADLSAAAGAPVAVVFGLPPIDGDGTAESIDGLDVAIDDYGPPNAAHLSADAGEIVEETLNSALLKSNCPVTGQPDWARVVIAYRGPRLDRAGLLRYLVSFRDHAEFHEQCVERIHADLTRIAKPQWLSVEARYTRRGGLDINPWRGSPGLAAPAAGRDERQ

SEQ ID NO: 47058 - protein, 270 aa, Lysobacter enzymogenes
  REGION 1..270: note = tr|A0A1H3HRL5|A0A1H3HRL5_LYSEN NADPH-dependent 7-cyano-7-deazaguanine reductase OS=Lysobacter enzymogenes; OX = 69 GN=queF PE=3 SV=1
MTAHELPLGRHVDYPREYDASLLFPIARALGREHIGVDDAAPPFVGHDRWHAYELSWLDPRGKPQVATATVSVPATSPHLIESKSLKLYLNSFNSSRFDSAQAVLHTIAADLSAAAGAPVAVAFGLPPIGGDGAVESIDGLDVAIDDYGPPNAGHLSADAGEIVEEALSSALLKSNCPVTGQPDWARVVIAYRGPRLDRAGLLRYLVSFRDHAEFHEQCVERIHADLTRIAAPQWLSVEARYTRRGGLDINPWRGSPGLDAPAAGRDERQ

SEQ ID NO: 47059 - protein, 270 aa, Lysobacter gummosus
  REGION 1..270: note = tr|A0A0S2GEH3|A0A0S2GEH3_9GAMM NADPH-dependent 7-cyano-7-deazaguanine reductase OS=Lysobacter gummosus; OX = 262324 GN=queF PE=3 SV=1
MTTHDLPLGRHVDYPREYDASLLFPIARSLGRAHIGLSDDALPFTGFDRWNAYELSWLDARGKPRVATATVTVPAGSPHLIESKSLKLYLNSFNSTRFDGEDIVRATIAADLSAAAGAPVEVAFGLPSIGNDDGAESIDELDVAIDDYGPPNAGHLRADPGAIVEETLTSALLKSNCPVTGQPDWARVIVAYRGPRLDRAALLRYLISFRDHAEFHEQCVERIHSDLQTHAQPQWLSVQARYTRRGGLDINPWRGSHGLAPPPAGRDERQ

SEQ ID NO: 47060 - protein, 271 aa, unidentified
  source 1..271: note = Lysobacter lycopersici
  REGION 1..271: note = tr|A0A516V6H9|A0A516V6H9_9GAMM NADPH-dependent 7-cyano-7-deazaguanine reductase OS=Lysobacter lycopersici; OX = 1324796 GN=queF PE=3 SV=1
MSTPQDSSLGRHVDYPREYDASLLFPIARSLGRDALGIRADALPFAGFDRWHAYELSWLDARGKPRVATATFEVPADSPNLVESKSLKLYLNSFNASRFDGDDAVRDTIARDLSNAAGAPVSVAFGLPPLRDDDAAIDIDAQDIAIESYGPPDASLLASDASSDANETLSSALLKSNCPVTGQPDWASVRIAYRGPRIDRAGLLRYLVSFRDHAEFHEQCVERIFVDVLAHCRPHALSVEARYTRRGGLDINPWRATPGFIAPTPGRDLRQ

SEQ ID NO: 47061 - protein, 274 aa, unidentified
  source 1..274: note = Lysobacter maris
  REGION 1..274: note = tr|A0A2U9T0Y0|A0A2U9T0Y0_9GAMM NADPH-dependent 7-cyano-7-deazaguanine reductase OS=Lysobacter maris; OX = 1605891 GN=queF PE=3 SV=1
MNDSPRNDGLPLGRHVDYPRHYDAGLLFPIARSLGRHEIDVDDAALPFVGIDRWHAYELSWLDARGKPAMATATVQVPANSPFLIESKSLKLYLNSFNATAFDDAEAVRLRIATDLSAAAGAPVQVAFGLPPATPEHEGESIDGLDVAIEHYGPPRAALLAADAGRIVEEVLCSGLLKSNCPVTGQPDWATVVIGYTGPQLDRAALLRYLVSFRDHAEFHEQCVERIFTDLLARAAPTALSVEARYTRRGGLDINPWRATPGHPRPIETRDTRQ

SEQ ID NO: 47062 - protein, 274 aa, unidentified
  source 1..274: note = Lysobacter maris
  REGION 1..274: note = tr|A0A508B865|A0A508B865_9GAMM NADPH-dependent 7-cyano-7-deazaguanine reductase OS=Lysobacter maris; OX = 1605891 GN=queF PE=3 SV=1
MNDSARNAGLPLGRHVDYPRHYDAGLLFPIARSLGRHEIGVDDAALPFVGVDRWHAYELSWLDARGKPAMATATVQVPADSPFLIESKSLKLYLNSFNATAFDDAEAVRLRIATDLSAAAGAPVQVAFGLPPATPEHEGESIDGLDVAIEHYGPPRAALLAADAGRIVEEVLCSGLLKSNCPVTGQPDWATVVIGYTGPQLDRAALLRYLVSFRDHAEFHEQCVERIFTDLLARAAPTALSVEARYTRRGGLDINPWRATPGHPRPIETRDTRQ

SEQ ID NO: 47063 - protein, 273 aa, unidentified
  source 1..273: note = Lysobacter pythonis
  REGION 1..273: note = tr|A0A3M2I0V5|A0A3M2I0V5_9GAMM NADPH-dependent 7-cyano-7-deazaguanine reductase OS=Lysobacter pythonis; OX = 2483112 GN=queF PE=3 SV=1
MSTAHNSPDTSQLGRETAYPEHYDARLLFPIPRARGRAALGIDGAPPFVGFDAWNAYELSWLDARGKPRVAVARFTVPADSPNLIESKSFKLYLNSFNRERVEDDTALRARIETDLSTAAAAPVTMHPALPPMGEAGGECIDGLDIAIDDYGPPNAGHLSAADDETVEEILSSHLLKSNCPVTGQPDWASVVIAYRGPRIAREGLLRYLVSFRDHREFHEQCVERIFIDLTARCRPRSLSVEACYTRRGGLDINPWRATPDCAAPPPRRLPRQ

SEQ ID NO: 47064 - protein, 276 aa, Lysobacter ruishenii
  REGION 1..276: note = tr|A0A562M0U1|A0A562M0U1_9GAMM NADPH-dependent 7-cyano-7-deazaguanine reductase OS=Lysobacter ruishenii; OX = 686800 GN=queF PE=3 SV=1
MTTQDNSVAGSALGRHVDYPQGYDPGLLYPIARTLGRHAIGLREEALPFIGHDRWHAYELSWLDAKGKPVVATATFEVPADAPNLVESKSLKLYLNSFNASRFDDADAVRASIAGDLSRVAGAPVRVAFGLPPMATGDDDAVSIDALDVAIDHYGPPRADFIRIDADDVVEETLASALLKSNCPVTGQPDWAHVRIAYRGPRLDRAGLLRYLVSFRDHAEFHEQCVERVFADVLAQARPERLSVEARYTRRGGLDINPWRATPGSVTPVARREDRQ

SEQ ID NO: 47065 - protein, 270 aa, unidentified
  source 1..270: note = Lysobacter silvestris
  REGION 1..270: note = tr|A0A2K1Q1A2|A0A2K1Q1A2_9GAMM NADPH-dependent 7-cyano-7-deazaguanine reductase OS=Lysobacter silvestris; OX = 1645665 GN=queF PE=3 SV=1
MHTPEDSQLGREVDYPRHYDPALLFPIPRTQGRDELGIRADALPFIGHDRWQGYELGWLDARGKPVVATATFEVPATSPNLVESKSFKLYLNSFNAHRIESPEELQRILERDLANVAGAPVRMRFGVPPLREEDGGECIDGLDIAIDHYGPPDPALLICAGADVEEALVSHLLKSNCPVTGQPDWATLQIRYLGPRIDRAGLLRYIVGFRDQREFHEQCVERIFVDVLARCRPQVLSVEARYTRRGGLDINPWRATPGSEPPEVWRTPRQ

SEQ ID NO: 47066 - protein, 273 aa, Lysobacter soli
  REGION 1..273: note = tr|A0A3D8VA93|A0A3D8VA93_9GAMM NADPH-dependent 7-cyano-7-deazaguanine reductase OS=Lysobacter soli; OX = 453783 GN=queF PE=3 SV=1
MTHDLPLGRHVDYPREYDASLLFPIARSLGRDHIGIASGELPFIGVDRWNAYELSWLDLRGKPRVGTATITVPATSPNLVESKSLKLYLNSFNAARFDSDADVHARIVEDLTRVAGVPVDVRFGLPPTDEAAPDNAVLDCIDSLDVEIHDYGPPNADHLSADASRVVTETLTSSLLKSNCPVTGQPDWARIVIDYHGPKLDRAGLLRYVVSFRDHAEFHEQCVERVFVDLIARTGAQRLSVEARYTRRGGLDINPWRATPGIERPAPGRDERQ

SEQ ID NO: 47067 - protein, 268 aa, Lysobacter sp.
  REGION 1..268: note = tr|A0A0Q9ECU0|A0A0Q9ECU0_9GAMM NADPH-dependent 7-cyano-7-deazaguanine reductase OS=Lysobacter sp. Root96; OX = 1736612 GN=queF PE=3 SV=1
MTQELPLGRHVDYPREYDPALLFPIARALGRSQIGLSDGALPFVGLDRWHAYELSWLDARGKPHMATATLTVPADSPHLIESKSLKLYLNSYNASRFDDAETVRARIAADLSQAAGAGVEVAFGLPPMRDSAAESLDGLEVAIDDYGPPNAAHLAADPAMVVEETLSSALLKSNCPVTGQPDWARVDIAYRGPRLDRAGLLRYLVSFRDHAEFHEQCVERIFADLLRAAAPQALSVEARYTRRGGLDINPWRATAGFSRPAAQRDERQ

SEQ ID NO: 47068 - protein, 281 aa, Lysobacter sp.
  REGION 1..281: note = tr|A0A0D0S4W2|A0A0D0S4W2_9GAMM NADPH-dependent 7-cyano-7-deazaguanine reductase OS=Lysobacter sp. A03; OX = 1199154 GN=queF PE=3 SV=1
MTASDPTAAARAGSDLPLGRSVAYPRSYDASLLFPIARALGRTPLGVHADALLFVGNDRWHAYELGWLDGRGKPRVATATITVPASSPHLIESKSLKLYLNSFNATAFTSDEAVLTRMVADLSRVAGSPVEVAFGLPAMDEAHDGAILIDTLDIAIDHYGPPEPAFIAADPAQLVTETLTSELLKSNCPVTGQPDWARLVVRYHGPQLDRAGLLRYLVSFRDHAGFHEQCVEQVFCDLMRHACPTQLSVEARYTRRGGLDINPWRATPGCPAPQPGRDLRQ

SEQ ID NO: 47069 - protein, 269 aa, Lysobacter spongiicola
  REGION 1..269: note = tr|A0A1T4SDI5|A0A1T4SDI5_9GAMM NADPH-dependent 7-cyano-7-deazaguanine reductase OS=Lysobacter spongiicola DSM 21749 OX=1122188 GN=queF PE=3 SV=1
MTTNDLPLGRHVEYPREYDPSLLFPIERALGRGELGIDGGALPFIGHDRWHAYELGWLDTRGKPRVATATLTVPADSPRLVESKSLKLYLNSFNASRFNDDAQVLERMAADLSAVAGAPVQVAFGLPDFDPGEAACIDGTAVSIDHYGPPHAGFLAADTDDVVEEVLSSALLKSNCPVTGQPDWARLVIDYRGPRLDRAALLRYLVSFRDHCEFHEQCVERVFTDLMARARPARLSVEARYTRRGGLDINPWRATPGTVAPRAGRDLRQ

SEQ ID NO: 47070 - protein, 273 aa, unidentified
  source 1..273: note = Lysobacter tolerans
  REGION 1..273: note = tr|A0A1N6S6I8|A0A1N6S6I8_9GAMM NADPH-dependent 7-cyano-7-deazaguanine reductase OS=Lysobacter tolerans; OX = 1604334 GN=queF PE=3 SV=1
MGNFNTPADSQLGRETAYPDRYDPALLFPIPRAAARAQIGVDDQALPFTGHDGWNVYELSWLDLRGKPQVAVGRLTVPADSPHLIESKSLKLYLNSFNSERLADAESLQARIERDLSATAGAPVSMVFGLPGMGVIAGENIDFVDVDINEYGPPNARLLQADDSSHVNETLVSDLLKSNCPVTGQPDWATLSIDYRGPRIEREGLLKYLASYRDYREFHEQCVERIFIDLMTHCRLQSLSVQANYTRRGGVDINPWRGTPDRLPPPDLRVLRQ

SEQ ID NO: 47071 - protein, 150 aa, unidentified
  source 1..150: note = Macellibacteroides sp.
  REGION 1..150: note = tr|A0A1C2BXP1|A0A1C2BXP1_9PORP NADPH-dependent 7-cyano-7-deazaguanine reductase OS=Macellibacteroides sp. HH-ZS OX=1857568 GN=queF PE=3 SV=1
MDEKELSLLGNKTVYKSDYAPEVLEAFTNKHPDNDYWVRFNCPEFTSLCPITGQPDFATILIDYIPDVKMVESKSLKLYLFSFRNHGDFHEDCVNIIMKDLIKLMDPKYIEVTGIFTPRGGISIHPYCNYGRKGTKFEELAEKRLFAHNS

SEQ ID NO: 47072 - protein, 165 aa, unidentified
  source 1..165: note = Macrococcus bohemicus
  REGION 1..165: note = tr|A0A328A5C5|A0A328A5C5_9STAP NADPH-dependent 7-cyano-7-deazaguanine reductase OS=Macrococcus bohemicus; OX = 1903056 GN=queF PE=3 SV=1
MTGRQKEELQDITLLGNQNNKYLYEYDPSILESFDNKHQGRDYFVKFNCPEFTSLCPITGQPDFAAIYISYIPNIKMVESKSLKLYLFSFRNHGDFHEDCMNIIMNDLIDLMDPHYIEVWGKFTPRGGISIDPYTNYGRPGTKYEEIANYRLMNHDLYPETITNR

SEQ ID NO: 47073 - protein, 164 aa, Macrococcus bovicus
  REGION 1..164: note = tr|A0A4R6C0N6|A0A4R6C0N6_9STAP NADPH-dependent 7-cyano-7-deazaguanine reductase OS=Macrococcus bovicus; OX = 69968 GN=queF PE=3 SV=1
MTRSKDELQDITLLGNQHNQYLYEYDPSILESFDNKHPGRDYFVKFNCPEFTSLCPITGQPDFATIYISYIPNIKMVESKSLKLYLFSFRNHGDFHEDCINIIMNDLIELMDPHYIEVWGKFTPRGGISIDPYTNYGRPDSKYEEIANYRLMNHDLYPETITNR

SEQ ID NO: 47074 - protein, 164 aa, Macrococcus brunensis
  REGION 1..164: note = tr|A0A4R6BGQ9|A0A4R6BGQ9_9STAP NADPH-dependent 7-cyano-7-deazaguanine reductase OS=Macrococcus brunensis; OX = 198483 GN=queF PE=3 SV=1
MTRSKDELQDITLLGNQNNQYLYEYDPSILESFDNKHQGRDYFVKFNCPEFTSLCPITGQPDFATIYISYIPNIKMVESKSLKLYLFSFRNHGDFHEDCMNIIMNDLIELMDPHYIEIWGKFTPRGGISIDPYTNYGRPGTKYEEIANYRLMNHDLYPETITNR

SEQ ID NO: 47075 - protein, 165 aa, unidentified
  source 1..165: note = Macrococcus canis
  REGION 1..165: note = tr|A0A1W7A9N0|A0A1W7A9N0_9STAP NADPH-dependent 7-cyano-7-deazaguanine reductase OS=Macrococcus canis; OX = 1855823 GN=queF PE=3 SV=1
MSGRQKEELQDITLLGNQNNKYLYEYDPSILESFDNKHQGRDYFVKFNCPEFTSLCPITGQPDFAAIYISYIPNIKMVESKSLKLYLFSFRNHGDFHEDCMNIIMNDLIELMDPHYIEVWGKFTPRGGISIDPYTNYGRPGTKYEEMASYRLMNHDLYPETITNR

SEQ ID NO: 47076 - protein, 166 aa, unidentified
  source 1..166: note = Macrococcus canis
  REGION 1..166: note = tr|A0A4R6C6H1|A0A4R6C6H1_9STAP NADPH-dependent 7-cyano-7-deazaguanine reductase OS=Macrococcus canis; OX = 1855823 GN=queF PE=3 SV=1
MMSGRQKEELQDITLLGNQNNKYLYEYDPSILESFDNKHQGRDYFVKFNCPEFTSLCPITGQPDFAAIYISYIPNIKMVESKSLKLYLFSFRNHGDFHEDCMNIIMNDLIELMDPHYIEVWGKFTPRGGISIDPYTNYGRPGTKYEEMASYRLMNHDLYPETITNR

SEQ ID NO: 47077 - protein, 164 aa, Macrococcus carouselicus
  REGION 1..164: note = tr|A0A4V3BED5|A0A4V3BED5_9STAP NADPH-dependent 7-cyano-7-deazaguanine reductase OS=Macrococcus carouselicus OX=69969 GN=queF PE=3 SV=1
MSRNKEELQDITLLGNQNNQYLYEYDPSILESFDNKHPGRDYFVKFNCPEFTSLCPITGQPDFAAIYISYIPNIKMVESKSLKLYLFSFRNHGDFHEDCINIIMNDLIELMDPHYIEVWGKFTPRGGISIDPYTNYGRPDSKYEEIANYRLMNHDLYPETITNR

SEQ ID NO: 47078 - protein, 166 aa, Macrococcus caseolyticus
  REGION 1..166: note = tr|A0A5E8SKP2|A0A5E8SKP2_9STAP NADPH-dependent 7-cyano-7-deazaguanine reductase OS=Macrococcus caseolyticus subsp. hominis OX=1891096 GN=queF PE=3 SV=1
MMSGRQKEELQDITLLGNQNNKYLYEYDKTILESFDNKHQGRDYFVKFNCPEFTSLCPITGQPDFAAIYISYIPNIKMVESKSLKLYLFSFRNHGDFHEDCMNIIMNDLIELMDPHYIEVWGKFTPRGGISIDPYTNYGRPGTKYEEMASYRLMNHDLYPETITNR

SEQ ID NO: 47079 - protein, 165 aa, Macrococcus caseolyticus
  REGION 1..165: note = sp|B9EAC6|QUEF_MACCJ NADPH-dependent 7-cyano-7-deazaguanine reductase OS=Macrococcus caseolyticus (strain JCSC5402) OX=458233 GN=queF PE=3 SV=1
MSGRQKEELQDITLLGNQNNKYLYEYDKTILESFDNKHQGRDYFVKFNCPEFTSLCPITGQPDFAAIYISYIPNIKMVESKSLKLYLFSFRNHGDFHEDCMNIIMNDLIELMDPHYIEVWGKFTPRGGISIDPYTNYGRPGTKYEEMASYRLMNHDLYPETITNR

SEQ ID NO: 47080 - protein, 165 aa, unidentified; identical to SEQ ID NO: 47072
  source 1..165: note = Macrococcus epidermidis
  REGION 1..165: note = tr|A0A327ZV73|A0A327ZV73_9STAP NADPH-dependent 7-cyano-7-deazaguanine reductase OS=Macrococcus epidermidis OX=1902580 GN=queF PE=3 SV=1

SEQ ID NO: 47081 - protein, 165 aa, unidentified
  source 1..165: note = Macrococcus goetzii
  REGION 1..165: note = tr|A0A395G9R5|A0A395G9R5_9STAP NADPH-dependent 7-cyano-7-deazaguanine reductase OS=Macrococcus goetzii; OX = 1891097 GN=queF PE=3 SV=1
MTGRQKEELQDITLLGNQNNKYLYEYDPSILESFDNKHQGRDYFVKFNCPEFTSLCPITGQPDFAAIYISYIPNIKMVESKSLKLYLFSFRNHGDFHEDCMNIIMNDLIELMDPHYIEVWGKFTPRGGISIDPYTNYGRPGTKYEEIANYRLMNHDLYPETITNR

SEQ ID NO: 47082 - protein, 164 aa, Macrococcus hajekii
  REGION 1..164: note = tr|A0A4R6BJ25|A0A4R6BJ25_9STAP NADPH-dependent 7-cyano-7-deazaguanine reductase OS=Macrococcus hajekii; OX = 198482 GN=queF PE=3 SV=1
MSRSNDELQDITLLGNQNNKYLYEYDPSVLESFDNKHPGRDYFVKFNCPEFTSLCPITGQPDFATIYISYIPHIKMVESKSLKLYLFSFRNHGDFHEDCMNIIMNDLIDLMDPHYIEVWGKFTPRGGISIDPYTNYGRPDSKYAEMAHYRLMNHDLYPETITNR

SEQ ID NO: 47083 - protein, 165 aa, Macrococcus lamae
  REGION 1..165: note = tr|A0A4V3BF47|A0A4V3BF47_9STAP NADPH-dependent 7-cyano-7-deazaguanine reductase OS=Macrococcus lamae; OX = 198484 GN=queF PE=3 SV=1
MTGRTNEELQDITLLGNQNNVYEYSYNPDVLESFDNKHQGRDYFVKFNCPEFTSLCPITGQPDFATIYISYIPNIKMVESKSLKLYLFSFRNHGDFHEDCMNIIMNDLISLMDPHYIEVWGKFTPRGGISIDPYTNYGRPDTKYEEIASYRLMNHDLYPETITNR

SEQ ID NO: 47084 - protein, 166 aa, Macrococcus sp.
  REGION 1..166: note = tr|A0A4Q1B1K1|A0A4Q1B1K1_9STAP NADPH-dependent 7-cyano-7-deazaguanine reductase OS=Macrococcus sp. DPC7161 OX=2507060 GN=queF PE=3 SV=1
MMAGRQKDELQDITLLGNQNNKYLYEYDPSILESFDNKHQGRDYFVKFNCPEFTSLCPITGQPDFAAIYISYIPNIKMVESKSLKLYLFSFRNHGDFHEDCMNIIMNDLIELMDPHYIEVWGKFTPRGGISIDPYTNYGRPGTKYEEMAQYRLMNHDLYPENINNR

SEQ ID NO: 47085 - protein, 128 aa, unidentified
  source 1..128: note = Magnetococcus marinus
  REGION 1..128: note = sp|A0LD64|QUEF_MAGMM NADPH-dependent 7-cyano-7-deazaguanine reductase OS=Magnetococcus marinus (strain ATCC BAA-1437 / JCM 17883 / MC-1) OX=156889; GN = queF PE=3 SV=1
MSSPEKVEPQRAILESFANPNPQRDYEIDMHCPEFTCLCPKTGQPDFADFRITYVADEKCIELKSLKIYMWSFRDRGAFHEAVTNQIMDDLIAVCDPRYMQVQGAFYVRGGITTTITVEHHKERSTEA

SEQ ID NO: 47086 - protein, 122 aa, unidentified
  source 1..122: note = Magnetococcus massalia
  REGION 1..122: note = tr|A0A1S7LM67|A0A1S7LM67_MAGMO NADPH-dependent 7-cyano-7-deazaguanine reductase OS=Magnetococcus massalia (strain MO-1) OX=451514 GN=queF PE=3 SV=1
MAGPETMPQRDILETFPNPNPERDYEIKMDCPEFTCLCPKTGQPDFAEFVISYTPDVNCVELKSLKIYLWSFRDRGAFHEAVTNQIINDLVAACDPRYMKVEGAFKVRGGITTTVTIEHHKA

SEQ ID NO: 47087 - protein, 176 aa, unidentified
  source 1..176: note = Magnetofaba australis
  REGION 1..176: note = tr|A0A1Y2K844|A0A1Y2K844_9PROT NADPH-dependent 7-cyano-7-deazaguanine reductase OS=Magnetofaba australis IT-1 OX=1434232 GN=queF PE=3 SV=1
MSISLPNSFYDFLRNLAGQTPNRPTAFDKRPLRKVKRVADTPPFPPVKERVVAMTSPASVENQAALLETFPNPNPERDYEIDMQCPEFTCVCPKTGQPDFADIRIIYTPDQTCVELKSLKLYLWSYRDRGAFHEKVTNQILNDLVAATSPRQMTVEGAFKVRGGITTTVTVRYPDK

SEQ ID NO: 47088 - protein, 153 aa, unidentified
  source 1..153: note = Magnetospirillum caucaseum
  REGION 1..153: note = tr|M2YEY5|M2YEY5_9PROT NADPH-dependent 7-cyano-7-deazaguanine reductase OS=Magnetospirillum caucaseum OX=1244869 GN=queF PE=3 SV=1
MGTGTEHLTQLGQAAALPDSPDAAVLETVPNPHPGTLYLVRFTAPEFTSLCPITGQPDFAQLVIDYAPECALVESKSLKLFLGSFRNHGAFHEDCTIAIAKRLVAACQPKWLRIGGYWYPRGGIPIDVFWQTGAAPDGLWLPDQGVAGYRGRG

SEQ ID NO: 47089 - protein, 152 aa, Magnetospirillum gryphiswaldense
  REGION 1..152: note = tr|V6F437|V6F437_MAGGM NADPH-dependent 7-cyano-7-deazaguanine reductase OS=Magnetospirillum gryphiswaldense (strain DSM 6361 / JCM 21280 / NBRC 15271 / MSR-1) OX=431 944 GN=queF PE=3 SV=1
MADYPHLTQLGQSAALPDDPEAARLEVVPNPHPGDTYLVRFTAPEFTSLCPITGQPDFAHLVIDYVPENHLVESKSLKLFLGSFRNHGAFHEACTVMIGKRVVDATKPKWLRIGGYWYPRGGIPIDVFWQTGAPPAGLWLPDQGVPPYRGRG

SEQ ID NO: 47090 - protein, 152 aa, Magnetospirillum gryphiswaldense; identical to SEQ ID NO: 47089
  REGION 1..152: note = tr|A4U5K8|A4U5K8_9PROT NADPH-dependent 7-cyano-7-deazaguanine reductase OS=Magnetospirillum gryphiswaldense OX=55518 GN=queF PE=3 SV=1

SEQ ID NO: 47091 - protein, 150 aa, unidentified
  source 1..150: note = Magnetospirillum kuznetsovii
  REGION 1..150: note = tr|A0A364P208|A0A364P208_9PROT NADPH-dependent 7-cyano-7-deazaguanine reductase OS=Magnetospirillum kuznetsovii OX=2053833 GN=queF PE=3 SV=1
MTGPLTQLGQNTALPASPDQAVLETVPNPHPGTLYLVRFAAPEFTSLCPITGQPDFAHLVIDYAPDAALVESKSLKLFLGSFRNHGAFHEDCTLAIAKRLVAASAPKWLRIGGYWYPRGGIPIDVFWQTGTPPEGLWLPDQGVPSYRGRG

SEQ ID NO: 47092 - protein, 153 aa, unidentified
  source 1..153: note = Magnetospirillum magneticum
  REGION 1..153: note = sp|Q2W992|QUEF_MAGSA NADPH-dependent 7-cyano-7-deazaguanine reductase OS=Magnetospirillum magneticum (strain AMB-1 / ATCC 700264) OX=342108 GN=queF; PE = 3 SV=1
MGTGTEHLTQLGQSTALPASPDKAVLETVPNPHPGTLYLVRFTAPEFTSLCPITGQPDFAQLVIDYAPEGSLVESKSLKLFLGSFRNHGAFHEDCTIAIAKRLVAACAPKWLRIGGYWYPRGGIPIDVFWQTGPAPEGLWLPDQGVAGYRGRG

SEQ ID NO: 47093 - protein, 151 aa, Magnetospirillum magnetotacticum
  REGION 1..151: note = tr|A0A0C2YWX5|A0A0C2YWX5_MAGMG NADPH-dependent 7-cyano-7-deazaguanine reductase OS=Magnetospirillum magnetotacticum MS-1 OX=272627 GN=queF PE=3 SV=1
MADLSLTQLGQSTALPDNPDKAVLETVPNPHPGTLYLVRFTAPEFTSLCPITGQPDFAQLVIDYAPEGALVESKSLKLFLGSFRNHGAFHEDCTIAIAKRLVAACAPKWLRIGGYWYPRGGIPIDVFWQTGPSPEGLWLPDQGVAGYRGRG

SEQ ID NO: 47094 - protein, 160 aa, unidentified
  source 1..160: note = Magnetospirillum marisnigri
  REGION 1..160: note = tr|A0A178MEV9|A0A178MEV9_9PROT NADPH-dependent 7-cyano-7-deazaguanine reductase OS=Magnetospirillum marisnigri OX=1285242 GN=queF PE=3 SV=1
MAAPVDGRFDVSDGLTQLGRQTPLPDSPEAAVLEVVANPHPGTTYLVRFAAPEFTSLCPITGQPDFAHLVIDYVPAASLVESKSLKLFLGSFRNHGAFHEDCTVGIGKRLVEACKPVWLRIGGYWYPRGGIPIDVFWQTGTPPEGLWLPDQGVPGYRGRG

SEQ ID NO: 47095 - protein, 152 aa, unidentified
  source 1..152: note = Magnetospirillum moscoviense
  REGION 1..152: note = tr|A0A178MMR5|A0A178MMR5_9PROT NADPH-dependent 7-cyano-7-deazaguanine reductase OS=Magnetospirillum moscoviense OX=1437059 GN=queF PE=3 SV=1
MTQPTHLTQLGQSVTAAADPDQAVIEVVDNPHPGTTYLVRFAAPEFTSLCPITGQPDFAHLVIDYVPDASLVESKSLKLFLASFRNHGAFHEACTIGIAKRLVEACRPHWLRIGGYWYPRGGIPIDVFWQTGTPPEGLWLPDQGVAPYRGRG

SEQ ID NO: 47096 - protein, 151 aa, Magnetospirillum sp.
  REGION 1..151: note = tr|A0A0U5ML41|A0A0U5ML41_9PROT NADPH-dependent 7-cyano-7-deazaguanine reductase OS=Magnetospirillum sp. XM-1 OX=1663591 GN=queF PE=3 SV=1
MSDLNLTQLGQAAALPESPDKAVLETVPNPHPDTLYLVRFTAPEFTSLCPITGQPDFAQLVIDYAPEGALVESKSLKLFLGSFRNHGAFHEDCTIAIAKRLVAACQPKWLRIGGYWYPRGGIPIDVFWQTGPAPEGLWLPDQGVAGYRGRG

SEQ ID NO: 47097 - protein, 152 aa, Magnetospirillum sp.
  REGION 1..152: note = tr|A0A522X4K9|A0A522X4K9_9PROT NADPH-dependent 7-cyano-7-deazaguanine reductase OS=Magnetospirillum sp.; OX = 31872 GN=queF PE=3 SV=1
MTGPGPLTQLGQAAPLPSDPGTAVLETVVNPHPGSLYLVRFTAPEFTSLCPITGQPDFAHLVIDYAPEAALVESKSLKLFLGSFRNHGAFHEDCTLAIAKRLVTAAAPKWLRIAGYWYPRGGIPIDVFWQTAAAPEGLWLPDPGVPPYRGRG

SEQ ID NO: 47098 - protein, 157 aa, unidentified
  source 1..157: note = Magnetovibrio blakemorei
  REGION 1..157: note = tr|A0A1E5QBZ3|A0A1E5QBZ3_9PROT NADPH-dependent 7-cyano-7-deazaguanine reductase OS=Magnetovibrio blakemorei OX=28181 GN=queF PE=3 SV=1
MTNENLGHPSQLGQLGHQVEAPTSPDEAMLETVPNPQAGTDYVARFSAPEFTSVCPVTGQPDFAHLVIDYIPADKLVESKSFKLYLGSFRNHGAFHEDCTIAIAKKFIEAAKPKWLRIGGYWYPRGGIPIDVFYQTGTPPEGVWIPDQGVQGYRGRG

SEQ ID NO: 47099 - protein, 154 aa, unidentified
  source 1..154: note = Magnetovibrio sp.
  REGION 1..154: note = tr|A0A2D8Z0J7|A0A2D8Z0J7_9PROT NADPH-dependent 7-cyano-7-deazaguanine reductase OS=Magnetovibrio sp.; OX = 2024836 GN=queF PE=3 SV=1
MAKTTEKTLTQLGAASAIPDSPETAILECAANPHPKTPYLIRFTCPEFTSLCPVTGQPDFAHLVIDYVPGRKIVESKSLKLYLASFRNHAGFHEKCTLDIAAKIKKAAAPKWLRIGGYWYPRGGIPIDVFHQTGEPPKGLWIPDQGVASYKGRG

SEQ ID NO: 47100 - protein, 154 aa, unidentified
  source 1..154: note = Magnetovibrio sp.
  REGION 1..154: note = tr|A0A2E3P6F5|A0A2E3P6F5_9PROT NADPH-dependent 7-cyano-7-deazaguanine reductase OS=Magnetovibrio sp.; OX = 2024836 GN=queF PE=3 SV=1
MAKTTETTLTQLGAASAIPDSPETATLECAGNPHPKTPYLIRFTCPEFTSLCPVTGQPDFAHLVIDYVPGRKIVESKSLKLYLASFRNHAGFHEKCTLDIAAKIKKAAAPKWLRIGGYWYPRGGIPIDVFHQTGAPPKGLWIPDQGVAGYRGRG

SEQ ID NO: 47101 - protein, 289 aa, Malikia granosa
  REGION 1..289: note = tr|A0A2S9K7V8|A0A2S9K7V8_9BURK NADPH-dependent 7-cyano-7-deazaguanine reductase OS=Malikia granosa; OX = 263067 GN=queF PE=3 SV=1
MSEPLHPSQHQPEQSQLGKTSSYADQYDPSLLFPLPRQPKRDEIGISGQPPFLGADLWTAYELSWLNPRGKPQVAIAHFTVPCESPNIIESKSFKLYLNSFNNSRFDDGQQVLDRLKADLSEAAWRGAERQGSVGVRLLAPAQFAQEQIHELDGLSLDRLDVECTQYQPDPELLRADHEQPPVTETLVSDLLKSNCLVTGQPDWASVRISYTGAPIDQERLLQYLVSFRNHNEFHEQCVERIFMDLWARCKPVKLSVYARYTRRGGLDINPWRSSQPQQPPANIRTARQ

SEQ ID NO: 47102 - protein, 289 aa, Malikia spinosa
  REGION 1..289: note = tr|A0A2S9KCL3|A0A2S9KCL3_9BURK NADPH-dependent 7-cyano-7-deazaguanine reductase OS=Malikia spinosa; OX = 86180 GN=queF PE=3 SV=1
MTESQHPSQHQPEQSQLGKTSAYADQYDPSLLFPLPRQTKRDEIGISATPPFLGADLWTAYELSWLNPRGKPQVAIAQVTVPCESPNIIESKSFKLYLNSFNNSRFDDGQAVLDRLKADLSEAIWRGSERRGSIGVKLLTPAQFEQEKIRELDGLSLDRLDVECTHYQPAPELLRADATQPPVTETLVSDLLKSNCLVTGQPDWASVRISYTGAPIDQERLLQYLVSFRNHNEFHEQCVERIFMDLWTRCKPVKLSVYARYTRRGGLDINPWRSSQPQQPPANVRTARQ

SEQ ID NO: 47103 - protein, 276 aa, Malonomonas rubra
  REGION 1..276: note = tr|A0A1M6LT78|A0A1M6LT78_MALRU NADPH-dependent 7-cyano-7-deazaguanine reductase OS=Malonomonas rubra DSM 5091 OX=1122189 GN=queF PE=3 SV=1
MIDYEAVLPLGKTTEYISEYDPKLLCPFPRQVKRDVIGVTGKLPFSGYDIWNAFELSWLNLKGKPIVAMGEFHIPCESPNLIESKSFKLYLNSFNQTKLQGFADAEKRMVTDLSAAAGAPVRVRLFGSDQFITEEIECLPGERIDNLDIEVDDYSLDPALLEGAADPQNIVEEELHSHLLKSNCLVTNQPDWGSVLIRYKGGKLDREALLRYIISFRQHNEFHEQCVERIFVDLMRYCQPESLTVYARYTRRGGLDINPFRSNYETRIANMRQARQ

SEQ ID NO: 47104 - protein, 154 aa, Mameliella alba
  REGION 1..154: note = tr|A0A0B3SGG6|A0A0B3SGG6_9RHOB NADPH-dependent 7-cyano-7-deazaguanine reductase OS=Mameliella alba; OX = 561184 GN=queF PE=3 SV=1
MTDSIYRDLKQLGGATRIPASPEEAALERVANPQADATYTVRFTAPEFTSLCPMTGQPDFAHLVIDYVPGPWLVESKSLKLYLTSFRNHGAFHEDCTISIARRLVEFLEPQWLRIGGYWYPRGGIPIDVFWQTGPLPDGTWIPDQGVPPYRGRG

SEQ ID NO: 47105 - protein, 282 aa, unidentified
  source 1..282: note = Mangrovibacter phragmitis
  REGION 1..282: note = tr|A0A1B7KY56|A0A1B7KY56_9ENTR NADPH-dependent 7-cyano-7-deazaguanine reductase OS=Mangrovibacter phragmitis OX=1691903 GN=queF PE=3 SV=1
MTVYDNHKALSGLTLGKTTDYRDRYDANLLQPVPRSLNRDPLGLHADSLPFHGCDIWTLYELSWLNSKGLPQVAVGHVELEARSVNLIESKSFKLYLNSFNQTHFESWDDVRQTLIRDLSQCAKGQVAVTLYSVGFLEGQPIAAFNGECIDNQDITIDDYQFDDTLLEGAASTGPVIEETLVSHLLKSNCLITHQPDWGSVQIAYQGKRIDREKLLRYLVSFRHHNEFHEQCVERIFNDIQRYCQPKALSVYARYTRRGGLDINPWRSNYAFTPATGRLPRQ

SEQ ID NO: 47106 - protein, 282 aa, Mangrovibacter plantisponsor
  REGION 1..282: note = tr|A0A317QAA1|A0A317QAA1_9ENTR NADPH-dependent 7-cyano-7-deazaguanine reductase OS=Mangrovibacter plantisponsor OX=451513 GN=queF PE=3 SV=1
MTVYDNHKALSGLTLGKTTDYRDRYDANLLQPVPRSLNRDPLGLHADSLPFHGCDIWTLYELSWLNSKGLPQVAVGHVELEARSVNLIESKSFKLYLNSFNQTHFESWDDVRQTLIRDLSQCAKGQVAVTLYSVGDLEGQPIAAFNGECIDNQDITIDDYQFDDTLLEGAASTGPVIEETLISHLLKSNCLITHQPDWGSVQIAYQGRRIDREKLLRYLVSFRHHNEFHEQCVERIFNDIQRYCQPKALSVYARYTRRGGLDINPWRSNYAFTPATGRLPRQ

SEQ ID NO: 47107 - protein, 282 aa, Mangrovibacter sp.
  REGION 1..282: note = tr|A0A071MD40|A0A071MD40_9ENTR NADPH-dependent 7-cyano-7-deazaguanine reductase OS=Mangrovibacter sp. MFB070 OX=1224318 GN=queF PE=3 SV=1
MTVYDNHKALSGLTLGKTTDYRDRYDANLLQPVPRSLNRDPLGLHADSLPFHGCDIWTLYELSWLNSKGLPQVAVGHVELEARSVNLIESKSFKLYLNSFNQTHFESWDDVRQTLIRDLSQCAKGQVAVTLYSVGDLEGQPIAAFNGECIDNQDITIDDYQFDDTLLEGAASAGPVIEETLISHLLKSNCLITHQPDWGSVQIAYQGRRIDREKLLRYLVSFRHHNEFHEQCVERIFNDIQRYCQPKALSVYARYTRRGGLDINPWRSNYAFTPATGRLPRQ

SEQ ID NO: 47108 - protein, 156 aa, unidentified
  source 1..156: note = Mangrovibacterium diazotrophicum
  REGION 1..156: note = tr|A0A419W8H5|A0A419W8H5_9BACT NADPH-dependent 7-cyano-7-deazaguanine reductase OS=Mangrovibacterium diazotrophicum OX=1261403 GN=queF PE=3 SV=1
MENLTHLGNDTNYGFNYSPAVLETFDNKHPQNDYWVKFNAPEFTSLCPITGQPDFATIYISYIPGEKMVESKSLKLYLFSFRNHGDFHEDCINIIMKDLIKLMDPKYIEVWGKFLPRGGISIDPYSNYGKAGTKFEELAWYRMQNHDLNPETITNR

SEQ ID NO: 47109 - protein, 156 aa, unidentified
  source 1..156: note = Mangrovibacterium marinum
  REGION 1..156: note = tr|A0A2T5BYI4|A0A2T5BYI4_9BACT NADPH-dependent 7-cyano-7-deazaguanine reductase OS=Mangrovibacterium marinum OX=1639118 GN=queF PE=3 SV=1
MDNLTHLGSETNYGFNYSPELLETFDNKHPQNDYWVKFNAPEFTSLCPITGQPDFATIYISYIPGEKMVESKSLKLYLFSFRNHGDFHEDCINIIMKDLIQLMDPKYIEVWGKFLPRGGISIDPYANYGKVGTKYEELAWYRMQNHDLNPETITNR

SEQ ID NO: 47110 - protein, 279 aa, Mannheimia granulomatis
  REGION 1..279: note = tr|A0A011P947|A0A011P947_9PAST NADPH-dependent 7-cyano-7-deazaguanine reductase OS=Mannheimia granulomatis OX=85402 GN=queF PE=3 SV=1
MNYNDKSLSALKLGQKTEYKSEYDPTLLQAVPRKLNRDGLGITETQPFKQGADIWTCYELSWLNPNGLPQVAIADVAIDFQSENLIESKSFKLYLNSFNQSKFDSIEAVEKTIQSDLAHCASGQVSVKIYKLGHYTQQPIVDFQGECIDEQDIQIDSYAFSTDYLENVASGEAVEETLVSHLLKSNCLITSQPDWGSVQICYQGKKLDREKLLRYLVSFREHNEFHEQCVERIFCDLMQFAKPEKLTVYARYTRRGGLDINPFRSNFESVPENLRMARQ

SEQ ID NO: 47111 - protein, 279 aa, Mannheimia haemolytica
  REGION 1..279: note = tr|A0A249A0T9|A0A249A0T9_MANHA NADPH-dependent 7-cyano-7-deazaguanine reductase OS=Mannheimia haemolytica; OX = 75985 GN=queF PE=3 SV=1
MNYNDKSLSALKLGQKTEYKSEYDASLLQPVPRKLNRDSLGITQEQPFNRGADVWTCYELSWLNQNGLPQVAIADVAIDFKSENLIESKSFKLYLNSFNQTKFSSIEEVGKTIQADLARCASGQVSVKIYQLSHYTQQPIVDFAGDCIDEQDIQIDSYAFSTHYLENIAEDELVEETLVSHLLKSNCLITSQPDWGSVQIRYKGKKLNREKLLRYLVSFREHNEFHEQCVERIFCDLMQFAEPEKLTVYARYTRRGGLDINPFRSNFEEVPENLRMARQ

SEQ ID NO: 47112 - protein, 279 aa, Mannheimia haemolytica
  REGION 1..279: note = tr|A0A3S4XYJ5|A0A3S4XYJ5_MANHA NADPH-dependent 7-cyano-7-deazaguanine reductase OS=Mannheimia haemolytica; OX = 75985 GN=queF PE=3 SV=1
MNYNDKSLSALKLGQKTEYKSEYDASLLQPVPRKLNRDGLGITQHQPFNRGADVWTCYELSWLNLNGLPQVAIADVAIDFKSENLIESKSFKLYLNSFNQTRFRSIEDVEKTIQADLACCASGQVSVKIYQLSHYTQQPIVDFAGDCIDEQDIQIDSYAFSTHYLENIAEDDLVEETLVSHLLKSNCLITSQPDWGSVQIRYKGKKLNREKLLRYLVSFREHNEFHEQCVERIFCDLMQFAQPEKLTVYARYTRRGGLDINPFRSNFEEVPANLRMARQ

SEQ ID NO: 47113 - protein, 279 aa, Mannheimia sp.
  REGION 1..279: note = tr|W0Q6Z5|W0Q6Z5_9PAST NADPH-dependent 7-cyano-7-deazaguanine reductase OS=Mannheimia sp. USDA-ARS-USMARC-1261 OX=1432056 GN=queF PE=3 SV=1
MNYNDKSLDALKLGQKTEYKSEYDASLLQPVPRKLNRDGLAITQSQPFTQGADVWTCYELSWLNKNGLPQVAIADVAIDFKSENLIESKSFKLYLNSFNQTKFSSIEEVEQTIQRDLENCASGQVSVKIYKLSHYTKQPIVDFEGECIDEQDIQIDSYAFSTHYLENITEDDVVEETLVSHLLKSNCLITSQPDWGSVQIHYKGKKLNREKLLRYLVSFREHNEFHEQCVERIFCDLMQFAQPEKLTVYARYTRRGGLDINPFRSNFEEVPENLRMARQ

SEQ ID NO: 47114 - protein, 281 aa, unidentified
  source 1..281: note = Mannheimia succiniciproducens
  REGION 1..281: note = sp|Q65TN4|QUEF_MANSM NADPH-dependent 7-cyano-7-deazaguanine reductase OS=Mannheimia succiniciproducens (strain MBEL55E) OX=221988 GN=queF PE=3; SV = 1
MDYKDNSLKTLKLGQKTDYIANYDRTLLQPVPRALNRDGLGITKQQPFSVGADIWTAYEISWLNIKGLPQVAIADVEIDYRSTNLIESKSFKLYLNSFNQTKFSDMSEVQRTISEDLSICAEGNVRVQLHSLSNYSHERIADFAGECLDELDIEISDYGFNAEILQNCTALSTEIVEETLVSHLLKSNCLITSQPDWGSVQIHYQGKRIDHEKLLRYLVSFRQHNEFHEQCVERIYCDIMKYARPEKLTVYARYTRRGGLDINPFRSNFEAIPQNLRLARQ

SEQ ID NO: 47115 - protein, 279 aa, Mannheimia varigena
  REGION 1..279: note = tr|W0QF70|W0QF70_9PAST NADPH-dependent 7-cyano-7-deazaguanine reductase OS=Mannheimia varigena USDA-ARS-USMARC-1296 OX=1433287 GN=queF PE=3 SV=1
MNYNDKSLDALKLGQKTEYKSEYDASLLQPVPRKLNRDGLGITQSQPFTQGADVWTCYELSWLNKNGLPQVAIADVAIDFKSENLIESKSFKLYLNSFNQTKFSSIEEVEQTIQRDLANCASGQVSVKIYKLSHYTKQPIVDFEGECIDEQDIQIDSYAFSTHYLENITEDDVVEETLVSHLLKSNCLITSQPDWGSVQIHYKGKKLNREKLLRYLVSFREHNEFHEQCVERIFCDLMQFAQPEKLTVYARYTRRGGLDINPFRSNFEEVPENLRMARQ

SEQ ID NO: 47116 - protein, 153 aa, Maricaulis maris
  REGION 1..153: note = tr|A0A495DCK1|A0A495DCK1_9RHOB NADPH-dependent 7-cyano-7-deazaguanine reductase OS=Maricaulis maris; OX = 74318 GN=queF PE=3 SV=1
MTDDRYDQLGQLGTTTALPDNPETAQLERVANPCDAPYMTRFVCPEFTSLCPVTGAPDFAHLVIDYVPREWIVESKSLKLYLGSFRNHGAFHEACTTGIGQRLVKELDPVWLRIGGYWYPRGGIPIDVFYATGEPPAGVWIPDQDVPGYRGRG

SEQ ID NO: 47117 - protein, 153 aa, Maricaulis maris
  REGION 1..153: note = sp|Q0AQT4|QUEF_MARMM NADPH-dependent 7-cyano-7-deazaguanine reductase OS=Maricaulis maris (strain MCS10) OX=394221 GN=queF PE=3 SV=1
MTDNRYDNLGQLGTSTPLPDNPDTAALERVANPCDAPYMTRFVCPEFTSLCPVTGAPDFAHLVIDYVPRDWIVESKSLKLYLGSFRNHGAFHEACTTGIGQRLVKELDPVWLRIGGYWYPRGGIPIDVFFATGEPPKGVWIPDQDVPGYRGRG

SEQ ID NO: 47118 - protein, 153 aa, Maricaulis salignorans
  REGION 1..153: note = tr|A0A1G9TX33|A0A1G9TX33_9RHOB NADPH-dependent 7-cyano-7-deazaguanine reductase OS=Maricaulis salignorans; OX = 144026 GN=queF PE=3 SV=1
MTDNRYQDLGQLGATTPLPDHPDTAALERVANPCDAPYMIRFAVPEFTSLCPVTGAPDFAHLVIDYVPRDWIVESKSLKLFLGSFRNHGAFHEACTTQIAQRLVKELDPVWLRIGGYWYPRGGIPIDVFFATGEAPAGVWIPEQGVASYRGRG

SEQ ID NO: 47119 - protein, 153 aa, Maricaulis sp.
  REGION 1..153: note = tr|A0A2D8BSP7|A0A2D8BSP7_9RHOB NADPH-dependent 7-cyano-7-deazaguanine reductase OS=Maricaulis sp.; OX = 1486257 GN=queF PE=3 SV=1
MTDTRYETLSQLGGDTQMPASPDQAVLERVANPCDAPYLIRFTCPEFTSLCPVTGQPDFAHLVIDYVPRDWIVESKSLKLFLTSFRNHGAFHEACTTSIAQRLVSELDPAWLRIGGYWYPRGGIPIDVFYQTGPPPEGVWIPDQGVPPYRGRG

SEQ ID NO: 47120 - protein, 153 aa, Maricaulis sp.
  REGION 1..153: note = tr|A0A1Q8FYY8|A0A1Q8FYY8_9RHOB NADPH-dependent 7-cyano-7-deazaguanine reductase OS=Maricaulis sp. W15; OX = 1772333 GN=queF PE=3 SV=1
MTDDRYDNLGQLGTTTVLPDNPDTAQLERVANPCDAPYMTRFVCPEFTSLCPVTGAPDFAHLVIDYVPREWIVESKSLKLYLGSFRNHGAFHEACTTGIGQRLVKELDPVWLRIGGYWYPRGGIPIDVFYATGEPPAGVWIPDQDVPGYRGRG

SEQ ID NO: 47121 - protein, 129 aa, Marichromatium gracile
  REGION 1..129: note = tr|A0A4R4A5C4|A0A4R4A5C4_MARGR NADPH-dependent 7-cyano-7-deazaguanine reductase OS=Marichromatium gracile; OX = 1048 GN=queF PE=3 SV=1
MPSAPSRSLETFPNPQPERDYTIRIRVPEFTCLCPKTGQPDFAELTLEYIPEARCVELKALKNYVWSYRDEGAFHEAVTNRILGDLVAATEPRFMRLTADFNVRGGIYTTVVAEHRAADWQPQPQVQLP

SEQ ID NO: 47122 - protein, 129 aa, Marichromatium purpuratum
  REGION 1..129: note = tr|W0E5L4|W0E5L4_MARPU NADPH-dependent 7-cyano-7-deazaguanine reductase OS=Marichromatium purpuratum 984 OX=765910 GN=queF PE=3 SV=1
MPSAPSRSLETFPNPQPERDYTIRIRVPEFTCLCPKTGQPDFAELTLEYIPEARCVELKALKNYVWSYRDEGAFHEAVTNRILGDLVAATEPRFMRLTADFNVRGGIYTKVVVEHRAADWQPQPQVQLP

SEQ ID NO: 47123 - protein, 126 aa, unidentified
  source 1..126: note = Unknown
  REGION 1..126: note = tr|A0A0C1R8P5|A0A0C1R8P5_9ACTN Uncharacterized protein OS=marine actinobacterium MedAcidi-G2B OX=1550401; GN = MB54_03315 PE=4 SV=1
MEKANQEPVLGRPDSTPTTQIDTFSTEGPVESVHFRSSELTAVCPVTNQPDFYTIDISYSPESICIETKSLKLFLRTFEGVGIFAEHLAPRIANHLGEAVLVPVKVTLEQQIRGGIITTVTSVSNN

SEQ ID NO: 47124 - protein, 117 aa, unidentified
  source 1..117: note = Unknown
  REGION 1..117: note = tr|A0A0C1RPQ0|A0A0C1RPQ0_9ACTN NADPH-dependent 7-cyano-7-deazaguanine reductase OS=marine actinobacterium MedAcidi-G3 OX=1550402 GN=queF PE=3 SV=1
MPSEPSKELIVLDNPKPNRDYEIRCETPELTCLCPVTGQPDFATVVITYIPNELIVELKSLKMYLWSFRDQGVHHEGITNGILDDLVSAISPRSMTVVTDWLVRGGIATTVTATHES

SEQ ID NO: 47125 - protein, 145 aa, unidentified
  source 1..145: note = Unknown
  REGION 1..145: note = tr|A0A1Q3GI67|A0A1Q3GI67_9BACT NADPH-dependent 7-cyano-7-deazaguanine reductase OS=marine bacterium AO1-C; OX = 1905359 GN=BKI52_38450 PE=3 SV=1
MAEQKIYKDIEAGILKAIPNPDKRAYEIKIKIPEFTFLGVHKQPDFATVFLTFYPKNKIIELKSLKEYVFQLRNIIVSYERLINVFYDHLIDTYEPERLRILMVCNPRGGISSKLTIDSDWEARGGNEKYQDWQQKITDEWEVVM

SEQ ID NO: 47126 - protein, 267 aa, unidentified
  source 1..267: note = Unknown
  REGION 1..267: note = tr|A0Z1W1|A0Z1W1_9GAMM QueF_N domain-containing protein OS=marine gamma proteobacterium HTCC2080 OX=247639; GN = MGP2080_11058 PE=4 SV=1
MAVHALGQKVAAPKRYAPDILEAISRREGREALGPAPKSMVGHDCWHLYELSWLNLRNEPQHCVGVLLVDSASPATIESKSLKLYLNSLNFHCFASEAQACEVICGDIGRVTQSDVSLTVLPPDGLGAITREPEGVLLEADPQQSDHTSMQSPWCDSGDDILDATYVSHRLRSLCPVTAQPDWGTLVIDYRGRPINHHRLLGFIESFREHQEFHEQCVERCFYEVMKQTNAESLRVSAFYQRRGGIDITPVRSNHRVVPELWRMGRQ

SEQ ID NO: 47127 - protein, 272 aa, unidentified
  source 1..272: note = Unknown
  REGION 1..272: note = tr|A0YAY3|A0YAY3_9GAMM NADPH-dependent 7-cyano-7-deazaguanine reductase OS=marine gamma proteobacterium HTCC2143 OX=247633 GN=queF PE=3 SV=1
MSDIPLGKDVTYPDQYTTDVLFPISRQPSRDSLGINPMALPFQGEDVWNAYELSWLNDKGMPQVACARFYVPCESASIVESKSFKLYLNSFNQTRISSWEAVSKMLAVDLSACIGSPVKVDLYTIDDGTSRIGFSTLSGFCLDTLDITLDRYDPDPSQLGTLHGLVVDESLNSNLLRSLCPVTAQPDWGSVQIVYTGAQIDRVGLLKYLIGYRQHQEFHEQCVERIFRDITDYCAPDELYVQAFYTRRGGLDINPYRSSGESVSKFDRLFRQ

SEQ ID NO: 47128 - protein, 153 aa, unidentified
  source 1..153: note = Marinibacterium profundimaris
  REGION 1..153: note = tr|A0A225NFB8|A0A225NFB8_9RHOB NADPH-dependent 7-cyano-7-deazaguanine reductase OS=Marinibacterium profundimaris OX=1679460 GN=queF PE=3 SV=1
MENIYGDLRQLGSDTRLPESPEAAELERVPNPQSDVAYCVRFTAPEFTSLCPMTGQPDFAHLVIDYVPGGWLVESKSLKLYLGSFRNHGAFHEDCTISIARRLVDFLDPQWLRIGGYWYPRGGIPIDVFWQTGQTPSDVWIPDQGVPPYRGRG

SEQ ID NO: 47129 - protein, 119 aa, unidentified
  source 1..119: note = Mariniblastus fucicola
  REGION 1..119: note = tr|A0A5B9PJY1|A0A5B9PJY1_9PLAN NADPH-dependent 7-cyano-7-deazaguanine reductase OS=Mariniblastus fucicola; OX = 980251 GN=queF PE=3 SV=1
MSKNFHEMLDPIENPAPGRDYTIEIVCPEFTSVCPKTGQPDFGELTFEYVPDALIVELKSLKMYLQQFRNEGIFYENVTNSIFDDFVNVVQPKTAKLTARFTPRGGIRSIITAEYSKEA

SEQ ID NO: 47130 - protein, 154 aa, unidentified
  source 1..154: note = Marinicauda algicola
  REGION 1..154: note = tr|A0A4S2GYK1|A0A4S2GYK1_9RHOB NADPH-dependent 7-cyano-7-deazaguanine reductase OS=Marinicauda algicola; OX = 2029849 GN=queF PE=3 SV=1
MTQDRYSGLDQLGSKTETPASPDEAKLERVENPAREHDYLIRFTAPEFTSLCPVTGQPDFAHLVIDYAPGDWIVESKSLKLFLTSFRNHGAFHEACTMMIGQRLVDELAPKWLRIGGYWYPRGGIPIDVFGQWGEIPKGLWVPEQGVAPYRGRG

SEQ ID NO: 47131 - protein, 154 aa, unidentified
  source 1..154: note = Marinicauda pacifica
  REGION 1..154: note = tr|A0A4S2HDM7|A0A4S2HDM7_9RHOB NADPH-dependent 7-cyano-7-deazaguanine reductase OS=Marinicauda pacifica; OX = 1133559 GN=queF PE=3 SV=1
MTDDRYAGLDQLGSKTDAPTRPEDARLERVENPASETDYLVRFAAPEFTSLCPVTGQPDFAHLVIDYAPDQWIVESKSLKLFLQSFRNHGAFHEACTLMIGQRIVDECAPKWLRIGGYWYPRGGIPIDVFAQWGEAPQGLWVPDQGVAPYRGRG

SEQ ID NO: 47132 - protein, 154 aa, unidentified
  source 1..154: note = Marinicauda sp.
  REGION 1..154: note = tr|A0A2U2BU18|A0A2U2BU18_9RHOB NADPH-dependent 7-cyano-7-deazaguanine reductase OS=Marinicauda sp. WD6-1; OX = 2135793 GN=queF PE=3 SV=1
MTDPRYETLGQLGRAAEAPDSPDAATLERVENPEREADYLVRFTCPEFTSLCPVTGQPDFAHLVIDYAPDKWIVESKSLKLFLTSFRNHGAFHEACTTMIGKRLVEAISPKWLRIGGYWYPRGGIPIDVFAQWGEAPAGLWIPDQGVQPYRGRG

SEQ ID NO: 47133 - protein, 194 aa, unidentified
  source 1..194: note = Marinicaulis flavus
  REGION 1..194: note = tr|A0A2S7K3N8|A0A2S7K3N8_9PROT NADPH-dependent 7-cyano-7-deazaguanine reductase OS=Marinicaulis flavus; OX = 2058213 GN=queF PE=3 SV=1
MPTRSRTKKAKSTARKKAAPKAAALSALRAIDSGKSGKSKVKTAGAAPLTQLGSAAAPAASPEEAMLETAPNPQAGETYVARFTAPEFTSLCPVTGQPDFAHLVIDYVPGKHIVESKSLKLFLTSFRNHGAFHEDCTVYIAKRIIDAAKPKWLRIAGYWYPRGGIPIDVFYQTGEPPKGVWLPDPGVAPYRGRG

SEQ ID NO: 47134 - protein, 117 aa, Marinicella litoralis
  REGION 1..117: note = tr|A0A4R6XQ68|A0A4R6XQ68_9GAMM NADPH-dependent 7-cyano-7-deazaguanine reductase OS=Marinicella litoralis; OX = 644220 GN=queF PE=3 SV=1
MSTHPTKDLETFVNPNQERDYTIIIDIPEFTCLCPKTGQPDFATIKIEYQPDEKCVELKALKLYMWTFRERGAFHEAVTNEILDDLIAATDPKWMKITMKFNVRGGIYTDVVIEHKK

SEQ ID NO: 47135 - protein, 167 aa, Marinifilum sp.
  REGION 1..167: note = tr|A0A4T2AGP6|A0A4T2AGP6_9BACT NADPH-dependent 7-cyano-7-deazaguanine reductase OS=Marinifilum sp. JC120; OX = 2302941 GN=queF PE=3 SV=1
MKTTKSQDKTEALVSLGQAGATKYNYDTPGPEILETFPNNFPGRPYIISIEFPEYTSLCPVTGQPDFATIIVEYIPDELCVESKSFKLYMGAYRNHQSFMETITNNILDHFVGRLSPLWMRVKGIFSPRGGTGLHVFAEHYNKESAQYEEVRETVREWKMESGRHSA

SEQ ID NO: 47136 - protein, 291 aa, Marinilabilia salmonicolor
  REGION 1..291: note = tr|A0A368UUL0|A0A368UUL0_9BACT 7-cyano-7-deazaguanine reductase OS=Marinilabilia salmonicolor OX=989 GN=DFO77_11920 PE=4 SV=1
MNNEAKYLGKVSRYPKHYAPEVLVPVPRHLNREIYGLEDHNLPFTGFDVWHAYELSFLTQKGMPVAGLLKIIYPANSPNIVESKSLKLYLNGFNMERYGNNPAEGTAMVLRIIKTDLEKILETKAEVTFFSKEESLEADFTDYEILEEQPGIEETSFSKYQEAPELLKEAPYTQEKSMKVATHLLRSNCKVTFQPDWGSAFIHLKGENIPAKTALLQYLVSIRNENHFHEEICEMIYKRLWDKFSPEELMVSCIYTRRGGIDICPVRTSSPELMPDNLVNKNKLMSKLLRQ

SEQ ID NO: 47137 - protein, 291 aa, Marinilabilia salmonicolor
  REGION 1..291: note = tr|A0A2T0XPQ4|A0A2T0XPQ4_9BACT 7-cyano-7-deazaguanine reductase OS=Marinilabilia salmonicolor OX=989 GN=BY457_104133 PE=4 SV=1
MSNEAKYLGKVSRYPKQYAPEVLVPVPRHLNREIYGLEDHNLPFTGFDVWHAYELSFLTQKGMPVAGLLKIIYPANSPNIVESKSLKLYLNGFNMERYGNNPAEGTAMVLRIIKTDLEKILETKAEVTFFSKEESLEADFTDYEILEEQPGIEETSFSKFQEAPELLKEAPYTQEKSMKVATHLLRSNCKVTFQPDWGSAFIHLKGENIPAKTALLQYLVSIRNENHFHEEICEMIYKRLWDKFSPEELMVSCIYTRRGGIDICPVRTSSPELMPDNLVNKNKLMSKLLRQ

SEQ ID NO: 47138 - protein, 290 aa, Marinilabilia sp.
  REGION 1..290: note = tr|A0A2U2BCN9|A0A2U2BCN9_9BACT NADPH-dependent 7-cyano-7-deazaguanine reductase QueF OS=Marinilabilia sp. WTE OX=2162893 GN=DDZ16_04155 PE=4 SV=1
MNEDKYLGKVTSYPQKYSPEILIPVPRHLNRKDYNIKENNLPFTGYDTWHAYELSFLTEKGLPVVGLLKLVYPSDSTFLVESKSFKLYLNSFNMERYGKTPAEGLEIVLSTIRYDLNQTLKTNVTTHFFQGDESQSHFDFDDFEILENSEVAVSSDFKNYTETPELLAQSEDLKKTIKVATHLLRSNCKVTHQPDWGSAYIHLKGNQIPDKISLLKYIVSVRNENHFHEEICEMIYKRLMDIFSPQELMVTCIYTRRGGIDICPARASRTDLLPKFLISPGVLTKKLLRQ

SEQ ID NO: 47139 - protein, 146 aa, Marinilabilia sp.
  REGION 1..146: note = tr|A0A2U2B4Y3|A0A2U2B4Y3_9BACT 7-cyano-7-deazaguanine reductase OS=Marinilabilia sp. WTE; OX = 2162893 GN=DDZ16_17380 PE=4 SV=1
MAEKVLTYKDIDKSILKSLPNPTGQAYEIKVKIPEFTFLGVKDQPDFADVYITFYPTDRIIELKSLKMYVQALRNITVSYERLINVFYDHLMEVYKPDRIRLVMLCNPRGGISSRLTIDSDWKVRGGDEKYSDWKNHMDDTWSVTL

SEQ ID NO: 47140 - protein, 296 aa, unidentified
  source 1..296: note = Marinilabiliaceae bacterium
  REGION 1..296: note = tr|A0A359FY45|A0A359FY45_9BACT NADPH-dependent 7-cyano-7-deazaguanine reductase QueF OS=Marinilabiliaceae bacterium OX=2053574 GN=DEG09_07705 PE=4 SV=1
MKKSSEPIEAQVLGKQVAYPKGYSPELLVVVPRSANRKIYGLQDDSLPFVGYDVWHAYELGFLTDKGLPVSGVLKIIYPANSPGIVESKSLKLYLNGFNMSYYGANREDGIIKICEIIKDDLSELLKTKVELHFFDATAGETGFDFTYYELLEARLETENLNFADFKENQSLLKISDDKGGQIMVGTHLLRSKCRITGQPDWGSAYILLKGDQLPELSSLLKYIVSIRNENHFHEEICEMIYKRLWDTFSPIELMVSTIYTRRGGIDICPLRASKASLLPKLLTNVNQLSKKLIRQ

SEQ ID NO: 47141 - protein, 146 aa, unidentified
  source 1..146: note = Marinilabiliaceae bacterium
  REGION 1..146: note = tr|A0A353U1N5|A0A353U1N5_9BACT NADPH-dependent 7-cyano-7-deazaguanine reductase OS=Marinilabiliaceae bacterium OX=2053574 GN=queF PE=3 SV=1
MENNIRTYKEIDASILKSLPNPTGEAYEIKIKIPEFTFLGVKEQPDFADVFITFYPKKRIIELKSLKQYVYALRNITVSYERLINVFYDHIMQVYEPERVRIVMVFNPRGGISSKLTIDSDWKVRGGDEKFSDWKNNIEDQWSVTL

SEQ ID NO: 47142 - protein, 289 aa, unidentified
  source 1..289: note = Marinilabiliales bacterium
  REGION 1..289: note = tr|A0A2J6HPC8|A0A2J6HPC8_9BACT NADPH-dependent 7-cyano-7-deazaguanine reductase QueF OS=Marinilabiliales bacterium OX=2053303 GN=C0593_12945 PE=4 SV=1
MEQELTHLGNQSGYPQEYAPDVLEAIPRSLNREQYHIDEETPGFLGFDIWHAWEVSFITQKGMPVSGVLKIIYPQSSPFIVESKSLKLYLNSFNMTRLGKNRKEGISLLLQTVQNDLDRVLESLPTVSFFDYSDEKENDFSSWEILEEKYDLNDINFEDYNENPALLESDKESSEFRIGSNLLRSNCRVTFQPDWGSVFIHFKGKEGPTPQSLIKYIVSFRNENHFHEEVCEMIYKRLWDAYNPEELLVACLYTRRGGIDISPVRTNKISLLPEVILNPRVLGRKLLRG

SEQ ID NO: 47143 - protein, 126 aa, unidentified
  source 1..126: note = Marinimicrobia bacterium
  REGION 1..126: note = tr|A0A117M9E5|A0A117M9E5_9BACT NADPH-dependent 7-cyano-7-deazaguanine reductase OS=Marinimicrobia bacterium 46_43 OX=1635280 GN=queF PE=3 SV=1
MAKAEGLSLPFEKPEKIRTDLLEPIPYRGNDQVITLEYPEFSAVCPYSGLPDIARVTIEYIPNDKIIELKSLKYYFISFRNVGIYQEDMTNRVYEDLKKVLGPKKMKVKTVYNIRGGIETTCTMGG

SEQ ID NO: 47144 - protein, 126 aa, unidentified; identical to SEQ ID NO: 47143
  source 1..126: note = Marinimicrobia bacterium
  REGION 1..126: note = tr|A0A101G521|A0A101G521_9BACT NADPH-dependent 7-cyano-7-deazaguanine reductase OS=Marinimicrobia bacterium 46_47 OX=1635279 GN=queF PE=3 SV=1

SEQ ID NO: 47145 - protein, 276 aa, Marinimicrobium koreense
  REGION 1..276: note = tr|A0A3N1NZ87|A0A3N1NZ87_9GAMM NADPH-dependent 7-cyano-7-deazaguanine reductase OS=Marinimicrobium koreense OX=306545 GN=queF PE=3 SV=1
MSEHTSNSHGPLGQQTAYASSYDPGLLFPIARAETRASLGLSELALPFYGTDLWTGYEVSWLDERGKPIVAIAQFRLPCTSPNLIESKSFKLYLNSYNQSRFAGQEQVRAQMIQDLSAAAGADVSVQLEPVADAQLPIAEAGGECIDALPVTIEHYHPAPELLATGEELVEERLHSHLLKSNCPVTGQPDWATVEIHYRGSKIEREGLLKYVVSFREHQDFHEHCVERMFVDLQARCKPEFLTVFARYTRRGGLDINPWRSSAQGSAPDFERLVRQ

SEQ ID NO: 47146 - protein, 276 aa, Marinimicrobium sp.
  REGION 1..276: note = tr|A0A2D8WMC3|A0A2D8WMC3_9GAMM NADPH-dependent 7-cyano-7-deazaguanine reductase OS=Marinimicrobium sp.; OX = 2024837 GN=queF PE=3 SV=1
MSEHTSNSHGPLGQQTAYASSYDPGLLFPIARAETRASLGLSESALPFYGTDLWTGYEVSWLDERGKPIVAIAQFRLPCTSPNLIESKSFKLYLNSYNQSRFVGQEQVRAQMIQDLSAAAGADVSVQLEPVADAQLPIAEAGGECIDALPVTIEHYHPAPELLATGEELVEERLHSHLLKSNCPVTGQPDWATVEIHYRGSKIEREGLLKYVVSFREHQDFHEHCVERMFVDLQARCQPEFLTVFARYTRRGGLDINPWRSSAQGSAPDFERLVRQ

SEQ ID NO: 47147 - protein, 137 aa, unidentified
  source 1..137: note = Marininema halotolerans
  REGION 1..137: note = tr|A0A1I6SVH2|A0A1I6SVH2_9BACL NADPH-dependent 7-cyano-7-deazaguanine reductase OS=Marininema halotolerans OX=1155944 GN=queF PE=3 SV=1
MGKVNVDHSKYQNIRFDIQDESAIMTDILETIPYEYPGKEVEIEIPTNEFTSVCPWSGLPDFAEIMISFVPNHDLIEMKSLKYYLTSYRNVGIYQEHATRRILEEVVAAIKPKRMKVEALWNPRGGLGTRVVTEYTE

SEQ ID NO: 47148 - protein, 137 aa, Marininema mesophilum
  REGION 1..137: note = tr|A0A1H2QWW0|A0A1H2QWW0_9BACL NADPH-dependent 7-cyano-7-deazaguanine reductase OS=Marininema mesophilum; OX = 1048340 GN=queF PE=3 SV=1
MGKVEVDHSKYQNIRFDIQDESAIMTDILETIPYEYPGKDVEIEIPTNEFTSVCPWSGLPDFADITISFVPNQNLIEMKSLKYYLTSYRNVGIYQEHATRRILEEVVAAIKPKRMKVKALWNPRGGLGTKVVAEYTA

SEQ ID NO: 47149 - protein, 159 aa, Marinithermus hydrothermalis
  REGION 1..159: note = tr|F2NM61|F2NM61_MARHT NADPH-dependent 7-cyano-7-deazaguanine reductase OS=Marinithermus hydrothermalis (strain DSM 14884 / JCM 11576 / T1); OX = 869210 GN=queF PE=3 SV =1
MDASLEHKLQEAAEHTRKALEYMARFGIKPEGKVRLFLPPETRQKTIDRIPFPYEERQVVVYETEPGEFSAVCPFSGLPDYGVVRIEYVPGSWILELKSLKYYLISWRDIGVYQEEATALIYRDLMQHLEDPEYLVVTTIYNVRGGIKTTCTIDSRAQG

SEQ ID NO: 47150 - protein, 272 aa, Marinobacter adhaerens
  REGION 1..272: note = tr|A0A351PPM7|A0A351PPM7_9ALTE NADPH-dependent 7-cyano-7-deazaguanine reductase OS=Marinobacter adhaerens; OX = 1033846 GN=queF PE=3 SV=1
MALNDAPLGKTSDYPDSYDPGLLFPVAREENRRRIGLEDGRWPWFGEDLWQAWEISWLRPSGVPEVAWAEIVFPAASPAIIESKSLKLYLNSLNQAVYSSREQVAEVITQDLSSACGGAVQVNLLSVDESGEAIGRPEGFELIDDEPVSEVVFEYAPEALSASGEVVTERLCSHLLKSNCPVTGQPDWATLLISYTGPKIDRGGLLRYVVSFRQKQDFHEHCVETVFTDLMGRCNPESLTVVARYTRRGGLDINPWRSTETGGDAGPRLIRQ

SEQ ID NO: 47151 - protein, 272 aa, Marinobacter adhaerens
  REGION 1..272: note = tr|E4PKD0|E4PKD0_MARAH NADPH-dependent 7-cyano-7-deazaguanine reductase OS=Marinobacter adhaerens (strain DSM 23420 / HP15) OX=225937 GN=queF PE=3 SV=1
MALNDAPLGKTSDYPDSYDPGLLFPVAREENRRRLGLEDGRWPWFGEDLWQAWEISWLRPSGVPEVAWAEIVFPAASPAIIESKSLKLYLNSLNQAVYSSREQVAEVITQDLSSACGGAVQVNLLSVDESGEAIGRPEGFELIDDEPVSEVVFEYAPEALSASGEVVTERLCSHLLKSNCPVTGQPDWATLLISYTGPKIDRGGLLRYVVSFRQKQDFHEHCVETVFTDLMGRCNPESLTVVARYTRRGGLDINPWRSTETGGDAGPRLIRQ

SEQ ID NO: 47152 - protein, 272 aa, Marinobacter algicola
  REGION 1..272: note = tr|A6EWJ4|A6EWJ4_9ALTE NADPH-dependent 7-cyano-7-deazaguanine reductase OS=Marinobacter algicola DG893 OX=443152 GN=queF PE=3 SV=1
MALIDAPLGKSSDYPDAYDPQLLFPVAREENRRRIGLEDGRWPWFGEDLWQAWEISWLRSGGVPAVAWAEIRVPSASPSIIESKSLKLYLNSLNQTVFSSADQVRDVIARDLSSASGAAVQVDLHSVDQGARAVGRPEGFVLIDDEDVDSVGYDYNPDSLQAAGEVVSEKLCSHLLKSNCPVTGQPDWATVLIDYTGPAMDRAGLLQYIVSFRQKQDFHEHCVETMFTDLMTRCQPQKLSVCARYTRRGGLDINPWRSTDPEEAVGPRLIRQ

SEQ ID NO: 47153 - protein, 272 aa, unidentified
  source 1..272: note = Marinobacter antarcticus
  REGION 1..272: note = tr|A0A1M6U0U5|A0A1M6U0U5_9ALTE NADPH-dependent 7-cyano-7-deazaguanine reductase OS=Marinobacter antarcticus OX=564117 GN=queF PE=3 SV=1
MALDNAPLGKASDYPDRYDPALLFPVAREENRRRIGLEDGRWPWFGGDLWQAWEISWLRPGGIPDLAWAEIRFPAASPSIIESKSLKLYLNSLNQTAFSSADQVAEAITGDLSSACGAAVNVRFLSVDDSGTAIGRPSGYELIDNEPVEDVVYDYAPESLSATGPVVTEKFCSHLLKSNCPVTGQPDWGTVLISYTGSAIDRAGLLRYIVSFRQKQDFHEHCVETLFTDLLRRCKPQNLTVCARYTRRGGLDINPWRSTEPEEQAGPRLIRQ

SEQ ID NO: 47154 - protein, 273 aa, unidentified
  source 1..273: note = Marinobacter confluentis
  REGION 1..273: note = tr|A0A4Z1BPB7|A0A4Z1BPB7_9ALTE NADPH-dependent 7-cyano-7-deazaguanine reductase OS=Marinobacter confluentis OX=1697557 GN=queF PE=3 SV=1
MSLIDAPLGKASEYPDSYDPALLFPVSRDVNRRRIGLDDGRWPWFGDDLWQGWEISWLRPDGVPAVAWAEIFVPAASPCIIESKSMKLYLNSLNQAVFSSFERVEEVVAQDLSSVSGAAVSVKLHSVDEGVRLSGRPEGFVLIDDESPASVAYEYNPELLSAASDQRVTERLCSHLLKSNCPVTGQPDWATLLVEYTGPAMDRAALLSYVVGFRQTQDFHEHCVETIFTDLMARCQPEHLTVCARYTRRGGLDINPLRSTAPDAPFGPRLIRQ

SEQ ID NO: 47155 - protein, 272 aa, Marinobacter daqiaonensis
  REGION 1..272: note = tr|A0A1I6GKK6|A0A1I6GKK6_9ALTE NADPH-dependent 7-cyano-7-deazaguanine reductase OS=Marinobacter daqiaonensis OX=650891 GN=queF PE=3 SV=1
MALDNAPLGKSSDYPERYAPELLFPVPRDDNRRRIALDDGRWPWFGEDLWQAWELSWLRPSGVPEVAWGTFRLPAASPSLIESKSLKLYLNSLNQEVYSSHGQVRETIERDLASACGAAASVMLYSVDRGMTAAGRPEGAILIDDEPVDGVIYEYCPEVLVAGGEKVSESLCSHLLKSNCPVTGQPDWGSLLIEYTGPAMDRAALLKYVVGFRQKQDFHEHCVETVFTDLMRACQPEQLTVSARYTRRGGLDINPWRSTSPGEAPLVRLVRQ

SEQ ID NO: 47156 - protein, 272 aa, Marinobacter excellens
  REGION 1..272: note = tr|A0A0N8KKE4|A0A0N8KKE4_9ALTE NADPH-dependent 7-cyano-7-deazaguanine reductase OS=Marinobacter excellens HL-55 OX=1305731 GN=queF PE=3 SV=1
MALHNAPLGKSSDYPDQYDPALLFPVAREENRGRIGLHDSRWPWFGEDLWQAWEISWLRPGGVPAVAWGELRFPAASPSIIESKSLKLYLNSLNQAVFSSVDQVAETITADLSSACGAAVSVSLFSVDDAAPAEGRPAGYQLIDDEPVEDVVYDYSAESLVTGAEDVTEQLCSHLLKSNCPVTGQPDWASVFIHYTGKKIDRAGLLRYIVSFRQKQDFHEHCVETLFTDLMSRCKPRELTVCARYTRRGGLDINPVRSTHPEADAGPRLVRQ

SEQ ID NO: 47157 - protein, 272 aa, Marinobacter excellens
  REGION 1..272: note = tr|A0A137SBE4|A0A137SBE4_9ALTE NADPH-dependent 7-cyano-7-deazaguanine reductase OS=Marinobacter excellens LAMA 842 OX=1306954 GN=queF PE=3 SV=1
MALHNAPLGKSSDYPDQYDPSLLFPVAREENRRRIGLEDGRWPWFGEDLWQAWEISWLRPGGVPAVAWGEIRFPAASPSIIESKSLKLYLNSLNQAVFSSADQVAETITADLSSACGAAVTVRLFSVDESAPAEGRPQGYELIDDEPVDDVVYEYSADSLSAGEEVVSEQLCSHLLKSNCPVTGQPDWASVFVRYTGPKIDRAGLLRYVVSFRQKQDFHEHCVETVFTDLMARCQPTELMVCARYTRRGGLDINPWRSTRAEGDAGPRLVRQ

SEQ ID NO: 47158 - protein, 272 aa, Marinobacter flavimaris; identical to SEQ ID NO: 47151
  REGION 1..272: note = tr|A0A3D8GZW8|A0A3D8GZW8_9ALTE NADPH-dependent 7-cyano-7-deazaguanine reductase OS=Marinobacter flavimaris OX=262076 GN=queF PE=3 SV=1

SEQ ID NO: 47159 - protein, 272 aa, unidentified
  source 1..272: note = Marinobacter fuscus
  REGION 1..272: note = tr|A0A2T1K6H8|A0A2T1K6H8_9ALTE NADPH-dependent 7-cyano-7-deazaguanine reductase OS=Marinobacter fuscus; OX = 2109942 GN=queF PE=3 SV=1
MALDNAPLGKSSEYPDQYDPSLLFPVSRDQNRHRIGLDDGRWPWFGEDMWQAWELSWLRAGGVPAVAWAEIRFPAASPAIIESKSLKLYLNSLNQLVFSSPDQVAGVIARDLSSACGATVDVRMLSVDEAAPAIGRPDGFELIDDEPLDDVIYSYAPGSLVAGEEQVSESLCSHLLKSNCPVTGQPDWATLFIRYTGPKIDRAGLLRYIVSFRQEQDFHEHCVETVFTDIMARCRPESLMVCARYTRRGGLDINPWRSTSAEDGPGPRLVRQ

SEQ ID NO: 47160 - protein, 272 aa, Marinobacter gudaonensis
  REGION 1..272: note = tr|A0A1I6G7M1|A0A1I6G7M1_9ALTE NADPH-dependent 7-cyano-7-deazaguanine reductase OS=Marinobacter gudaonensis OX=375760 GN=queF PE=3 SV=1
MALNDAPLGKTSDYPDRYDPGLLFPVAREENRRRLGLEDGRWPWFGEDLWQAWEVSWLRPGGVPEVAWAELVFPAASPAIIESKSLKLYLNSLNQAVYSSREQVAEVIAQDLSSACGGSVQVRLHSVDESGEAIGRPAGFELVDDEPVTEPVYEYSPDSLSAGGTVVTEQLCSHLLKSNCPVTGQPDWATLLVSYTGPRIDRAGLLRYVVSFRQKQDFHEHCVETVFTDIMARCRPESLTVCARYTRRGGLDINPWRSTETGQDAGPRLIRQ

SEQ ID NO: 47161 - protein, 272 aa, Marinobacter guineae
  REGION 1..272: note = tr|A0A2G1VBA5|A0A2G1VBA5_9ALTE NADPH-dependent 7-cyano-7-deazaguanine reductase OS=Marinobacter guineae; OX = 432303 GN=queF PE=3 SV=1
MALNDAPLGKTSDYPDSYNPGLLFPVAREENRRRLGLDDGRWPWFGEDLWQAWEISWLRPGGVPDVAWAEIVFPAASPSIIESKSLKLYLNSLNQAVYSTRDQVAEVITKDLSSACGGAVHVRLLSVDESGDAVGRPAGFELIDDEPVSDVVYDYAPDSLFAGDEIVTERLCSHLLKSNCPVTGQPDWATLLISYTGPKIDRAGLLRYVVSFRQKQDFHEHCVETVFTDVMSHCKPESLTVCARYTRRGGLDINPWRSTETGHDAGPRLIRQ

SEQ ID NO: 47162 - protein, 272 aa, unidentified
  source 1..272: note = Marinobacter halophilus
  REGION 1..272: note = tr|A0A2T1KH45|A0A2T1KH45_9ALTE NADPH-dependent 7-cyano-7-deazaguanine reductase OS=Marinobacter halophilus OX=1323740 GN=queF PE=3 SV=1
MALHNAPLGKSSDYPDQYDPALLFPVAREENRRRIGLHDGRWPWFGEDLWQAWEISWLRPGGVPAVAWGEIRFPATSPSIIESKSLKLYLNSLNQAVFSTEDQVVETITADLSSACGAAVDVRLFSVDEAAPAEGRPVGYELIDDEPVQNVVYDYSAESLAAGTKEVSEQLCSHLLKSNCPVTGQPDWASVFIRYTGPKIDRSGLLRYIVSFRQKQDFHEHCVETLFTDLMSRCQPSQLMVCARYTRRGGLDINPVRSTSPEDGAGPRLVRQ

SEQ ID NO: 47163 - protein, 34 aa, Marinobacter hydrocarbonoclasticus
  REGION 1..34: note = tr|A0A3B8WFT0|A0A3B8WFT0_MARHY NADPH-dependent 7-cyano-7-deazaguanine reductase QueF (Fragment); OS = Marinobacter hydrocarbonoclasticus OX=2743; GN = DCF82_13980 PE=4 SV= 1
LMVCARYTRRGGLDINPWRSTCAEDGPGPRLVRQ

SEQ ID NO: 47164 - protein, 272 aa, Marinobacter hydrocarbonoclasticus
  REGION 1..272: note = tr|A0A455W4S5|A0A455W4S5_MARHY NADPH-dependent 7-cyano-7-deazaguanine reductase OS=Marinobacter hydrocarbonoclasticus OX=2743 GN=queF PE=3 SV=1
MALHNAPLGKSSDYPDQYDPSLLFPVAREENRRRIGLEDGRWPWFGADLWQAWEISWLRPGGVPAVAWGEIRFPAESPSIIESKSLKLYLNSLNQAVFSSADQVAETITADLSSACGASVDVRLFSVDESAPAEGRPKGYELIDDEPVDDVVYEYSAESLSAGEQVVSEQLCSHLLKSNCPVTGQPDWASVFIRYTGPKMDRAGLLRYVVSFRQKQDFHEHCVETMFTDLMARCQPTELMVCARYTRRGGLDINPWRSTRAEGDAGPRLVRQ

SEQ ID NO: 47165 - protein, 272 aa, Marinobacter lipolyticus
  REGION 1..272: note = tr|R8B184|R8B184_9ALTE NADPH-dependent 7-cyano-7-deazaguanine reductase OS=Marinobacter lipolyticus SM19 OX=1318628 GN=queF PE=3 SV=1
MALNDAPLGKSSEYPDRYNPDLLFPVPREENRRRIGLNDGRWPWFGEDLWQAWEVSWLRADGVPAVAWAEIRFPAASPNIIESKSLKLYLNSLNQAVFSSPDQVADVITRDLSSGSGAAVQVTMRSVDEGAMAEGRPQGYELIDGETVDDVTYDYAPESLSAFGESVSESLCSHLLKSNCPVTGQPDWATVMIRYTGPKLDRRGLLRYIVSFRQKQDFHEHCVETLFTDIMARCKPEVLMVCARYTRRGGLDINPWRSTNPEDGSGARLIRQ

SEQ ID NO: 47166 - protein, 272 aa, Marinobacter litoralis
  REGION 1..272: note = tr|A0A3M2RA93|A0A3M2RA93_9ALTE NADPH-dependent 7-cyano-7-deazaguanine reductase OS=Marinobacter litoralis; OX = 187981 GN=queF PE=3 SV=1
MALDNAPLGKSSDYPDQYDPSLLFPVAREENRRRIGLEDGRWPWFGEDMWQAWELSWLRPGGVPVVAWAEIRFPAASPSIVESKSLKLYLNSLNQHVFSSEQQVAETITRDLSKVCGGAVHVQMQSVDATAPAVGRPDGYELIDNETVEEVVYEYAPESLSAKGPEVTEGLCSHLLKSNCPVTGQPDWGTIFIRYTGAAIDRAGLLRYIISFRQKQDFHEHCVETVFTDVMQRCKPSELMVCARYTRRGGLDINPWRSTNPQEGLGPRLVRQ

SEQ ID NO: 47167 - protein, 274 aa, Marinobacter lutaoensis
  REGION 1..274: note = tr|A0A1V2DUH0|A0A1V2DUH0_9ALTE NADPH-dependent 7-cyano-7-deazaguanine reductase OS=Marinobacter lutaoensis OX=135739 GN=queF PE=3 SV=1
MALHDAPLGKSSEYPEHYDPTLLFPVARQENRRRLGLDDGRWPWFGEDLWQAWEVSWLRPGGVPAVAWAEIHVPADSPSIIESKSLKLYLNSLNQEVFASPERLRAVVSEDLSGAAGAPVRVQLREVDTGAMAEGRPEGYELIDDEPVADVVYHYAPESLRLRDGAERVSERLCSHLLKSNCPVTGQPDWGTLLIEYTGPRIDRSALLRYIVSFRNKQDFHEHCVETVFTDLMARCKPEALTVCARYTRRGGLDINPWRSTSPGGGAGPRLIRQ

SEQ ID NO: 47168 - protein, 272 aa, unidentified
  source 1..272: note = Marinobacter manganoxydans
  REGION 1..272: note = tr|G6YV70|G6YV70_9ALTE NADPH-dependent 7-cyano-7-deazaguanine reductase OS=Marinobacter manganoxydans MnI7-9 OX=1094979 GN=queF PE=3 SV=1
MALNDAPLGKTSDYPDNYDPGLLFPVAREENRRRLGLEDGRWPWFGEDLWQAWEISWLRPNGVPEVAWAQIVFPAASPSIIESKSLKLYLNSLNQAVYSSREQVAEVITQDLSSACGGAVQVNLLSVDESGEAVGRPEGFELIDDEPVSDVVYEYSPESLEAGNEVVTEQLCSHLLKSNCPVTGQPDWATLLVSYTGPKIDRPGLLRYVVSFRQKQDFHEHCVETVFTDLMARCSPESLTVIARYTRRGGLDINPWRSTETGKDAGPRLIRQ

SEQ ID NO: 47169 - protein, 272 aa, Marinobacter mobilis
  REGION 1..272: note = tr|A0A1H3BT23|A0A1H3BT23_9ALTE NADPH-dependent 7-cyano-7-deazaguanine reductase OS=Marinobacter mobilis; OX = 488533 GN=queF PE=3 SV=1
MGLHNAPLGKNSEYPDSYSPELLFPVPRDDNRRRIGLSDGRWPWFGEDLWQAWEVSWLRPSGVPAVAWIEFRVPAASPSLIESKSWKLYLNSLNQSVFSTPEQMLEVVERDLSSACGAAVTARLHSVDESGVATGRPEGFILIDDEPVDAVSYDYDASCLSVDGPVITEKLCSHLLKSNCPVTGQPDWGTLTVEYTGPALSRAGLLKYVVGFRQKQDFHEHCVETVFTDIMTHCQPESLTVCARYTRRGGLDINPWRSTEPGYAPSVRLIRQ

SEQ ID NO: 47170 - protein, 272 aa, unidentified
  source 1..272: note = Marinobacter nanhaiticus
  REGION 1..272: note = tr|N6VUH1|N6VUH1_9ALTE NADPH-dependent 7-cyano-7-deazaguanine reductase OS=Marinobacter nanhaiticus D15-8W OX=626887 GN=queF PE=3 SV=1
MALHDAPLGKSSEYPERYAPELLFPVPRQDNRRRIGLDDGRWPWFGADLWQAWELSWLRPNGVPAVAWGVIRVPAASPSIVESKSLKLYLNSFNQEVFSDADQVRERIEHDLSSASGSVVSVELYSVDEPATIVSRPDDFELIDDEPIEVESYTPCPDRLHTGEEQVSEALCSHLLKSNCPVTGQPDWGSLLIRYTGKKIDRAALLHYVVGFRQKQDFHEHCVETVFTDLMTYCQPESLTVSAHYTRRGGLDINPWRSTDLHEPPMPRLLRQ

SEQ ID NO: 47171 - protein, 272 aa, unidentified
  source 1..272: note = Marinobacter nitratireducens
  REGION 1..272: note = tr|A0A072N4J9|A0A072N4J9_9ALTE NADPH-dependent 7-cyano-7-deazaguanine reductase OS=Marinobacter nitratireducens OX=1137280 GN=queF PE=3 SV=1
MALHDAPLGKSSAYPDRYDPNLLFPVSREENRRRLGLEDGRWPWFGEDVWQAWEVSWVRPGGVPAVAWAEICFPAASPAIIESKSLKLYLNSLNQTIFSSAEQVAETIKSDLSSASGSAVDVWMRSVDDSGEAVGRPGGFLLVDDESLDEVVYEYAPESLTASGASVSEKLCSHLLKSNCPVTGQPDWATVLIEYSGPKIDRAGLLRYIVSFRQKQDFHEHCVETIFTDIMARCQPERLSVCARYTRRGGLDINPWRSTEPAGDAGPRLIRQ

SEQ ID NO: 47172 - protein, 274 aa, Marinobacter pelagius
  REGION 1..274: note = tr|A0A366GM91|A0A366GM91_9ALTE NADPH-dependent 7-cyano-7-deazaguanine reductase OS=Marinobacter pelagius; OX = 379482 GN=queF PE=3 SV=1
MALHNAPLGKSSEYPDSYDPNLLFPVARDENRRRIGLEDGRWPWFGEDLWQAWEVSWLRPGGVPAVAWAEIFVPAASPSIIESKSLKLYFNSLNQHVFSTPEQLVETVVSDLSSACGAAVRVNLHSVDESGEATGRPEGYQLIDDEPVADVVYQYAPESLAVEQGAEVVTEQLCSHLLKSNCPVTGQPDWGTLLISYTGPKVDRSALLRYIVSFRNKQDFHEHCVETVFTDLMKQCQPTELAVCARYTRRGGLDINPWRSTQAEGNAGPRLIRQ

SEQ ID NO: 47173 - protein, 274 aa, Marinobacter pelagius
  REGION 1..274: note = tr|A0A1I4VZI8|A0A1I4VZI8_9ALTE NADPH-dependent 7-cyano-7-deazaguanine reductase OS=Marinobacter pelagius; OX = 379482 GN=queF PE=3 SV=1
MALHNAPLGKSSEYPDSYDPNLLFPVARDENRRRIGLEDGRWPWFGEDLWQAWEVSWLRPGGVPAVAWAEIFVPAASPSIIESKSLKLYLNSLNQHVFSTPEQLVETVVSDLSSACGAAVRVNLHSVDESGQAIGRPEGYQLIDDEPVGDVVYQYAPESLAVEQSAEVVTEQLCSHLLKSNCPVTGQPDWGTLLIRYTGPKIDRSALLRYIVSFRNKQDFHEHCVETVFTDLMKQCQPTELAVCARYTRRGGLDINPWRSTQAEGSAGPRLIRQ

SEQ ID NO: 47174 - protein, 272 aa, unidentified
  source 1..272: note = Marinobacter persicus
  REGION 1..272: note = tr|A0A2S6G7K8|A0A2S6G7K8_9ALTE NADPH-dependent 7-cyano-7-deazaguanine reductase OS=Marinobacter persicus; OX = 930118 GN=queF PE=3 SV=1
MALDKAPLGKTSDYPDRYDPTLLFPVPREENRRRIGLHDGRWPWFGEDLWQAWEISWLRPGGVPAVAWAEIRFPAASPAIIESKSLKLYLNSFNQAVFSSIEQVQHTMEMDLSSACGAAVHVLVHSVDEGAPAVGRPEGYDLIDDLPVENVVYEYAPESLSADGDTVTEQLCSHLLKSNCPVTGQPDWATVLIRYTGPKIDAAGLLRYIVGFRQKQDFHEHCVETLFTDLMEHCRPSELMVCARYTRRGGLDINPWRSTSPADGPGPRLVRQ

SEQ ID NO: 47175 - protein, 272 aa, unidentified
  source 1..272: note = Marinobacter persicus
  REGION 1..272: note = tr|A0A1I3WS23|A0A1I3WS23_9ALTE NADPH-dependent 7-cyano-7-deazaguanine reductase OS=Marinobacter persicus; OX = 930118 GN=queF PE=3 SV=1
MALDKAPLGKTSEYPDRYDPTLLFPVPREENRRRLDLDDGRWPWFGEDLWQAWELSWLRPGGVPAVAWAEIRFPAASPAIIESKSLKLYLNSFNQAVFSSVEQVQHTMEADLSSACGAAVHVRMRSVDETEPAVGRPEGYRLIDDLPVEDVVYDYAPDSLSAGGGTVTEQLCSHLLKSNCPVTGQPDWATVLIRYTGPRIDASGLLRYIVGFRQKQDFHEHCVETLFTDLMHHCQPTELMVCARYTRRGGLDINPWRSTSAGDGPGPRLIRQ

SEQ ID NO: 47176 - protein, 272 aa, Marinobacter psychrophilus
  REGION 1..272: note = tr|A0A0H4I3I5|A0A0H4I3I5_9ALTE NADPH-dependent 7-cyano-7-deazaguanine reductase OS=Marinobacter psychrophilus OX=330734 GN=queF PE=3 SV=1
MALDNAPLGKISEYPDTYDPGQLFPIPRLHNRQRIGLEDGLWPWFGGDLWQAWEVSWLRSGGVPVVAWAEIEFAAESPQLVESKSLKLYLNSLNQTVYASAERVCEVIVADLSSASGAAVRVTLHSVDEGALAQGRPHEYQLIDDEPLTDVVYSYAPESLVTGTKIVSEKLCSHLLKSNCPVTGQPDWGSVLIDYTGPKLNRVGLLRYIVSFRQKQDFHEHCVETLFTDLMRHCKPQALTVTARYTRRGGLDINPWRSTRADANSGPRLIRQ

SEQ ID NO: 47177 - protein, 272 aa, unidentified
  source 1..272: note = Marinobacter salarius
  REGION 1..272: note = tr|A0A1W6KAN0|A0A1W6KAN0_9ALTE NADPH-dependent 7-cyano-7-deazaguanine reductase OS=Marinobacter salarius; OX = 1420917 GN=queF PE=3 SV=1
MALNDAPLGKSSDYPDAYDPQLLFPVAREENRRRIGLEDGRWPWFGEDLWQAWEISWLRTGGVPAVAWAEIRVPSASPSIIESKSLKLYLNSLNQTVFSSADQVRDVIARDLSSASGAAVNVDLHSVDQGARAVGRPEGFVLIDDEDVESVGYDYNPDSLQATGDVVSEKLCSHLLKSNCPVTGQPDWATVLIDYAGPAMDRAGLLQYIVSFRQKQDFHEHCVETMFTDLMARCQPQKLSVCARYTRRGGLDINPWRSTDPEEAVGPRLIRQ

SEQ ID NO: 47178 - protein, 272 aa, unidentified
  source 1..272: note = Marinobacter salarius
  REGION 1..272: note = tr|W5YQ24|W5YQ24_9ALTE NADPH-dependent 7-cyano-7-deazaguanine reductase OS=Marinobacter salarius; OX = 1420917 GN=queF PE=3 SV=1
MALNDAPLGKSSDYPDAYDPQLLFPVAREENRRRIGLEDGRWPWFGEDLWQAWEISWLRTGGVPAVAWAEIRVPSASPSIIESKSLKLYLNSLNQTVFSSADQVRDVIARDLSSASGAAVNVDLHSVDQGARAVGRPEGFVLIDDEDVESVGYDYNPDSLQATGDVVSEKLCSHLLKSNCPVTGQPDWATVLIDYTGPAMDRAGLLQYIVSFRQKQDFHEHCVETMFTDLMARCQPQKLSVCARYTRRGGLDINPWRSTDPEEAVGPRLIRQ

SEQ ID NO: 47179 - protein, 272 aa, unidentified
  source 1..272: note = Marinobacter salinus
  REGION 1..272: note = tr|A0A1D9GKN4|A0A1D9GKN4_9ALTE NADPH-dependent 7-cyano-7-deazaguanine reductase OS=Marinobacter salinus; OX = 1874317 GN=queF PE=3 SV=1
MALHDAPLGKSSEYPDRYDPNLLFPVARDENRRRLGLADGRWPWFGEDLWQAWEVSWLRQGGVPAVVWAEIRFPSASPCIIESKSLKLYLNSFNQSIFSSAEQVAETLTRDLSSACGASVHVQLRSVDESGDALGRPPGFELIDDEPVGEVVYEYAPDSLVVSGETVTEQLCSHLLKSNCPVTGQPDWATIMVSYTGPAIVRSGLLRYLVSFRQKQDFHEHCVETVFTDLMRYCGPKSLMVCARYTRRGGLDINPWRATEPGHDAGPRLIRQ

SEQ ID NO: 47180 - protein, 273 aa, Marinobacter santoriniensis
  REGION 1..273: note = tr|M7D7C1|M7D7C1_9ALTE NADPH-dependent 7-cyano-7-deazaguanine reductase OS=Marinobacter santoriniensis NKSG1 OX=1288826 GN=queF PE=3 SV=1
MALHTAPLGKSSEYPDRYDPDILFPVPREENRRRIGLDDGRWPWFGEDLWQAWELSWLKPGGVPVVAWAEIHVPGASPFLIESKSLKLYLNSLNQHTFSSWQQAGETIINDLSSACGAAVRVQLHSVDEDVVTRGRPAGYELIDDEPVDGVVYEYDVASLAVRDEAVVTESLCSHLLKSNCPVTGQPDWGTLLIRYTGKPIDRAGLLRYVVSFRNKQDFHEHCVETVFTDLMAHCAPDSLEVCARYTRRGGLDINPWRSTAPEGDPGPRLVRQ

SEQ ID NO: 47181 - protein, 272 aa, Marinobacter segnicrescens
  REGION 1..272: note = tr|A0A1H9YEB3|A0A1H9YEB3_9ALTE NADPH-dependent 7-cyano-7-deazaguanine reductase OS=Marinobacter segnicrescens OX=430453 GN=queF PE=3 SV=1
MALDHAPLGKSSEYPDRYAPELLFPVPRDDNRRRIGLEDGRWPWFGDDLWQAWELSWLRPGGVPVVAWGEFRVPAASPSLIESKSLKLYLNSLNQEVFSSHDQVRETIERDLSSACGAQVAVSLYSVDRGMTAEGRPPGAILIDDEPVSSVGYDYCPEVLKASGETVTESLCSHLLKSNCPVTGQPDWGSLLVEYTGPAIDRSALLQYVVGFRQKQDFHEHCVETVFTDLMQRCQPEHLVVSARYTRRGGLDINPWRSTDPGEAPRMRLVRQ

SEQ ID NO: 47182 - protein, 272 aa, unidentified; identical to SEQ ID NO: 47157
  source 1..272: note = Marinobacter shengliensis
  REGION 1..272: note = tr|A0A2T1KNA0|A0A2T1KNA0_9ALTE NADPH-dependent 7-cyano-7-deazaguanine reductase OS=Marinobacter shengliensis OX=1389223 GN=queF PE=3 SV=1

SEQ ID NO: 47183 - protein, 272 aa, unidentified
  source 1..272: note = Marinobacter similis
  REGION 1..272: note = tr|W5YGK3|W5YGK3_9ALTE NADPH-dependent 7-cyano-7-deazaguanine reductase OS=Marinobacter similis; OX = 1420916 GN=queF PE=3 SV=1
MALHNAPLGKASEYPDRYDPSLLFPVARDENRRRIGLNDGRWPWFGEDLWQAWEVSWLRLSGVPAVAWAEIRFPAASPSIIESKSLKLYLNSFNQSAFSSPEQVAKTITDDLSSACGAAVQVDMKSVDEPGDAFGRPQGYELIDDEPVSDVVYEYSPESLSASGEVVTEKLCSHLLKSNCPVTGQPDWATLMVSYTGPKLDRAGLLKYVVSFRQKQDFHEHCVETVFTDLMAQCQPEKLMVCARYTRRGGLDINPWRATEPTQDSSGRLVRQ

SEQ ID NO: 47184 - protein, 272 aa, Marinobacter sp.
  REGION 1..272: note = tr|A0A1E7PZN1|A0A1E7PZN1_9ALTE NADPH-dependent 7-cyano-7-deazaguanine reductase OS=Marinobacter sp. X15-166B OX=1897620 GN=queF PE=3 SV=1
MALDKAPLGKHSEYPDKYSPDLLFPVPRDDNRRRIALADGRWPWFGEDLWQAWEISWLQPNGVPAVVWGVIRVPAASASLIESKSLKLYLNSLNQTVFSTTDQVRELISRDLSSLVGAAVTVDLYSVDEAVAAVGRPEGYQLIDGEPVTSVDYQYRPELLQATGPRVTEQLCSHLLKSNCPVTGQPDWGSLLIEYTGPQIARPQLLQYVVGFRQQQDFHEHCVETVFTDIMARCQPEQLTVCARYTRRGGLDINPWRSTQPGSAPLVRLVRQ

SEQ ID NO: 47185 - protein, 272 aa, Marinobacter sp.; identical to SEQ ID NO: 47178
  REGION 1..272: note = tr|A0A3S1DXK9|A0A3S1DXK9_9ALTE NADPH-dependent 7-cyano-7-deazaguanine reductase OS=Marinobacter sp. NP-6; OX = 2488666 GN=queF PE=3 SV=1

SEQ ID NO: 47186 - protein, 272 aa, unidentified
  source 1..272: note = Marinobacter subterrani
  REGION 1..272: note = tr|A0A0J7LZ74|A0A0J7LZ74_9ALTE NADPH-dependent 7-cyano-7-deazaguanine reductase OS=Marinobacter subterrani OX=1658765 GN=queF PE=3 SV=1
MALLDAPLGKTSDYPDRYDPDLLFPVARGENRRRLGLNDGRWPWFGADLWQAWEISWLRPGGIPEVAWAEFVFPAASPSIIESKSLKLYLNSLNQTVYSSAEQVAEVITQDLSSACGAAVQVKMMSVDESGDAIGRPGGFTLIDDEPVSDVVYDYAPESLSSGGEDVTEHLCSHLLKSNCPVTGQPDWATLLISYTGPKMDRAGLLRYVVSFRQKQDFHEHCVETVFTDLMNRCMPESLTVCARYTRRGGLDINPWRSTETGQDAGPRLVRQ

SEQ ID NO: 47187 - protein, 272 aa, Marinobacter vinifirmus
  REGION 1..272: note = tr|A0A558BEK8|A0A558BEK8_9ALTE NADPH-dependent 7-cyano-7-deazaguanine reductase OS=Marinobacter vinifirmus OX=355591 GN=queF PE=3 SV=1
MALHNAPLGKSSEYPDQYDPSLLFPVAREENRRRIGLEDGRWPWFGEDLWQAWEISWLRPGGVPAVAWAEIRFPAASPSIIESKSLKLYLNSLNQAVFSTVEQVAETITADLSSACGAAVDVRLLSVDESAPAIGRPEGYELIDDEPVDDVVYEYSAESLTVSGEEVSEQLCSHLLKSNCPVTGQPDWATVLIRYQGKKIDRSGLLRYIVSFRQKQDFHEHCVETVFTDLMARCKPEQLTVCARYTRRGGLDINPWRSTSPEQGPGPRLVRQ

SEQ ID NO: 47188 - protein, 272 aa, Marinobacter zhejiangensis
  REGION 1..272: note = tr|A0A1I4P702|A0A1I4P702_9ALTE NADPH-dependent 7-cyano-7-deazaguanine reductase OS=Marinobacter zhejiangensis OX=488535 GN=queF PE=3 SV=1
MGLHNAPLGKSSEYPESYSPDLLFPVVRDDNRRRIGLSDGRWPWFGEDLWQAWEVSWLRPSGVPAVAWVEFRVPAASPALIESKSWKLYLNSLNQATFSSAEQMLSVVEKDLSSACGAAVKARLHSVDDSGDAIGRPEGFILIDDEPVDSVSYEYDPSSLTTEGPVVTEKLCSHLLKSNCPVTGQPDWGTLTVEYTGPAISKAGLLKYVVGFRQKQDFHEHCVETVFTDIMAHCKPESLTVCARYTRRGGLDINPWRSTEPGAAPSLRLVRQ

SEQ ID NO: 47189 - protein, 275 aa, unidentified
  source 1..275: note = Marinobacterium aestuarii
  REGION 1..275: note = tr|A0A1A9F0R4|A0A1A9F0R4_9GAMM NADPH-dependent 7-cyano-7-deazaguanine reductase OS=Marinobacterium aestuarii OX=1821621 GN=queF PE=3 SV=1
MSHEDQVLYQSPLGQGTAYVNTYDAGQLYPIARNLNWQKRGIDQTSLPFAGEDIWNAYEVSWLNGRGKPLVRLAEFRIPASSSHIIESKSFKLYLNSFNLSRFDSEAEVAALMVRDLSAAAGAAVGVRLIEPDAAAPIGAFEGRCIDELDVEIEHYQPAPELLCAGENAVTESLYSHLLKSNCPVTGQPDWASIQVSYTGPQIDREGLLRYLVSYREHGDFHEQCVENIFMDIWQQCRPESLSVYARYVRRGGLDINPYRSSQPGEAPNLRLDRQ

SEQ ID NO: 47190 - protein, 274 aa, Marinobacterium georgiense
  REGION 1..274: note = tr|A0A1H4BPC8|A0A1H4BPC8_9GAMM NADPH-dependent 7-cyano-7-deazaguanine reductase OS=Marinobacterium georgiense DSM 11526 OX=1122198 GN=queF PE=3 SV=1
MSEHDQVKASPLGQDTVYVNEYDASLLYPIRRDLNWEVKGVKRSSLPFRGLDIWNAYEVSWLDAGGKPVVRLAEFRIPASSPCIIESKSFKLYLNSFNLSRFAQESEVRERMQADLSAAAGAPVQVKLIPLTQAVEVSQLKGRCLDDLPLQVEHYSPAPELLNASGPVTEETLVSHLLKSNCPVTGQPDWASVQIRYKGAQIDHKGLLAYLISYREHGDFHEQCVENIFMDIWQRCRPQKLSVYARYVRRGGLDINPYRSSINDEPQNLRLSRQ

SEQ ID NO: 47191 - protein, 274 aa, Marinobacterium halophilum
  REGION 1..274: note = tr|A0A2P8ETW9|A0A2P8ETW9_9GAMM NADPH-dependent 7-cyano-7-deazaguanine reductase OS=Marinobacterium halophilum OX=267374 GN=queF PE=3 SV=1
MSEHEQVKASPLGQETAYVNEYDASLLYPIARDLNWAAKGVKRAALPFRGLDIWNAYEVSWLDRGGKPVVRLAEFRIPASSPHIIESKSFKLYLNSYNLSRFGGEADVRERMTADLSAVAGAPVEVILTSLTAPVEVVQLKGRCLDELPLQVEHYTPAPELLTAGGAVQDEILVSHLLKSNCPVTGQPDWASVQIRYKGPQIDQKGLLAYLISYREHGDFHEQCVENIFMDIWQRCRPQKLSVYARYVRRGGLDINPYRSSINDVPQNLRLSRQ

SEQ ID NO: 47192 - protein, 274 aa, Marinobacterium lutimaris
  REGION 1..274: note = tr|A0A1H5ZF68|A0A1H5ZF68_9GAMM NADPH-dependent 7-cyano-7-deazaguanine reductase OS=Marinobacterium lutimaris OX=568106 GN=queF PE=3 SV=1
MSEHESVKQSPLGQGTRYVNRYDPSLLYPIARDINWQAQGVDRTKLPFRGVDIWNAYELSWLDSRGKPVVRLAEFRIPASSESIIESKSFKLYLNSYNLTRFGSEDEVRSHLQQDLSQAAGGQVSVRLIRPDAPGTIGQLEGVCIDDLEIDVEHYTPAPSLLKCSSETVTETLTTHLLKSNCPVTGQPDWGSVQIRYRGGKIDRKGLLAYIVSYREHGDFHEQCVENIFMDIWRHCRPQKLSVYARYVRRGGLDINPYRSSIQDEPVNTRLSRQ

SEQ ID NO: 47193 - protein, 274 aa, unidentified
  source 1..274: note = Marinobacterium mangrovicola
  REGION 1..274: note = tr|A0A4R1GIJ2|A0A4R1GIJ2_9GAMM NADPH-dependent 7-cyano-7-deazaguanine reductase OS=Marinobacterium mangrovicola OX=1476959 GN=queF PE=3 SV=1
MSEHESVKQSPLGQGTRYVNRYDPSLLYPIARDINWQAQGVDRATLPFRGVDIWNAYELSWLDSRGKPVVRLAEFRIPASSDHIIESKSFKLYLNSYNLTRFGSEEEARSHLQQDLSQAAGGQVSVRLIRPDAPATIGQLEGVCIDDLEIDVEHYSPAPSLLKCSSETVTETLVTHLLKSNCPVTGQPDWGSVQIRYRGGKIDRKGLLAYIVSYREHGDFHEQCVENIFMDIWRHCRPQKLSVYARYVRRGGLDINPYRSSIQDEPVNTRLSRQ

SEQ ID NO: 47194 - protein, 274 aa, Marinobacterium sp.
  REGION 1..274: note = tr|A0A081FZP6|A0A081FZP6_9GAMM NADPH-dependent 7-cyano-7-deazaguanine reductase OS=Marinobacterium sp. AK27 OX=1232683 GN=queF PE=3 SV=1
MSEHESIKQSPLGQGTRYVNRYDPGLLYPIAREINWQAKGIDRSTLPFRGVDIWNAYELSWLDSRGKPVVRLAEFRIPANSAHIIESKSFKLYLNSYNLTRFGSESEVQAHLKQDLSQAAGGDVSVRLVRPDAPLQMGKLEGACIDDLEIDVEHYTPAPNLLQSSNEIVSETLVSHLLKSNCPVTGQPDWGSVQIRYKGGKIDRKGLLAYIVSYREHGDFHEQCVENIFMDIWQRCRPQKLSVYARYVRRGGLDINPYRSSIADEPVNPRLARQ

SEQ ID NO: 47195 - protein, 274 aa, Marinobacterium stanieri
  REGION 1..274: note = tr|A0A1N6SJ46|A0A1N6SJ46_9GAMM NADPH-dependent 7-cyano-7-deazaguanine reductase OS=Marinobacterium stanieri OX=49186 GN=queF PE=3 SV=1
MSEHHQVKASPLGQETAYVNEYDPKLLYPIARDLNWQAKGVTRSSLPFRGLDIWNAYEVSWLDQGGKPVVRLAEFRIPASSPNIIESKSFKLYLNSYNLSRFCNEAEVRTRMQEDLSAAAGAPVDVILTSLNAPVEVQQLKGLCLDELPLQVEHYTPAPQLLTSGGQVQDETLVSHLLKSNCPVTGQPDWASVQIRYKGPQIDHKGLLAYLISYREHGDFHEQCVENIFMDIWQRCRPQKLSVYARYVRRGGLDINPYRSSINDTPQNLRLSRQ

SEQ ID NO: 47196 - protein, 163 aa, Marinococcus halophilus
  REGION 1..163: note = tr|A0A510Y3Y5|A0A510Y3Y5_MARHA NADPH-dependent 7-cyano-7-deazaguanine reductase OS=Marinococcus halophilus OX=1371 GN=queF PE=3 SV=1
MPEREDIEQLDQLGSEKTSYTFEYDPSLLETFENTHPYRDYFVKFNCPEFTTLCPKTGQPDFGTLYISYIPDEKMVESKSLKLYLFSFRNHGGFHEDSINTIVNDLVHLMNPRYLEIWGKFTPRGGISIDPFVNYGRAGSKYEQLAENRLFQHDLYPEPIDNR

SEQ ID NO: 47197 - protein, 163 aa, Marinococcus luteus
  REGION 1..163: note = tr|A0A1H2VF36|A0A1H2VF36_9BACI NADPH-dependent 7-cyano-7-deazaguanine reductase OS=Marinococcus luteus; OX = 1122204 GN=queF PE=3 SV=1
MPEREDIEQLDQLGSEKTAYTFEYDPSLLEVFENTHPYRDYFVKFNCPEFTTLCPKTGQPDFGTLYISYIPDEKMVESKALKLYLFSFRNHGGFHEDSINTIVNDLVELMDPRYLEIWGKFTPRGGISIDPFVNYGRAGSKYEQLAENRLFQHDLYPEPIDNR

SEQ ID NO: 47198 - protein, 271 aa, Marinomonas alcarazii
  REGION 1..271: note = tr|A0A318VAN9|A0A318VAN9_9GAMM NADPH-dependent 7-cyano-7-deazaguanine reductase OS=Marinomonas alcarazii; OX = 491949 GN=queF PE=3 SV=1
MGFLPLGQQTEYVSEYDAGLLYPIARVDKWTEMGIESERLPFYGEDVWNAYELSWLNLKGKPIVALAEFRLPCDSPNIIESKSFKLYLNSLNQMRYESAEEVQGILERDLSQAAQAEVTVIIRDVDSMSSLVVLTPDYCIDDLDIDVSEYHPNADLLAIDESMGIVEERLVSHLLKSNCPVTNQPDWGSVFIDYKGPKINHESLLRYVISFREHTDFHEQCVERIFIDIMRHCRPESLTVYARYVRRGGLDINPYRSSTPVVLGNDRLTRQ

SEQ ID NO: 47199 - protein, 270 aa, Marinomonas aquimarina
  REGION 1..270: note = tr|A0A1A8TFE3|A0A1A8TFE3_9GAMM NADPH-dependent 7-cyano-7-deazaguanine reductase OS=Marinomonas aquimarina; OX = 295068 GN=queF PE=3 SV=1
MGFLPLGQKTDYVSEYDPGLLFPIARVDKWRDMGIESERLPFHGEDIWNAYELSWLNKKGKPIVATAEFRLPCSSPNIIESKSFKLYLNSLNQMRYQDQFEVQEILERDLTAAAGAPVSVVIRDVDAMESLVVLTPDYCIDELDVEINEYHPNADLLTVKDTEQVEERLVSHLLKSNCPVTNQPDWGSVFIDYQGGQIDHAGLLKYIASFREHTDFHEQCVERIFIDIMTRCKPQSLVVYARYVRRGGLDINPYRSTSEIVLGNDRLARQ

SEQ ID NO: 47200 - protein, 272 aa, Marinomonas aquiplantarum
  REGION 1..272: note = tr|A0A366CZX7|A0A366CZX7_9GAMM NADPH-dependent 7-cyano-7-deazaguanine reductase OS=Marinomonas aquiplantarum OX=491951 GN=queF PE=3 SV=1
MGFLPLGQQTEYVSEYDAGLLYPIARVDKWTEMGIASERLPFYGEDIWNAYELSWLDMNGKPVVAMAEFRLPCESPNIIESKSFKLYLNSLNQMRYESRDQVQDILEKDLSAAAGASVSVAIRDLDAMSSLVVLTPDYCIDDLDVTIENYHPNSDLLQLDKEAGQVEERLVSHLLKSNCPVTNQPDWGSVFIDYRGPKIHHESLLKYIISFREHTDFHEQCVERIFIDIMRHFQPEFLTVYARYVRRGGLDINPYRSTQQGLVLGNDRLSRQ

SEQ ID NO: 47201 - protein, 270 aa, Marinomonas balearica
  REGION 1..270: note = tr|A0A4R6M670|A0A4R6M670_9GAMM NADPH-dependent 7-cyano-7-deazaguanine reductase OS=Marinomonas balearica; OX = 491947 GN=queF PE=3 SV=1
MGMLPLGQKTEYVSKYDPSLLFPIPRVDKWAEMGIERNRLPFFGEDIWNAYELSWLNEKGKPVVALGEFRIPHDSPNIIESKSFKLYLNSFNQSTYENIAILQEVIEQDLSKAAGAPVTVMLRDVDSMESLVVLTPDYCIDDIDVEIDTYHPDSSLLTIEHDGIVEERLVSHLLRSNCPVTNQPDWGSIFIDYKGKKIDHASLLKYIVSFREHTDFHEQCVERVFIDIMQQCQPESLIVYARYVRRGGLDINPYRSSSEIVLGNDRLTRQ

SEQ ID NO: 47202 - protein, 270 aa, Marinomonas communis
  REGION 1..270: note = tr|A0A4R6X882|A0A4R6X882_9GAMM NADPH-dependent 7-cyano-7-deazaguanine reductase OS=Marinomonas communis; OX = 28254 GN=queF PE=3 SV=1
MGFLPLGQKTEYVSEYDPGLLFPIPRVDKWKDMGIESERLPFHGEDIWNAYELSWLNKKGKPIVATAEFRLPCHSPNIIESKSFKLYLNSLNQMRYEDQFEVQELLEKDLSAAAGADVTVIIRDVEAMEALVVLTPDYCIDDLDVEVNEYHPNADLLTTVEGEQVEERLVSHLLKSNCPVTNQPDWGSVFIDYRGAKIDHAGLLKYVASFREHTDFHEQCVERIFIDIMTKCQPESLIVYARYVRRGGLDINPYRSTDPIVLGNDRLTRQ

SEQ ID NO: 47203 - protein, 271 aa, Marinomonas foliarum
  REGION 1..271: note = tr|A0A369A314|A0A369A314_9GAMM NADPH-dependent 7-cyano-7-deazaguanine reductase OS=Marinomonas foliarum; OX = 491950 GN=queF PE=3 SV=1
MGFLPLGQQTEYVSEYDAGLLYPIARVDKWTEMGIESERLPFYGEDVWNAYELSWLNLKGKPIVALAEFRLPCDSPNIIESKSFKLYLNSLNQMRYESPEEVQAILERDLSHAAEAEVTVIIRDVDSMSSLVVLTPDYCIDDLDVDVTEYHPNAGLLAIDDSMGIVEERLVSHLLKSNCPVTNQPDWGSVFIDYKGDKIDHESLLRYVISFREHTDFHEQCVERIFIDIMRHCRPESLTVYARYVRRGGLDINPYRSSAPVVLGNDRLTRQ

SEQ ID NO: 47204 - protein, 270 aa, unidentified
  source 1..270: note = Marinomonas fungiae
  REGION 1..270: note = tr|A0A0K6ILD8|A0A0K6ILD8_9GAMM NADPH-dependent 7-cyano-7-deazaguanine reductase OS=Marinomonas fungiae; OX = 1137284 GN=queF PE=3 SV=1
MGFLPLGQKTDYVSEYDSGLLFPIARVDKWRDMGIESERLPFHGEDIWNAYELSWLNKKGKPIVATAEFRLPCSSPNIIESKSFKLYLNSLNQMRYEDQFEVQGILEADLSAAAGAPVTVIIRDVDAMESLVVLTPDYCIDDLDVEINEYHPNADLLTVKETEQVEERLVSHLLKSNCPVTNQPDWGSVFIDYQGGQIDHAGLLKYIASFREHTDFHEQCVERIFIDIMTRCKPQSLVVYARYVRRGGLDINPYRSTSPIVLGNDRLARQ

SEQ ID NO: 47205 - protein, 271 aa, unidentified
  source 1..271: note = Marinomonas gallaica
  REGION 1..271: note = tr|A0A1C3JUM6|A0A1C3JUM6_9GAMM NADPH-dependent 7-cyano-7-deazaguanine reductase OS=Marinomonas gallaica; OX = 1806667 GN=queF PE=3 SV=1
MGFLPLGQKTDYVSEYDPGLLFPIARVDKWRDMGIESERLPFHGEDIWNAYELSWLNKKGKPIVAMAEFRLPCSSPNIIESKSFKLYLNSLNQMRYDDAFEVQQILEDDLSKVAGAPVGVIIRDVDAMESLVVLTPDYCIDDLDVEVTEYHPNASLLVNKLGGEKVEERLVSHLLKSNCPVTNQPDWGSVFIDYRGKQIDHAALLKYVASFREHTDFHEQCVERIFIDIMTQCKPDSLVVYARYVRRGGLDINPYRSTESIVLGNDRLSRQ

SEQ ID NO: 47206 - protein, 271 aa, unidentified
  source 1..271: note = Marinomonas hwangdonensis
  REGION 1..271: note = tr|A0A3M8Q1V0|A0A3M8Q1V0_9GAMM NADPH-dependent 7-cyano-7-deazaguanine reductase OS=Marinomonas hwangdonensis OX=1053647 GN=queF PE=3 SV=1
MGFLPLGQQTEYVSEYDAGLLYPIARVDKWAEMGIETERLPFYGEDIWNAYEVSWLNAKGKPIAALAEFRLPCDSPNIIESKSFKLYLNSLNQMRYESVEEVQALLEKDLSDAACAPVTVFIRDVDNMASLVVMTPDYCIDELDIEVSEYHPNADLLTVDASQGVVEERLVSHLLKSNCPVTNQPDWGSVFIEYKGTKICHESLLKYVISFREHTDFHEQCVERMFIDILRQCQPESLTVYARYVRRGGLDINPYRSTMPLVLGNDRLTRQ

SEQ ID NO: 47207 - protein, 270 aa, Marinomonas mediterranea
  REGION 1..270: note = tr|F2K3C1|F2K3C1_MARM1 NADPH-dependent 7-cyano-7-deazaguanine reductase OS=Marinomonas mediterranea (strain ATCC 700492 / JCM 21426 / NBRC 103028 / MMB-1) OX=717774GN=queF PE=3 SV=1
MGVLPLGQKTEYVSTYDASLLFPIPRVDKWGEMGIEEDRLPFFGEDIWNAYELSWLNLKGKPVVALGEFRIPHDSPNIIESKSFKLYLNSFNQMKHEHFASVQAIMERDLSAAAGAPVTVILRDVDSMESLVVLTPDYCIDEIDVDIDTYQPNSELLQREHDGVVEERLVSHLLRSNCPVTNQPDWGSVFIDYKGMKIDHASLLKYIVSFREHTDFHEQCVERIFIDIMQRCQPESLIVYARYVRRGGLDINPYRSSTEIVLGNDRLTRQ

SEQ ID NO: 47208 - protein, 271 aa, Marinomonas polaris
  REGION 1..271: note = tr|A0A1M4ZWD3|A0A1M4ZWD3_9GAMM NADPH-dependent 7-cyano-7-deazaguanine reductase OS=Marinomonas polaris DSM 16579 OX=1122206 GN=queF PE=3 SV=1
MGFLPLGQQTEYVSEYDAGLLYPIARVDKWTEMAIESERLPFFGEDVWNAYELSWLNLKGKPIVALAEFRLPCDSPNIIESKSFKLYLNSLNQMRYESAEEVQAILEKDLSRAAGAEVTVIIRDVDSMASLVVLTPDYCIDELDVDVSEYQPNAGLLETDETMGVVEERLVSHLLKSNCPVTNQPDWGSVFIDYKGPKIHHESLLKYVISFREHTDFHEQCVERIFIDIMRQCKPESLTVYARYVRRGGLDINPYRSTAPLVLGNDRLTRQ

SEQ ID NO: 47209 - protein, 271 aa, Marinomonas pollencensis
  REGION 1..271: note = tr|A0A3E0DRN2|A0A3E0DRN2_9GAMM NADPH-dependent 7-cyano-7-deazaguanine reductase OS=Marinomonas pollencensis OX=491954 GN=queF PE=3 SV=1
MGFLPLGQQTEYVSEYDAGLLYPIARVDKWAEMDIEAERLPFFGEDIWNAYEVSWLNLKGKPIVALAEFRLPCDSPNIIESKSFKLYLNSLNQMRYESFADVQQLLETDLSNAAGAPVTVMLRDVDSMAALVVLTPDYCIDELDVEIDEYQPNAELLTVDASQGVVEERLVSHLLKSNCPVTNQPDWGSVFIDYKGAKINHQQLLKYVISFREHTDFHEQCVERIYIDIMRYCKPESLTVYARYVRRGGLDINPYRSSAPLVLGNDRLTRQ

SEQ ID NO: 47210 - protein, 272 aa, Marinomonas posidonica
  REGION 1..272: note = tr|F6D180|F6D180_MARPP NADPH-dependent 7-cyano-7-deazaguanine reductase OS=Marinomonas posidonica (strain CECT 7376 / NCIMB 14433 / IVIA-Po-181) OX=491952; GN = queF PE =3 SV=1
MGFLPLGQQTEYVSEYDAGLLYPIGRVDKWTDMGIASERLPFYGEDVWNAYELSWLDLKGKPVVAMAEFRLPCESPNIIESKSFKLYLNSLNQMRYESRDQVQEILEKDLSAAAGARVSVVIRELDSMSSLVVLTPDYCIDELEVTIEDYHPNSDLLRVEKEAGQVEERLVSHLLKSNCPVTNQPDWGSVFIDYRGPKIHHESLLKYIVSFREHTDFHEQCVERIFIDIMRHCQPEFLTVYARYVRRGGLDINPYRSTVQGLVLGNDRLTRQ

SEQ ID NO: 47211 - protein, 271 aa, Marinomonas primoryensis
  REGION 1..271: note = tr|A0A2Z4PTD7|A0A2Z4PTD7_9GAMM NADPH-dependent 7-cyano-7-deazaguanine reductase OS=Marinomonas primoryensis OX=178399 GN=queF PE=3 SV=1
MGFLPLGQQTDYVSEYDSGLLYPIARVDKWSEMGIASERLPFYGEDVWNAYELSWLNLKGKPVVALAEFRLPCDSPNIIESKSFKLYLNSLNQMRYDSTEDVQAILEKDLSNAAGADVTVIIRDVDSMASLVVLTPDYCIDELDVDITEYHPNAGLLTLDAFSGVVEERLVSHLLKSNCPVTNQPDWGSVFIDYKGSQIHHESLLKYIVSFREHTDFHEQCVERIFIDIMRECQPESLTIYARYVRRGGLDINPYRSSAPLVLGNDRLTRQ

SEQ ID NO: 47212 - protein, 271 aa, unidentified
  source 1..271: note = Marinomonas profundimaris
  REGION 1..271: note = tr|W1RSZ9|W1RSZ9_9GAMM NADPH-dependent 7-cyano-7-deazaguanine reductase OS=Marinomonas profundimaris OX=1208321 GN=queF PE=3 SV=1
MGFLPLGQQTEYVSEYDAGLLYPIARVDKWSEMGIASERLPFYGEDVWNAYEMSWLNLKGKPVVALAEFRLPCDSPNIIESKSFKLYLNSLNQMRYDSIEEVQALLEKDLSNAAGADVTVIIRDVDSMASLVVLTPDYCIDELDVDITEYHPNADLLTLDAESGIVEERLVSHLLKSNCPVTNQPDWGSVFIDYKGAKIHHESLLKYVVSFREHTDFHEQCVERIFIDIMRQCQPESLTVYARYVRRGGLDINPYRSSAPLVLGNDRLTRQ

SEQ ID NO: 47213 - protein, 271 aa, Marinomonas rhizomae
  REGION 1..271: note = tr|A0A366JE16|A0A366JE16_9GAMM NADPH-dependent 7-cyano-7-deazaguanine reductase OS=Marinomonas rhizomae; OX = 491948 GN=queF PE=3 SV=1
MGFLPLGQQTEYVSEYDAGLLYPIARVDKWTEMAIESERLPFFGEDVWNAYELSWLNLKGKPIVALAEFRLPCDSPNIIESKSFKLYLNSLNQMRYGSAEEVQVILEKDLSSAAGADVTVIIRDVDSMASLVVLTPDYCIDDLDVDVSEYHPNADLLETGELMGVVEERLVSHLLKSNCPVTNQPDWGSVFIDYKGPKIHHESLLKYVISFREHTDFHEQCVERIFIDIMRQCKPESLTVYARYVRRGGLDINPYRSTAPLVLGNDRLTRQ

SEQ ID NO: 47214 - protein, 270 aa, Marinomonas sp.
  REGION 1..270: note = tr|A0A370UDQ4|A0A370UDQ4_9GAMM NADPH-dependent 7-cyano-7-deazaguanine reductase OS=Marinomonas sp. YLB-05; OX = 2213058 GN=queF PE=3 SV=1
MGALPLGQKTDYVSEYDPGLLFPIARLDKWQDMGIESERLPFHGEDIWNAYELSWLNEKGKPIVAMAEFRLPCSSPNIIESKSFKLYLNSLNQMRYKDAYEVQALLEADLSQAAGAPVTVIIRNVDAMESLVVLTPDYCIDELDVVVDEYHPNAQLLTIEEGAVVEERLVSHLLKSNCPVTNQPDWGSIFIDYRGSQISHEGLLKYVASFREHTDFHEQCVERIFIDIMTQCKPESLVVYARYVRRGGLDINPYRSTHEIVLGNDRLTRQ

SEQ ID NO: 47215 - protein, 272 aa, Marinomonas sp.
  REGION 1..272: note = tr|A0A166JRQ9|A0A166JRQ9_9GAMM NADPH-dependent 7-cyano-7-deazaguanine reductase OS=Marinomonas sp. TW1; OX = 1561203 GN=queF PE=3 SV=1
MGFLPLGQQTEYVSEYDAGLLYPIARVDKWTDMGIASERLPFYGEDIWNAYELSWLDTNGKPVVAMAEFRLPCESPNIIESKSFKLYLNSLNQMRYESRDQVQGLLENDLSIAAGASVSVVIRDLDAMASLVVLTPDYCIDDLDVTIEDYHPNSDLLRVDQEAGQVEERLVSHLLKSNCPVTNQPDWGSVFIDYRGPKIHHESLLKYIVSFREHTDFHEQCVERIFIDIMRHCQPEFLTVYARYVRRGGLDINPYRSTEQGLVLGNDRLSRQ

SEQ ID NO: 47216 - protein, 271 aa, unidentified
  source 1..271: note = Marinomonas spartinae
  REGION 1..271: note = tr|A0A1A8TMY8|A0A1A8TMY8_9GAMM NADPH-dependent 7-cyano-7-deazaguanine reductase OS=Marinomonas spartinae; OX = 1792290 GN=queF PE=3 SV=1
MGTLPLGQQTEYVSEYDPGLLYPIARVDKWSEMGVASERLPFYGEDVWNAYEVSWLNSKGKPIVALAEFRFPCNSPNIIESKSFKLYLNSLNQMRYDSQEDVQATLEKDLSNAAGVTVTVVLREVDSMSSLVVLTPDYCIDELDVEIDEYHPKADLLTLDRDAGIVEERLVSHLLKSNCPVTNQPDWGSVFIDYRGPRIDHESLLKYIVSFREHTDFHEQCVERIYIDIMRLCQPESLIVYARYVRRGGLDINPYRSSAPLVLGNDRLTRQ

SEQ ID NO: 47217 - protein, 271 aa, Marinomonas ushuaiensis
  REGION 1..271: note = tr|X7E6Q6|X7E6Q6_9GAMM NADPH-dependent 7-cyano-7-deazaguanine reductase OS=Marinomonas ushuaiensis DSM 15871 OX=1122207 GN=queF PE=3 SV=1
MGFLPLGQQTEYVSEYDSGLLYPIARVDKWIEMNIESERLPFYGEDVWNAYELSWLNLKGKPVVALAEFRLPCDSPNIIESKSFKLYLNSLNQMRYDSTEEVQALLERDLSNAAEARVTVVIRDVESMSSLVVLTPDYCIDELDVEIIEYHPNAELLKAGDPSDMAEERLVSHLLKSNCPVTNQPDWGSVFIDYKGPKINHEDLLKYIVSFREHTDFHEQCVERIFIDIMRQCQPESLTVYARYVRRGGLDINPYRSSAPLVLGNDRLARQ

SEQ ID NO: 47218 - protein, 140 aa, Marinoscillum sp.
  REGION 1..140: note = tr|A0A2D7TFJ3|A0A2D7TFJ3_9BACT NADPH-dependent 7-cyano-7-deazaguanine reductase OS=Marinoscillum sp.; OX = 2024838 GN=queF PE=3 SV=1
MKLKSNIIDPYLGQEAEGKKFKFESVDKIEVKELKVFLFDNKEECIKITSKEFIAVCPFSGLPDIARLKIEYYPEGGLAIELKSLKYYLVSFKNVGIYQEEVTSRIFKDLKKILKTQKIRVTTKYNVRGGLHTTCKVGKI

SEQ ID NO: 47219 - protein, 266 aa, Marinospirillum alkaliphilum
  REGION 1..266: note = tr|A0A1K1YMI4|A0A1K1YMI4_9GAMM NADPH-dependent 7-cyano-7-deazaguanine reductase OS=Marinospirillum alkaliphilum DSM 21637 OX=1122209 GN=queF PE=3 SV=1
MSVSAAVENSPLGQSTPYTNRYDPGLLYPIPRSGSRQDFYGVDIWNAYEVSWLNARGKPQVRLAEFRVPADSANIIESKSFKLYLNSFNLTRFDDQQTVVQQLEQDLSAAAGASVAVKLHAVDVGLQPQPLNGECLDELDIDIQHYLPEPALLSADPKQLVSETLVSHLLKSNCPVTGQPDWASIQISYRGPQMDRAGLLAYLVSYREKGDFHEACVEQIHRDLMQRCHPDYLSVYARYVRRGGLDINPFRCSEPVEVNNCRLLRQ

SEQ ID NO: 47220 - protein, 274 aa, Marinospirillum celere
  REGION 1..274: note = tr|A0A1I1DTI4|A0A1I1DTI4_9GAMM NADPH-dependent 7-cyano-7-deazaguanine reductase OS=Marinospirillum celere; OX = 1122252 GN=queF PE=3 SV=1
MHSPRVETSPLGKETQYINQYTSEVLYPLPRQQGRSSLGLSAGKLPFQGVDIWNAYELSWLNSKGKPLVRLAEFHFPATSSHIIESKSFKLYLNSFNLTRFASEEEVLARLTQDLSQASGSEVQVILHPADYGLPVRPLEGECLDDLDIEVNHYTPAPELLKVTSDEVVEETLVSHLLKSNCPVTGQPDWASVQIHYKGPKIDPESLLAYLISYREKGDFHEHCVEEIFVDLLRLCQCQQLTVYARYLRRGGLDINPWRSTLSVEPPNPRQARQ

SEQ ID NO: 47221 - protein, 154 aa, Marinovum algicola
  REGION 1..154: note = tr|A0A0H4LFI2|A0A0H4LFI2_9RHOB NADPH-dependent 7-cyano-7-deazaguanine reductase OS=Marinovum algicola DG 898 OX=988812 GN=queF PE=3 SV=1
MSENIYSDLKQLGGETRIPASPEEAELERVPNPQADVAYNVRFTAPEFTSLCPMTGQPDFAHLVIDYVPGAWLVESKSLKLFLTSFRNQGAFHEDCTISIARRLVDFLEPQWLRIGGYWYPRGGIPIDVFWQTAPRPEGLWLPDQGVPPYRGRG

SEQ ID NO: 47222 - protein, 155 aa, Marinovum sp.
  REGION 1..155: note = tr|A0A2D7ZBJ5|A0A2D7ZBJ5_9RHOB NADPH-dependent 7-cyano-7-deazaguanine reductase OS=Marinovum sp.; OX = 2024839 GN=queF PE=3 SV=1
MSDPNIYKDLTLLGGETNLPNNPDEAILERVPNPQKDVNYCVRFTAPEFTSLCPLTGQPDFAHLVIDYVPKDWLVESKSLKLYLGAFRNHGAFHEDCTISIARKITDLLEPEWLRIGGYWFPRGGIPIDIFYQTGNGPKGVWIPDQNVPTYRGRG

SEQ ID NO: 47223 - protein, 154 aa, Marinovum sp.
  REGION 1..154: note = tr|A0A2E7WGB5|A0A2E7WGB5_9RHOB NADPH-dependent 7-cyano-7-deazaguanine reductase OS=Marinovum sp.; OX = 2024839 GN=queF PE=3 SV=1
MSSNIYENLQQLGGQTALPDSPETAVLERVENPQAGTPYAVRFTAPEFTSLCPMTGQPDFAHLVIDYVPDAWLVESKSLKLYLGAFRNHGAFHEDCTVSIGKRLVDFLSPQWLRIGGYWYPRGGIPIDVFYQTGPTPQDCWIPDQGVPTYRGRG

SEQ ID NO: 47224 - protein, 124 aa, unidentified
  source 1..124: note = Mariprofundus aestuarium
  REGION 1..124: note = tr|A0A2K8KVW4|A0A2K8KVW4_9PROT NADPH-dependent 7-cyano-7-deazaguanine reductase OS=Mariprofundus aestuarium OX=1921086 GN=queF PE=3 SV=1
MTEKLGTVINKPTRYLETFENPNPERDYHVRIDSPEFTCLCPKTGQPDFAEIKLDYIPDQSCVELKSLKFYYWSFRDEGHFHEKVTNMIANDLIELLDPRYIKVQAIFNVRGGVYTTVEVEHRK

SEQ ID NO: 47225 - protein, 124 aa, unidentified
  source 1..124: note = Mariprofundus ferrinatatus
  REGION 1..124: note = tr|A0A2K8L5H5|A0A2K8L5H5_9PROT NADPH-dependent 7-cyano-7-deazaguanine reductase OS=Mariprofundus ferrinatatus OX=1921087 GN=queF PE=3 SV=1
MSEKLGAVINKPTRYLETFENPNPERDYHVRIDSPEFTCLCPKTGQPDFAEIKLDYVPDQLCVELKSLKLYYWSFRDEGHFHEKVTNMIANDLIGLLDPRYIKVQAVFNVRGGVYTTVEVEHRK

SEQ ID NO: 47226 - protein, 124 aa, Mariprofundus ferrooxydans
  REGION 1..124: note = tr|Q0EYR8|Q0EYR8_9PROT NADPH-dependent 7-cyano-7-deazaguanine reductase OS=Mariprofundus ferrooxydans PV-1 OX=314345 GN=queF PE=3 SV=1
MSDKLGAIINRPGKFLETFENPNPERDYHIRIDSPEFTCLCPKTGQPDFAEIKLDYVPDQLCVELKSLKLYYWSFRDEGHFHEQVTNMIANDLIALLDPRQIKVTAVFNVRGGVYTTVEVEHSK

SEQ ID NO: 47227 - protein, 124 aa, unidentified
  source 1..124: note = Mariprofundus micogutta
  REGION 1..124: note = tr|A0A1L8CPX2|A0A1L8CPX2_9PROT NADPH-dependent 7-cyano-7-deazaguanine reductase OS=Mariprofundus micogutta OX=1921010 GN=queF PE=3 SV=1
MSEKLGAVLNKPTRYLETFENPNPERDYHIRIDSPEFTCLCPKTGQPDFAEIKLDYIPDAVCVELKSLKLYYWSFRDEGHFHEQVTNMIANDLIKLLDPRQIKVTAVFNVRGGVYTTVEVEHSK

SEQ ID NO: 47228 - protein, 129 aa, Mariprofundus sp.
  REGION 1..129: note = tr|A0A498DEZ2|A0A498DEZ2_9PROT NADPH-dependent 7-cyano-7-deazaguanine reductase OS=Mariprofundus sp. EBB-1 OX=2650971 GN=queF PE=3 SV=1
MTGSTNNEALGAQMNYPEKELEVFDNPNPERDYHIRIDSPEFTCLCPKTGQPDFAEIKLDYVPDQCCVELKSLKLYYWSFRDEGHFHEKVTNMIADDLIKLLDPRYLKVQAVFNVRGGVYTTVEVEHKK

SEQ ID NO: 47229 - protein, 283 aa, unidentified
  source 1..283: note = Marisediminitalea aggregata
  REGION 1..283: note = tr|A0A1M5GW30|A0A1M5GW30_9ALTE NADPH-dependent 7-cyano-7-deazaguanine reductase OS=Marisediminitalea aggregata OX=634436 GN=queF PE=3 SV=1
MTELSKQKKELSLPTHLTLGQSVDYIEQYTPDLLQSVPRSLSRDQIGVTAPLPFEGVDIWNGYELSWLNAKGKPLVAILQCRVPVTSANLIESKSFKLYLNSFNQTKFNSREDVSACLEKDLSACADAPVAVTLFGPEQFDDLPVKNLTGTCIDELDIDVTQYSPAPSLLNSDTSQHAEETLVSHLLKSNCLITSQPDWASIQIRYQGPKIDHEGLLAYLISFRQHNEFHEQCIERIYCDLMARCKPLKLAVYARYTRRGGLDINPLRSNYTVDIENDRQARQ

SEQ ID NO: 47230 - protein, 154 aa, Maritalea myrionectae
  REGION 1..154: note = tr|A0A2R4MHZ5|A0A2R4MHZ5_9RHIZ NADPH-dependent 7-cyano-7-deazaguanine reductase OS=Maritalea myrionectae; OX = 454601 GN=queF PE=3 SV=1
MTENIYANLKQLGGETRIPASPEEAELERVPNPQADVTYNVRFTAPEFTSLCPMTGQPDFAHLVIDYAPGAWLVESKSLKLFLTSFRNHGAFHEDCTISIARRLVDFLEPQWLRIGGYWYPRGGIPIDVFWQSGPVPEQLWLPDQGVPPYRGRG

SEQ ID NO: 47231 - protein, 155 aa, Maritimibacter sp.
  REGION 1..155: note = tr|A0A2U2CLB7|A0A2U2CLB7_9RHOB NADPH-dependent 7-cyano-7-deazaguanine reductase OS=Maritimibacter sp. 55A14 OX=2174844 GN=queF PE=3 SV=1
MAREDIYADLTQLGAKTELPASPDEAVLERVPNPQAGTAYTVRFTAPEFTSLCPLTGQPDFAHLVIDYIPGDWLVESKSLKLYLGSFRNHGAFHEDCTVSIGKRLAETLAPQWLRIGGYWYPRGGIPIDVFYQTGPAPDGVWIPETGVAPYRGRG

SEQ ID NO: 47232 - protein, 154 aa, Maritimibacter sp.
  REGION 1..154: note = tr|A0A2D9YVX3|A0A2D9YVX3_9RHOB NADPH-dependent 7-cyano-7-deazaguanine reductase OS=Maritimibacter sp.; OX = 2003363 GN=queF PE=3 SV=1
MAKTDVSGLSQLGAHTALPASPSEAVLERVPFGSKGQGAAVRFTAPEFTSLCPMTGQPDFAHIVIDYIPGDWLVESKSLKLFLHSFRNHGAFHEDCTMEIASRLVELLSPEWLRIGAYWYPRGGIPIDVFWQTGPAPEGAWIPDQGVPTYRGRG

SEQ ID NO: 47233 - protein, 154 aa, unidentified
  source 1..154: note = Marivivens niveibacter
  REGION 1..154: note = tr|A0A251WXW5|A0A251WXW5_9RHOB NADPH-dependent 7-cyano-7-deazaguanine reductase OS=Marivivens niveibacter; OX = 1930667 GN=queF PE=3 SV=1
MTDSIYSNLQQLGGATVVPQSPEEAVLERVQNPQADIEYNVRFTAPEFTSLCPMTGQPDFAHLCIDYVPSEWLVESKSLKLFLGSFRNHGAFHEDCTISIARRLVEFLDPKWLRIGGYWYPRGGIPIDVFWQTGEMPAGVWIPDQGVPPYRGRG

SEQ ID NO: 47234 - protein, 154 aa, unidentified
  source 1..154: note = Martelella endophytica
  REGION 1..154: note = tr|A0A0D5LQC8|A0A0D5LQC8_9RHIZ NADPH-dependent 7-cyano-7-deazaguanine reductase OS=Martelella endophytica; OX = 1486262 GN=queF PE=3 SV=1
MVKTDVSGLSQLGHAVDAPSSPEEAVMEKVPFSQAGTDFVVRFTAPEFTSLCPMTGQPDFAHIVIDYIPGEWLVESKSLKLFLHSFRNHGAFHEDCSIYIAKRIVELTEPKWLRIGAYWYPRGGIPIDVFWQTGAPPEGVWLPDQGVAPYRGRG

SEQ ID NO: 47235 - protein, 154 aa, Martelella mediterranea
  REGION 1..154: note = tr|A0A2T0JBQ3|A0A2T0JBQ3_9RHIZ NADPH-dependent 7-cyano-7-deazaguanine reductase OS=Martelella mediterranea OX=293089 GN=queF PE=3 SV=1
MVKTDVSGLSQLGQAVDAPSSPEEAKLEKVPFSEAGTDFVVRFTAPEFTSLCPMTGQPDFAHIVIDYIPGEWLVESKSLKLFLHSFRNHGAFHEDCSIYIAKRIVALLEPKWLRIGAYWYPRGGIPIDVFWQTGAPPEGVWLPDQGVAPYRGRG

SEQ ID NO: 47236 - protein, 154 aa, Martelella sp.
  REGION 1..154: note = tr|A0A506UFP5|A0A506UFP5_9RHIZ NADPH-dependent 7-cyano-7-deazaguanine reductase OS=Martelella sp. BGMRC2036 OX=2590451 GN=queF PE=3 SV=1
MVKTDVSGLSQLGHAVEAPANPEDAVMEKVPFSQAGTDFVVRFTAPEFTSLCPMTGQPDFAHIVIDYIPGEWLVESKSLKLFLASFRNHGAFHEDCSIYIAKRIVELLDPKWLRIGAYWYPRGGIPIDVFWQTGTPPEGVCLPDQGVQPYRGRG

SEQ ID NO: 47237 - protein, 277 aa, Massilia albidiflava
  REGION 1..277: note = tr|A0A411X4H6|A0A411X4H6_9BURK NADPH-dependent 7-cyano-7-deazaguanine reductase OS=Massilia albidiflava; OX = 321983 GN=queF PE=3 SV=1
MSNSPEHSPLGKNSAYRTDYAPELLFPIPRIGKRDELGLTGTLPFFGVDIWNAYELSWLNMRGKPQVAVARITVPADSPNIIESKSFKLYLNSFNQTRLGGPEALRDLLQQDLSAATGANVHVVLTMQEDFGKLQMGELEGLLLDRLDIEVDNYSPQPSILKANFEELPVEEVLVSHLLKSNCLVTGQPDWGSVQISYSGPQIDQESLLKYLIGFREHNEFHEQCVERIFVDILRECQPAHLTVYARYTRRGGLDINPWRSNFTKGGRPSNLRNARQ

SEQ ID NO: 47238 - protein, 277 aa, unidentified
  source 1..277: note = Massilia armeniaca
  REGION 1..277: note = tr|A0A2R4CGH4|A0A2R4CGH4_9BURK NADPH-dependent 7-cyano-7-deazaguanine reductase OS=Massilia armeniaca; OX = 2072590 GN=queF PE=3 SV=1
MTNTADQSPLGKNSAYRTDYAPELLFPIPRQGKRDELGLSGTLPFFGVDIWNAYELSWLNMRGKPQIAVARITVPADSPNIIESKSFKLYLNSFNQTRLGGPDALRDLLQQDLSAAAGANVHVVLTLQEDFGTLQMGELDGVLLDRLDIEVDNYAPQPEVLKANFDELPVEETLVSHLLKSNCLVTGQPDWGSVQITYAGPQIDQESLLKYLIGFREHNEFHEQCVERIFTDILRQCRPQHLSVYARYTRRGGLDINPWRTNYSKGGRPSNLRNARQ

SEQ ID NO: 47239 - protein, 275 aa, Massilia aurea
  REGION 1..275: note = tr|A0A422QMS1|A0A422QMS1_9BURK NADPH-dependent 7-cyano-7-deazaguanine reductase OS=Massilia aurea; OX = 373040 GN=queF PE=3 SV=1
MNTPDQSPLGKSSAYQSQYAPELLFPIPRQQKREELGLSGTLPFFGVDIWNAYELSWLNMRGKPQVAIATVTAPADSPNIIESKSFKLYLNSFNQTRLAGPEALLALLRDDLSNGFGAPVHVTLTSPEQFGGIKMGELEGTLLDRLDIEIDAYSPAPQLLKANHEDAPVEETLVSHLLKSNCLVTGQPDWGTVQIRYVGPQIDQEGLLKYLIGFREHNEFHEQCVERIFMDVLRQCQPSKLAVYARYTRRGGLDINPWRANFSTGKPGNLRGARQ

SEQ ID NO: 47240 - protein, 276 aa, unidentified
  source 1..276: note = Massilia eurypsychrophila
  REGION 1..276: note = tr|A0A2G8TER7|A0A2G8TER7_9BURK NADPH-dependent 7-cyano-7-deazaguanine reductase OS=Massilia eurypsychrophila OX=1485217 GN=queF PE=3 SV=1
MTTTADQSPLGKTSAYQTHYAPDLLFPIPRQGKRDELQLTGTLPFFGVDIWNAYEVSWLNMRGKPQVAIATITAPADSPNIVESKSFKLYLNSFNQTRLANEEALLALLREDLATGFGAPVQVALTLPENFPTLKMGELDGVLLDRLDLEVDQYSPAPALLSANHHEAPVEEKLVSHLLKSNCLVTGQPDWASVQIHYVGPQIEQEGLLRYLIGFREHNEFHEQCVERIFVDIMRECRPQKLAVYARYTRRGGLDINPWRTNFTSGRPPNLRNARQ

SEQ ID NO: 47241 - protein, 277 aa, Massilia flava
  REGION 1..277: note = tr|A0A562PM82|A0A562PM82_9BURK NADPH-dependent 7-cyano-7-deazaguanine reductase OS=Massilia flava; OX = 871742 GN=queF PE=3 SV=1
MSNSPEHSPLGKNSAYRTDYAPELLFPIPRQGKRDELGLAGTLPFFGVDIWNAYELSWLNMRGKPQVAVARITVPADSPNIVESKSFKLYLNSFNQTRLGGPEALRELLQQDLSAAVGANVQVTLTLQEEFGKLQMGELDGLLLDRLDIEVDNYSPQPSILKANFDELPVEETLVSHLLKSNCLVTGQPDWGSVQISYAGPQIDQESLLKYLIGFREHNEFHEQCVERIFVDILRECKPSHLTVYARYTRRGGLDINPWRSNFTKAGRPSNLRNARQ

SEQ ID NO: 47242 - protein, 276 aa, unidentified
  source 1..276: note = Massilia glaciei
  REGION 1..276: note = tr|A0A2U2I4X0|A0A2U2I4X0_9BURK NADPH-dependent 7-cyano-7-deazaguanine reductase OS=Massilia glaciei; OX = 1524097 GN=queF PE=3 SV=1
MSNTPDLSPLGKTSAYQTSYAPGLLFPIARQAKRDELQLTGTMPFFGVDIWNAYELSWLNLRGKPQVAIATVTAPAESPNIIESKSFKLYLNSFNQTRLAGPDALLALLKADLAKGFGAPVHVALTLQDAFGTLKMGELDGLLLDRLDVEIDRYTPSPALLRAGRAGAPVDETLVSHLLKSNCLVTGQPDWASVQVRYVGPQIEQEGLLKYLIGFREHNEFHEQCVERIFMDIWRQCAPQKLAVYARYTRRGGLDINPWRSNFSGAPPSNLRTARQ

SEQ ID NO: 47243 - protein, 277 aa, unidentified
  source 1..277: note = Massilia lurida
  REGION 1..277: note = tr|A0A562QWN5|A0A562QWN5_9BURK NADPH-dependent 7-cyano-7-deazaguanine reductase OS=Massilia lurida; OX = 1036180 GN=queF PE=3 SV=1
MSNSPEQSPLGKNSAYRTDYAPELLFPIARQGKRDELGLSGTLPFFGVDIWNAYELSWLNLRGKPQVAVARIAVPADSPNIIESKSFKLYLNSFNQTRLGDPDALRERLQRDLSAAAGSTVHVTLTLQEDFGKLKMGELDGVLLDRLDVEIDDYSPQPSILKANFDENPVEETFVSHLLKSNCLVTGQPDWGSVQIDYAGPQIDQESLLKYLIGFREHNEFHEQCVERIFTDILRECRPQHLTVYARYTRRGGLDINPWRSNFTRAGQPSNLRNARQ

SEQ ID NO: 47244 - protein, 277 aa, Massilia lutea
  REGION 1..277: note = tr|A0A4P6KWJ6|A0A4P6KWJ6_9BURK NADPH-dependent 7-cyano-7-deazaguanine reductase OS=Massilia lutea; OX = 321985 GN=queF PE=3 SV=1
MSNSPEHSPLGKNSAYRTDYAPELLFPIPRIGKRDELGLTGTLPFFGVDIWNAYELSWLNMRGKPQVAVARITVPADSPNIIESKSFKLYLNSFNQTRLGGPEALRELLQQDLSAATGATVHVALTMQEEFGKLQMGELDGLLLDRLDIEIDNYSPQPSILKAAVDELPVEETLVSHLLKSNCLVTGQPDWGSVQISYAGPQIDQESLLKYLIGFREHNEFHEQCVERIFVDILRECRPAHLTVYARYTRRGGLDINPWRSNFTKAGSPSNLRNARQ

SEQ ID NO: 47245 - protein, 291 aa, unidentified
  source 1..291: note = Massilia namucuonensis
  REGION 1..291: note = tr|A0A1I7KCY3|A0A1I7KCY3_9BURK NADPH-dependent 7-cyano-7-deazaguanine reductase OS=Massilia namucuonensis; OX = 1035707 GN=queF PE=3 SV=1
MRYHASFAPRFDAAMTNTADLSPLGKNSAYRTDYAPELLFPIPRQGKRDELGLTGTLPFFGVDIWNAYELSWLNMRGKPQIAVARVTVPADSPNIVESKSFKLYLNSFNQTRLANADALKSLLIQDLSAAVGANVHVAITPQEEFGTLAMGELDGLLLDRLDIEVDSYAPQPHILKANLDDLPVQETFVSHLLKSNCLVTGQPDWGSVQIHYAGPQIDQESLLKYLIGFREHNEFHEQCVERIFVDILRQCQPQQLSVYARYTRRGGLDINPWRSNYSTGQKPSNLRNARQ

SEQ ID NO: 47246 - protein, 275 aa, Massilia oculi
  REGION 1..275: note = tr|A0A2S2DI10|A0A2S2DI10_9BURK NADPH-dependent 7-cyano-7-deazaguanine reductase OS=Massilia oculi; OX = 945844 GN=queF PE=3 SV=1
MNTPDQSPLGKSSAYQSQYAPELLFPIPRQQKRDELGLSGSLPFFGVDIWNAYELSWLNMRGKPQVAIATVTAPADSPNIIESKSFKLYLNSFNQTRLAGPEALLALLRDDLSNGFGAPVHVTLTSPEEFGAIRMGELEGTLLDRLDIEVDAYSPAPQLLKANHEEAPVEETLVSHLLKSNCLVTGQPDWGTVQIRYVGPQIDQEGLLKYLIGFREHNEFHEQCVERIFMDVLRQCQPSKLAVYARYTRRGGLDINPWRANFTTGKPGNLRGARQ

SEQ ID NO: 47247 - protein, 276 aa, unidentified
  source 1..276: note = Massilia phosphatilytica
  REGION 1..276: note = tr|A0A2S8H288|A0A2S8H288_9BURK NADPH-dependent 7-cyano-7-deazaguanine reductase OS=Massilia phosphatilytica OX=2026176 GN=queF PE=3 SV=1
MTNTPEQSPLGKNSAYQTEYAPELLFPIARQQKRDELGLSGTLPFFGVDIWNAYELSWLNMRGKPQVAIATFTVPADSPNIVESKSFKLYLNSFNQTRLANTDALLALLREDLSNAVGAPVHATLTLPEDFDKLKMGELDGLLLDRLDVEIDNYSPSPELLKANHEEAAVEETLVSHLLKSNCLVTGQPDWGSVQIRYVGPQIDQESLLRYLIGFREHNEFHEQCVERIFTDILRQCKPSKLAVYARYTRRGGLDINPWRANFSTAKPPNLRAARQ

SEQ ID NO: 47248 - protein, 277 aa, Massilia plicata
  REGION 1..277: note = tr|A0A4P7BGW9|A0A4P7BGW9_9BURK NADPH-dependent 7-cyano-7-deazaguanine reductase OS=Massilia plicata; OX = 321984 GN=queF PE=3 SV=1
MTNSADQSPLGKTSAYRTDYAPELLFPIPRVGKRDELGLTGTLPFFGVDIWNAYELSWLNMRGKPQVAIARITVPADSPNIIESKSFKLYLNSFNQTRLGGPEALRELLQQDLSAAAGANVHVVLTMQEDFGKLQMGELDGVLLDRLDIEVDKYAPQPELLKASFDELPVEETLVSHLLKSNCLVTGQPDWGSVQITYAGPQIDQESLLKYLIGFREHNEFHEQCVERIFVDILRQCQPQQLTVYARYTRRGGLDINPWRTNYTSGGKPSNLRNARQ

SEQ ID NO: 47249 - protein, 276 aa, unidentified
  source 1..276: note = Massilia psychrophila
  REGION 1..276: note = tr|A0A2G8SWA8|A0A2G8SWA8_9BURK NADPH-dependent 7-cyano-7-deazaguanine reductase OS=Massilia psychrophila; OX = 1603353 GN=queF PE=3 SV=1
MTTTADQSPLGKTSAYQTQYAPELLFPIPRQGKRDELQLTNTLPFFGVDIWNAYELSWLNMRGKPQVAIATIMAPADSPNIIESKSFKLYLNSFNQTRLANDEALLSLLREDLSNGFGAPVQVALTLQQNFSTLKMGELDGLLLDRLDLDVDLYTPSPALLSASVDAAPVEEKLVSHLLKSNCLVTGQPDWASVQIHYVGPQIDQEGLLRYLIGFREHNEFHEQCVERIFVDILRQCTPQKLAVYARYTRRGGLDINPWRTNFTSARPPNVRNARQ

SEQ ID NO: 47250 - protein, 276 aa, Massilia sp.
  REGION 1..276: note = tr|A0A0Q5H1D4|A0A0Q5H1D4_9BURK NADPH-dependent 7-cyano-7-deazaguanine reductase OS=Massilia sp. Leaf139; OX = 1736272 GN=queF PE=3 SV=1
MNNTPDQSPLGKSSAYQTEYAPELLFPIPRQQKREELAISGTLPFFGLDIWNAYELSWLNMRGKPQVAIATISAPADSPNIVESKSFKLYLNSFNQTRVAGVDALKSLLREDLSNAFGAPVHITITEPEGFGQLKMGELEGLSIDRLDIEVNAYSPAPHLLTANFDEAPVEETLVSNLLKSNCLVTGQPDWGSVQIEYVGPQIDQEGLLRYLIGFREHNEFHEQCVERIFIDILRQCKPSKLAVYARYTRRGGLDINPWRANFSTGRPHNLRGARQ

SEQ ID NO: 47251 - protein, 277 aa, Massilia sp.
  REGION 1..277: note = tr|A0A344JL56|A0A344JL56_9BURK NADPH-dependent 7-cyano-7-deazaguanine reductase OS=Massilia sp. YMA4; OX = 1593482 GN=queF PE=3 SV=1
MTNTADQSPLGKNSAYRTDYAPELLFPIPRQGKRDELGLTGTLPFFGVDIWNAYELSWLNMRGKPQVAVARITVPADSPNIIESKSFKLYLNSFNQTRLGGPDALRDLLQQDLSAAAGANVHVVLTLQEDFGTLQMGELDGLLLDRLDIEVDNYSPQPEVLKANFDELPVEETLVSHLLKSNCLVTGQPDWGSVQITYAGPQIDQESLLKYLIGFREHNEFHEQCVERIFTDILRQCRPQHLSVYARYTRRGGLDINPWRTNYSKGGRPSNLRNARQ

SEQ ID NO: 47252 - protein, 275 aa, Massilia timonae
  REGION 1..275: note = tr|A0A1S2NFZ0|A0A1S2NFZ0_9BURK NADPH-dependent 7-cyano-7-deazaguanine reductase OS=Massilia timonae; OX = 47229 GN=queF PE=3 SV=1
MNTPDQSPLGKSSAYQSQYAPELLFPIPRQQKREELGLSGTLPFFGVDIWNAYELSWLNMRGKPQVAIATVTAPADSPNIVESKSFKLYLNSFNQTRLAGPEALLALLRDDLSNGFGAPVHVTLTHPDQFGKIGMGELEGTLLDRLDIEVDDYSPAPQLLKANHEEAPVEETLVSHLLKSNCLVTGQPDWGTVQIRYVGSQIDQEGLLKYLIGFREHNEFHEQCVERIFMDVLRQCQPSKLAVYARYTRRGGLDINPWRANFSSGKPGNLRGARQ

SEQ ID NO: 47253 - protein, 275 aa, Massilia timonae
  REGION 1..275: note = tr|K9DZV4|K9DZV4_9BURK NADPH-dependent 7-cyano-7-deazaguanine reductase OS=Massilia timonae CCUG 45783 OX=883126 GN=queF PE=3 SV=1
MNTPDQSPLGKSSAYQSQYAPELLFPIPRQQKREELGLSGTLPFFGVDIWNAYELSWLNMRGKPQVAIATVTAPADSPNIVESKSFKLYLNSFNQTRLAGPEALLALLRDDLSNGFGAPVHVTLTHPEQFGKIGMGELEGTLLDRLDIEVDDYSPAPQLLKANHEEAPVEETLVSHLLKSNCLVTGQPDWGTVQIRYVGPQINQEGLLKYLIGFREHNEFHEQCVERIFMDVLRQCQPSKLAVYARYTRRGGLDINPWRANFSTGKPGNLRGARQ

SEQ ID NO: 47254 - protein, 277 aa, unidentified
  source 1..277: note = Massilia umbonata
  REGION 1..277: note = tr|A0A4P8HSY6|A0A4P8HSY6_9BURK NADPH-dependent 7-cyano-7-deazaguanine reductase OS=Massilia umbonata; OX = 864828 GN=queF PE=3 SV=1
MSNSPEHSPLGKNSAYRTDYAPELLFPIPRIGKRDELGLTGTLPFFGVDIWNAYELSWLNMRGKPQVAVARITVPADSPNIVESKSFKLYLNSFNQTRLGGPEALRDLLQQDLSAATGANVHVVLTMQEDFATLKMGELDGLLLDRLDIEVDHYSPQPSILKANFDELPVEETLVSHLLKSNCLVTGQPDWGSVQISYSGPQIDQESLLKYLIGFREHNEFHEQCVERIFVDILRACKPAHLTVYARYTRRGGLDINPWRSNFTKAGRPSNLRNARQ

SEQ ID NO: 47255 - protein, 276 aa, unidentified
  source 1..276: note = Massilia violaceinigra
  REGION 1..276: note = tr|A0A2D2DG37|A0A2D2DG37_9BURK NADPH-dependent 7-cyano-7-deazaguanine reductase OS=Massilia violaceinigra; OX = 2045208 GN=queF PE=3 SV=1
MTNTADLSPLGKTSAYQTQYAPDLLFPIPRQGKRDELQLTGTLPFFGVDIWNAYEISWLNMRGKPQVAIATITVPADSPNIVESKSFKLYLNSFNQTRLSNSDALLALLREDLAGGFGAPVHITLIEPHAFDTVKMGELDGMLLDRLDVEIDNYSPSPALLTAAADGAPVEEKLVSHLLKSNCLVTGQPDWASVQIHYVGPQIEQGGLLKYLIGFREHNEFHEQCVERIFTDILRQCAPQKLAVYARYTRRGGLDINPWRSNFSSGRPPNLRTARQ

SEQ ID NO: 47256 - protein, 278 aa, unidentified
  source 1..278: note = Massilia yuzhufengensis
  REGION 1..278: note = tr|A0A1I1NTB9|A0A1I1NTB9_9BURK NADPH-dependent 7-cyano-7-deazaguanine reductase OS=Massilia yuzhufengensis OX=1164594 GN=queF PE=3 SV=1
MTTPDQSPLGKSSAYQSQYAPELLFPIPRAQKREELGLTADSGTMPFFGVDIWNAYELSWLNMRGKPQVAIATITAPSDSPNIVESKSFKLYLNSFNQTRVAGTDALVELLRQDLSAAFGSPVHVSITTPDAFGSLKMGELEGTLLDRLDVEIDQYLPSPHLLTADHDASPVEETLVSHLLKSNCLVTGQPDWGTVQIRYVGPQIEQEGLLKYLIGFREHNEFHEQCVERIFMDVLRQCKPTKLAVYARYTRRGGLDINPWRANFSTGKPGNLRTARQ

SEQ ID NO: 47257 - protein, 140 aa, Mastigocladus laminosus
  REGION 1..140: note = tr|A0A4D9CPV0|A0A4D9CPV0_MASLA NADPH-dependent 7-cyano-7-deazaguanine reductase OS=Mastigocladus laminosus UU774 OX=1594576 GN=queF PE=3 SV=1
MSNSLSESVSQPSQEIKYGEREIAEGQLITFPNPRIGRRYNIDITLPEFTCKCPFSGYPDFATIHITYIPDQLVVELKALKLYINSYRDRYISHEESANQILDDFVAACDPLEITLKADFAPRGNVHTVIEVHHVKSEGQ

SEQ ID NO: 47258 - protein, 139 aa, Mastigocoleus testarum
  REGION 1..139: note = tr|A0A0V7ZLX1|A0A0V7ZLX1_9CYAN NADPH-dependent 7-cyano-7-deazaguanine reductase OS=Mastigocoleus testarum BC008 OX=371196 GN=queF PE=3 SV=1
MSDSSTESTNFPIAEMKYGEREIAEGKLITFPNPRIGRRYNIDISLPEFTCKCPFSGYPDFATIYINYVPDEKVVELKALKLYINSYRDRYISHEESANQILDDFVSACDPLEITVKADFSPRGNVHTVVEVTHQKSNK

SEQ ID NO: 47259 - protein, 155 aa, unidentified
  source 1..155: note = Mediterranea sp.
  REGION 1..155: note = tr|A0A1Y4HI45|A0A1Y4HI45_9BACT NADPH-dependent 7-cyano-7-deazaguanine reductase OS=Mediterranea sp. An20; OX = 1965586 GN=queF PE=3 SV=1
MEELRAQLNALGKKTEYRQDYAPEVLEAFTNKHPENDYWVRFNCPEFTSLCPITGQPDFAEIRISYIPDVKMVESKSLKLYLFSFRNHGAFHEDCVNIIMKDLIRLMDPKYIEVTGFFTPRGGISIYPYANYGRPGTKYERLAEERLFRHDSKQE

SEQ ID NO: 47260 - protein, 164 aa, Megamonas funiformis
  REGION 1..164: note = tr|H3KB74|H3KB74_9FIRM NADPH-dependent 7-cyano-7-deazaguanine reductase OS=Megamonas funiformis YIT 11815 OX=742816 GN=queF PE=3 SV=1
MRTSEETKDITLLGQKNVKYEFNYRPDVLETFDNKHPDHDYWVKFNCPEFTTLCPITGQPDFGTIYISYIPDEKMVESKSLKLYLFSFRNNGDFHEDVVNIIMKDLIKLMNPKYIEVWGKFLPRGGISIDPYTNYGRPDTKYEQLAQTRFVNHDLYSLDKVDNR

SEQ ID NO: 47261 - protein, 164 aa, Megamonas hypermegale
  REGION 1..164: note = tr|A0A239U0V9|A0A239U0V9_9FIRM NADPH-dependent 7-cyano-7-deazaguanine reductase OS=Megamonas hypermegale; OX = 158847 GN=queF PE=3 SV=1
MRTKEEVQDITLLGQKNVKYDFDYRPDVLETFDNKHPDHDYWVKFNCPEFTTLCPITGQPDFGTIYISYVPDIKMVESKSLKLYLFSFRNHGDFHEDVVNIIMKDLIKLMNPKYIEVWGKFLPRGGISIDPYTNYGRPNTKYESLAQKRFETHDLYSLEKIDNR

SEQ ID NO: 47262 - protein, 164 aa, Megamonas hypermegale; identical to SEQ ID NO: 47260
  REGION 1..164: note = tr|A0A378NNL1|A0A378NNL1_9FIRM NADPH-dependent 7-cyano-7-deazaguanine reductase OS=Megamonas hypermegale; OX = 158847 GN=queF PE=3 SV=1

SEQ ID NO: 47263 - protein, 164 aa, Megamonas rupellensis; identical to SEQ ID NO: 47260
  REGION 1..164: note = tr|A0A411ZJX1|A0A411ZJX1_9FIRM NADPH-dependent 7-cyano-7-deazaguanine reductase OS=Megamonas rupellensis; OX = 491921 GN=queF PE=3 SV=1

SEQ ID NO: 47264 - protein, 164 aa, Megamonas rupellensis
  REGION 1..164: note = tr|A0A412CBV4|A0A412CBV4_9FIRM NADPH-dependent 7-cyano-7-deazaguanine reductase OS=Megamonas rupellensis; OX = 491921 GN=queF PE=3 SV=1
MRTSEETKDITLLGQKNVKYEFNYRPDVLETFDNKHLDHDYWVKFNCPEFTTLCPITGQPDFGTIYISYIPDEKMVESKSLKLYLFSFRNNGDFHEDVVNIIMKDLIKLMNPKYIEVWGKFLPRGGISIDPYTNYGRPDTKYEQLAQTRFVNHDLYSLDKVDNR

SEQ ID NO: 47265 - protein, 164 aa, Megamonas sp.
  REGION 1..164: note = tr|A0A1H8HXD3|A0A1H8HXD3_9FIRM NADPH-dependent 7-cyano-7-deazaguanine reductase OS=Megamonas sp. Calf98-2; OX = 1855330 GN=queF PE=3 SV=1
MRTSEETKDITLLGQKNVKYEFNYRPDVLETFDNKHPDHDYWVKFNCPEFTTLCPITGQPDFGTIYISYIPDEKMVESKSLKLYLFSFRNNGDFHEDVVNIIMKDLIKLMNPKYIEVWGKFLPRGGISIDPYTNYGRPDTKYEQLAQTRFVNHDLYRLDKVDNR

SEQ ID NO: 47266 - protein, 164 aa, Megasphaera cerevisiae
  REGION 1..164: note = tr|A0A0J6WRV2|A0A0J6WRV2_9FIRM NADPH-dependent 7-cyano-7-deazaguanine reductase OS=Megasphaera cerevisiae DSM 20462 OX=1122219 GN=queF PE=3 SV=1
MSRSNEELQGISALGSQHTQYKQDYDPALLEVFPNKHPGRDYFVKFNCPEFTSLCPKTGQPDYATIYISYVPELRMVESKSLKLYLFSFRNHGDFHEDCVNNIMDDLIHLMNPKYIEVWGKFLPRGGISIDPYCNYGRKGTPWEEVAWQRLARHDMYPEQIDNR

SEQ ID NO: 47267 - protein, 164 aa, Megasphaera elsdenii
  REGION 1..164: note = tr|G0VPI1|G0VPI1_MEGEL NADPH-dependent 7-cyano-7-deazaguanine reductase OS=Megasphaera elsdenii DSM 20460 OX=1064535 GN=queF PE=3 SV=1
MSRSKEELQGVTKLGNQHTVYAQDYDPSLLETFVNKHPDRDYFVKFNCPEFTSLCPMTGQPDYATIYISYVPGVRMVESKSLKLYLFSFRNHGDFHEDCVNIIMDDLIRVMDPKYIEVWGKFLPRGGISIDPYCNYGRPGTPWADVAWQRLSQHDLYPEKVDNR

SEQ ID NO: 47268 - protein, 164 aa, Megasphaera elsdenii
  REGION 1..164: note = tr|A0A1M6N6D8|A0A1M6N6D8_MEGEL NADPH-dependent 7-cyano-7-deazaguanine reductase OS=Megasphaera elsdenii; OX = 907 GN=queF PE=3 SV=1
MSRSKEELQGVTKLGNQHTVYAQDYDPSLLETFVNKHPDRDYFVKFNCPEFTSLCPMTGQPDYATIYISYVPGERMVESKSLKLYLFSFRNHGDFHEDCVNIIMDDLIRVMDPKYIEVWGKFLPRGGISIDPYCNYGRPGTPWADVAWQRLSQHDLYPEKVDNR

SEQ ID NO: 47269 - protein, 164 aa, unidentified
  source 1..164: note = Megasphaera genomosp.
  REGION 1..164: note = tr|A0A2J8BC13|A0A2J8BC13_9FIRM NADPH-dependent 7-cyano-7-deazaguanine reductase OS=Megasphaera genomosp. type_2 OX=699193 GN=queF PE=3 SV=1
MSRTKQELQGITTLGKQQTQYSTTYDPTQLETFVNKHPEHDYFVKFNCPEFTSLCPKTGQPDYATLYISYVPCERMVESKSLKLYLFSFRNHGDFHEDCVNIIMNDLISLMDPKYIEVWGKFLPRGGISIDPFCNYGKKGTPWEQVAWKRLSEHDMYPEIVNNR

SEQ ID NO: 47270 - protein, 176 aa, unidentified
  source 1..176: note = Megasphaera genomosp.
  REGION 1..176: note = tr|D3LVR7|D3LVR7_9FIRM NADPH-dependent 7-cyano-7-deazaguanine reductase OS=Megasphaera genomosp. type_1 str. 28L OX=699218 GN=queF PE=3 SV=1
MTATEACWEGMTVSRTKDELQQIQHLGNQHTTYTGTYDPSVLESFANKHGDHDYFVKFNCPEFTSLCPKTGQPDYATIYISYVPDLRLVESKSLKLYLFSFRNHGDFHEDCINIIMKDLCALLDPKYIEVWGKFLPRGGISIDPYCNYGKPHTPWENVAWQRLAQHDLYPETVNNR

SEQ ID NO: 47271 - protein, 164 aa, unidentified
  source 1..164: note = Megasphaera hexanoica
  REGION 1..164: note = tr|A0A344MKH5|A0A344MKH5_9FIRM NADPH-dependent 7-cyano-7-deazaguanine reductase OS=Megasphaera hexanoica; OX = 1675036 GN=queF PE=3 SV=1
MSRTKEELQGVTSLGNQHTAYTFDYDPSLLETFINKHPGRDYFVKFNCPEFTSLCPKTGQPDYATLYISYVPDQRMVESKSLKLYLFSFRNHGDFHEDCVNIIMDDLIHAMDPKYIEVWGKFLPRGGISIDPYCNYGRAGTPWEQVAWQRLSQHDLYPETIDNR

SEQ ID NO: 47272 - protein, 157 aa, Megasphaera micronuciformis
  REGION 1..157: note = tr|E2ZCX8|E2ZCX8_9FIRM NADPH-dependent 7-cyano-7-deazaguanine reductase OS=Megasphaera micronuciformis F0359 OX=706434 GN=queF PE=3 SV=1
MEKLTLLGNQNVTYANEYNPKILEVFENKHQDHDYFVKFNCPEFTSLCPITGQPDFATVTISYVPDIKMVESKSLKLYLFSFRNHGAFHEDCVNIIMEDLITLMDPKYIEVWGKFLPRGGLSIDPYCNYGKKGTKWEDVAFKRLAEHDMYPEKVDNR

SEQ ID NO: 47273 - protein, 164 aa, Megasphaera paucivorans
  REGION 1..164: note = tr|A0A1G9PY29|A0A1G9PY29_9FIRM NADPH-dependent 7-cyano-7-deazaguanine reductase OS=Megasphaera paucivorans OX=349095 GN=queF PE=3 SV=1
MSRNTKELQGVTQLGSKHTEYDFDYEPSLLETFANKHTEREYFVKFNCPEFTSLCPKTGQPDYATIYISYVPGKLMVESKSLKLYLFSFRNHGDFHEDCVNIIMDDLIMLMDPKYIEVWGKFLPRGGISIDPYCNYGKKGTPWEQVAWQRLTQHDVYPEKVDNR

SEQ ID NO: 47274 - protein, 164 aa, Megasphaera sp.
  REGION 1..164: note = tr|S7HRA6|S7HRA6_9FIRM NADPH-dependent 7-cyano-7-deazaguanine reductase OS=Megasphaera sp. NM10; OX = 1273103 GN=queF PE=3 SV=1
MSRSKEELQGVTQLGNQYTTYAQDYDPSLLETFVNKHPDRDYFVKFNCPEFTSLCPMTGQPDYATIYISYVPGERMVESKSLKLYLFSFRNHGDFHEDCVNIIMDDLIQAMDPKYIEVWGKFLPRGGISIDPYCNYGRPGTPWADVAWQRLSQHDLYPEKVDNR

SEQ ID NO: 47275 - protein, 164 aa, Megasphaera sp.
  REGION 1..164: note = tr|F9MQJ4|F9MQJ4_9FIRM NADPH-dependent 7-cyano-7-deazaguanine reductase OS=Megasphaera sp. UPII 135-E OX=1000569 GN=queF PE=3 SV=1
MSRTKQELQGITTLGKQQTQYSTTYDPTRLETFVNKHPEHDYFVKFNCPEFTSLCPKTGQPDYATLYISYVPCERMVESKSLKLYLFSFRNHGDFHEDCVNIIMNDLISLMDPKYIEVWGKFLPRGGISIDPFCNYGKKGTPWEQVAWKRLSEHDMYPEIVNNR

SEQ ID NO: 47276 - protein, 164 aa, unidentified
  source 1..164: note = Megasphaera stantonii
  REGION 1..164: note = tr|A0A346AWZ6|A0A346AWZ6_9FIRM NADPH-dependent 7-cyano-7-deazaguanine reductase OS=Megasphaera stantonii; OX = 2144175 GN=queF PE=3 SV=1
MNRTSEELSQLASLGSQHTTYRQDYDPGLLETFDNKHPGRDYFVKFNCPEFTSLCPKTGQPDYATIYISYVPDQKMVESKSLKLYLFSFRNHGDFHEDCVNIIMDDLISLMNPKYIEVWGKFLPRGGISIDPYCNYGRQGTPWEQVAWQRLSQHDLYPEKVDNR

SEQ ID NO: 47277 - protein, 123 aa, unidentified
  source 1..123: note = Meiothermus roseus
  REGION 1..123: note = tr|A0A399EVQ1|A0A399EVQ1_9DEIN NADPH-dependent 7-cyano-7-deazaguanine reductase OS=Meiothermus roseus; OX = 1644118 GN=queF PE=3 SV=1
MPRPKSLEEARRVLAHEAFRAPNITQVTLEATEFTSICPRSGQPDFGRVRISYVPREKCIESKSLKFYLWAYRDEPAFCEELTARIADDIVAAIDPAWLEVTLEQNPRGAIGIVVTAVRGQKP

SEQ ID NO: 47278 - protein, 134 aa, unidentified
  source 1..134: note = Meiothermus terrae
  REGION 1..134: note = tr|A0A399EBJ0|A0A399EBJ0_9DEIN NADPH-dependent 7-cyano-7-deazaguanine reductase OS=Meiothermus terrae; OX = 1408545 GN=queF PE=3 SV=1
MDKFWLPRSGPMPRPKSLEEARQVLADEAFRAPNVGRVTFEAAEFTSICPRSGQPDFGRVRISYTPKERCIESKSLKFYLWAYRDEPAFCEELTARIADDIVAAIDPAWLEVTLEQTPRGGIGIVVTAERGQRP

SEQ ID NO: 47279 - protein, 281 aa, unidentified
  source 1..281: note = Melaminivora alkalimesophila
  REGION 1..281: note = tr|A0A317RAI3|A0A317RAI3_9BURK NADPH-dependent 7-cyano-7-deazaguanine reductase OS=Melaminivora alkalimesophila OX=1165852 GN=queF PE=3 SV=1
MNTPEHSQLGKASAYADQYDASLLFPIPRADKRAEIGIDGSAPFFGADLWTAFELSWLNLRGKPQVALAHITVPCETPHIVESKSFKLYLNSFNNTRFASEAEVRTRIRADVSEAVWRGAEHPGTVGVTLLLPEAFDREPIHELDGLLLDRLDVECTRYQPAPELLAARHDEAPVTETLVSHLLKSNCLVTGQPDWGSVQIRYTGPQIDQEGLLQYIVSFRNHNEFHEQCVERIFMDLWTRCKPIKLEVYARYTRRGGLDINPWRTSHPQAMPKNVRTARQ

SEQ ID NO: 47280 - protein, 282 aa, unidentified
  source 1..282: note = Melaminivora sp.
  REGION 1..282: note = tr|A0A2P1NN64|A0A2P1NN64_9BURK NADPH-dependent 7-cyano-7-deazaguanine reductase OS=Melaminivora sp. SC2-7; OX = 2116657 GN=queF PE=3 SV=1
MQTPEQSQLGQHSAYADQYDASLLFPLPRSPKRIELGLQDGAAPFFGADLWTAYELSWLNERGKPQVALAHLTVPCETPHLIESKSLKLYLNSFNGTRFASLDAVRARIRADLSEAAWRGSGQAGGVGVRLIEPGHFDAQQVRELDGLLLDRLDLDCTHYTPAPELLAANHDEAPVTETLVSHLLKSNCLVTGQPDWGSVQIAYSGAQIDQAGLLQYLVSFRNHNEFHEQCVERIFMDVWTRCRPLKLSVYARYTRRGGLDINPFRTSHPQPLPANVRTARQ

SEQ ID NO: 47281 - protein, 281 aa, unidentified
  source 1..281: note = Melaminivora sp.
  REGION 1..281: note = tr|A0A2R3Q9D9|A0A2R3Q9D9_9BURK NADPH-dependent 7-cyano-7-deazaguanine reductase OS=Melaminivora sp. SC2-9; OX = 2109913 GN=queF PE=3 SV=1
MVTPEQSPLGRATPYPEHYDAQLLCPLPRAPKRAEIGIAAAPPFFGADLWSAYELSWLNPRGKPQVAIAHITVPCETPHLIESKSFKLYLASFNNARFASFDEVRARICADLSEAAWRGSAQSGSVGVRLIAPEAFEQQRVQELDGLLLDRLDLECSHYTPAPELLSADHGEAPVSEVLTSHLLKSNCLVTGQPDWGSVQIAYSGAQIDQAGLLRYLVSFRNHNEFHEQCVERIFMDVWTRCRPIKLSVYARYTRRGGLDINPFRTSHPQQLPPNVRTARQ

SEQ ID NO: 47282 - protein, 142 aa, unidentified
  source 1..142: note = Melghirimyces algeriensis
  REGION 1..142: note = tr|A0A521BR26|A0A521BR26_9BACL NADPH-dependent 7-cyano-7-deazaguanine reductase OS=Melghirimyces algeriensis OX=910412 GN=queF PE=3 SV=1
MGKATVDHSKYQKIRFDIQDESAIMTDILETIPYEYPGKDVEVEIPTAEFTSVCPWSGLPDFAEIQITFVPDQHLIEMKSLKYYLTSYRNVGIYQEHATRRILDELVALAKPKYMKVEALWNPRGGLGTRVVAEYPEKNNRG

SEQ ID NO: 47283 - protein, 143 aa, unidentified
  source 1..143: note = Melghirimyces profundicolus
  REGION 1..143: note = tr|A0A2T6C9N3|A0A2T6C9N3_9BACL NADPH-dependent 7-cyano-7-deazaguanine reductase OS=Melghirimyces profundicolus OX=1242148 GN=queF PE=3 SV=1
MGKVTVDHSKYQNIRFDTQEESAIMTDILETIPYQYPGKDVEVEIPTTEFTSVCPWSGLPDFAEIKIRFVPDRYLVEMKSLKYYLTSYRNVGIYQEHATRRILDELVELLKPKSMTVEALWNPRGGLGTRVVAEYPDKKDKKG

SEQ ID NO: 47284 - protein, 138 aa, unidentified
  source 1..138: note = Melghirimyces thermohalophilus
  REGION 1..138: note = tr|A0A1G6HLJ8|A0A1G6HLJ8_9BACL NADPH-dependent 7-cyano-7-deazaguanine reductase OS=Melghirimyces thermohalophilus OX=1236220 GN=queF PE=3 SV=1
MGKVDVDHSKYQNIRFDIQDESAIMTDILETIPYEYPGKDVEVEIPTTEFTSVCPWSGLPDFAEITITFVPDRHLVEMKSLKYYLTSYRNVGIYQEHATRRILEELVDLLKPKRMKVEALWNPRGGLGTRVVAEYPEK

SEQ ID NO: 47285 - protein, 118 aa, unidentified
  source 1..118: note = Melioribacter roseus
  REGION 1..118: note = tr|I6ZRU7|I6ZRU7_MELRP NADPH-dependent 7-cyano-7-deazaguanine reductase OS=Melioribacter roseus (strain JCM 17771 / P3M-2) OX=1191523 GN=queF PE=3 SV=1
MNEKQKILETFPNPNPERDYIIIHTAPEFTSLCPKTGQPDFATIILEYIPDKLCVELKSYKFYLQSFRNDGIYFEAVTNRILNDLVETLQPRKMKLTAKFNTRGGIHSDIIAEYKKEQ

SEQ ID NO: 47286 - protein, 118 aa, unidentified
  source 1..118: note = Melioribacter sp.
  REGION 1..118: note = tr|A0A1G1BB03|A0A1G1BB03_9BACT NADPH-dependent 7-cyano-7-deazaguanine reductase OS=Melioribacter sp. GWF2_38_21 OX=1801612 GN=queF PE=3 SV=1
MQDKTKILVTFPNPNPERDYTVIHYAPEFTSVCPVTGQPDYATIVLEYIPDKICVELKSYKFYLQSYRNDGIYFEAVTNKIANDLIKIMKPRYLKVLAKFNTRGGISSDIIVEHKKRK

SEQ ID NO: 47287 - protein, 136 aa, Melittangium boletus
  REGION 1..136: note = tr|A0A250IBH3|A0A250IBH3_9DELT NADPH-dependent 7-cyano-7-deazaguanine reductase OS=Melittangium boletus DSM 14713 OX=1294270 GN=queF PE=3 SV=1
MASQPSKDLKTFVNPAPDRDYEIAFDVPEFTCLCPLTGQPDFARFRIRYVPDELCVELKSLKLYMWAYRDEGAFHEKVTNTIADDIVRAIQPRKLTVEGDFFVRGGIGTVVTVTHEKAARSRPAAKKKAATPARRK

SEQ ID NO: 47288 - protein, 144 aa, Merismopedia glauca
  REGION 1..144: note = tr|A0A2T1C406|A0A2T1C406_9CYAN NADPH-dependent 7-cyano-7-deazaguanine reductase OS=Merismopedia glauca CCAP 1448/3 OX=1296344 GN=queF PE=3 SV=1
MSHSSTPETLPPTQETREMKYGEREIAEGQLITFPNPRVGRRYHVNITLPEFTCKCPFSGYPDFATIDLTYVPNLRVVELKALKLYINSYRDRYISHEESVNQILDDFIAACDPLEVTIKGDFTPRGNVHTVIEIHHSKPQLDS

SEQ ID NO: 47289 - protein, 130 aa, unidentified
  source 1..130: note = Mesoaciditoga sp.
  REGION 1..130: note = tr|A0A2J6WJ67|A0A2J6WJ67_9BACT NADPH-dependent 7-cyano-7-deazaguanine reductase OS=Mesoaciditoga sp.; OX = 2060323 GN=queF PE=3 SV=1
MPKAEGKTFSFLGEDAIETGILETIDFQNKEKEFVRYETDEFSAVCPFSGLPDIGRVMIEYIPSDKIIELKSLKYYFVSFRNVGIYQERATQRIFNDLFELLNPVWMKVTVIYKTRGGIDATTIIEKGER

SEQ ID NO: 47290 - protein, 279 aa, unidentified
  source 1..279: note = Mesocricetibacter intestinalis
  REGION 1..279: note = tr|A0A4V3D9Z6|A0A4V3D9Z6_9PAST NADPH-dependent 7-cyano-7-deazaguanine reductase OS=Mesocricetibacter intestinalis OX=1521930 GN=queF PE=3 SV=1
MNYQDHSLNTLKLGKKTEYASDYDPRLLQAVPRALNRDGLGITLQQPFTLGADIWTAYEISWLNPKGVPQVAVADIEIDFRSENLIESKSFKLYLNSFNQTKFTDAAEVQRAMQLDLSACAGGGVKVRLNSLADYSGIPIAALPGQCIDNQDIEIKDYRFNPNLLENCTDAQIVEETLVSHLLKSNCLITAQPDWGSIQIHYIGARIQPEKLLRYLISFRQHNEFHEQCVERIFCDLQHYARPQKLTVYARYTRRGGLDINPFRSNFEPCPANFRLARQ

SEQ ID NO: 47291 - protein, 153 aa, Mesorhizobium albiziae
  REGION 1..153: note = tr|A0A1I4B0C9|A0A1I4B0C9_9RHIZ NADPH-dependent 7-cyano-7-deazaguanine reductase OS=Mesorhizobium albiziae; OX = 335020 GN=queF PE=3 SV=1
MTTTGNLTQLGTKVETPASPELAILETVPFARTDGPPAIVRFTCPEFTSLCPVTGQPDFAHIVIDYAPDELLVESKSLKLFMTSFRNHGAFHEDCTVAIGKRVVEATKPLWLRIAGYWYPRGGIPIDVFWQTGTPPEGAWLPETGVAPYRGRG

SEQ ID NO: 47292 - protein, 153 aa, Mesorhizobium alhagi
  REGION 1..153: note = tr|H0HUX8|H0HUX8_9RHIZ NADPH-dependent 7-cyano-7-deazaguanine reductase OS=Mesorhizobium alhagi CCNWXJ12-2 OX=1107882 GN=queF PE=3 SV=1
MTVTENLTQLGARVETPASPDAAILETVPYTRGDGPPAIVRFTCPEFTSLCPVTGQPDFAHIVIDYAPDAALVESKSLKLFMVSFRNHGAFHEDCTVMIARRIIEATKPLWLRIAGYWYPRGGIPIDVFWQTGAPPEGAWLPDTGVAPYRGRG

SEQ ID NO: 47293 - protein, 153 aa, Mesorhizobium amorphae
  REGION 1..153: note = tr|A0A212DNE8|A0A212DNE8_9RHIZ NADPH-dependent 7-cyano-7-deazaguanine reductase OS=Mesorhizobium amorphae CCBAU 01583 OX=1449348 GN=queF PE=3 SV=1
MIDTKTLTQLGAHVETPQSPEAAVLETVPFARGDGPPAIVRFVCPEFTSLCPVTGQPDFAHIVIDYAPDTLLVESKSLKLFMTSFRNHGAFHEECTVMIGRRIVAATKPLWLRIGGYWYPRGGIPIDVFWQTGAPPEGSWLPDTGVAPYRGRG

SEQ ID NO: 47294 - protein, 153 aa, Mesorhizobium amorphae
  REGION 1..153: note = tr|G6YJA3|G6YJA3_9RHIZ NADPH-dependent 7-cyano-7-deazaguanine reductase OS=Mesorhizobium amorphae CCNWGS0123 OX=1082933 GN=queF PE=3 SV=1
MIDTKALTQLGAHVEPPRSPEAAVLETVPFARGDGPPAIVRFVCPEFTSLCPVTGQPDFAHIVIDYAPDTLLVESKSLKLFMTSFRNHGAFHEECTVMIGRRIVAATKPLWLRVGGYWYPRGGIPIDVFWQTGAPPEGAWLPDTGVAPYRGRG

SEQ ID NO: 47295 - protein, 153 aa, Mesorhizobium australicum
  REGION 1..153: note = tr|L0KQJ0|L0KQJ0_MESAW NADPH-dependent 7-cyano-7-deazaguanine reductase OS=Mesorhizobium australicum (strain HAMBI 3006 / LMG 24608 / WSM2073); OX = 754035 GN=queF PE=3SV=1
MIDTKNLTQLGTHVETPQSPEAAVLETVPFSRGDGPPAIVRFTCPEFTSLCPVTGQPDFAHIVIDYAPDAALVESKSLKLFMTSFRNHGAFHEDCTVMIGRRIVAATKPLWLRIGGYWYPRGGIPIDVFWQTGAPPEGAWLPDTGVTPYRGRG

SEQ ID NO: 47296 - protein, 153 aa, Mesorhizobium ciceri
  REGION 1..153: note = tr|A0A143N7U3|A0A143N7U3_9RHIZ NADPH-dependent 7-cyano-7-deazaguanine reductase OS=Mesorhizobium ciceri; OX = 39645 GN=queF PE=3 SV=1
MIDTKTLTQLGAHVETPQSPEAAVLETVPFSRGDGPPAIVRFTCPEFTSLCPVTGQPDFAHIVIDYAPDAALVESKSLKLFMTSFRNHGAFHEDCTVMIGRRIVAATKPLWLRIGGYWYPRGGIPIDVFWQTGAPPEGAWLPDTGVAPYRGRG

SEQ ID NO: 47297 - protein, 153 aa, Mesorhizobium ciceri; identical to SEQ ID NO: 47296
  REGION 1..153: note = tr|E8TIG7|E8TIG7_MESCW NADPH-dependent 7-cyano-7-deazaguanine reductase OS=Mesorhizobium ciceri biovar biserrulae (strain HAMBI 2942 / LMG 23838 / WSM1271) OX=765698GN=queF PE=3 SV=1

SEQ ID NO: 47298 - protein, 153 aa, unidentified
  source 1..153: note = Mesorhizobium delmotii
  REGION 1..153: note = tr|A0A2P9AVX8|A0A2P9AVX8_9RHIZ NADPH-dependent 7-cyano-7-deazaguanine reductase OS=Mesorhizobium delmotii; OX = 1631247 GN=queF PE=3 SV=1
MTDTKNLTQLGTNVEAPQSPEAAVLETVPFSRGDGPPAIVRFTCPEFTSLCPVTGQPDFAHIVIDYAPDTLLVESKSLKLFMTSFRNHGAFHEECTVMIGRRIIAATKPLWLRIGGYWYPRGGIPIDVFWQTGAPPEGAWLPDTGVAPYRGRG

SEQ ID NO: 47299 - protein, 153 aa, unidentified; identical to SEQ ID NO: 47296
  source 1..153: note = Mesorhizobium erdmanii
  REGION 1..153: note = tr|A0A4Q1V9L9|A0A4Q1V9L9_9RHIZ NADPH-dependent 7-cyano-7-deazaguanine reductase OS=Mesorhizobium erdmanii; OX = 1777866 GN=queF PE=3 SV=1

SEQ ID NO: 47300 - protein, 153 aa, unidentified
  source 1..153: note = Mesorhizobium hawassense
  REGION 1..153: note = tr|A0A330HR71|A0A330HR71_9RHIZ NADPH-dependent 7-cyano-7-deazaguanine reductase OS=Mesorhizobium hawassense OX=1209954 GN=queF PE=3 SV=1
MTDAKNLTQLGKHVETPQSPEQAVLEAVPFQRGDGPPAIVRFTCPEFTSLCPVTGQPDFAHIVIDYAPDEMLVESKSLKLFMTSFRNHGAFHEECTVMIGRRIVEVTKPLWLRVGGYWFPRGGIPIDVFWQTGAPPKDVWLPDTGVAPYRGRG

SEQ ID NO: 47301 - protein, 153 aa, unidentified
  source 1..153: note = Mesorhizobium helmanticense
  REGION 1..153: note = tr|A0A2T4J3G7|A0A2T4J3G7_9RHIZ NADPH-dependent 7-cyano-7-deazaguanine reductase OS=Mesorhizobium helmanticense OX=1776423 GN=queF PE=3 SV=1
MIDTKTLTQLGAHVETPQSPDAAILETVPFARADGPPAIVRFTCPEFTSLCPVTGQPDFAHIVIDYAPDALLVESKSLKLFMTSFRNHGAFHEECTVMIGRRIVAATKPLWLRIGGYWYPRGGIPIDVFWQTGAPPEGVWLPDTGVAPYRGRG

SEQ ID NO: 47302 - protein, 153 aa, Mesorhizobium huakuii; identical to SEQ ID NO: 47296
  REGION 1..153: note = tr|A0A068D8Q5|A0A068D8Q5_9RHIZ NADPH-dependent 7-cyano-7-deazaguanine reductase OS=Mesorhizobium huakuii 7653R OX=763057 GN=queF PE=3 SV=1

SEQ ID NO: 47303 - protein, 153 aa, unidentified; identical to SEQ ID NO: 47296
  source 1..153: note = Mesorhizobium japonicum
  REGION 1..153: note = tr|A0A3M9XFZ2|A0A3M9XFZ2_9RHIZ NADPH-dependent 7-cyano-7-deazaguanine reductase OS=Mesorhizobium japonicum OX=2066070 GN=queF PE=3 SV=1

SEQ ID NO: 47304 - protein, 153 aa, unidentified; identical to SEQ ID NO: 47296
  source 1..153: note = Mesorhizobium japonicum
  REGION 1..153: note = sp|Q983K4|QUEF_RHILO NADPH-dependent 7-cyano-7-deazaguanine reductase OS=Mesorhizobium japonicum (strain LMG 29417 / CECT 9101 / MAFF 303099); OX = 266835 GN=queF PE=3SV=1

SEQ ID NO: 47305 - protein, 153 aa, unidentified; identical to SEQ ID NO: 47296
  source 1..153: note = Mesorhizobium jarvisii
  REGION 1..153: note = tr|A0A3A5KBK4|A0A3A5KBK4_9RHIZ NADPH-dependent 7-cyano-7-deazaguanine reductase OS=Mesorhizobium jarvisii; OX = 1777867 GN=queF PE=3 SV=1

SEQ ID NO: 47306 - protein, 153 aa, unidentified
  source 1..153: note = Mesorhizobium kowhaii
  REGION 1..153: note = tr|A0A2W7C3T9|A0A2W7C3T9_9RHIZ NADPH-dependent 7-cyano-7-deazaguanine reductase OS=Mesorhizobium kowhaii; OX = 1300272 GN=queF PE=3 SV=1
MTVTKNLTQLGAHVETPQSPDQAVLETVPFARGDGPPAIVRFTCPEFTSLCPVTGQPDFAHIVIDYAPDALLVESKSLKLFMTSFRNHGAFHEECTVMIGRRIVAATKPLWLRIGGYWFPRGGIPIDVFWQTGAPPEGTWLPDTGVAPYRGRG

SEQ ID NO: 47307 - protein, 153 aa, Mesorhizobium mediterraneum
  REGION 1..153: note = tr|A0A271KYU2|A0A271KYU2_9RHIZ NADPH-dependent 7-cyano-7-deazaguanine reductase OS=Mesorhizobium mediterraneum OX=43617 GN=queF PE=3 SV=1
MTDTKNLIQLGTNVEAPRSPEAAVLETVPFSRGDGPPAIVRFTCPEFTSLCPVTGQPDFAHIVIDYAPDTLLVESKSLKLFMTSFRNHGAFHEECTVMIGRRIIAATKPLWLRIGGYWYPRGGIPIDVFWQTGAPPEGAWLPDTGVAPYRGRG

SEQ ID NO: 47308 - protein, 153 aa, Mesorhizobium metallidurans
  REGION 1..153: note = tr|M5EQB1|M5EQB1_9RHIZ NADPH-dependent 7-cyano-7-deazaguanine reductase OS=Mesorhizobium metallidurans STM 2683 OX=1297569 GN=queF PE=3 SV=1
MIDTKNLTQLGTHVETPQSPEAAVLETVPSARGDGPPAIVRFTCPEFTSLCPVTGQPDFAHIVIDYAPDALLVESKSLKLFMTSFRNHGAFHEDCTVMIGRRIVAATKPLWLRIGGYWYPRGGIPIDVFWQTGAPPEGVWLPDTGVVPYRGRG

SEQ ID NO: 47309 - protein, 153 aa, unidentified
  source 1..153: note = Mesorhizobium muleiense
  REGION 1..153: note = tr|A0A1G9KRD8|A0A1G9KRD8_9RHIZ NADPH-dependent 7-cyano-7-deazaguanine reductase OS=Mesorhizobium muleiense OX=1004279 GN=queF PE=3 SV=1
MTDTKNLTQLGSNVEAPQNPEAAVLETVPFSRGDGPPAIVRFTCPEFTSLCPVTGQPDFAHIVIDYAPDMLLVESKSLKLFMTSFRNHGAFHEECTVMIGRRIIAATKPLWLRIGGYWYPRGGIPIDVFWQTGAPPEGAWLPDTGVAPYRGRG

SEQ ID NO: 47310 - protein, 153 aa, Mesorhizobium opportunistum
  REGION 1..153: note = tr|F7Y2I1|F7Y2I1_MESOW NADPH-dependent 7-cyano-7-deazaguanine reductase OS=Mesorhizobium opportunistum (strain LMG 24607 / HAMBI 3007 / WSM2075); OX = 536019 GN=queF PE =3 SV=1
MIDTKTLTQLGAHVETPQSPEQAVLETVPYTRGDGPPAIVRFTCPEFTSLCPVTGQPDFAHIVIDYAPDAALVESKSLKLFMTSFRNHGAFHEDCTVMIGRRIVAATKPLWLRIGGYWFPRGGIPIDVFWQTGAPPEGAWLPDTGVAPYRGRG

SEQ ID NO: 47311 - protein, 154 aa, Mesorhizobium plurifarium
  REGION 1..154: note = tr|A0A2T3EH09|A0A2T3EH09_MESPL NADPH-dependent 7-cyano-7-deazaguanine reductase OS=Mesorhizobium plurifarium OX=69974 GN=queF PE=3 SV=1
MTKTDVSGLSQLGTKVDLPQSPEEAVLEKVPSGHGGTDFVVRFTAPEFTSLCPMTGQPDFAHIVIDYVPDGWLVESKSLKLFLHSFRNHGAFHEDCTIEIAQRLVSLLSPKWLRIGAYWYPRGGIPIDVFWQTGNPPEGVWLPDQGVPTYRGRG

SEQ ID NO: 47312 - protein, 153 aa, Mesorhizobium plurifarium
  REGION 1..153: note = tr|A0A090F7T7|A0A090F7T7_MESPL NADPH-dependent 7-cyano-7-deazaguanine reductase OS=Mesorhizobium plurifarium OX=69974 GN=queF PE=3 SV=1
MTDAKNLTQLGKHVETPQSPEQAVLETVPFQRGDGPPAIVRFTCPEFTSLCPVTGQPDFAHIVIDYAPDKTLVESKSLKLFMTSFRNHGAFHEECTVMIGRRIVEATKPLWLRVGGYWFPRGGIPIDVFWQTGAPPKDAWLPDTGVAPYRGRG

SEQ ID NO: 47313 - protein, 153 aa, unidentified
  source 1..153: note = Mesorhizobium prunaredense
  REGION 1..153: note = tr|A0A1R3V2N3|A0A1R3V2N3_9RHIZ NADPH-dependent 7-cyano-7-deazaguanine reductase OS=Mesorhizobium prunaredense OX=1631249 GN=queF PE=3 SV=1
MTDTKNLTQLGSNVEAPQNPEAAVLETVPFSRGDGPPAIVRFTCPEFTSLCPVTGQPDFAHIVIDYAPDTLLVESKSLKLFMTSFRNHGAFHEECTVMIGRRIIAATKPLWLRIGGYWYPRGGIPIDVFWQTGAPPQGAWLPDTGVAPYRGRG

SEQ ID NO: 47314 - protein, 153 aa, unidentified
  source 1..153: note = Mesorhizobium qingshengii
  REGION 1..153: note = tr|A0A1G5XAK1|A0A1G5XAK1_9RHIZ NADPH-dependent 7-cyano-7-deazaguanine reductase OS=Mesorhizobium qingshengii OX=1165689 GN=queF PE=3 SV=1
MTITKDLTQLGAHVETPQSPDQAVLETVPFSRGDGPPAIVRFTCPEFTSLCPVTGQPDFAHIVIDYAPDAALVESKSLKLFMTSFRNHGAFHEECTVMIGRRIVAATKPLWLRVGGYWFPRGGIPIDVFWQTGAPPEGAWLPDTGVAPYRGRG

SEQ ID NO: 47315 - protein, 153 aa, unidentified
  source 1..153: note = Mesorhizobium sanjuanii
  REGION 1..153: note = tr|A0A2A6F939|A0A2A6F939_9RHIZ NADPH-dependent 7-cyano-7-deazaguanine reductase OS=Mesorhizobium sanjuanii OX=2037900 GN=queF PE=3 SV=1
MIDTKSLTQLGAHVETPLSPEAAVLETVPFSRGDGPPAIVRFTCPEFTSLCPVTGQPDFAHIVIDYAPDALLVESKSLKLFMTSFRSHGAFHEDCTVMIGRRIVAVTKPLWLRIGGYWYPRGGIPIDVFWQTGAPPEGAWLPDTGVAPYRGRG

SEQ ID NO: 47316 - protein, 155 aa, unidentified
  source 1..155: note = Mesorhizobium soli
  REGION 1..155: note = tr|A0A2P7SET9|A0A2P7SET9_9RHIZ NADPH-dependent 7-cyano-7-deazaguanine reductase OS=Mesorhizobium soli; OX = 1295366 GN=queF PE=3 SV=1
MSQSNIYSELTQLGKDTPIPASPETAVLERVRNPQAGTRYCVRFTAPEFTSLCPMTGQPDFAHLVIDYVPGEWLVESKSLKLFLTSFRNHGAFHEDCTVSIARRLVDRLEPEWLRIGGYWYPRGGIPIDVFYQTGTAPADVWIPEQGVPPYRGRG

SEQ ID NO: 47317 - protein, 153 aa, Mesorhizobium sp.
  REGION 1..153: note = tr|A0A503AM31|A0A503AM31_9RHIZ NADPH-dependent 7-cyano-7-deazaguanine reductase OS=Mesorhizobium sp. B2-7-1 OX=2589909 GN=queF PE=3 SV=1
MTDAKNLTQLGKHVEPPQSPEQAVLEAVPFQRGDGPPAIVRFTCPEFTSLCPVTGQPDFAHIVIDYAPDKTLVESKSLKLFMTSFRNHGAFHEECTVMIGRRIVEATKPLWLRVGGYWFPRGGIPIDVFWQTGAPPKDVWLPDTGVAPYRGRG

SEQ ID NO: 47318 - protein, 153 aa, Mesorhizobium sp.; identical to SEQ ID NO: 47296
  REGION 1..153: note = tr|A0A3S2HMD2|A0A3S2HMD2_9RHIZ NADPH-dependent 7-cyano-7-deazaguanine reductase OS=Mesorhizobium sp. M7A.F.Ca.CA.002.03.2.1 OX=2496680 GN=queF PE=3 SV=1

SEQ ID NO: 47319 - protein, 153 aa, unidentified
  source 1..153: note = Mesorhizobium tamadayense
  REGION 1..153: note = tr|A0A3P3FRW5|A0A3P3FRW5_9RHIZ NADPH-dependent 7-cyano-7-deazaguanine reductase OS=Mesorhizobium tamadayense OX=425306 GN=queF PE=3 SV=1
MTDAKNLTQLGKHVETPQSPEQAVLETVPFQRGDGPPAIVRFTCPEFTSLCPVTGQPDFAHIVIDYAPDKRLVESKSLKLFMTSFRNHGAFHEECTVMIGRRIVEATKPLWLRVGGYWFPRGGIPIDVFWQTGAPPKDAWLPDTGVAPYRGRG

SEQ ID NO: 47320 - protein, 153 aa, Mesorhizobium temperatum
  REGION 1..153: note = tr|A0A271LBK8|A0A271LBK8_9RHIZ NADPH-dependent 7-cyano-7-deazaguanine reductase OS=Mesorhizobium temperatum OX=241416 GN=queF PE=3 SV=1
MTDTKNLTQLGTNVEAPQSPEAAVLETVPFSRGDGPPAIVRFTCPEFTSLCPVTGQPDFAHIVIDYAPDAVLVESKSLKLFMTSFRNHGAFHEECTVMIGRRIVAATKPLWLRIGGYWYPRGGIPIDVFWQTGAPPEGAWLPDTGVAPYRGRG

SEQ ID NO: 47321 - protein, 153 aa, Mesorhizobium tianshanense
  REGION 1..153: note = tr|A0A562NLC8|A0A562NLC8_9RHIZ NADPH-dependent 7-cyano-7-deazaguanine reductase OS=Mesorhizobium tianshanense OX=39844 GN=queF PE=3 SV=1
MTITKNLTQLGTHVEAPRSPEAAVLETVPFSRGDGPPAIVRFTCPEFTLLCPVTGQPDFAHIVIDYAPDTLLVESKSLKLFMTSFRNHGAFHEECTVMIGRRIVAATKPLWLRIGGYWYPRGGIPIDVFWQTGAPPEGAWLPDTGVAPYRGRG

SEQ ID NO: 47322 - protein, 153 aa, unidentified
  source 1..153: note = Mesorhizobium waimense
  REGION 1..153: note = tr|A0A3A5KPX9|A0A3A5KPX9_9RHIZ NADPH-dependent 7-cyano-7-deazaguanine reductase OS=Mesorhizobium waimense; OX = 1300307 GN=queF PE=3 SV=1
MIDTRTLTQLGAHVEPPQSPEAAVLETVPFARGNGPPAIVRFVCPEFTSLCPVTGQPDFAHIVIDYAPDTLLVESKSLKLFMTSFRNHGAFHEECTVMIGRRIVAATKPLWLRIGGYWYPRGGIPIDVFWQTAAPPEGAWLPDTGVAPYRGRG

SEQ ID NO: 47323 - protein, 153 aa, unidentified
  source 1..153: note = Mesorhizobium wenxiniae
  REGION 1..153: note = tr|A0A271K7W8|A0A271K7W8_9RHIZ NADPH-dependent 7-cyano-7-deazaguanine reductase OS=Mesorhizobium wenxiniae OX=2014805 GN=queF PE=3 SV=1
MTDTKNLTQLGTNVETPQSPEAAVLETVPFSRGDGPPAIVRFTCPEFTSLCPVTGQPDFAHIVIDYAPDTLLVESKSLKLFMTSFRNHGAFHEECTVMIGRRIIAATKPLWLRIGGYWYPRGGIPIDVFWQTGAPPEGAWLPDTGVAPYRGRG

SEQ ID NO: 47324 - protein, 139 aa, unidentified
  source 1..139: note = Mesosutterella multiformis
  REGION 1..139: note = tr|A0A388SCG1|A0A388SCG1_9BURK NADPH-dependent 7-cyano-7-deazaguanine reductase OS=Mesosutterella multiformis OX=2259133 GN=queF PE=3 SV=1
MSSAPSEKLEVFDNPAPERDYVIHMEIPEFTCLCPLTGQPDFATLIVDYIADEKCLELKSIKLYTWTYREMGAFHEDVTNRILSDFVNAIHPRYMRIRARWWVRGGIYTTVIAEHRKEGWTPAPVVHLPDFETNSPMRG

SEQ ID NO: 47325 - protein, 281 aa, unidentified; identical to SEQ ID NO: 46660
  source 1..281: note = Metakosakonia sp.
  REGION 1..281: note = tr|A0A348D8Z3|A0A348D8Z3_9ENTR NADPH-dependent 7-cyano-7-deazaguanine reductase OS=Metakosakonia sp. MRY16-398 OX=2487150 GN=queF PE=3 SV=1

SEQ ID NO: 47326 - protein, 279 aa, unidentified
  source 1..279: note = Metallibacterium scheffleri
  REGION 1..279: note = tr|A0A4S3KQA0|A0A4S3KQA0_9GAMM NADPH-dependent 7-cyano-7-deazaguanine reductase OS=Metallibacterium scheffleri OX=993689 GN=B1806_05040 PE=3 SV=1
MNPYEPTALGKPVAAWPRRVDAAVLAPIPRAAMRADLGLAPHAPLPFHGEDLWGCYELSWLDVHGKPVQALAELRVSAASARLIESKSLKLYLNGYAGERMADADAVRARIAQDLAVAAGDTVQVALLESAVWGRLRLHAAPGEALDELQIAPASYGPPQPQLLRRASAGRVHETLHSALFRSNCPVTGQPDWATVVVDYAGPALDHAALLAYLVSYREHAAFHEQCVERIWLDLMQHGACVALTVFARFTRRGGLDINPLRSSDAAARLPAWQRYAQQ

SEQ ID NO: 47327 - protein, 129 aa, unidentified
  source 1..129: note = Unknown
  REGION 1..129: note = tr|A0A1X7MIV6|A0A1X7MIV6_9GAMM NADPH-dependent 7-cyano-7-deazaguanine reductase OS=methanotrophic bacterial endosymbiont of Bathymodiolus sp. OX=280772; GN = queF PE=3SV=1
MATKPSKDLQAFDNPQPGRDFTIRIDTPEFTCLCPLTGQPDFAEITIEYVPDKLCIELKALKLYLWTFRDRGAFHEAVTNGILNDIVKIVQPNFMRVRADFNVRGGVYTSVIVEHRNPDWQAPELVQLP

SEQ ID NO: 47328 - protein, 153 aa, Methylarcula marina
  REGION 1..153: note = tr|A0A3R7Q0T7|A0A3R7Q0T7_9RHOB NADPH-dependent 7-cyano-7-deazaguanine reductase OS=Methylarcula marina; OX = 72022 GN=queF PE=3 SV=1
MSHYTDALTQLGASTELPRNPDEAVLERVPNPQPGEIYAVRFTQPEFTSLCPMTGQPDFAHLVIDYVPGDWLVESKSLKLYLGSFRNHGAFHEDCTVSIGKRLAETLAPQWLRIGGYWYPRGGMPIDVFWQTGAVPAGLWLPDQGVPGYRGRG

SEQ ID NO: 47329 - protein, 161 aa, Methylibium petroleiphilum
  REGION 1..161: note = tr|A2SGS9|A2SGS9_METPP NADPH-dependent 7-cyano-7-deazaguanine reductase OS=Methylibium petroleiphilum (strain ATCC BAA-1232 / LMG 22953 / PM1); OX = 420662 GN=queF PE=3SV=1
MAKTAKKSSPRTPPRQRPMPPNPPTAPSKELHVFPNPAPERDYVIQFQIPEFTCLCPLTGQPDFAHFTIDMIADGLCVELKSLKMYMWSFRDEGAFHEKVTNDILGKIVETTAPRFARITARWYVRGGIYTNVVAEHRKKGWKPEPLVVLPQHATERGLPT

SEQ ID NO: 47330 - protein, 143 aa, Methylibium sp.
  REGION 1..143: note = tr|A0A0Q7DHJ1|A0A0Q7DHJ1_9BURK NADPH-dependent 7-cyano-7-deazaguanine reductase OS=Methylibium sp. Root1272 OX=1736441 GN=queF PE=3 SV=1
MPPNPPTAPSKELHVFPNPAPERDYVIQFQIPEFTCLCPLTGQPDFAHFTIDMIADGLCVELKSLKMYMWSFRDEGAFHEKVTNDILGKIVETTAPRFARITAKWYVRGGIYTSVVAEHRKKGWKPEPLVALPQHAAERGLPT

SEQ ID NO: 47331 - protein, 143 aa, Methylibium sp.
  REGION 1..143: note = tr|W7WWN8|W7WWN8_9BURK NADPH-dependent 7-cyano-7-deazaguanine reductase OS=Methylibium sp. T29-B; OX = 1437443 GN=queF PE=3 SV=1
MPPNPPTAPSKELHVFPNPAPERDYVIQFQIPEFTCLCPLTGQPDFAHFTIDMIADGLCVELKSLKMYMWSFRDEGAFHEKVTNDILGKIVETTAPRFARITARWYVRGGIYTNVVAEHRKKGWKPEPLVVLPQHATERGLPT

SEQ ID NO: 47332 - protein, 139 aa, Methylobacillus flagellatus
  REGION 1..139: note = sp|Q1H1G9|QUEF_METFK NADPH-dependent 7-cyano-7-deazaguanine reductase OS=Methylobacillus flagellatus (strain KT / ATCC 51484 / DSM 6875) OX=265072; GN = queF PE=3 SV=1
MSSQPSKALETFDNPTPGRDFHIHMEIPEFTCLCPKTGQPDFAVLYLDYIPDQKCVELKSLKLYIWSFRDEGCFHEAVTNQILDDLVVATDPKFMRLTAKFYVRGGIFTNVVAEHRKPGWQPQPRVELAEFESQSNIRG

SEQ ID NO: 47333 - protein, 139 aa, unidentified
  source 1..139: note = Methylobacillus rhizosphaerae
  REGION 1..139: note = tr|A0A238YMK3|A0A238YMK3_9PROT NADPH-dependent 7-cyano-7-deazaguanine reductase OS=Methylobacillus rhizosphaerae OX=551994 GN=queF PE=3 SV=1
MTSQPSKALETFDNPNPGRDFHIHMEIPEFTCLCPKTGQPDFAVLYLDYIPDQKCVELKSLKLYMWSFRDEGCFHEAVTNRILDDLVAATNPKFMRLTAKFYVRGGIFTNVVAEHRQPDWQPQPRVELSTFTAQSNIRG

SEQ ID NO: 47334 - protein, 139 aa, Methylobacillus sp.
  REGION 1..139: note = tr|A0A1A9NNA6|A0A1A9NNA6_9PROT NADPH-dependent 7-cyano-7-deazaguanine reductase OS=Methylobacillus sp. MM3 OX=1848039 GN=queF PE=3 SV=1
MSSQPSKTLETFDNPQPERDFHIHMEIPEFTCLCPKTGQPDFATLYLDYIPDQKCVELKSLKLYMWSFRNEGAFHEAVTNSILDDLVAATQPRFMRLTAKFYVRGGIFTNVVAEHRKPGWQPAPRVELTQFEHQSNTRG

SEQ ID NO: 47335 - protein, 129 aa, Methylobacter sp.
  REGION 1..129: note = tr|A0A522WV67|A0A522WV67_9GAMM NADPH-dependent 7-cyano-7-deazaguanine reductase OS=Methylobacter sp.; OX = 2051955 GN=queF PE=3 SV=1
MTTQPSKDLETFDNPQPGRDYTIRIDVPEFTCLCPKTGQPDFATIQIEYVPAKLCVELKALKLYMWAFRDQGAFHEAVTNEILDDLVKVTSPNFMRIRAEFNVRGGIYTTVVVEHRNPDWQAPELVTLP

SEQ ID NO: 47336 - protein, 129 aa, Methylobacter sp.
  REGION 1..129: note = tr|A0A2S5Q6A0|A0A2S5Q6A0_9GAMM NADPH-dependent 7-cyano-7-deazaguanine reductase OS=Methylobacter sp.; OX = 2051955 GN=queF PE=3 SV=1
MTTQPSKDLETFPNPQPERDFTIRIDIPEFTCLCPKTGQPDFAKIQIEYVPADVCVELKALKLYMWTFRERGAFHEAVTNEILNDIVAVTQPNFMRIRAEFNVRGGIYTTVVAEHRNPAWQAPALVNLP

SEQ ID NO: 47337 - protein, 129 aa, Methylobacter tundripaludum
  REGION 1..129: note = tr|A0A2S6GVQ8|A0A2S6GVQ8_9GAMM NADPH-dependent 7-cyano-7-deazaguanine reductase OS=Methylobacter tundripaludum OX=173365 GN=queF PE=3 SV=1
MTTQPSKDLETFDNPKPGRDYTIRIDVPEFTCLCPKTGQPDFATIQIEYIPGALCVELKALKLYMWAFRDQGAFHEAVTNEILDDLVKAIAPNFMRIRAEFNVRGGIYTTVVVEHKNPDWQAPEPVTLP

SEQ ID NO: 47338 - protein, 129 aa, Methylobacter tundripaludum
  REGION 1..129: note = tr|A0A2S6HGF4|A0A2S6HGF4_9GAMM NADPH-dependent 7-cyano-7-deazaguanine reductase OS=Methylobacter tundripaludum OX=173365 GN=queF PE=3 SV=1
MTTQPSKDLETFDNPQPGRDYTIRIDVPEFTCLCPKTGQPDFATIQIEYVPGALCVELKALKLYMWAFRDQGAFHEAVTNEILDDIVKAIAPNFMRIRAEFNVRGGIYTTVVVEHRNPKWQAPELVTLP

SEQ ID NO: 47339 - protein, 154 aa, Methylobacterium aquaticum
  REGION 1..154: note = tr|A0A0J6SMA5|A0A0J6SMA5_9RHIZ NADPH-dependent 7-cyano-7-deazaguanine reductase OS=Methylobacterium aquaticum OX=270351 GN=queF PE=3 SV=1
MTQDLSHHARQLGQLSAQPRSPDEAQLDRVPNPHPDTDYCARFTAPEFTSLCPVTGQPDFAILVIDYVPDQWLVESKSLKLYLHSFRDHGAFHEDCTVGIGRRLTALLEPRYLRIGGYWYPRGGIPIDVFWQTGTPPASVWLPDQGVPPYRARG

SEQ ID NO: 47340 - protein, 154 aa, Methylobacterium aquaticum
  REGION 1..154: note = tr|A0A0C6FHJ4|A0A0C6FHJ4_9RHIZ NADPH-dependent 7-cyano-7-deazaguanine reductase OS=Methylobacterium aquaticum OX=270351 GN=queF PE=3 SV=1
MTQDITDHARQLGQPIAQPRSPEEAQLDRVPNPHPDTDYCARFTAPEFTSLCPVTGQPDFAILVIDYVPDQWLVESKSLKLYLHSFRDHGAFHEDCTVGIGRRLTALLEPRYLRIGGYWYPRGGIPIDVFWQTGTPPASVWLPDQGVPPYRARG

SEQ ID NO: 47341 - protein, 150 aa, Methylobacterium brachiatum
  REGION 1..150: note = tr|A0A3G2V4K2|A0A3G2V4K2_9RHIZ NADPH-dependent 7-cyano-7-deazaguanine reductase OS=Methylobacterium brachiatum OX=269660 GN=queF PE=3 SV=1
MTASETLQLGQATSLPASPGDARLDRVPNPHADTDYVARFTAPEFTSICPVTGQPDFAILVIDYVPGAWLVESKSLKLYLGAFRNHGAFHEDCTVAIGKRLRDLLEPRYLRIGGYWYPRGGIPIDVFWQTGEPPKTIWLPETGVAPYRGR

SEQ ID NO: 47342 - protein, 150 aa, Methylobacterium brachiatum
  REGION 1..150: note = tr|A0A1I3PUR9|A0A1I3PUR9_9RHIZ NADPH-dependent 7-cyano-7-deazaguanine reductase OS=Methylobacterium brachiatum OX=269660 GN=queF PE=3 SV=1
MTASETLQLGQATSLPASPDEARLDRVPNPHADTDYVARFTAPEFTSICPVTGQPDFAILVIDYVPGDWLVESKSLKLYLGAFRNHGAFHEDCTVAIGKRLRDLLEPRYLRIGGYWYPRGGIPIDVFWQTGEPPKTIWLPETGVAPYRGR

SEQ ID NO: 47343 - protein, 164 aa, unidentified
  source 1..164: note = Methylobacterium currus
  REGION 1..164: note = tr|A0A2R4WGD3|A0A2R4WGD3_9RHIZ NADPH-dependent 7-cyano-7-deazaguanine reductase OS=Methylobacterium currus OX=2051553 GN=queF PE=3 SV=1
MTQDITNQDIADHDIAGHARQLGQPTAQPRSPDEAQLDRVPNPHPDTDYCARFTAPEFTSLCPVTGQPDFAILVIDYVPDRWLVESKSLKLYLHSFRDHGAFHEDCTVGIGRRLTALLEPRYLRIGGYWYPRGGIPIDVFWQTGTPPASVWLPDQGVPPYRARG

SEQ ID NO: 47344 - protein, 149 aa, unidentified
  source 1..149: note = Methylobacterium dankookense
  REGION 1..149: note = tr|A0A564G0P2|A0A564G0P2_9RHIZ NADPH-dependent 7-cyano-7-deazaguanine reductase OS=Methylobacterium dankookense OX=560405 GN=queF PE=3 SV=1
MTNDALQLGQAIPLPASPEEARLDRVPNPHADTDYCARFTAPEFTSLCPVTGQPDFAILVIDYVPDRWLVESKSLKLYLGSFRNHGAFHEDCTVAIGKALAGLLEPRYLRIGGFWYPRGGIPIDVFWQTGEPPKTVWLPDPGVPPYRAR

SEQ ID NO: 47345 - protein, 154 aa, unidentified
  source 1..154: note = Methylobacterium frigidaeris
  REGION 1..154: note = tr|A0A2G8MDL0|A0A2G8MDL0_9RHIZ NADPH-dependent 7-cyano-7-deazaguanine reductase OS=Methylobacterium frigidaeris OX=2038277 GN=queF PE=3 SV=1
MTQDITEHARQLGQPTAQPRSPDEAQLDRVPNPHPDTDYCARFTAPEFTSLCPVTGQPDFAILVIDYVPDRWLVESKSLKLYLHSFRDHGAFHEDCTVGIGRRLTTLLEPRYLRIGGYWYPRGGIPIDVFWQTGTPPASVWLPDQGVPPYRARG

SEQ ID NO: 47346 - protein, 154 aa, unidentified
  source 1..154: note = Methylobacterium gnaphalii
  REGION 1..154: note = tr|A0A512JMX6|A0A512JMX6_9RHIZ NADPH-dependent 7-cyano-7-deazaguanine reductase OS=Methylobacterium gnaphalii OX=1010610 GN=queF PE=3 SV=1
MTDDIAAHARQLGHSTPLPASPEAAQLDRVPNPHPDTDYLARFTAPEFTSLCPVTGQPDFATLVIDYVPGEWLVESKSLKLYLGSFRNHGAFHEDCTVGIGRRLAELLAPRWLRIGGYWYPRGGIPIDVFWQTGAPLASVWLPDQGVPAYRGRG

SEQ ID NO: 47347 - protein, 154 aa, Methylobacterium gossipiicola
  REGION 1..154: note = tr|A0A1I2WY21|A0A1I2WY21_9RHIZ NADPH-dependent 7-cyano-7-deazaguanine reductase OS=Methylobacterium gossipiicola OX=582675 GN=queF PE=3 SV=1
MTQPPLNPETLQLGQATPLPASPEEARLDRVPNPHPGTDYLARFTVPEFTSLCPVTGQPDFAILVIDYVPDQWLVESKSLKLYLTAFRNHGAFHEDCTVGIGLTLNQLLAPRFLRIGGYWYPRGGIPIDVFWQTGEPLKSVWLPEQGVPPYRAR

SEQ ID NO: 47348 - protein, 154 aa, unidentified
  source 1..154: note = Methylobacterium haplocladii
  REGION 1..154: note = tr|A0A512ITN6|A0A512ITN6_9RHIZ NADPH-dependent 7-cyano-7-deazaguanine reductase OS=Methylobacterium haplocladii OX=1176176 GN=queF PE=3 SV=1
MSDDPSAAGLQLGQATPLPASPEAAQLDRVPNPHADTDYLARFTAPEFTSLCPVTGQPDFATLVIDYVPGAWLVESKSLKLYLGAFRNHGAFHEDCTVGIGRRLTALLEPRWLRIGGYWYPRGGIPIDVFWQTGEPLKGIWLPEQGVAPYRGRG

SEQ ID NO: 47349 - protein, 154 aa, unidentified
  source 1..154: note = Methylobacterium indicum
  REGION 1..154: note = tr|A0A0J6R9R5|A0A0J6R9R5_9RHIZ NADPH-dependent 7-cyano-7-deazaguanine reductase OS=Methylobacterium indicum OX=1775910 GN=queF PE=3 SV=1
MTHDITDHARQLGQPTAQPRSPEEAQLDRVPNPHPDTDYCARFTAPEFTSLCPVTGQPDFAILVIDYVPDQWLVESKSLKLYLHSFRDHGAFHEDCTVGIGRRLTALLEPRYLRIGGYWYPRGGIPIDVFWQTGTPPASVWLPDQGVPPYRARG

SEQ ID NO: 47350 - protein, 156 aa, Methylobacterium mesophilicum
  REGION 1..156: note = tr|M7Y2K2|M7Y2K2_9RHIZ NADPH-dependent 7-cyano-7-deazaguanine reductase OS=Methylobacterium mesophilicum SR1.6/6 OX=908290 GN=queF PE=3 SV=1
MTSTNDTTSTDDLQLGQPTPFPTSPEEARLDRVPNPHADTDYVARFTAPEFTSICPVTGQPDFAILVIDYVPGDWLVESKSLKLYLGSFRNHGAFHEDCTVAIGKRLRDLLAPRYLRIGGFWYPRGGIPIDVFWQTGELPKNAWLPEPGVPPYRGR

SEQ ID NO: 47351 - protein, 150 aa, Methylobacterium nodulans
  REGION 1..150: note = tr|B8IDB3|B8IDB3_METNO NADPH-dependent 7-cyano-7-deazaguanine reductase OS=Methylobacterium nodulans (strain LMG 21967 / CNCM I-2342 / ORS 2060); OX = 460265 GN=queF PE =3 SV=1
MTNETLQLGRPSALPRSPEEAQLDRVPNPHPDTDYLARFTAPEFTSLCPVTGQPDFAILVIDYVPDRWLIESKSLKLYLHSFRDHGAFHEDCTVAIGKRLAGLLQPRYLRIGGYWYPRGGIPIDVFWQTGEPPKSLWLPDQGVPPYRARG

SEQ ID NO: 47352 - protein, 162 aa, Methylobacterium organophilum
  REGION 1..162: note = tr|A0A2U1E447|A0A2U1E447_METOR NADPH-dependent 7-cyano-7-deazaguanine reductase OS=Methylobacterium organophilum OX=410 GN=queF PE=3 SV=1
MRAGPAGSIWPAMTSTDDLQLGQPTPFPASPQEARLDRVPNPHADTDYVARFTAPEFTSICPVTGQPDFAILVIDYVPGDWLVESKSLKLYLGSFRNHGAFHEDCTVAIGKRLRDLLEPRYLRIGGFWYPRGGIPIDVFWQTGELPKNAWLPDPGVPPYRGR

SEQ ID NO: 47353 - protein, 153 aa, Methylobacterium oryzae
  REGION 1..153: note = tr|A0A089NR06|A0A089NR06_9RHIZ NADPH-dependent 7-cyano-7-deazaguanine reductase OS=Methylobacterium oryzae CBMB20 OX=693986 GN=queF PE=3 SV=1
MPAMTSANDLQLGQPTPFPTSPEEARLDRVPNPHADTDYVARFTAPEFTSICPVTGQPDFAILVIDYVPGDWLVESKSLKLYLGSFRNHGAFHEDCTVAIGKRLRDLLEPRYLRIGGFWYPRGGIPIDVFWQTGELPKNAWLPDPGVPPYRGR

SEQ ID NO: 47354 - protein, 157 aa, unidentified
  source 1..157: note = Methylobacterium oxalidis
  REGION 1..157: note = tr|A0A512J5D2|A0A512J5D2_9RHIZ NADPH-dependent 7-cyano-7-deazaguanine reductase OS=Methylobacterium oxalidis OX=944322 GN=queF PE=3 SV=1
MTNETHTPETHADLQLGQATPQPASPETARLDRVPNPHADTDYLARFTAPEFTSLCPVTGQPDFAILVIDYVPDRWLVESKSLKLYLTSFRNHGAFHEDCTVAIGKRLTTLLEPRYLRIGGFWYPRGGIPIDVFWQTGEPPKSVWLPDPGVPPYRAR

SEQ ID NO: 47355 - protein, 150 aa, unidentified
  source 1..150: note = Methylobacterium phyllostachyos
  REGION 1..150: note = tr|A0A1H0JDK5|A0A1H0JDK5_9RHIZ NADPH-dependent 7-cyano-7-deazaguanine reductase OS=Methylobacterium phyllostachyos OX=582672 GN=queF PE=3 SV=1
MTMPNDLQLGQPAPLPTSPEDARLDRVPNPHADTDYVARFTAPEFTSICPVTGQPDFAILVIDYVPGDWLVESKSLKLYLGSFRNHGAFHEDCTVAIGKRLRDLLEPRYLRIGGFWYPRGGIPIDVFWQTGELPKNAWLPDPGVAPYRGR

SEQ ID NO: 47356 - protein, 163 aa, Methylobacterium platani
  REGION 1..163: note = tr|A0A179S930|A0A179S930_9RHIZ NADPH-dependent 7-cyano-7-deazaguanine reductase OS=Methylobacterium platani OX=427683 GN=queF PE=3 SV=1
MTQDIRQDIRQDDIAHHARQLGQPVAAPRSPEEAQLDRVPNPHPDTDYCARFTVPEFTSLCPVTGQPDFAILVIDYVPDQWLVESKSLKLYLHSFRDHGAFHEDCTVGIGRRLTALLEPRYLRIGGYWYPRGGIPIDVFWQTGTPPASVWLPDQGVPPYRARG

SEQ ID NO: 47357 - protein, 150 aa, unidentified
  source 1..150: note = Methylobacterium pseudosasicola
  REGION 1..150: note = tr|A0A1I4KEU5|A0A1I4KEU5_9RHIZ NADPH-dependent 7-cyano-7-deazaguanine reductase OS=Methylobacterium pseudosasicola OX=582667 GN=queF PE=3 SV=1
MTASETLQLGQATPLPASPTEARLDRVPNPHADTDYVARFTAPEFTSICPVTGQPDFAILVIDYVPGDWLVESKSLKLYLGAFRNHGAFHEDCTVAIGKRLRDLLEPRYLRIGGYWYPRGGIPIDVFWQTGEPPKTIWLPETGVAPYRGR

SEQ ID NO: 47358 - protein, 162 aa, Methylobacterium radiotolerans
  REGION 1..162: note = tr|A0A3S3BWM9|A0A3S3BWM9_9RHIZ NADPH-dependent 7-cyano-7-deazaguanine reductase OS=Methylobacterium radiotolerans OX=31998 GN=queF PE=3 SV=1
MRAGPAGSIWPAMTSTDDLQLGQPTPFPASPEEARLDRVPNPHADTDYVARFTAPEFTSICPVTGQPDFAILVIDYVPGDWLVESKSLKLYLGSFRNHGAFHEDCTVAIGKRLRDLLEPRYLRIGGFWYPRGGIPIDVFWQTGELPKNAWLPDPGVPPYRGR

SEQ ID NO: 47359 - protein, 162 aa, Methylobacterium radiotolerans
  REGION 1..162: note = tr|B1LZU5|B1LZU5_METRJ NADPH-dependent 7-cyano-7-deazaguanine reductase OS=Methylobacterium radiotolerans (strain ATCC 27329 / DSM 1819 / JCM 2831 / NBRC 15690 / NCI MB 10815 / 0-1) OX=426355 GN=queF PE=3; SV = 1
MRAGPAGSIWPAMTSTDDLQLGQPTPFPTSPEEARLDRVPNPHADTDYVARFTAPEFTSICPVTGQPDFAILVIDYVPGDWLVESKSLKLYLGSFRNHGAFHEDCTVAIGKRLRDLLEPRYLRIGGFWYPRGGIPIDVFWQTGELPKNAWLPDPGVPPYRGR

SEQ ID NO: 47360 - protein, 150 aa, Methylobacterium sp.
  REGION 1..150: note = tr|A0A3S2VUD9|A0A3S2VUD9_9RHIZ NADPH-dependent 7-cyano-7-deazaguanine reductase OS=Methylobacterium sp. TER-1 OX=2499852 GN=queF PE=3 SV=1
MTEETLQLGRATALPRSPDEAQLDRVPNPHPDTDYLARFTAPEFTSLCPVTGQPDFAILVIDYVPDRWLVESKSLKLYLHAFRDHGAFHEDCTVGIGRRLTALLEPRYLRIGGYWYPRGGIPIDVFWQTGTPPQSVWLPDQGVPPYRARG

SEQ ID NO: 47361 - protein, 154 aa, Methylobacterium sp.
  REGION 1..154: note = tr|A0A4Z0NPQ0|A0A4Z0NPQ0_9RHIZ NADPH-dependent 7-cyano-7-deazaguanine reductase OS=Methylobacterium sp. 6HR-1 OX=1141884 GN=queF PE=3 SV=1
MTQDLTQHARQLGQPSAQPRSPDEAQLDRVPNPHPDTDYCARFTAPEFTSLCPVTGQPDFAILVIDYVPDRWLVESKSLKLYLHSFRDHGAFHEDCTVGIGRRLTALLEPRYLRIGGYWYPRGGIPIDVFWQTGTPPASVWLPDQGVPPYRARG

SEQ ID NO: 47362 - protein, 159 aa, unidentified
  source 1..159: note = Methylobacterium tarhaniae
  REGION 1..159: note = tr|A0A0J6VRW2|A0A0J6VRW2_9RHIZ NADPH-dependent 7-cyano-7-deazaguanine reductase OS=Methylobacterium tarhaniae OX=1187852 GN=queF PE=3 SV=1
MTQDIPQQDISQHARQLGQLSAQPRSPDEAQLDRVPNPHPDTDYCARFTAPEFTSLCPVTGQPDFAILVIDYVPDQWLVESKSLKLYLHSFRDHGAFHEDCTVGIGRRLTALLEPRYLRIGGYWYPRGGIPIDVFWQTGTPPASVWLPDQGVPPYRARG

SEQ ID NO: 47363 - protein, 159 aa, Methylobacterium variabile
  REGION 1..159: note = tr|A0A0J6S5U0|A0A0J6S5U0_9RHIZ NADPH-dependent 7-cyano-7-deazaguanine reductase OS=Methylobacterium variabile OX=298794 GN=queF PE=3 SV=1
MTQDLTQHATTPGSLQLGRASAQPRSPDEAQLDRVPNPHPDTDYCARFTAPEFTSLCPVTGQPDFAILVIDYVPDQWLVESKSLKLYLHSFRDHGAFHEDCTVGIGRRLTALLEPRYLRIGGYWYPRGGIPIDVFWQTGTPPASVWLPDQGVPPYRARG

SEQ ID NO: 47364 - protein, 140 aa, unidentified
  source 1..140: note = Methylocaldum marinum
  REGION 1..140: note = tr|A0A250KSB9|A0A250KSB9_9GAMM NADPH-dependent 7-cyano-7-deazaguanine reductase OS=Methylocaldum marinum; OX = 1432792 GN=queF PE=3 SV=1
MPIREVPYTVSMSSAPSKDLEIFDNPQPGRNYTIRIEIPEFTCLCPKTGQPDFATILIEYVPNRACVELKSLKLYIWSFREEGAFHEAVTNRMLDDLVSACAPNFMRVTARFNVRGGIYTTVVAEHRDSAWKAPDLVNLP

SEQ ID NO: 47365 - protein, 196 aa, Methylocaldum sp.
  REGION 1..196: note = tr|A0A4R7A9T1|A0A4R7A9T1_9GAMM NADPH-dependent 7-cyano-7-deazaguanine reductase OS=Methylocaldum sp. 0917; OX = 2485163 GN=queF PE=3 SV=1
MSFAVRDDSRKMMVGAMAGKSVSLVCNGTGRYYSGLSHGVIPYLFMSCLCSATTAHRAFLKILYRSPMPSIPSKDLETFDNPQPGRNYTIRIEIPEFTCLCPKTGQPDFATILIEYVPNRSCVELKSLKLYIWSFREEGAFHEAVTNRILDDLVRACAPNFMRVTARFNVRGGIYTTVVAEHRDPAWEAPRLVNLP

SEQ ID NO: 47366 - protein, 152 aa, unidentified
  source 1..152: note = Methylocapsa palsarum
  REGION 1..152: note = tr|A0A1I3Y9I8|A0A1I3Y9I8_9RHIZ NADPH-dependent 7-cyano-7-deazaguanine reductase OS=Methylocapsa palsarum; OX = 1612308 GN=queF PE=3 SV=1
MVRTHTGATLLGAQAAAHSPDEATLERVPNPHAGETYIARFTAPEFTSLCPVTGQPDFAHLVIDYAPREWLVESKSLKLYLGSFRNHGAFHEDCTLRIGKDLVAALDPVWFRIGGYWYPRGGIPIDVFWSAGALPAGTWLPDQGVPPYRGRG

SEQ ID NO: 47367 - protein, 176 aa, unidentified
  source 1..176: note = Methyloceanibacter caenitepidi
  REGION 1..176: note = tr|A0A0A8K450|A0A0A8K450_9RHIZ NADPH-dependent 7-cyano-7-deazaguanine reductase OS=Methyloceanibacter caenitepidi OX=1384459 GN=queF PE=3 SV=1
MAKRPSKKVAKSPANKMAEAVKKASGKAEGLLQLGKAAPLPASPDDAILERVPNPHPDTPYVARFTAPEFTCLCPVTGQPDFAHFVLDYAPGAWLVESKSFKLYLGSFRNTAAFHEDSTLRIGKAIADLLEPSWLRIGGYWFPRGGIPIDVFWQYGTPPEGIWIPDQGVAPYRGRG

SEQ ID NO: 47368 - protein, 153 aa, unidentified
  source 1..153: note = Methyloceanibacter marginalis
  REGION 1..153: note = tr|A0A1E3W3E0|A0A1E3W3E0_9RHIZ NADPH-dependent 7-cyano-7-deazaguanine reductase OS=Methyloceanibacter marginalis OX=1774971 GN=queF PE=3 SV=1
MTRKITGLRQLGHEVPVPASPVDAQLERVPNPHADTAYVARFTAPEFTCLCPVTGQPDFAHFVVDYAPREWLLESKSFKLFLSSFRNAAAFHEDATLTIGKRIVQIIEPSWLRIGGYWFPRGGIPIDVFWQHGTPPEGVWIPDQGVAPYRGRG

SEQ ID NO: 47369 - protein, 148 aa, unidentified
  source 1..148: note = Methyloceanibacter methanicus
  REGION 1..148: note = tr|A0A1E3W5A3|A0A1E3W5A3_9RHIZ NADPH-dependent 7-cyano-7-deazaguanine reductase OS=Methyloceanibacter methanicus OX=1774968 GN=queF PE=3 SV=1
MGLKQLGKAAPLPPSPDEAVLERVSNLHADTDYVARFTAPEFTCLCPVTGQPDFAHFVVDYAPGKWLLESKSFKLFLGSFRNTASFHEDTTLRIGKSIATLIEPRWLRIGGYWFPRGGIPIDVFWQHGTPPDGIWIPDQGVAPYRGRG

SEQ ID NO: 47370 - protein, 168 aa, unidentified
  source 1..168: note = Methyloceanibacter sp.
  REGION 1..168: note = tr|A0A353IQZ6|A0A353IQZ6_9RHIZ NADPH-dependent 7-cyano-7-deazaguanine reductase OS=Methyloceanibacter sp.; OX = 1965321 GN=queF PE=3 SV=1
MARKNAAKKPEAKKVKDQKPAGLKQLGKAVPLPASPDDAVLERVPNAHPDTDYVARFTAPEFTCLCPVTGQPDFAHFVMDYAPGKWLLESKSFKLFLGSFRNTASFHEDTTLRIGKTIAQLIEPAWLRIGGYWFPRGGIPIDVFWQHGTPPEGIWIPDQGEVPYRGRG

SEQ ID NO: 47371 - protein, 160 aa, unidentified
  source 1..160: note = Methyloceanibacter stevinii
  REGION 1..160: note = tr|A0A1E3VMH3|A0A1E3VMH3_9RHIZ NADPH-dependent 7-cyano-7-deazaguanine reductase OS=Methyloceanibacter stevinii OX=1774970 GN=queF PE=3 SV=1
MAEAAKKASVKNQGLRQLGKTAPLPASPDDAILERVPNPHPDTAYVARFTAPEFTCLCPVTGQPDFAHFVLDYTPGAWLVESKSFKLYLGSFRNTAAFHEDTTLTIGKAIADLLEPSWLRIGGYWFPRGGIPIDVFWQCGSPPEGIWIPDQGVAPYRGRG

SEQ ID NO: 47372 - protein, 153 aa, unidentified
  source 1..153: note = Methyloceanibacter superfactus
  REGION 1..153: note = tr|A0A1E3VQY2|A0A1E3VQY2_9RHIZ NADPH-dependent 7-cyano-7-deazaguanine reductase OS=Methyloceanibacter superfactus OX=1774969 GN=queF PE=3 SV=1
MTRKITGLKQLGHESPVPNSPDEAELERVPNPHAGTAYVARFTAPEFTCLCPVTGQPDFAHLVVDYAPGKWLLESKSFKLFLASFRNASAFHEDATITIGKRIVDLVEPAWLRIGGYWYPRGGIPIDVFWQYGTPPEGVWIPDQGVAPYRGRG

SEQ ID NO: 47373 - protein, 153 aa, Methylocella silvestris
  REGION 1..153: note = tr|A0A2J7TDH5|A0A2J7TDH5_METSI NADPH-dependent 7-cyano-7-deazaguanine reductase OS=Methylocella silvestris OX=199596 GN=queF PE=3 SV=1
MVKIHDGASQLGASIALPRSPEEATLERVANPHEDALYLARFTAPEFTSLCPVTGQPDFALLVIDYAPDKWIVESKSLKLYLGSFRNEGAFHEDCTVRIGKDLVAVLTPRWLRIGGYWYPRGGMPIDVFWSTGAPPPGLWLPDQGVPPYRGRG

SEQ ID NO: 47374 - protein, 153 aa, Methylocella silvestris
  REGION 1..153: note = sp|B8EJT0|QUEF_METSB NADPH-dependent 7-cyano-7-deazaguanine reductase OS=Methylocella silvestris (strain DSM 15510 / CIP 108128 / LMG 27833 / NCIMB 13906 / BL2) OX=3 95965 GN=queF PE=3 SV=1
MVKIHDGASQLGANVAAPRSPEEATLERVANPHEEALYLARFTAPEFTSLCPVTGQPDFALLVIDYAPDKWIVESKSLKLYLGSFRNRGAFHEDCTVRIGKDLVAVLAPRWLRIGGYWYPRGGMPIDVFWSTGAPPPGLWLPDQGVPPYRGRG

SEQ ID NO: 47375 - protein, 153 aa, Methylocella tundrae
  REGION 1..153: note = tr|A0A4U8YYR5|A0A4U8YYR5_METTU NADPH-dependent 7-cyano-7-deazaguanine reductase OS=Methylocella tundrae; OX = 227605 GN=queF PE=3 SV=1
MVKTHTGTSQLGASVAAPASPEEATLERVPNPHRSEHYLARFTAPEFTSLCPVTGQPDFALLVIDYVPDEWLVESKSLKLYLGSFRNHGAFHEDCTLRIGKDLVAILSPRWFRIGGYWYPRGGIPIDVFWSTGEPPAGLWLPDQGVPPYRGRG

SEQ ID NO: 47376 - protein, 129 aa, unidentified
  source 1..129: note = Methylococcaceae bacterium
  REGION 1..129: note = tr|A0A257N6T0|A0A257N6T0_9GAMM NADPH-dependent 7-cyano-7-deazaguanine reductase OS=Methylococcaceae bacterium NSM2-1 OX=1917482 GN=queF PE=3 SV=1
MTTRPTKDLETFDNPQPGRDYTIRIDIPEFTCLCPKTGQPDFATIQIEYVPAALCVELKALKLHMWAFRDQGAFHEAVTNEILNDIVRAIAPNFMRIRAEFNVRGGIYTTVVVEHRNNDWQAPELVNLP

SEQ ID NO: 47377 - protein, 122 aa, unidentified
  source 1..122: note = Methylococcaceae bacterium
  REGION 1..122: note = tr|A0A4Q5L562|A0A4Q5L562_9GAMM NADPH-dependent 7-cyano-7-deazaguanine reductase OS=Methylococcaceae bacterium FWC3 OX=2516328 GN=queF PE=3 SV=1
MIETFENPRTDRDYTIRIEIPEFTCLCPKTGQPDFATIVLEYVPDGLCIELKALKLYIWSFRDQGAFHEAVTNRILTELCGCCRPRFMRITARFNVRGGIYTTVVAEHRAGGWTPSPPVQLP

SEQ ID NO: 47378 - protein, 129 aa, unidentified
  source 1..129: note = Methylococcales bacterium
  REGION 1..129: note = tr|A0A3A2J4R9|A0A3A2J4R9_9GAMM NADPH-dependent 7-cyano-7-deazaguanine reductase OS=Methylococcales bacterium OX=2304002 GN=queF PE=3 SV=1
MTTRPTKDLETFVNPQPDRDYTIRIDIPEFTCLCPKTGQPDFATIQIEYVPGALCVELKALKLYMWAFREQGAFHEAVTNEILNDIVAAIAPNFMRIRAEFNVRGGIYTTVVVEHKDKQWQAPELVNLP

SEQ ID NO: 47379 - protein, 129 aa, unidentified
  source 1..129: note = Methylococcales bacterium
  REGION 1..129: note = tr|A0A418RL07|A0A418RL07_9GAMM NADPH-dependent 7-cyano-7-deazaguanine reductase OS=Methylococcales bacterium OX=2304002 GN=queF PE=3 SV=1
MTTKPTKDLETFVNPQPDRDYTIRIDIPEFTCLCPKTGQPDFATIQIEYVPGALCVELKGLKLYMWAFRDQGAFHEAVTNEILNDIVAAIAPNFMRIRAEFNVRGGIYTTVVVEHKDKHWQAPELVTLP

SEQ ID NO: 47380 - protein, 129 aa, Methylococcus capsulatus
  REGION 1..129: note = sp|Q604U5|QUEF_METCA NADPH-dependent 7-cyano-7-deazaguanine reductase OS=Methylococcus capsulatus (strain ATCC 33009 / NCIMB 11132 / Bath); OX = 243233 GN=queF PE=3 SV= 1
MPSQPSKTLETFDNPRPDHDYTIRIEIPEFTCLCPKTGQPDFATILLEYVPDRQCIELKSLKMYIWSFRDEGAFHEAVTNTILDDLVTVSRPRFMRVTARFNVRGGIYTTVVAERRAPDWEPTTPVALP

SEQ ID NO: 47381 - protein, 120 aa, Methylococcus sp.
  REGION 1..120: note = tr|A0A432RK25|A0A432RK25_9GAMM NADPH-dependent 7-cyano-7-deazaguanine reductase OS=Methylococcus sp.; OX = 39769 GN=queF PE=3 SV=1
MSIGPSLNLETFENPKPGRDYTICIQVPEFTCLCPVTGQPDFATVSIEYRPDILCVELKSIKLYMWSFRDQGAFHEAVTNQILDDLVAACSPKYMKISADFNVRGGIYTTVIAEHGKRKD

SEQ ID NO: 47382 - protein, 129 aa, Methylococcus sp.
  REGION 1..129: note = tr|A0A3N9V1U1|A0A3N9V1U1_9GAMM NADPH-dependent 7-cyano-7-deazaguanine reductase OS=Methylococcus sp.; OX = 39769 GN=queF PE=3 SV=1
MTTQPSKTLETFDNPRPDRDYTIRIDMPEFTCLCPKTGQPDFATLHLEYVPDAKCVELKSLKLYVWSYRDEGAFHEAITNRILDDLVAATQPRFMRLTARFNVRGGVYTNVVAEHRKPGWQAPAVVQLP

SEQ ID NO: 47383 - protein, 129 aa, unidentified
  source 1..129: note = Methylocucumis oryzae
  REGION 1..129: note = tr|A0A0F3IMF7|A0A0F3IMF7_9GAMM NADPH-dependent 7-cyano-7-deazaguanine reductase OS=Methylocucumis oryzae; OX = 1632867 GN=queF PE=3 SV=1
MTQLASHYLETFPNPALGRDYTIRIDIPEFTCLCPKTGQPDFAVIKLEYVPDQVCVELKSLKLYIWGFRDQGAFHEAVTNQILADLVAVTMPKFMRIRAEFNVRGGIYTTVIVEHQQPDWQPPVYIQLA

SEQ ID NO: 47384 - protein, 153 aa, unidentified
  source 1..153: note = Methylocystaceae bacterium
  REGION 1..153: note = tr|A0A395D374|A0A395D374_9RHIZ NADPH-dependent 7-cyano-7-deazaguanine reductase OS=Methylocystaceae bacterium OX=2052174 GN=queF PE=3 SV=1
MTKTHKGAALLGQKTALPASPDEAELDLVANPHPGETYLVRFVAPEFTSLCPVTGQPDFAHIVIDYAPAEWLVESKSLKLYLGSYRNHGAFHEDCTLRIAKDLVAALAPKWLRIGGYWYPRGGIPIDVFWHTGDPPKGLWLPDQGVPPYRGRG

SEQ ID NO: 47385 - protein, 153 aa, unidentified
  source 1..153: note = Methylocystaceae bacterium
  REGION 1..153: note = tr|A0A4V0X374|A0A4V0X374_9RHIZ NADPH-dependent 7-cyano-7-deazaguanine reductase OS=Methylocystaceae bacterium OX=2052174 GN=queF PE=3 SV=1
MTKKHDGPELLGRIVALPNSPDEAELDLVTNPYKDTVYLVRFTAPEFTSLCPVTGQPDFAHLVIDYCPADCLIESKSLKLFLGSFRNHGAFHEDCTLRIAHELIAAMKPRWLRIGGYWYPRGGMPIDVFWQTATPPAGLWLPDQGVPPYRGRG

SEQ ID NO: 47386 - protein, 153 aa, unidentified
  source 1..153: note = Methylocystis bryophila
  REGION 1..153: note = tr|A0A1W6MRU5|A0A1W6MRU5_9RHIZ NADPH-dependent 7-cyano-7-deazaguanine reductase OS=Methylocystis bryophila OX=655015 GN=queF PE=3 SV=1
MTKTHKGAALLGERAPLPASPDEAELDLVPNPHKGETYLVRFTAPEFTSLCPVTGQPDFAHLVIDYVPAETLVESKSLKLYLASFRNHGAFHEDCTVRIALDLKAALSPLWLRIGGYWYPRGGIPIDVFWQSGEPPKGLWLPDQGVAPYRGRG

SEQ ID NO: 47387 - protein, 153 aa, Methylocystis heyeri
  REGION 1..153: note = tr|A0A4V3XH09|A0A4V3XH09_9RHIZ NADPH-dependent 7-cyano-7-deazaguanine reductase OS=Methylocystis heyeri; OX = 391905 GN=queF PE=3 SV=1
MTKTHQGPALLGEKAPLPASPDEAELDLVPNPHPGETYLVRFTAPEFTSLCPVTGQPDFAHIVIDYAPGEWLVESKSLKLYLGSFRNHGAFHEDCTLRIALDLKNAMSPRWLRIGGYWYPRGGIPIDVFWQSSEPPQGLWLPDQGVPPYRGRG

SEQ ID NO: 47388 - protein, 153 aa, Methylocystis hirsuta
  REGION 1..153: note = tr|A0A3M9XLP1|A0A3M9XLP1_9RHIZ NADPH-dependent 7-cyano-7-deazaguanine reductase OS=Methylocystis hirsuta; OX = 369798 GN=queF PE=3 SV=1
MTKTHKGAALLGRMAALPASPDEAELDLVPNPHKDATYLVRFTAPEFTSLCPVTGQPDFAHIVIDYVPAEWLVESKALKLYLGSFRNHGAFHEDCTLRIACDLVAAMTPKWLRIGGYWYPRGGMPIDVFWQTGAPPDGLWLPDQGVPPYRGRG

SEQ ID NO: 47389 - protein, 153 aa, Methylocystis rosea
  REGION 1..153: note = tr|A0A3G8M1C9|A0A3G8M1C9_9RHIZ NADPH-dependent 7-cyano-7-deazaguanine reductase OS=Methylocystis rosea; OX = 173366 GN=queF PE=3 SV=1
MTKTHKGAALLGRMAALPASPDEAELDLVPNPHKDATYLVRFTAPEFTSLCPVTGQPDFAHIVIDYVPAEWLVESKALKLYLGSFRNHGAFHEDCTLRIARDLVAAMTPKWLRIGGYWYPRGGMPIDVFWQTGAPPEGLWLPDQGVPPYRGRG

SEQ ID NO: 47390 - protein, 126 aa, Methylocystis sp.
  REGION 1..126: note = tr|A0A2S5MGH1|A0A2S5MGH1_9RHIZ NADPH-dependent 7-cyano-7-deazaguanine reductase (Fragment); OS = Methylocystis sp. OX=1911079 GN=CTY36_09310 PE=3 SV=1
MTKTHKGAALLGRMAALPASPDEAELDLVPNPHKDATYLVRFTAPEFTSLCPVTGQPDFAHIVVDYVPAEWLVESKALKLYLGSFRNHGAFHEDCTLRIARDLVAAMTPKWLRIGGYWYPRGGMPI

SEQ ID NO: 47391 - protein, 153 aa, Methylocystis sp.; identical to SEQ ID NO: 47389
  REGION 1..153: note = tr|A0A2U1SBD0|A0A2U1SBD0_9RHIZ NADPH-dependent 7-cyano-7-deazaguanine reductase OS=Methylocystis sp. MitZ-2018 OX=2127046 GN=queF PE=3 SV=1

SEQ ID NO: 47392 - protein, 129 aa, unidentified
  source 1..129: note = Methyloglobulus morosus
  REGION 1..129: note = tr|V5DYH6|V5DYH6_9GAMM NADPH-dependent 7-cyano-7-deazaguanine reductase OS=Methyloglobulus morosus KoM1 OX=1116472 GN=queF PE=3 SV=1
MTTKPSKDLETFPNPQPGRDYTIRITIPEFTCLCPKTGQPDFATISLEYVPASLCVELKALKLYMWSFRDEGAFHEAVTNEMLNHIVSAIHPNFMRIRAEFNVRGGIYTTVIAEHKNPVWEAPDLINLP

SEQ ID NO: 47393 - protein, 159 aa, unidentified
  source 1..159: note = Methyloligella halotolerans
  REGION 1..159: note = tr|A0A1E2S1T0|A0A1E2S1T0_9RHIZ NADPH-dependent 7-cyano-7-deazaguanine reductase OS=Methyloligella halotolerans OX=1177755 GN=queF PE=3 SV=1
MAGEADTPKHTEELTQLGHETAIPRSPDEARLERVPNPHPGTEYLARFTCPEFTCLCPVTGQPDFAHLVIDYVPGDWLLESKSLKLYLFSFRDHGGFHEETTVSVGKRIVEEIAPPFLRIGGYWYPRGGIPIDVFWQHGEAPQGLWLPDQGVAPYRGRG

SEQ ID NO: 47394 - protein, 129 aa, unidentified
  source 1..129: note = Methylomagnum ishizawai
  REGION 1..129: note = tr|A0A1Y6CSP2|A0A1Y6CSP2_9GAMM NADPH-dependent 7-cyano-7-deazaguanine reductase OS=Methylomagnum ishizawai OX=1760988 GN=queF PE=3 SV=1
MSTLPSKALETFDNPQPGRDYTIRIDVPEFTCLCPKTGQPDFATLLLEYVPDRLCVELKSLKLYAWSFRDEGAFHEAVTNRILDDLVAATRPRFMRLTAKFNVRGGIYTTVVAEHRDPEWVAPAVVALP

SEQ ID NO: 47395 - protein, 129 aa, Methylomicrobium album
  REGION 1..129: note = tr|H8GNU0|H8GNU0_METAL NADPH-dependent 7-cyano-7-deazaguanine reductase OS=Methylomicrobium album BG8 OX=686340 GN=queF PE=3 SV=1
MSTQPSKDLETFVNPEPGRDYTIRIDIPEFTCLCPKTGQPDFATIRLEYVPAAACVELKALKLYIWSFRDQGAFHEAVTNQILNDIVAAIRPNFLRVRAEFNVRGGIYTTVVAEHRNPDWQAPQPVHLS

SEQ ID NO: 47396 - protein, 129 aa, Methylomicrobium alcaliphilum
  REGION 1..129: note = tr|G4SZH7|G4SZH7_META2 NADPH-dependent 7-cyano-7-deazaguanine reductase OS=Methylomicrobium alcaliphilum (strain DSM 19304 / NCIMB 14124 / VKM B-2133 / 20Z) OX=10914 94 GN=queF PE=3 SV=1
MTTQPSTQLETFDNPRPGRDFTIRIDIPEFTCLCPKTGQPDFATLTIEYVPSQLCVELKSLKLYMWSFRDRGAFHEAVTNEILDHIAAAIHPNFMRIRANFNVRGGIYTNVIAEHKNPDWQAPEPVHLP

SEQ ID NO: 47397 - protein, 129 aa, Methylomicrobium buryatense
  REGION 1..129: note = tr|A0A4P9UNI4|A0A4P9UNI4_9GAMM NADPH-dependent 7-cyano-7-deazaguanine reductase OS=Methylomicrobium buryatense OX=95641 GN=queF PE=3 SV=1
MTTQPSTQLETFDNPRPGRDFTIRIDIPEFTCLCPKTGQPDFATLTIEYVPSQLCVELKSLKLYMWSFRDRGAFHEAVTNEILDHIAAAIHPNFMRIRANFNVRGGIYTNVIAEHKSPDWQAPEPVHLP

SEQ ID NO: 47398 - protein, 129 aa, Methylomicrobium kenyense
  REGION 1..129: note = tr|A0A543VET8|A0A543VET8_9GAMM NADPH-dependent 7-cyano-7-deazaguanine reductase OS=Methylomicrobium kenyense OX=269709 GN=queF PE=3 SV=1
MTTQPSTELETFDNPRPGRDFTIRIDIPEFTCLCPKTGQPDFATLTIEYVPNQLCVELKSLKLYMWSFRERGAFHEAVTNEILDHIAATIHPNFMRIRANFNVRGGIYTNVIVEHKNPDWQAPEPVHLP

SEQ ID NO: 47399 - protein, 129 aa, unidentified
  source 1..129: note = Methylomonas denitrificans
  REGION 1..129: note = tr|A0A126T0W2|A0A126T0W2_9GAMM NADPH-dependent 7-cyano-7-deazaguanine reductase OS=Methylomonas denitrificans OX=1538553 GN=queF PE=3 SV=1
MTTKPSADLTTFENPRPARDFTIRIDIPEFTCLCPMTGQPDFAKLVLEYVPNKLCVELKSLKLYMWTFRERGAFHEAVTNEILDHIVAAISPNFMRLRAEFNVRGGIYTTVIAEHRDPSWHAPELVNLP

SEQ ID NO: 47400 - protein, 129 aa, unidentified
  source 1..129: note = Methylomonas koyamae
  REGION 1..129: note = tr|A0A291IHK4|A0A291IHK4_9GAMM NADPH-dependent 7-cyano-7-deazaguanine reductase OS=Methylomonas koyamae; OX = 702114 GN=queF PE=3 SV=1
MTTQPSSDLTTFENPRPARDFTIRIDIPEFTCLCPMTGQPDFAKLTIEYVPDRLCVELKSLKLYMWTFRERGAFHEAVTNEILDHIVATISPNFMRLRAEFNVRGGIYTTVVAEHRNPNWQAPAPVTLP

SEQ ID NO: 47401 - protein, 129 aa, unidentified
  source 1..129: note = Methylomonas koyamae
  REGION 1..129: note = tr|A0A177P054|A0A177P054_9GAMM NADPH-dependent 7-cyano-7-deazaguanine reductase OS=Methylomonas koyamae; OX = 702114 GN=queF PE=3 SV=1
MSTQPSSDLTTFENPRPARDFTIRIDIPEFTCLCPMTGQPDFAKLTLEYVPDRLCVELKSLKLYMWTFRERGAFHEAVTNEILDHIAAATQPNFMRLRADFNVRGGIYTTVVVEHRNPAWQAPTPVQLP

SEQ ID NO: 47402 - protein, 129 aa, unidentified
  source 1..129: note = Methylomonas lenta
  REGION 1..129: note = tr|A0A177N5W6|A0A177N5W6_9GAMM NADPH-dependent 7-cyano-7-deazaguanine reductase OS=Methylomonas lenta; OX = 980561 GN=queF PE=3 SV=1
MTTKPNSDLITFENPKPERDFTIRIDIPEFTCLCPMTGQPDFAKLIIEYVPAKLCVELKGLKLYMWTFRERGAFHEAVTNEILDHIVAAIAPNFMRLRAEFNVRGGIYTTVIAEHRNPVWQVPELVNLP

SEQ ID NO: 47403 - protein, 129 aa, Methylomonas methanica
  REGION 1..129: note = tr|F9ZYL7|F9ZYL7_METMM NADPH-dependent 7-cyano-7-deazaguanine reductase OS=Methylomonas methanica (strain MC09) OX=857087 GN=queF PE=3 SV=1
MTTKPSSDLTTFENPRPERDFTIRIDIPEFTCLCPMTGQPDFAKLVLEYVPDKLCVELKSLKLYMWTFRERGAFHEAVTNEILDHIVSAISPNFMRLRAEFNVRGGIYTTVIAEHRNPDWQAPAIVNLP

SEQ ID NO: 47404 - protein, 129 aa, Methylomonas methanica; identical to SEQ ID NO: 47399
  REGION 1..129: note = tr|A0A4R3XXS5|A0A4R3XXS5_METMH NADPH-dependent 7-cyano-7-deazaguanine reductase OS=Methylomonas methanica; OX = 421 GN=queF PE=3 SV=1

SEQ ID NO: 47405 - protein, 129 aa, Methylomonas sp.
  REGION 1..129: note = tr|A0A2P5MUU8|A0A2P5MUU8_METSP NADPH-dependent 7-cyano-7-deazaguanine reductase OS=Methylomonas sp.; OX = 418 GN=queF PE=3 SV=1
MTTQPSSDLATFPNPRPKRDFTIRIDIPEFTCLCPLTGQPDFAKLILEYVPNELCVELKSLKLYMWTFRERGAFHEAITHEILDHIVAATSPNFMRLRAEFNVRGGIYTNVIAEHRNPDWQAPELVNLP

SEQ ID NO: 47406 - protein, 129 aa, Methylomonas sp.
  REGION 1..129: note = tr|A0A172U6I4|A0A172U6I4_9GAMM NADPH-dependent 7-cyano-7-deazaguanine reductase OS=Methylomonas sp. DH-1; OX = 1727196 GN=queF PE=3 SV=1
MTTQPSSDLTTFENPRPARDFTIRIDIPEFTCLCPMTGQPDFAKLTIEYVPDRLCVELKSLKLYMWTFRERGAFHEAVTNEILDHIVAAISPNFMRLRAEFNVRGGIYTTVVAEHRNPNWQAPAPVTLP

SEQ ID NO: 47407 - protein, 129 aa, Methylophaga aminisulfidivorans
  REGION 1..129: note = tr|F5SXH2|F5SXH2_9GAMM NADPH-dependent 7-cyano-7-deazaguanine reductase OS=Methylophaga aminisulfidivorans MP OX=1026882 GN=queF PE=3 SV=1
MSTQPSKQLETFDNATPDRDYTIHIETSEFTCLCPKTGQPDFATIKLDYVPDEKCVELKAFKLYMWSYRDQGAFHEKVTNTILDDLVAVCQPRFMRITGIFNVRGGVYTTVVAEYRKEGWVAPEPVTLP

SEQ ID NO: 47408 - protein, 129 aa, unidentified
  source 1..129: note = Methylophaga frappieri
  REGION 1..129: note = tr|I1YE85|I1YE85_METFJ NADPH-dependent 7-cyano-7-deazaguanine reductase OS=Methylophaga frappieri (strain ATCC BAA-2434 / DSM 25690 / JAM7) OX=754477; GN = queF PE=3 SV =1
MSTQPSKQLETFDNATPERDYTIHIETPEFTCLCPKTGQPDFATIKIDYVPDLKCVELKSLKLYFWSFRDEGGFHEKLTNQILSDLVAALNPRFMRVTGIFNVRGGVYTNVVAEHRQKDWLPPQPVVLP

SEQ ID NO: 47409 - protein, 129 aa, unidentified
  source 1..129: note = Methylophaga lonarensis
  REGION 1..129: note = tr|M7NU82|M7NU82_9GAMM NADPH-dependent 7-cyano-7-deazaguanine reductase OS=Methylophaga lonarensis MPL OX=1286106 GN=queF PE=3 SV=1
MSTQPSKQLETFDNAAPERDYTIHIETPEFTCLCPKTGQPDFATIKIDYVPDLKCVELKSLKLYFWSFREEGGFHEKLTNQILTDLVTAIDPRFMRVTGVFNVRGGVYTTVVAEHRQAGWVAPEAVHLP

SEQ ID NO: 47410 - protein, 129 aa, Methylophaga muralis
  REGION 1..129: note = tr|A0A1E3GRX5|A0A1E3GRX5_9GAMM NADPH-dependent 7-cyano-7-deazaguanine reductase OS=Methylophaga muralis; OX = 291169 GN=queF PE=3 SV=1
MSTLPSKQLETFDNAVPERDYTIHIETPEFTCLCPKTGQPDFATIKIDYVPDLKCVELKSLKLYFWSYREEGGFHEKLTNQILTDLVAATAPRFMRVTGIFNVRGGVYTNVVAEYRKEGWVAPTPVHLP

SEQ ID NO: 47411 - protein, 50 aa, unidentified
  source 1..50: note = Methylophaga nitratireducenticrescens
  REGION 1..50: note = tr|A0A525NJS0|A0A525NJS0_METNJ NADPH-dependent 7-cyano-7-deazaguanine reductase QueF (Fragment); OS = Methylophaga nitratireducenticrescens OX=754476; GN = E8F57_01895 PE= 4 SV=1
NQILTDLVAATEPRFMRVTGIFNVRGGVYTNVVAEYRKEGWVAPTPVHLP

SEQ ID NO: 47412 - protein, 129 aa, unidentified
  source 1..129: note = Methylophaga nitratireducenticrescens
  REGION 1..129: note = tr|I1XK01|I1XK01_METNJ NADPH-dependent 7-cyano-7-deazaguanine reductase OS=Methylophaga nitratireducenticrescens OX=754476 GN=queF PE=3 SV=1
MSTLPSKQLETFDNAVPERDYTIHIETPEFTCLCPKTGQPDFATIKIDYVPDLKCVELKSLKLYFWSYREEGGFHEKLTNQILTDLVAATEPRFMRVTGIFNVRGGVYTNVVAEYRKEGWVAPTPVHLP

SEQ ID NO: 47413 - protein, 129 aa, Methylophaga sp.
  REGION 1..129: note = tr|A0A2E2D3N3|A0A2E2D3N3_9GAMM NADPH-dependent 7-cyano-7-deazaguanine reductase OS=Methylophaga sp.; OX = 2024840 GN=queF PE=3 SV=1
MSTQPSKQLETFDNATPERDYTIHIETSEFTCLCPKTGQPDFATIKLDYVPDEKCVELKAFKLYMWSYRDQGAFHEKVTNTILDDLVAACQPRFMRITGIFNVRGGVYTTVVAEYRKEGWVAPEPVTLP

SEQ ID NO: 47414 - protein, 129 aa, Methylophaga sp.
  REGION 1..129: note = tr|A0A2D9KSA5|A0A2D9KSA5_9GAMM NADPH-dependent 7-cyano-7-deazaguanine reductase OS=Methylophaga sp.; OX = 2024840 GN=queF PE=3 SV=1
MSTLPSKQLETFDNAVPERDYTIHIETPEFTCLCPKTGQPDFATIKIDYVPDLKCVELKSLKLYFWSYREEGGFHEKLTNQILTDLVAATEPRFMRVTGIFNVRGGVYTNVVAEYRKEGWVAPTPVQLP

SEQ ID NO: 47415 - protein, 129 aa, Methylophaga sulfidovorans; identical to SEQ ID NO: 47413
  REGION 1..129: note = tr|A0A1I3Z968|A0A1I3Z968_9GAMM NADPH-dependent 7-cyano-7-deazaguanine reductase OS=Methylophaga sulfidovorans OX=45496 GN=queF PE=3 SV=1

SEQ ID NO: 47416 - protein, 129 aa, Methylophaga thiooxydans
  REGION 1..129: note = tr|A0A0A0BFW4|A0A0A0BFW4_9GAMM NADPH-dependent 7-cyano-7-deazaguanine reductase OS=Methylophaga thiooxydans OX=392484 GN=queF PE=3 SV=1
MSTLPSKQLETFDNATPERDYSIHIETPEFTCLCPKTGQPDFATIKLDYVPDEKCVELKSFKLYIWSYRDEGAFHEKVTNTILNDLVKATDPRFMRVTGVFNVRGGVYTTVVAEHRKEGWVPPSPVTLP

SEQ ID NO: 47417 - protein, 129 aa, Methylophaga thiooxydans
  REGION 1..129: note = tr|C0N200|C0N200_9GAMM NADPH-dependent 7-cyano-7-deazaguanine reductase OS=Methylophaga thiooxydans DMS010 OX=637616 GN=queF PE=3 SV=1
MSTLPSKQLETFDNATPERDYSIHIETPEFTCLCPKTGQPDFATIKLDYVPDEKCVELKSFKLYIWSYRDEGAFHEKVTNTILNDLVEATDPRFMRVTGVFNVRGGVYTTVVAEHRKEGWVPPTPVTLP

SEQ ID NO: 47418 - protein, 172 aa, unidentified
  source 1..172: note = Methylophilaceae bacterium
  REGION 1..172: note = tr|Y0KGN6|Y0KGN6_9PROT NADPH-dependent 7-cyano-7-deazaguanine reductase OS=Methylophilaceae bacterium 11 OX=1101195 GN=queF PE=3 SV=1
MIDEYGLIFKRYNNVFLTQKLLFIMHNESLGAKPTAQPSKQLETFPNPNSGRDFHIHMEIPEFTCLCPKTGQPDFAIIYLDYIPDQLCVELKSLKLYMWSFRDEGCFHEAVTNSMLDDLVAATQPKFMRVTAKFYVRGGIFTNVVTEHRKEGWQPQPLVDLLQFSAQSNIRG

SEQ ID NO: 47419 - protein, 148 aa, unidentified
  source 1..148: note = Methylophilaceae bacterium
  REGION 1..148: note = tr|A0A4P5TXI0|A0A4P5TXI0_9PROT NADPH-dependent 7-cyano-7-deazaguanine reductase OS=Methylophilaceae bacterium OX=2030816 GN=queF PE=3 SV=1
MKALSLGKKPSAKPTKKLETFTNPCPSRDFHIHMQIPEFTCLCPKTGQPDFATLYLDYIPNKKCVELKSLKLYIWSFRDEGCFHEAVTNRILDDLVKATEPRFMRLRAEFFVRGGVFTNVVAEHKKKGWKPEPTIDLTQFSKQSNTRS

SEQ ID NO: 47420 - protein, 147 aa, unidentified
  source 1..147: note = Methylophilales bacterium
  REGION 1..147: note = tr|A0A0H4IZM4|A0A0H4IZM4_9PROT NADPH-dependent 7-cyano-7-deazaguanine reductase OS=Methylophilales bacterium MBRS-H7 OX=1623450 GN=queF PE=3 SV=1
MKLTKLGSKPTAQPTKELETFSNPNPKGDFHIHMEIPEFTCLCPKTGQPDFATLYLDYIPDKHCVELKSLKLYMWSFRDEGCFHEAVTNQILSDLVKATKPRYMKLTAKFYVRGGIFTNVVVEHRKKGWKPQPKVDLDQFPSQNSVV

SEQ ID NO: 47421 - protein, 148 aa, unidentified
  source 1..148: note = Methylophilales bacterium
  REGION 1..148: note = tr|A0P6P0|A0P6P0_9PROT NADPH-dependent 7-cyano-7-deazaguanine reductase OS=Methylophilales bacterium HTCC2181 OX=383631 GN=queF PE=3 SV=1
MSDQSLGGKPTAQPTKHLEVFDNPNKNRDFHIHMQIPEFTCLCPKTGQPDFATLYLDYIPDERCVELKSLKLYIWSFRDEGCFHEAVTNSILDDLVAATNPRYMKLTAKFFVRGGVFTNVVAEHRKNGWKPQEKIDLNQFPSESNTRG

SEQ ID NO: 47422 - protein, 148 aa, unidentified
  source 1..148: note = Methylophilus medardicus
  REGION 1..148: note = tr|A0A5B8CSK7|A0A5B8CSK7_9PROT NADPH-dependent 7-cyano-7-deazaguanine reductase OS=Methylophilus medardicus OX=2588534 GN=queF PE=3 SV=1
MNEHLLGGKPTAQPEKTLETFENPNTNRDFHIHMEIPEFTCLCPKTGQPDFAVIYLDYIPNKLCVELKSLKLYMWSFRDEGCFHEAVTNQILDTLVGATDPKFMRVTAKFYVRGGIFTNVVAEHRANGWQPQPYVELSQFSAQSNIRG

SEQ ID NO: 47423 - protein, 148 aa, Methylophilus methylotrophus
  REGION 1..148: note = tr|A0A5C7WJ25|A0A5C7WJ25_METME NADPH-dependent 7-cyano-7-deazaguanine reductase OS=Methylophilus methylotrophus OX=17 GN=queF PE=3 SV=1
MNEHLLGGKPTAQPSKTLETFDNPNPGRDFHIHMEIPEFTCLCPKTGQPDFAVIYLDYIPNKLCVELKSLKLYMWSFRDEGCFHEAVTNQILDDLVASIDPKFMRVTAKFYVRGGIFTNVVVEHRAAGWQPQPYVELSQFSAQSNIRG

SEQ ID NO: 47424 - protein, 148 aa, Methylophilus rhizosphaerae
  REGION 1..148: note = tr|A0A1G9AUD1|A0A1G9AUD1_9PROT NADPH-dependent 7-cyano-7-deazaguanine reductase OS=Methylophilus rhizosphaerae OX=492660 GN=queF PE=3 SV=1
MNEHLLGGKPTAEPTKALETFDNPNPGRDFHIHMEIPEFTCLCPKTGQPDFAVIYLDYIPNKLCVELKSLKLYMWSFRDEGCFHEAVTNQILDDLVVAIDPKFMRVTAKFYVRGGIFTNVVAEHRAAGWQPQPYVELSQFSAQSNIRG

SEQ ID NO: 47425 - protein, 148 aa, Methylophilus sp.
  REGION 1..148: note = tr|A0A5C7XD88|A0A5C7XD88_9PROT NADPH-dependent 7-cyano-7-deazaguanine reductase OS=Methylophilus sp.; OX = 29541 GN=queF PE=3 SV=1
MNEHLLGGKPTAQPVKTLETFDNPNPHRDFHIHMEIPEFTCLCPKTGQPDFAIIYLDYIPNKLCVELKSLKLYMWSFRDEGCFHEAVTNQILDDLVSAIDPKFMRVTAKFYVRGGIFTNVVAEHRAAGWQPQPYVELSQFSAQSNIRG

SEQ ID NO: 47426 - protein, 148 aa, Methylophilus sp.
  REGION 1..148: note = tr|A0A0Q6BQC2|A0A0Q6BQC2_9PROT NADPH-dependent 7-cyano-7-deazaguanine reductase OS=Methylophilus sp. Leaf416 OX=1736373 GN=queF PE=3 SV=1
MNEQLLGGKPTAEPTKALETFENPNSSRDFHIHMEIPEFTCLCPKTGQPDFAVIYLDYIPNKLCVELKSLKLYMWSFRDEGCFHEAVTNQILDDLVAAIDPKFMRVTAKFYVRGGIFTNVVAEHRAAGWQPQPYVELSQFSAQSNIRG

SEQ ID NO: 47427 - protein, 148 aa, Methylopila sp.
  REGION 1..148: note = tr|A0A2H6BGZ1|A0A2H6BGZ1_9RHIZ NADPH-dependent 7-cyano-7-deazaguanine reductase OS=Methylopila sp. Yamaguchi OX=1437817 GN=queF PE=3 SV=1
MTEPLLGRMVGLPSSPEEAELDRVPNPHPDVTYLARFTAPEFTSLCPVTGQPDFAHIVIDYAPDEWLVESKSLKLYLGAFRNHGAFHEDCTVAIAKRLIATLKPRWLRIGGYWYPRGGIPIDVFFQAGELPPGVWVPEQGVAPYRGRG

SEQ ID NO: 47428 - protein, 129 aa, unidentified
  source 1..129: note = Methyloprofundus sedimenti
  REGION 1..129: note = tr|A0A1V8MB45|A0A1V8MB45_9GAMM NADPH-dependent 7-cyano-7-deazaguanine reductase OS=Methyloprofundus sedimenti OX=1420851 GN=queF PE=3 SV=1
MATKPSKDLQAFDNPKPGRDFTIRIDTPEFTCLCPLTGQPDFAKITIEYVPDQLCIELKALKLYFWTFRDRGAFHEAVTNEILDDIVKVVQPNFMRVRADFNVRGGVYTSVIAEHRNPDWQAPELVQLP

SEQ ID NO: 47429 - protein, 153 aa, unidentified
  source 1..153: note = Methylorubrum extorquens
  REGION 1..153: note = tr|H1KE76|H1KE76_METEX NADPH-dependent 7-cyano-7-deazaguanine reductase OS=Methylorubrum extorquens DSM 13060 OX=882800 GN=queF PE=3 SV=1
MDSIETHAKQLGQQTPLPASPEAAQLDRVPNPHADTDYLARFTAPEFTSLCPVTGQPDFATLVIDYVPDRWLVESKSLKLYLGAFRNHGAFHEDCTVGIGRRLVALLEPRWLRIGGYWYPRGGIPIDVFWQTGEPLKSVWLPDQGVASYRGRG

SEQ ID NO: 47430 - protein, 153 aa, unidentified
  source 1..153: note = Methylorubrum extorquens
  REGION 1..153: note = sp|B7KRB3|QUEF_METC4 NADPH-dependent 7-cyano-7-deazaguanine reductase OS=Methylorubrum extorquens (strain CM4 / NCIMB 13688) OX=440085 GN=queF; PE = 3 SV=1
MDSIETHAKQLGQQTPLPASPEAAQLDRVPNPHADTDYLARFTAPEFTSLCPVTGQPDFATLVIDYVPDRWLVESKSLKLYLGAFRNHGAFHEDCTVGIGRRLVALLEPRWLRIGGYWYPRGGIPIDVFWQTGEPLKSVWLPDQGVAPYRGRG

SEQ ID NO: 47431 - protein, 153 aa, unidentified
  source 1..153: note = Methylorubrum populi
  REGION 1..153: note = tr|A0A177IXT1|A0A177IXT1_9RHIZ NADPH-dependent 7-cyano-7-deazaguanine reductase OS=Methylorubrum populi; OX = 223967 GN=queF PE=3 SV=1
MDSIETHAKQLGRQTPLPASPEEAQLDRVPNPHADTDYLARFTVPEFTSLCPVTGQPDFATLVIDYVPDRWLVESKSLKLYLAAFRNHGAFHEDCTVGIGRRLADLLEPRWLRIGGYWYPRGGIPIDVFWQTGEPLKSVWLPDQGVAPYRGRG

SEQ ID NO: 47432 - protein, 153 aa, unidentified; identical to SEQ ID NO: 47431
  source 1..153: note = Methylorubrum populi
  REGION 1..153: note = sp|B1ZEJ7|QUEF_METPB NADPH-dependent 7-cyano-7-deazaguanine reductase OS=Methylorubrum populi (strain ATCC BAA-705 / NCIMB 13946 / BJ001) OX=441620; GN = queF PE=3 SV=1

SEQ ID NO: 47433 - protein, 153 aa, unidentified
  source 1..153: note = Methylorubrum salsuginis
  REGION 1..153: note = tr|A0A1I4GQQ4|A0A1I4GQQ4_9RHIZ NADPH-dependent 7-cyano-7-deazaguanine reductase OS=Methylorubrum salsuginis OX=414703 GN=queF PE=3 SV=1
MTNIEDHAKQLGKQTPLPDSPDAAQLDRVPNPHADTDYLARFTAPEFTSLCPVTGQPDFATLVIDYVPDRWLVESKSLKLYLGAFRNHGAFHEDCTVGIGRRLVSLLEPRWLRIGGYWYPRGGIPIDVFWQSGPPLPNVWLPDQGVAPYRGRG

SEQ ID NO: 47434 - protein, 153 aa, unidentified
  source 1..153: note = Methylorubrum sp.
  REGION 1..153: note = tr|A0A4Z0EAJ9|A0A4Z0EAJ9_9RHIZ NADPH-dependent 7-cyano-7-deazaguanine reductase OS=Methylorubrum sp. Q1; OX = 2562453 GN=queF PE=3 SV=1
MDSIETHAKQLGQQTSLPASPEAAQLDRVPNPHADTDYLARFTAPEFTSLCPVTGQPDFATLVIDYVPDRWLVESKSLKLYLGAFRNHGAFHEDCTVSIGRRLVERLEPRWLRIGGYWYPRGGIPIDVFWQTGEPLKSVWLPDQGVAPYRGRG

SEQ ID NO: 47435 - protein, 153 aa, unidentified; identical to SEQ ID NO: 47430
  source 1..153: note = Methylorubrum zatmanii
  REGION 1..153: note = tr|A0A1W6RNK8|A0A1W6RNK8_9RHIZ NADPH-dependent 7-cyano-7-deazaguanine reductase OS=Methylorubrum zatmanii; OX = 29429 GN=queF PE=3 SV=1

SEQ ID NO: 47436 - protein, 153 aa, Methylosinus sp.
  REGION 1..153: note = tr|A0A177P8V4|A0A177P8V4_9RHIZ NADPH-dependent 7-cyano-7-deazaguanine reductase OS=Methylosinus sp. R-45379 OX=980563 GN=queF PE=3 SV=1
MTKTHKGAALLGQKAPLPQSPEEAELDLVANPHPGETYLVRFAAPEFTSLCPVTGQPDFAHIVIDYAPMEWLVESKSLKLYLGSYRNHGAFHEDCTIRIAKDLVAAMTPRWLRIGGYWYPRGGIPIDVFWQTGEPPAGLWLPDQGVPPYRGRG

SEQ ID NO: 47437 - protein, 153 aa, Methylosinus sp.; identical to SEQ ID NO: 47436
  REGION 1..153: note = tr|A0A4R8HSD0|A0A4R8HSD0_9RHIZ NADPH-dependent 7-cyano-7-deazaguanine reductase OS=Methylosinus sp. sav-2; OX = 2485168 GN=queF PE=3 SV=1

SEQ ID NO: 47438 - protein, 153 aa, Methylosinus sporium
  REGION 1..153: note = tr|A0A2U1SQ99|A0A2U1SQ99_METSR NADPH-dependent 7-cyano-7-deazaguanine reductase OS=Methylosinus sporium; OX = 428 GN=queF PE=3 SV=1
MTKTHKGAALLGQKTALPNSPDEAELDLVANPHPGETYLVRFVAPEFTSLCPVTGQPDFAHIVIDYAPMEWLVESKSLKLYLGSYRNHGAFHEDCTIRIAKDLAAAMTPRWLRIGGYWYPRGGIPIDVFWQTGEPPAGLWLPDQGVPPYRGRG

SEQ ID NO: 47439 - protein, 153 aa, Methylosinus sporium
  REGION 1..153: note = tr|A0A549SHC6|A0A549SHC6_METSR NADPH-dependent 7-cyano-7-deazaguanine reductase OS=Methylosinus sporium; OX = 428 GN=queF PE=3 SV=1
MTKTHKGAALLGQKTALPNSPDEAELDLVANPHPGETYLVRFVAPEFTSLCPVTGQPDFAHIVIDYAPMEWLVESKSLKLYLGSYRNHGAFHEDCTIRIAKDLVAAMTPRWLRIGGYWYPRGGIPIDVFWQTGEPPAGLWLPDQGVPPYRGRG

SEQ ID NO: 47440 - protein, 153 aa, Methylosinus trichosporium
  REGION 1..153: note = tr|A0A2D2D2P0|A0A2D2D2P0_METTR NADPH-dependent 7-cyano-7-deazaguanine reductase OS=Methylosinus trichosporium OB3b OX=595536 GN=queF PE=3 SV=1
MTKTHKGPELLGRKAALPASPDEAELDLVANPHPSETYLVRFVAPEFTSLCPVTGQPDFAHIVIDYAPAEWLVESKSLKLYLSSYRNHGAFHEDCTLRIAKDLVAALAPRWLRIGGYWYPRGGIPIDVFWQTGAPPQGLWLPDQGVPSYRGRG

SEQ ID NO: 47441 - protein, 148 aa, Methylotenera mobilis
  REGION 1..148: note = tr|C6WVP1|C6WVP1_METML NADPH-dependent 7-cyano-7-deazaguanine reductase OS=Methylotenera mobilis (strain JLW8 / ATCC BAA-1282 / DSM 17540) OX=583345; GN = queF PE=3 SV= 1
MTDLSLGAKPTAQPSKTLETFESPTTTRDFHIHMEIPEFTCLCPKTGQPDFAVIYLDYIPDQLCVELKSLKLYMWSFRDEGCFHEAVTNRILDDLVAATQPKFMRVTAKFYVRGGVFTNVIAEHRKPGWQPQPRVELTQFESQSNIRG

SEQ ID NO: 47442 - protein, 148 aa, Methylotenera mobilis
  REGION 1..148: note = tr|A0A351RAA4|A0A351RAA4_9PROT NADPH-dependent 7-cyano-7-deazaguanine reductase OS=Methylotenera mobilis; OX = 359408 GN=queF PE=3 SV=1
MTEHSLGAKPTAQPSKTLETFENPNTKRDFHIHMEIPEFTCLCPKTGQPDFAIIYLDYIPDQLCVELKSLKLYMWSFRDEGCFHEAVTNSILDDLVEATQPKFMRVTAKFYVRGGVFTNVIAEHRKQGWQPQPRVELTQFESQSNIRG

SEQ ID NO: 47443 - protein, 148 aa, Methylotenera sp.
  REGION 1..148: note = tr|A0A2S5L7G4|A0A2S5L7G4_9PROT NADPH-dependent 7-cyano-7-deazaguanine reductase OS=Methylotenera sp.; OX = 2051956 GN=queF PE=3 SV=1
MTDLSLGAKPTAQPSKTLETFESPTNTRDFHIHMEIPEFTCLCPKTGQPDFAVIYLDYIPDQLCVELKSLKLYMWSFRDEGCFHEAVTNRILDDLVAATQPKFMRVTAKFYVRGGVFTNVTAEHRKAGWQPQPRVELTQFESQSNIRG

SEQ ID NO: 47444 - protein, 154 aa, Methylotenera sp.
  REGION 1..154: note = tr|A0A2S5NU88|A0A2S5NU88_9PROT NADPH-dependent 7-cyano-7-deazaguanine reductase OS=Methylotenera sp.; OX = 2051956 GN=queF PE=3 SV=1
MSSTNLHDSVTLLGDLSAQPSKTLETFPNPNPNRDFHIHMEIPEFTCLCPKTGQPDFAVIYLDYIPNQLCVELKSLKLYTVSFRNEGCFHEAVTNRILDDLVTSTQPKFMRVTAKFYVRGGIFTNVVAEHRQPGWQPLPRVDLLAFESQSNTRG

SEQ ID NO: 47445 - protein, 148 aa, Methylotenera versatilis
  REGION 1..148: note = tr|D7DI80|D7DI80_METV0 NADPH-dependent 7-cyano-7-deazaguanine reductase OS=Methylotenera versatilis (strain 301) OX=666681 GN=queF PE=3 SV=1
MTTQSIGGKPTAQPTKTLETFENPNQARDFHIHMEIPEFTCLCPKTGQPDFAIIYLDYIPDQTCVELKSLKLYMWSFRDEGCFHEAVTNTILDDLIAATQPKFMRVTAKFYVRGGVFTNVVAEHRKAGWQPLPRVELTQFESQSNIRG

SEQ ID NO: 47446 - protein, 118 aa, unidentified
  source 1..118: note = Methylothermaceae bacteria
  REGION 1..118: note = tr|A0A148N4Q6|A0A148N4Q6_9GAMM NADPH-dependent 7-cyano-7-deazaguanine reductase OS=Methylothermaceae bacteria B42 OX=1798802 GN=queF PE=3 SV=1
MSTKPSRELETFPNPNPDRDYTIRIETPEFTCLCPKTGQPDFAHITVEYIPDKLCVELKSYKLYIWSYRDLGAFHEAVTNQILDDLVGACQPRWMKVEAKFNVRGGIYTTVMAEYERN

SEQ ID NO: 47447 - protein, 219 aa, Methyloversatilis sp.
  REGION 1..219: note = tr|A0A257X8U4|A0A257X8U4_9PROT NADPH-dependent 7-cyano-7-deazaguanine reductase QueF (Fragment); OS = Methyloversatilis sp. 12-65-5 OX=1970398 GN=B7Z51_06265; PE = 4 SV=1
MDEERQLPSHSPLGRSTDYPDRYDAGLLFPMQRCASRQSLGLLPGQPLPFSGIDRWHAWEISWLDPHGKPQVAIGRFDIPADSVCMVESKSLKLYLNSYNNERMVSREAVRALIETDLSAACQSGVMVELYALDALPTQAGVQADALPGDSIDAPELHFDCYQPDASLLSAGGDPVEECLRSDLLKTNCPVTLQPDWATLMVRYRGPRIDREGLLRYVV

SEQ ID NO: 47448 - protein, 283 aa, Methyloversatilis sp.
  REGION 1..283: note = tr|A0A1B3LMC2|A0A1B3LMC2_9PROT NADPH-dependent 7-cyano-7-deazaguanine reductase OS=Methyloversatilis sp. RAC08 OX=1842540 GN=queF PE=3 SV=1
MMDDERQLPSHSPLGRSSDYPDRYDAGLLFPMQRTASRQSLGLVHGQPLPFSGIDRWHAWEISWLDPHGKPQVAIGRFDIPADSVCMVESKSLKLYLNSYNNERMVSREAVRALIETDLSAACQSGVMVELYALDALPTQAWTQLDALPGDSIDAPELHFDCYQPDASLLSAGGDPVEECLRSDLLKTNCPVTLQPDWATLMVRYRGPRIDREGLLRYVVSFRNHADFHEHCVERIYMDLLQRCRPERLTVNALYTRRGGLDINPWRSNFEQPDARFVKLARQ

SEQ ID NO: 47449 - protein, 274 aa, Methyloversatilis universalis
  REGION 1..274: note = tr|F5R9J9|F5R9J9_METUF NADPH-dependent 7-cyano-7-deazaguanine reductase OS=Methyloversatilis universalis (strain ATCC BAA-1314 / JCM 13912 / FAM5); OX = 1000565 GN=queFPE=3 SV=1
MEHPATGSGLGHSTDYPDSYDAGLLFPMPREASRLPLGLAADALPFAGIDRWHAWEVSWLNPQGKPEVAIGRIDIPASSPFMVESKSLKLYLNGYNSERMVSLEAVRALIETDLSAACQAGVTVELYSPDTLPGLAVQSPGESIDALDIACERYHPDPALLSAAGDTVEETLRSDLLKSNCPVTLQPDWASVIVHYVGPRIDRAGLLRYIVSFRNHADFHEHCVERIWVDLMERCRPEKLTVFACYTRRGGLDINPWRSNFETLPDTFVKLARQ

SEQ ID NO: 47450 - protein, 153 aa, Methylovirgula ligni
  REGION 1..153: note = tr|A0A3D9Z4C1|A0A3D9Z4C1_9RHIZ NADPH-dependent 7-cyano-7-deazaguanine reductase OS=Methylovirgula ligni; OX = 569860 GN=queF PE=3 SV=1
MSKKPIAAPLLGRQAALPASPDEAKLDRVPNPHPDADYIARFTAPEFTSLCPVTGQPDFAHLVIDYVPDRWLVESKSLKLYLGAFRNHGAFHEDCTIRVGKDLIALLKPRWLRIGGYFYPRGGIPIDVFWQSGKVPAGVWVPDQGVAPYRGRG

SEQ ID NO: 47451 - protein, 153 aa, Methylovirgula sp.
  REGION 1..153: note = tr|A0A371WUN4|A0A371WUN4_9RHIZ NADPH-dependent 7-cyano-7-deazaguanine reductase OS=Methylovirgula sp. 4M-Z18 OX=2293567 GN=queF PE=3 SV=1
MAKSTKQLHALGQSVAMPDHPDEAILERVPNPQAGTNYVARFTVPEFTSVCPVTNQPDFAHLVIDYVPGAWLVESKSLKLYLLGFRNHGAFHEDCTVRIGKDLVKLLRPKWFRIGGYWYPRGGIPIDVFWQTGTVPKGTWVPDQGVASYRGRG

SEQ ID NO: 47452 - protein, 139 aa, unidentified
  source 1..139: note = Methylovorus glucosetrophus
  REGION 1..139: note = tr|C6XDD6|C6XDD6_METGS NADPH-dependent 7-cyano-7-deazaguanine reductase OS=Methylovorus glucosetrophus (strain SIP3-4) OX=582744 GN=queF PE=3 SV=1
MSSQPTKALETFDNPQPGRDFHIHMEIPEFTCLCPKTGQPDFAVLYLDYIPDQKCVELKSLKLYMWSFRDEGCFHEAVTNRILDDLVAATDPKFMRLTAKFYVRGGIFTNVVAEHRKPGWQPLPRVELSQFDAQSNIRG

SEQ ID NO: 47453 - protein, 139 aa, Methylovorus sp.
  REGION 1..139: note = tr|A0A1A9T5T9|A0A1A9T5T9_9PROT NADPH-dependent 7-cyano-7-deazaguanine reductase OS=Methylovorus sp. MM2; OX = 1848038 GN=queF PE=3 SV=1
MSSQPSKALETFDNPKPERDFHIHMEIPEFTCLCPKTGQPDFAVLYLDYIPDQKCVELKSLKMYIWAFRDQGCFHEAVTNEILDDLVQATAPKFMRLTAKFYVRGGIFTNVVAEYRKEGWLPAPRVDLTQFEQQFNTRG

SEQ ID NO: 47454 - protein, 129 aa, unidentified
  source 1..129: note = Methylovulum psychrotolerans
  REGION 1..129: note = tr|A0A2S5CN95|A0A2S5CN95_9GAMM NADPH-dependent 7-cyano-7-deazaguanine reductase OS=Methylovulum psychrotolerans OX=1704499 GN=queF PE=3 SV=1
MTTQPSKDLETFDNPQPGRDYTIRIDIPEFTCLCPKTGQPDFATLQIEYVPAALCVELKALKLYMWTFRERGAFHEAVTNEILNDIVAVTQPNFMRIRAEFNVRGGIYTTVVVEHRNPAWQAPELVNLP

SEQ ID NO: 47455 - protein, 145 aa, unidentified
  source 1..145: note = Methylovulum psychrotolerans
  REGION 1..145: note = tr|A0A1Z4BVU0|A0A1Z4BVU0_9GAMM NADPH-dependent 7-cyano-7-deazaguanine reductase OS=Methylovulum psychrotolerans OX=1704499 GN=queF PE=3 SV=1
MAGKTVLPSSTQPKKLMTTQPSKDLETFDNPQPGRDYTIRIDIPEFTCLCPKTGQPDFATLQIEYVPAALCVELKALKLYMWTFRERGAFHEAVTNEILNDIVAVTQPNFMRIRAEFNVRGGIYTTVVVEHRNPAWQAPELVNLP

SEQ ID NO: 47456 - protein, 129 aa, Methylovulum sp.
  REGION 1..129: note = tr|A0A522EI21|A0A522EI21_9GAMM NADPH-dependent 7-cyano-7-deazaguanine reductase OS=Methylovulum sp.; OX = 1916980 GN=queF PE=3 SV=1
MSTQASKDLEIFDNPQPGRDYTVRIDIPEFTCLCPKTGQPDFATIQIEYVPATLCVELKSLKLYMWAFREQGAFHEAVTNEILNDMVKAVAPMFMRVRAEFNVRGGIYTTVVAEHRDPAWKAPEFVQLP

SEQ ID NO: 47457 - protein, 154 aa, Micavibrio sp.
  REGION 1..154: note = tr|A0A2D6JZD3|A0A2D6JZD3_9PROT NADPH-dependent 7-cyano-7-deazaguanine reductase OS=Micavibrio sp.; OX = 2024841 GN=queF PE=3 SV=1
MSKSIYEDLTQLGSKTPLPNSPEEAELERVPNPKKDMEYCVRFSAPEFTSLCPLTGAPDFAHIVIDYVPGEYLVESKSLKLFLGSFRNHGAFHEDCTLEIAKRIMEITEAKWLRIGGYWYPRGGIPIDVFYQSGEPPKGVWIPEAGVQNYRGRG

SEQ ID NO: 47458 - protein, 154 aa, Micavibrio sp.
  REGION 1..154: note = tr|A0A2D8M1K4|A0A2D8M1K4_9PROT NADPH-dependent 7-cyano-7-deazaguanine reductase OS=Micavibrio sp.; OX = 2024841 GN=queF PE=3 SV=1
MTKDIYKNLSQLGQKSELPDSPEEAVLERVKNPQENTNYIVRFTAPEFTSLCPITSAPDFAHLVIDYLPGDWLIESKSLKLYLGSFRNHGAFHEDCTVTIAKKLAETLEPKWLRIGGYWFPRGGIPIDVFYQTGPDPEGVWIPEQGVAPYRGRG

SEQ ID NO: 47459 - protein, 165 aa, Microbacterium sp.; identical to SEQ ID NO: 44303
  REGION 1..165: note = tr|A0A542GQM9|A0A542GQM9_9BACI NADPH-dependent 7-cyano-7-deazaguanine reductase OS=Microbacterium sp. SLBN-1 OX=1489561 GN=queF PE=3 SV=1

SEQ ID NO: 47460 - protein, 276 aa, Microbulbifer agarilyticus
  REGION 1..276: note = tr|A0A1Q2M3T2|A0A1Q2M3T2_9GAMM NADPH-dependent 7-cyano-7-deazaguanine reductase OS=Microbulbifer agarilyticus OX=260552 GN=queF PE=3 SV=1
MNREDWQNLPLGQETRYESKYNPGLLHPIPRAVSRKQLGLEGQALPFSGADEWWGFELSWLNPKGVPQVAVARFRFAASSPSMIESKSFKLYLNSLNQSEFASSGAVREVLEKDLSAAAGSDVAVTLFGVDDPALAVHAPQGECLDGLDIETRTYEPDAALLKLKQSGEVVEEILFSHLLRSNCPVTGQPDWATVSIQYRGPALDRAGLLAYIISFREHQDFHEHCVERIYCDLQRLAAFEELTVCARYTRRGGLDINPLRTSSGNIEFPLRYGRQ

SEQ ID NO: 47461 - protein, 276 aa, unidentified
  source 1..276: note = Microbulbifer aggregans
  REGION 1..276: note = tr|A0A1C9W8U1|A0A1C9W8U1_9GAMM NADPH-dependent 7-cyano-7-deazaguanine reductase OS=Microbulbifer aggregans OX=1769779 GN=queF PE=3 SV=1
MDREDWKGLPLGQETQYESRYNPGLLHPIERAISRAHLGLSGGELPFSGLDEWWGFELSWLNPRGVPQVAVGRFSFPHDSVAMIESKSFKLYLNSFNQSEFASWEEVRDTLKRDLSTASGGEVTVELLGVEDAALSVVKPEGFCLDQLDIETRRYQPDAALLRLDAGRGAVSEVLYSHLLRSNCPVTGQPDWATVCIDYRGPALDREALLAYIISFREHQDFHEHCVERIFCDLQQLSGFDELTVCARYTRRGGLDINPLRSTLAGKGLPPRFARQ

SEQ ID NO: 47462 - protein, 276 aa, Microbulbifer donghaiensis
  REGION 1..276: note = tr|A0A1M5HCH0|A0A1M5HCH0_9GAMM NADPH-dependent 7-cyano-7-deazaguanine reductase OS=Microbulbifer donghaiensis OX=494016 GN=queF PE=3 SV=1
MTREDWQNLPLGQETQYESAYNPALLHPIQRSISRAHLGLDGEALPFFGEDEWWGFELSWLNPKGKPQVAVARFAFPATSPHMVESKSFKLYLNSFNQTVFPSWDAVSDALEKDLTAASGADMSVTLFEVEDPALAVAKPEGYCLDLLDIDIKHYQPDAALLALDSDDRPVSEILYSHLLRSNCPVTGQPDWATVSVEYKGPAIERESLLAYIISFREHQDFHEHCVERMFCDLQRLAEFEELTVCARYTRRGGLDINPLRSTLQNKKLPPRFARQ

SEQ ID NO: 47463 - protein, 276 aa, Microbulbifer marinus
  REGION 1..276: note = tr|A0A1H3VP89|A0A1H3VP89_9GAMM NADPH-dependent 7-cyano-7-deazaguanine reductase OS=Microbulbifer marinus; OX = 658218 GN=queF PE=3 SV=1
MTREDWQDLPLGRETQYESAYNPALLHPIQRSISRAHLGLEGDTLPFCGEDEWWGFELSWLNPKGMPQVAVARFTFPAASPHMVESKSLKLYLNSFNQTEFASWDAVRETLIKDLSAAAGAEVAVTLFEVEDPALAIAKPEGDCLDRLDIAIDQYQPDAALLALADSGERVNETLYSHLLRSNCPVTGQPDWATVCVEYKGPAIKREALLAYIVSFRDHQDFHEHCVERIFCDLQQLAKFDELTVCARYTRRGGLDINPLRSTLQNKKLPPRFARQ

SEQ ID NO: 47464 - protein, 276 aa, Microbulbifer sp.
  REGION 1..276: note = tr|A0A2S1JQR0|A0A2S1JQR0_9GAMM NADPH-dependent 7-cyano-7-deazaguanine reductase OS=Microbulbifer sp. A4B17 OX=359370 GN=queF PE=3 SV=1
MTREDWQNLPLGQETTYESTYNPELLHPIQRSVSRAQLGLSAGALPFFGEDEWWGFELSWLNPRGKPQVAVARFSFPAESPCMVESKSFKLYLNSFNQSRFESWRLVQDALVRDLSAAAGMNVGVVLMDVEDAALAVEKPEGYCLDHLDIEVNQYEPAPALLALGDGEEDVSEILYSHLLRSNCPVTGQPDWATVVVEYKGPALKREALLAYIISFREHQDFHEHCVERIFCDLQKLAEFTELTVCARYTRRGGLDINPLRSTRIEKRLPPRFARQ

SEQ ID NO: 47465 - protein, 276 aa, Microbulbifer sp.
  REGION 1..276: note = tr|A0A510IVI9|A0A510IVI9_9GAMM NADPH-dependent 7-cyano-7-deazaguanine reductase OS=Microbulbifer sp. GL-2; OX = 2591606 GN=queF PE=3 SV=1
MNREDWQNLPLGRETTYESTYNPQLLHPIQRSISRAQLGLSAGALPFFGEDEWWGFELSWLNSKGKPQVAVARFSFPAESPCMVESKSFKLYLNSFNQSKFESWRLVQDTLARDLGAAVGTAVEVNLLDVEDAALAVERPQGYCLDDLDILVEQYQPDPSLLALDESEEDISEILYSHLLRSNCPVTGQPDWATVMVEYRGPALKREALLAYIISFREHQDFHEHCVERIFCDLQQLAEFSELTVCARYTRRGGLDINPLRSTRIEKPLPPRFARQ

SEQ ID NO: 47466 - protein, 275 aa, Microbulbifer thermotolerans
  REGION 1..275: note = tr|A0A1I1F8D0|A0A1I1F8D0_9GAMM NADPH-dependent 7-cyano-7-deazaguanine reductase OS=Microbulbifer thermotolerans OX=252514 GN=queF PE=3 SV=1
MNREDWQNLPLGKETRYESTYNPGLLYPIPRAVSRAQLGLGDELPFVGEDEWWGYELSWLNPKGVPQVAVARFSFPASSSRMVESKSFKLYLNSFNQTEFASWDAVRETLAKDLSEVSGAAVEVNLYNVEDAVLAPEPPRGICLDRLDIETRRYQPDASILKLAGGAEPVSETLYSHLLRSNCPVTGQPDWATVSVEYQGPALHRGALLAYIISFREHQDFHEHCVERIFCDLHRLAAFEALTVSARYTRRGGLDINPLRSTIAGKPLPPRFARQ

SEQ ID NO: 47467 - protein, 275 aa, Microbulbifer thermotolerans
  REGION 1..275: note = tr|A0A143HM63|A0A143HM63_9GAMM NADPH-dependent 7-cyano-7-deazaguanine reductase OS=Microbulbifer thermotolerans OX=252514 GN=queF PE=3 SV=1
MNREDWQNLPLGKETRYESTYNPGLLYPIPRAVSRVQLGLGDELPFVGEDEWWGYELSWLNPKGVPQVAVARFSFPASSSRMVESKSFKLYLNSFNQTEFASWDAVRETLAKDLSEVSGAAVEVNLYNVEDAVLAPEPPRGICLDRLDIETRRYQPDASILKLAGGAEPVSETLYSHLLRSNCPVTGQPDWATVSVEYQGPALHREALLAYIISFREHQDFHEHCVERIFCDLHRLAAFEALTVSARYTRRGGLDINPLRSTIAGKPLPPRFARQ

SEQ ID NO: 47468 - protein, 281 aa, Microbulbifer yueqingensis
  REGION 1..281: note = tr|A0A1G9AQB4|A0A1G9AQB4_9GAMM NADPH-dependent 7-cyano-7-deazaguanine reductase OS=Microbulbifer yueqingensis OX=658219 GN=queF PE=3 SV=1
MDREDWQDLPLGQETSYESRYNPDLLHPIPRHVSRAHLGLMEGELPFCGHDEWWGFELSWLNPRGVPQVAVGRFTFPATSPHMVESKSFKLYLNSLNQTEFGSLDEVRDTLASDLRAAAGAEVGVTLFDVESDELAVQAPRGFCLDRLDIETHRYEPDAALLRLDCDDGEAEGRLVEETLYSHLLRSNCPVTGQPDWGTVFIHYQGPALDREALLAYVISFREHQDFHEHCVERMFCDLMGLADFKALTVCARYTRRGGLDINPLRSRKAVAELAGRLARQ

SEQ ID NO: 47469 - protein, 165 aa, Micrococcus lylae; identical to SEQ ID NO: 47079
  REGION 1..165: note = tr|A0A378P1V8|A0A378P1V8_9MICC NADPH-dependent 7-cyano-7-deazaguanine reductase OS=Micrococcus lylae; OX = 1273 GN=queF PE=3 SV=1

SEQ ID NO: 47470 - protein, 139 aa, unidentified
  source 1..139: note = Microcoleaceae bacterium
  REGION 1..139: note = tr|A0A355CLT8|A0A355CLT8_9CYAN NADPH-dependent 7-cyano-7-deazaguanine reductase OS=Microcoleaceae bacterium UBA10368 OX=2055793 GN=queF PE=3 SV=1
MNNDQTEQSMSQMSSTEEMKYGEREILDGELITFPNPRIGRRYSINITLPEFTCKCPFSGYPDFATIHVTYVPDERVVELKALKLYINSYRDRYISHEESINQILDDFVAACSPLEATIKGDFSPRGNVHTVIEVRHEK

SEQ ID NO: 47471 - protein, 38 aa, unidentified
  source 1..38: note = Microcoleaceae bacterium
  REGION 1..38: note = tr|A0A349JMZ7|A0A349JMZ7_9CYAN NADPH-dependent 7-cyano-7-deazaguanine reductase QueF (Fragment); OS = Microcoleaceae bacterium UBA11344 OX=2055792; GN = DCS91_17690 PE=4 S V=1
MNNHPTEQSMSQKSSAEEMKYGERQILEGELITFPNPR

SEQ ID NO: 47472 - protein, 160 aa, Microcoleus sp.
  REGION 1..160: note = tr|K9WFH4|K9WFH4_9CYAN NADPH-dependent 7-cyano-7-deazaguanine reductase OS=Microcoleus sp. PCC 7113 OX=1173027 GN=queF PE=3 SV=1
MVGRQRIALTGNLISNLELAMNQSLTQEQVSSEVQTPEMKYGEREIAEGKLITFPNPRVGRRYDINITLPEFTCKCPFSGYPDFATIHITYVPDERVVELKALKLYINSYRDRYISHEESVNQILDDFVEACDPLEVTVKGDFSPRGNVHTVIEVRHQKE

SEQ ID NO: 47473 - protein, 139 aa, Microcoleus vaginatus
  REGION 1..139: note = tr|F5UJC6|F5UJC6_9CYAN NADPH-dependent 7-cyano-7-deazaguanine reductase OS=Microcoleus vaginatus FGP-2 OX=756067 GN=queF PE=3 SV=1
MNNYAPEQTMSQKSSTEEMKYGERQILEGELITFPNPRVGRRYSINITLPEFTCKCPFSGYPDFATIHVTYVPDERVVELKALKLYVNSYRDRYISHEESINQILDDFVAACAPLEATIKGDFSPRGNVHTVIEVSHQK

SEQ ID NO: 47474 - protein, 131 aa, Microcystis aeruginosa; identical to SEQ ID NO: 45296
  REGION 1..131: note = tr|A0A2H6L623|A0A2H6L623_MICAE NADPH-dependent 7-cyano-7-deazaguanine reductase OS=Microcystis aeruginosa NIES-87 OX=449440 GN=queF PE=3 SV=1

SEQ ID NO: 47475 - protein, 131 aa, Microcystis aeruginosa; identical to SEQ ID NO: 45296
  REGION 1..131: note = sp|B0JPS9|QUEF_MICAN NADPH-dependent 7-cyano-7-deazaguanine reductase OS=Microcystis aeruginosa (strain NIES-843) OX=449447 GN=queF PE=3 SV=1

SEQ ID NO: 47476 - protein, 131 aa, Microcystis flosaquae
  REGION 1..131: note = tr|A0A552KR06|A0A552KR06_9CHRO NADPH-dependent 7-cyano-7-deazaguanine reductase OS=Microcystis flos-aquae Mf_QC_C_20070823_S10D OX=2486236 GN=queF PE=3 SV=1
MVQSSEKIEVKYGEREIAEGTLITFPNPRPGRNYDIQITLPEYTCKCPFSGYPDFATIYLSYVPDQKVMELKAIKLYINSYRDRYISHEEAINQILDDLVAACEPLQMKIKGDFHPRGNVHTVVEVMYKKE

SEQ ID NO: 47477 - protein, 131 aa, Microcystis flosaquae; identical to SEQ ID NO: 47476
  REGION 1..131: note = tr|A0A552LZ37|A0A552LZ37_9CHRO NADPH-dependent 7-cyano-7-deazaguanine reductase OS=Microcystis flos-aquae Mf_WU_F_19750830_S460 OX=2486237 GN=queF PE=3 SV=1

SEQ ID NO: 47478 - protein, 131 aa, unidentified
  source 1..131: note = Microcystis novacekii
  REGION 1..131: note = tr|A0A552ILK8|A0A552ILK8_9CHRO NADPH-dependent 7-cyano-7-deazaguanine reductase OS=Microcystis novacekii Mn_MB_F_20050700_S1D OX=2486266 GN=queF PE=3 SV=1
MVQSSEKIEVKYGEREIAEGTLITFPNPRPGRNYDIQITLPEYTCKCPFSGYPDFATIYLSYVPDQKVMELKAIKLYINSYRDHYISHEEAINQILDDLVAACEPLQMKIKGDFHPRGNVHTVVEVMYKKE

SEQ ID NO: 47479 - protein, 131 aa, unidentified; identical to SEQ ID NO: 45296
  source 1..131: note = Microcystis panniformis
  REGION 1..131: note = tr|A0A0K1S889|A0A0K1S889_9CHRO NADPH-dependent 7-cyano-7-deazaguanine reductase OS=Microcystis panniformis FACHB-1757 OX=1638788 GN=queF PE=3 SV=1

SEQ ID NO: 47480 - protein, 131 aa, unidentified; identical to SEQ ID NO: 45296
  source 1..131: note = Microcystis panniformis
  REGION 1..131: note = tr|A0A552PRT9|A0A552PRT9_9CHRO NADPH-dependent 7-cyano-7-deazaguanine reductase OS=Microcystis panniformis Mp_MB_F_20051200_S9 OX=2486223 GN=queF PE=3; SV = 1

SEQ ID NO: 47481 - protein, 131 aa, Microcystis sp.; identical to SEQ ID NO: 45296
  REGION 1..131: note = tr|A0A552AM08|A0A552AM08_9CHRO NADPH-dependent 7-cyano-7-deazaguanine reductase OS=Microcystis sp. M_OC_Ca_00000000_C217Col OX=2486213 GN=queF PE=3 SV=1

SEQ ID NO: 47482 - protein, 131 aa, Microcystis sp.
  REGION 1..131: note = tr|A0A552C5X4|A0A552C5X4_9CHRO NADPH-dependent 7-cyano-7-deazaguanine reductase OS=Microcystis sp. Msp_OC_L_20101000_S702 OX=2486218 GN=queF PE=3 SV=1
MVQSSEKIEVKYGEREIAEGTLITFPNPRPGRNYDIHITLPEYTCKCPFSGYPDFATIYLSYVPDQKVMELKAIKLYINSYRDRYISHEEAINQILDDLVAACEPLQMKVKGDFHPRGNVHTVVEVMYKKE

SEQ ID NO: 47483 - protein, 131 aa, unidentified; identical to SEQ ID NO: 45296
  source 1..131: note = Microcystis viridis
  REGION 1..131: note = tr|A0A3G9JFT5|A0A3G9JFT5_MICVR NADPH-dependent 7-cyano-7-deazaguanine reductase OS=Microcystis viridis NIES-102 OX=213615 GN=queF PE=3 SV=1

SEQ ID NO: 47484 - protein, 131 aa, unidentified
  source 1..131: note = Microcystis viridis
  REGION 1..131: note = tr|A0A552HTE8|A0A552HTE8_MICVR NADPH-dependent 7-cyano-7-deazaguanine reductase OS=Microcystis viridis Mv_BB_P_19951000_S68D OX=2486270 GN=queF PE=3 SV=1
MVQSSEKIEVKYGEREIAEGTLITFPNPRPGRNYDIQITLPEYTCKCPFSGYPDFATIYLSYVPDQKVMELKAIKLYINSYRDRYISHEEAINQILDDLVAACEPLQMKVKGDFHPRGNVHTVVEVIYKKE

SEQ ID NO: 47485 - protein, 131 aa, unidentified; identical to SEQ ID NO: 47482
  source 1..131: note = Microcystis wesenbergii
  REGION 1..131: note = tr|A0A552LIH5|A0A552LIH5_9CHRO NADPH-dependent 7-cyano-7-deazaguanine reductase OS=Microcystis wesenbergii Mw_MB_S_20031200_S109D OX=2486241 GN=queF PE=3; SV = 1

SEQ ID NO: 47486 - protein, 131 aa, unidentified; identical to SEQ ID NO: 45296
  source 1..131: note = Microcystis wesenbergii
  REGION 1..131: note = tr|A0A3E0M8S1|A0A3E0M8S1_9CHRO NADPH-dependent 7-cyano-7-deazaguanine reductase OS=Microcystis wesenbergii TW10 OX=2060474 GN=queF PE=3 SV=1

SEQ ID NO: 47487 - protein, 123 aa, Micromonospora echinospora
  REGION 1..123: note = tr|Q70KE1|Q70KE1_MICEC NADPH-dependent 7-cyano-7-deazaguanine reductase OS=Micromonospora echinospora OX=1877 GN=gacA PE=3 SV=1
MALTKLGRADTPPDRSLETFPIGDSSQEITIDCREFTCRCPITGQPDWATIRIEYRPGDRGVETKSLKLYLETFRDEGIFHEHLATKMRDDLVAALEPVFLKVTVDFNVRGGIALAASSTYQR

SEQ ID NO: 47488 - protein, 123 aa, Micromonospora inyonensis
  REGION 1..123: note = tr|C9W382|C9W382_9ACTN NADPH-dependent 7-cyano-7-deazaguanine reductase OS=Micromonospora inyonensis OX=47866 GN=sis16 PE=3 SV=1
MALTKLGRADTPPDRSLETFPITDSSQEITIDCREFTCRCPITGQPDWATIRIDYRPGDRGVETKSLKLYLETFRDEGIFHEHLATKMRDDLVAALEPVFLKVTVDFNVRGGIALAASSTYQR

SEQ ID NO: 47489 - protein, 123 aa, Micromonospora olivasterospora
  REGION 1..123: note = tr|Q2MFY6|Q2MFY6_MICOL NADPH-dependent 7-cyano-7-deazaguanine reductase OS=Micromonospora olivasterospora OX=1880 GN=fosC PE=3 SV=1
MALTKLGRANTPPDRSLETFPIGDSSQEITIDCREFTCRCPITGQPDWATIRIDYRPGDRGVETKSLKLYLETFRDEGIFHEHLATKMRDDLVATLEPVFLKVTVNFNVRGGIALAASSTYER

SEQ ID NO: 47490 - protein, 123 aa, Micromonospora pallida
  REGION 1..123: note = tr|A0A1C6TCV8|A0A1C6TCV8_9ACTN NADPH-dependent 7-cyano-7-deazaguanine reductase OS=Micromonospora pallida; OX = 145854 GN=queF PE=3 SV=1
MALTKLGRADTPPDRSLETFPIGDDSQEITIDCREFTCRCPITGQPDWATIRIDYRPGDRGVETKSLKLYLETFRDEGIFHEHLATKMRDDLVAALDPVFLKVTVDFNVRGGIALAASSTYQR

SEQ ID NO: 47491 - protein, 123 aa, Micromonospora sagamiensis; identical to SEQ ID NO: 47488
  REGION 1..123: note = tr|A0A562WA78|A0A562WA78_9ACTN NADPH-dependent 7-cyano-7-deazaguanine reductase OS=Micromonospora sagamiensis OX=47875 GN=queF PE=3 SV=1

SEQ ID NO: 47492 - protein, 123 aa, Micromonospora sp.
  REGION 1..123: note = tr|A0A3N1A6F8|A0A3N1A6F8_9ACTN NADPH-dependent 7-cyano-7-deazaguanine reductase OS=Micromonospora sp. Llam0 OX=2485143 GN=queF PE=3 SV=1
MALTKLGQAQAKPDGTLDTFPITDSSQEITIDCREFTCRCPITGQPDWATIRIDYRPGDRGVETKSLKLYLETFRDEGIFHEHLATKMRDDLVAALNPIFLKVTVDFNVRGGIALAASSTYQR

SEQ ID NO: 47493 - protein, 151 aa, Microvirga aerophila
  REGION 1..151: note = tr|A0A512BY18|A0A512BY18_9RHIZ NADPH-dependent 7-cyano-7-deazaguanine reductase OS=Microvirga aerophila; OX = 670291 GN=queF PE=3 SV=1
MMTDTLLQLGQASAVPTSPEDAQLDRVPNPHTDTDYLARFTAPEFTSLCPVTGQPDFAILVIDYVPGDWLVESKSLKLYMHSFRNHGAFHEDCTVAIGKRLAALLEPRYLRIGGYWYPRGGIPIDVFWQTGEMPKDLWLPDQGVAPYRPRV

SEQ ID NO: 47494 - protein, 150 aa, Microvirga guangxiensis
  REGION 1..150: note = tr|A0A1G5J3J2|A0A1G5J3J2_9RHIZ NADPH-dependent 7-cyano-7-deazaguanine reductase OS=Microvirga guangxiensis OX=549386 GN=queF PE=3 SV=1
MITDTHLQLGQASALPQTPEEATLDRVPNPHPDTDYLARFTVPEFTSLCPVTGQPDFAIIVIDYVPGPWLVESKSLKLYMHSFRNHGAFHEDCTVAIGKRLTELLEPRYLRIGGYWYPRGGIPIDVFWQTGEVPKNLWLPDQGVAPYRAR

SEQ ID NO: 47495 - protein, 149 aa, unidentified
  source 1..149: note = Microvirga lotononidis
  REGION 1..149: note = tr|I4Z0G6|I4Z0G6_9RHIZ NADPH-dependent 7-cyano-7-deazaguanine reductase OS=Microvirga lotononidis; OX = 864069 GN=queF PE=3 SV=1
MTETTLQLGHASALPQSPEEAQLDRVPNPHSDTDYLARFTVPEFTSLCPVTGQPDFAILVIDYVPGPWLVESKSLKLYMHSFRNHGAFHEDCTVAIGKRLADLLEPRYLRIGGYWYPRGGIPIDVFWQTGELPKNLWLPDQGVAPYRAR

SEQ ID NO: 47496 - protein, 149 aa, unidentified
  source 1..149: note = Microvirga ossetica
  REGION 1..149: note = tr|A0A1B2ENT2|A0A1B2ENT2_9RHIZ NADPH-dependent 7-cyano-7-deazaguanine reductase OS=Microvirga ossetica; OX = 1882682 GN=queF PE=3 SV=1
MTETTLQLGHASALPDSPETAQLDRVPNPHPDTDYLARFTVPEFTSLCPVTGQPDFAILVIDYVPGPWLVESKSLKLYMHSFRNHGAFHEDCTVAIGKRLADLLEPRYLRIGGYWYPRGGIPIDVFWQTGELPKNLWLPDQGVAPYRAR

SEQ ID NO: 47497 - protein, 149 aa, Microvirga sp.
  REGION 1..149: note = tr|A0A2T7TZV3|A0A2T7TZV3_9RHIZ NADPH-dependent 7-cyano-7-deazaguanine reductase OS=Microvirga sp. KLBC 81; OX = 1862707 GN=queF PE=3 SV=1
MTETHLQLGQASALPQTPEEAQLDRVPNPHPDTDYLARFTVPEFTSLCPVTGQPDFAILVIDYVPGPWLVESKSLKLYMHSFRNHGAFHEDCTVAIGKRLAELLEPRYLRIGGYWYPRGGIPIDVFWQTGELPKNLWLPDQGVAPYRAR

SEQ ID NO: 47498 - protein, 149 aa, Microvirga sp.
  REGION 1..149: note = tr|A0A086MQ40|A0A086MQ40_9RHIZ NADPH-dependent 7-cyano-7-deazaguanine reductase OS=Microvirga sp. BSC39; OX = 1549810 GN=queF PE=3 SV=1
MTDNTLQLGQSSALPDSAEAAQLDRVPNPHPDTDYLARFTVPEFTSLCPVTGQPDFAIIVIDYAPGPWLVESKSLKLYMHSFRNHGAFHEDCTVAIGKRLADLLEPRYLRIGGYWYPRGGIPIDVFWQTGELPKNLWLPDQGVAPYRAR

SEQ ID NO: 47499 - protein, 149 aa, Microvirga subterranea
  REGION 1..149: note = tr|A0A370HGG9|A0A370HGG9_9RHIZ NADPH-dependent 7-cyano-7-deazaguanine reductase OS=Microvirga subterranea; OX = 186651 GN=queF PE=3 SV=1
MTDTHLQLGQASASPRSPEEAKLDRVPNPHQDTDYLARFTVPEFTSLCPVTGQPDFAILVIDYAPGPWLVESKSLKLYMHSFRDHGAFHEDCTIAIGKRLAELLEPRYLRIGGYWYPRGGIPIDVFWQTGELPKNLWLPDQGVAPYRAR

SEQ ID NO: 47500 - protein, 150 aa, unidentified
  source 1..150: note = Microvirga vignae
  REGION 1..150: note = tr|A0A0H1RI74|A0A0H1RI74_9RHIZ NADPH-dependent 7-cyano-7-deazaguanine reductase OS=Microvirga vignae; OX = 1225564 GN=queF PE=3 SV=1
MTTEPHLQLGQASALPQTPEEAQLDRVPNPHPDTDYLARFTVPEFTSLCPVTGQPDFAILVIDYVPGPWLVESKSLKLYMHSFRNHGAFHEDCTVAIGKRLAELLEPRYLRIGGYWYPRGGIPIDVFWQTGELPKNLWLPDQGVAPYRAR

SEQ ID NO: 47501 - protein, 145 aa, Microvirgula aerodenitrificans
  REGION 1..145: note = tr|A0A2S0PD85|A0A2S0PD85_9NEIS NADPH-dependent 7-cyano-7-deazaguanine reductase OS=Microvirgula aerodenitrificans OX=57480 GN=queF PE=3 SV=1
MNLHDKLNALGSQRTDYRYDQPDAALLERFPNPYAEATINPHGVTGSLNITCPEFTSLCPVTGQPDFATLVIDMIPGAWCVESKSLKLYLGSFRMHGEFHEACVCRICNDLVTLLQPKWIRVEGRFTPRGGIPLWPTAEWRQPGC

SEQ ID NO: 47502 - protein, 145 aa, Microvirgula sp.; identical to SEQ ID NO: 47501
  REGION 1..145: note = tr|A0A329BA22|A0A329BA22_9NEIS NADPH-dependent 7-cyano-7-deazaguanine reductase OS=Microvirgula sp. AG722; OX = 2183901 GN=queF PE=3 SV=1

SEQ ID NO: 47503 - protein, 272 aa, unidentified
  source 1..272: note = Midichloria mitochondrii
  REGION 1..272: note = tr|F7XTZ6|F7XTZ6_MIDMI NADPH-dependent 7-cyano-7-deazaguanine reductase OS=Midichloria mitochondrii (strain IricVA) OX=696127 GN=midi_01078 PE=3; SV = 1
MFNLTSSELGKKSQYISKYKPDLLFAIPRKLKRAELFVGQNPVQFHGVDIWNAYEVSWLDIQGKPQVRIAEIIYDANSEFMVESKSLKLYLNSFNNSNFNTPEEVHNLITNDLSTILKTKIKCVLYNVESSHYIPQKIQGILLDDLDINIKNCNDKPILEQAHDIVEELLYTHLLKSNCLVTGQPDFGSLIVRYSGQKINHISVLRYIISLRNLNEFHEQCIERIFFEIYKNCRPNFLEVSARYTRRGGIDINPIRSSSENFAQSNYRSFRQ

SEQ ID NO: 47504 - protein, 149 aa, unidentified
  source 1..149: note = Minwuia thermotolerans
  REGION 1..149: note = tr|A0A2M9FYS8|A0A2M9FYS8_9PROT NADPH-dependent 7-cyano-7-deazaguanine reductase OS=Minwuia thermotolerans; OX = 2056226 GN=queF PE=3 SV=1
MNDAVKYLGKQSAVPESPGEAVLDAVPDPHPDARYVVRFTAPEFTSLCPVTGQPDFARLVIDYVPAGRIVESKSLKLFLGSFRNHGAFHEDCTVTIAKRIVAAIGPDWLRIAGYWYPRGGIPIDVFYQTGEPPAGVWLPDPGVETYRGR

SEQ ID NO: 47505 - protein, 143 aa, Mitsuaria sp.
  REGION 1..143: note = tr|A0A1A9HTB1|A0A1A9HTB1_9BURK NADPH-dependent 7-cyano-7-deazaguanine reductase OS=Mitsuaria sp. 7; OX = 1658665 GN=queF PE=3 SV=1
MPPNPPSRPSKEIHVFPNPAPERDYVIQFQIPEFTCHCPLTGQPDFAHFTIDMIADQYCVELKSLKMYFWSYRDEGAFHEKVTNTILEDIVKVTNPRFIRITAKWYVRGGIYTNVVTEHRKKGWKPLPAVDLPAHGFETGLLR

SEQ ID NO: 47506 - protein, 175 aa, Mitsuaria sp.
  REGION 1..175: note = tr|A0A1I6JJ56|A0A1I6JJ56_9BURK NADPH-dependent 7-cyano-7-deazaguanine reductase OS=Mitsuaria sp. PDC51; OX = 1881035 GN=queF PE=3 SV=1
MAKNPSAKPAAKAGAKAAKPTAKPAVAPKMREMPPNPPSRPSKEIHVFPNPAPERDYVIQFQIPEFTCHCPLTGQPDFAHFTIDMIADQYCVELKSLKMYFWSYRDEGAFHEKVTNTILEDIVKVTNPRFIRITAKWYVRGGIYTNVVAEHRKKGWKPLPAVDLPAHGFETGLLR

SEQ ID NO: 47507 - protein, 164 aa, Mitsuokella jalaludinii
  REGION 1..164: note = tr|A0A173W567|A0A173W567_9FIRM NADPH-dependent 7-cyano-7-deazaguanine reductase OS=Mitsuokella jalaludinii OX=187979 GN=queF PE=3 SV=1
MSRDKSQEDITLLGKKNVKYHYDYCPEILETFENRHPDNDYWVKFNCPEFTALCPITGQPDYATIYISYIPGRRMVESKSLKLYLVSFRNHGDFHEDVVNVIMKDLIRLMDPKYIEVWGKFLPRGGISIDPYANYGRPDTKYERLAEHRFMEHDLVAMDKVDNR

SEQ ID NO: 47508 - protein, 169 aa, Mitsuokella multacida
  REGION 1..169: note = tr|A0A414NUH8|A0A414NUH8_9FIRM NADPH-dependent 7-cyano-7-deazaguanine reductase OS=Mitsuokella multacida; OX = 52226 GN=queF PE=3 SV=1
MEGRSLSRDKSQEDITLLGKKNVKYHYDYCPEILETFENRHPDNDYWVKFNCPEFTALCPITGQPDYATIYISYIPGRRMVESKSLKLYLVSFRNHGDFHEDVVNVIMKDLIRLMDPKYIEVWGKFLPRGGISIDPYANYGRPDTKYERLAEHRFMEHDLVAMDKVDNR

SEQ ID NO: 47509 - protein, 169 aa, Mitsuokella multacida; identical to SEQ ID NO: 47508
  REGION 1..169: note = tr|C9KNH4|C9KNH4_9FIRM NADPH-dependent 7-cyano-7-deazaguanine reductase OS=Mitsuokella multacida DSM 20544 OX=500635 GN=queF PE=3 SV=1

SEQ ID NO: 47510 - protein, 164 aa, Mitsuokella sp.
  REGION 1..164: note = tr|A0A415REN4|A0A415REN4_9FIRM NADPH-dependent 7-cyano-7-deazaguanine reductase OS=Mitsuokella sp. AF33-22 OX=2292047 GN=queF PE=3 SV=1
MSRDKSQEDITLLGKKNVKYHYDYCPEILETFENRHPDNDYWVKFNCPEFTALCPITGQPDYATIYISYVPGKKMVESKSLKLYLVSFRNHGDFHEDVVNVIMKDLIALMDPKYIEVWGKFLPRGGISIDPYANYGRPGTKYEKLAEHRFMEHDLVAMDKVDNR

SEQ ID NO: 47511 - protein, 164 aa, Mitsuokella sp.
  REGION 1..164: note = tr|U2SXH2|U2SXH2_9FIRM NADPH-dependent 7-cyano-7-deazaguanine reductase OS=Mitsuokella sp. oral taxon 131 str. W9106 OX=1321781 GN=queF PE=3 SV=1
MPRDKKNEGLRLLGKKQVQYHYDYCPEILETFENRHKGRDYWVKFNCPEFTALCPITGQPDYATIYISYVPDVRMVESKSLKLYLVSFRSHGDFHEDVVNVILKDLVRLMDPKYIEVWGKFLPRGGISIDPWANYGRQGTKYEELAAHRFMEHDLYFMDKVDNR

SEQ ID NO: 47512 - protein, 281 aa, unidentified
  source 1..281: note = Mixta gaviniae
  REGION 1..281: note = tr|A0A1X1DHM8|A0A1X1DHM8_9GAMM NADPH-dependent 7-cyano-7-deazaguanine reductase OS=Mixta gaviniae; OX = 665914 GN=queF PE=3 SV=1
MSSYENHQALAGLTLGKPTAYQDRYDPALLQAVPRSLNREPLGLYPDNLPFHGADIWTLYELSWLNAKGVPQVAVGEVALRADSINLIESKSFKLYLNSFNQTRFADWGEVRQTLERDLSACAQGDVSVALFRLQEIEAQPIGHFEGVCIDEQDISIDDYQFNADYLADAAGSDIVEETLTSHLLKSNCLITNQPDWGSVQIRYRGPRINREALLRYLVSFRHHNEFHEQCVERIFNDLLRFCRPETLSVYARYTRRGGLDINPWRSNTDFKPSRSRLVRQ

SEQ ID NO: 47513 - protein, 281 aa, unidentified
  source 1..281: note = Mixta sp.
  REGION 1..281: note = tr|A0A506V7J4|A0A506V7J4_9GAMM NADPH-dependent 7-cyano-7-deazaguanine reductase OS=Mixta sp. BIT-26; OX = 2562439 GN=queF PE=3 SV=1
MSCYEQHQALAGLTLGKPTAYQDRYQPDLLQGVPRSLNREPLGLYPDNLPFHGADIWTLYELSWLNAKGVPQVAIGEISLRADSLNLIESKSFKLYLNSFNQTRFADWGEVRQTLQRDLSACAQGEVSVALFRLQEIEGQPISQFDGICIDEQDISIDDYQFNVDYLADAAGAEIVEETLTSHLLKSNCLITHQPDWGSVQIRYRGPRINREALLRYLVSFRHHNEFHEQCVERIFNDLLRFCRPQTLTVYARYTRRGGLDINPWRSNTDFQPGHTRLVRQ

SEQ ID NO: 47514 - protein, 281 aa, unidentified
  source 1..281: note = Mixta theicola
  REGION 1..281: note = tr|A0A2K1Q7T1|A0A2K1Q7T1_9GAMM NADPH-dependent 7-cyano-7-deazaguanine reductase OS=Mixta theicola; OX = 1458355 GN=queF PE=3 SV=1
MSSYEQHQALASLTLGKPTAWQDRYEPGLLQAVPRSLNREPLGLYPVNLPFHGADIWTLYELSWLNAKGVPQVAVGEVVLQADSLNLIESKSFKLYLNSFNQTRFADWGEVRQTLERDLRACAQGEVSVALFRLQEIEGQPIGQFDGFCIDEQDISIDDYQFNADYLADAAGEEIVEETLVSHLLKSNCLITHQPDWGSVQIRYRGPRIRREALLRYLVSFRRHNEFHEQCVERIFNDLLRFCQPETLSVYARYTRRGGLDINPWRSNSDFSPSHSRLVRQ

SEQ ID NO: 47515 - protein, 275 aa, unidentified
  source 1..275: note = Mizugakiibacter sediminis
  REGION 1..275: note = tr|A0A0U1PC06|A0A0U1PC06_9GAMM NADPH-dependent 7-cyano-7-deazaguanine reductase OS=Mizugakiibacter sediminis OX=1475481 GN=queF PE=3 SV=1
MNRPTDSPLGRAVAYPETYDPSLLFPIARADKRAELGLAAPLPFAGVDVWNAYELSWLDARGKPAVALAELRVPADSPRIVESKSLKLYLNGYTQTRFDAAEAVRTRIAADLAAATGAEVAVTLLPAARFGEARLAPLAGACIDDLDLAIDDYGPPRPEYLATTPGAEVEEALVSNLLKSNCPVTGQPDWASVQIRYAGAPIDRAGLLRYLVSFRRHSDFHEQCVERIFVDLLRRCAPRRLAVYARYTRRGGLDINPFRATPGYGEAGNPRTARQ

SEQ ID NO: 47516 - protein, 89 aa, unidentified
  source 1..89: note = Mobilisporobacter senegalensis
  REGION 1..89: note = tr|A0A3N1X566|A0A3N1X566_9FIRM NADPH-dependent 7-cyano-7-deazaguanine reductase OS=Mobilisporobacter senegalensis OX=1329262 GN=queF PE=3 SV=1
MVESKSLKLFLFSFRNHGDFHEDCVNIIMKDLIKLMDPKYIEVWGKFTPRGGISIDPYCNYGRPDTKWEEVAFNRLINHDLYPEKVDNR

SEQ ID NO: 47517 - protein, 289 aa, Moellerella wisconsensis
  REGION 1..289: note = tr|A0A0N0IC03|A0A0N0IC03_9GAMM NADPH-dependent 7-cyano-7-deazaguanine reductase OS=Moellerella wisconsensis ATCC 35017 OX=1354267 GN=queF PE=3 SV=1
MSQYQDNPALSNLTLGKKTAYHDQYEANLLQAVPRSLNRQPLNIHPDNLPFHGADIWTLYELSWLNSRGVPQVAIGQVSVDATSQNLIESKSFKLYLNSFNQTHFDSWEKVRTTLQNDLTHCAQGLVSVTLHALDEFTQQPIGTFIGECIDNQDINIDDYQFNRDYLIHSISDNDINNGHQPIIEETLVSHLLKSNCLITHQPDWGSVQIHYRGTKIDREKLLRYLVSFRHHNEFHEQCVERIFNDLMEFCRPESLTVYARYTRRGGLDINPWRSNESFQPSLARLARQ

SEQ ID NO: 47518 - protein, 289 aa, Moellerella wisconsensis; identical to SEQ ID NO: 47517
  REGION 1..289: note = tr|A0A484ZWE5|A0A484ZWE5_9GAMM NADPH-dependent 7-cyano-7-deazaguanine reductase OS=Moellerella wisconsensis OX=158849 GN=queF PE=3 SV=1

SEQ ID NO: 47519 - protein, 157 aa, unidentified
  source 1..157: note = Monoglobus pectinilyticus
  REGION 1..157: note = tr|A0A2K9P4N2|A0A2K9P4N2_9FIRM NADPH-dependent 7-cyano-7-deazaguanine reductase OS=Monoglobus pectinilyticus OX=1981510 GN=queF PE=3 SV=1
MENIQREQEGLTLLGNQKTVYKADYAPEVLETFENKHRDNDYWVRFNCPEFTSLCPITGQPDFAEIIISYVPDVRMVESKSLKLYLFSFRNHGDFHEDCVNKIMKDLIELMDPKYIEVFGRFTPRGGISIHPYANYGRPGTKWEQVAFERLTHREIV

SEQ ID NO: 47520 - protein, 139 aa, unidentified
  source 1..139: note = Moorea bouillonii
  REGION 1..139: note = tr|A0A1U7MVE7|A0A1U7MVE7_9CYAN NADPH-dependent 7-cyano-7-deazaguanine reductase OS=Moorea bouillonii PNG; OX = 568701 GN=queF PE=3 SV=1
MSNSFTQEQASPEVDTPQIKYGEQEIAQAKLITFPNPRIGRPYHINITLPEFTCKCPFSGYPDFATIYITYVPNQLVVELKALKLYINTYRDRYISHEESINQILDDFVAACNPEDVTIKGDFNPRGNVHTVVEVRHQK

SEQ ID NO: 47521 - protein, 139 aa, unidentified
  source 1..139: note = Moorea producens
  REGION 1..139: note = tr|A0A1D8TKD9|A0A1D8TKD9_9CYAN NADPH-dependent 7-cyano-7-deazaguanine reductase OS=Moorea producens PAL-8-15-08-1 OX=1458985 GN=queF PE=3 SV=1
MSNSFTQEQASPEVDTPQIKYGEQEIAQAKLITFPNPRIGRPYHINITLPEFTCKCPFSGYPDFATIYITYVPNELVVELKALKLYINTYRDRYISHEESINQILDDFVAACNPEEVTIKGDYNPRGNVHTVVEVRHQK

SEQ ID NO: 47522 - protein, 139 aa, unidentified
  source 1..139: note = Moorea producens
  REGION 1..139: note = tr|A0A1D9FTA8|A0A1D9FTA8_9CYAN NADPH-dependent 7-cyano-7-deazaguanine reductase OS=Moorea producens JHB; OX = 1454205 GN=queF PE=3 SV=1
MSNSFTQEQASPEVDTPQIKYGEQEIAQAKLITFPNPRIGRPYNINITLPEFTCKCPFSGYPDFATIYITYVPNELVVELKALKLYINTYRDRYISHEESINQILDDFVAACNPEEVTIKGDFNPRGNVHTVVEVRHQK

SEQ ID NO: 47523 - protein, 126 aa, Moorella glycerini
  REGION 1..126: note = tr|A0A0C7NPG7|A0A0C7NPG7_9THEO NADPH-dependent 7-cyano-7-deazaguanine reductase OS=Moorella glycerini; OX = 55779 GN=queF PE=3 SV=1
MMEFEALGKVVREPRKKLEVFPKPANVKTVILESDEVTSLCPVTGQPDWETVVVEYAPAKYCIESKSFKLYLWSFREEGVFCEALADTIARDIYQACSPHWCKVTVIQKPRGGIKITASAFYGEGN

SEQ ID NO: 47524 - protein, 126 aa, Moorella humiferrea
  REGION 1..126: note = tr|A0A2T0ALY8|A0A2T0ALY8_9THEO NADPH-dependent 7-cyano-7-deazaguanine reductase OS=Moorella humiferrea; OX = 676965 GN=queF PE=3 SV=1
MMEFEALGKDVREPRKKLEVFPKPANVKTVILESDEVTSLCPVTGQPDWETVIVEYAPDKYCIESKSFKLYLWSFREEGVFCEALADTIARDIYRACSPHWCKVTVIQKPRGGIKITASAFYGEGN

SEQ ID NO: 47525 - protein, 126 aa, Moorella mulderi
  REGION 1..126: note = tr|A0A151AWN6|A0A151AWN6_9THEO NADPH-dependent 7-cyano-7-deazaguanine reductase OS=Moorella mulderi DSM 14980 OX=1122241 GN=queF PE=3 SV=1
MMEFEALGKDVREPRKKLEVFPKPANVKTVILESDEVTSLCPVTGQPDWETVIVEYAPAKYCIESKSFKLYLWSFREEGVFCEALADTIARDIYRACSPHWCKVTVIQKPRGGIKITASAFYGEGN

SEQ ID NO: 47526 - protein, 130 aa, Moorella thermoacetica
  REGION 1..130: note = tr|A0A1J5NJJ5|A0A1J5NJJ5_MOOTH NADPH-dependent 7-cyano-7-deazaguanine reductase OS=Moorella thermoacetica; OX = 1525 GN=queF PE=3 SV=1
MMEFEALGKVVREPRKKLEVFPKPANVKTVILESDEVTSLCPVTGQPDWETVVVEYAPAKYCIESKSFKLYLWSFREEGVFCEALADTIARDIYQACSPHWCKVTVIQKPRGGIKITASAFYGEGDKDKK

SEQ ID NO: 47527 - protein, 300 aa, Moraxella atlantae
  REGION 1..300: note = tr|A0A378Q3P9|A0A378Q3P9_9GAMM NADPH-dependent 7-cyano-7-deazaguanine reductase OS=Moraxella atlantae; OX = 34059 GN=queF PE=3 SV=1
MTDVNDDHSPQNSPLNSALGQTTVYPTTYAPEVLYAITRALGRANLTLPVKQLSIGVDWWQAFEVSWLNPQGVSQVAMARLTIPADSPYLVESKSLKLYLNSLNFTTFANHDALITTIAHDVGACVQAAVTVELFAVDTPNSLPLSAPQGICIDHALDDLSPNEKVALVSDVDAGLLRAASSTHTAKNLVQASQPQAYYSHLLRSNCPVTNQPDWGTVAIEIDSAPLVPADLLRYILSFRTHNGFHEQCVEQIFNDLTQTFAPKSLLVRAWYTRRGGIDINPCRVSDGSLLPAPSRLNRQ

SEQ ID NO: 47528 - protein, 300 aa, Moraxella atlantae
  REGION 1..300: note = tr|A0A1B8QFT0|A0A1B8QFT0_9GAMM NADPH-dependent 7-cyano-7-deazaguanine reductase OS=Moraxella atlantae; OX = 34059 GN=A9308_02610 PE=3 SV=1
MTDVNDDHSPQNSPLNSALGQTTVYPTTYAPEVLYAITRALGRANLTLPVEQLSIGVDWWQAFEVSWLNPQGVSQVAMARLTIPADSPYLVESKSLKLYLNSLNFTTFANHDALIATIAHDVGACVQAAVAVELFAVDTPNSLPLSAPQGICIDHALDDLSPNEKVALVSDVDAGLLRAASSTHTAKNLVQASQPQAYYSHLLRSNCPVTNQPDWGTVAIEIDSAPLVPADLLRYILSFRAHNGFHEQCVEQIFHDLTQTFAPKSLLVRAWYTRRGGIDINPCRVSDGSLLPAPSRLNRQ

SEQ ID NO: 47529 - protein, 285 aa, Moraxella bovis
  REGION 1..285: note = tr|A0A378PTH4|A0A378PTH4_MORBO NADPH-dependent 7-cyano-7-deazaguanine reductase OS=Moraxella bovis OX=476; GN = queF PE=3 SV=1
MSIHGVLGESTTYSKTYDPTLLYPISRQIGRDEILKDVGFDFNNYHNELKNGVDIWQAFELSWLNPIGISQVAMARFTIPANSPNIVESKSLKLYLNSLNFTKFSSIDELKTTLQKDLSICVGADVGVEIIGLDSDELTIAKPIGICIDDVLNHLSDEIVLSDDIDSKFLKSAKKGELATYQFYSNLLRSNCPVTNQPDWGVVQIEMTSEYDLDFGEFLKYILSFRQHNGFHEQCVERIFADMMTYFKPVSLKVLANYTRRGGIDINPVRVFNTDKGQIKRLIRQ

SEQ ID NO: 47530 - protein, 285 aa, Moraxella bovis
  REGION 1..285: note = tr|A0A2Z4R5L9|A0A2Z4R5L9_MORBO NADPH-dependent 7-cyano-7-deazaguanine reductase OS=Moraxella bovis OX=476; GN = DQF64_03455 PE=3 SV=1
MSIHGVLGESTTYSKTYDPTILYPISRQIGRDEILKDVGFDFNNYHDELKNGVDIWQAFELSWLNPIGISKVAMARFTIPANSPNIVESKSLKLYLNSLNFTKFSSINELKTTLQKDLSICVGADVGVEIIGLDSDELTIAKPIGICIDDVLNHLSDEIVLSDDIDSKFLKNAKKGELATYQFYSNLLRSNCPVTNQPDWGVVQIEMTSEYDLDFGEFLKYILSFRQHNGFHEQCVERIFADMMTYFKPVSLKVLANYTRRGGIDINPVRVFNTDKGQIKRLIRQ

SEQ ID NO: 47531 - protein, 285 aa, Moraxella bovoculi
  REGION 1..285: note = tr|A0A3F3AJE0|A0A3F3AJE0_9GAMM NADPH-dependent 7-cyano-7-deazaguanine reductase OS=Moraxella bovoculi; OX = 386891 GN=queF PE=3 SV=1
MSIHGVLGESTTYSKTYDPTILYPISRQIGRDEILKDVGFDFNNYHHELKNGVDIWQAFELSWLNPIGISQVAMARFTIPANSPNIVESKSLKLYLNSLNFTKFSSIDELKTTLQKDLSACAGANVGVEIIGLNDDGLDIHAPVGICIDDVLDNTKKEIPLLDDIDNTFLKNAKRSALTQYKFYSNLLRSNCPVTNQPDWGALQIEITTEYELDFGEFLKYILSFRQHNGFHEQCVERIFADCMIHYRPVFLRVLANYTRRGGIDINPVRVYHRDVGEVKRLVRQ

SEQ ID NO: 47532 - protein, 285 aa, Moraxella bovoculi; identical to SEQ ID NO: 47531
  REGION 1..285: note = tr|A0A066UCS9|A0A066UCS9_9GAMM NADPH-dependent 7-cyano-7-deazaguanine reductase OS=Moraxella bovoculi 237; OX = 743974 GN=queF PE=3 SV=1

SEQ ID NO: 47533 - protein, 280 aa, Moraxella canis
  REGION 1..280: note = tr|A0A1S9ZM24|A0A1S9ZM24_9GAMM NADPH-dependent 7-cyano-7-deazaguanine reductase OS=Moraxella canis; OX = 90239 GN=B0180_02455 PE=3 SV=1
MSIHGVLGETTSYPKSYDPSVLFAISRDLGRDEIVKLTGVQADQLTDGVDVWQAFELSWLNDQGISKVAIARISIPAHSPNIVESKSLKLYLNSLNFTSFSDASEVQALIQKDLSACVGADVSAEIIPLSGSGFEVHEPLGVCIDEVLDGGSGVIIGDDIDASVLRHPPVHQMATYQFHTNLLRSNCPVTNQPDWGTLSVSITTDKALDYQKILNYVLTFRKHNGFHEQCVERIFADLLVNFEPSSLMVQANYTRRGGIDINPVRVLNHDLPAVTRQVRQ

SEQ ID NO: 47534 - protein, 285 aa, Moraxella caprae
  REGION 1..285: note = tr|A0A378R2V1|A0A378R2V1_9GAMM NADPH-dependent 7-cyano-7-deazaguanine reductase OS=Moraxella caprae; OX = 90240 GN=queF PE=3 SV=1
MSIHGVLGESTTYSKTYDPTILYPISRQIGRDEILKDVGFDFNDYHDELKNGVDIWQAFELSWLNPIGISQVAMARFTIPANSPNIVESKSLKLYLNSLNFTKFSSIDELKTTLQKDLSICVGADVGVEIIGLDSDELTIAKPIGICIDDVLNHLSDEIILSDDIDSKFLKNAKKGELATYQFYSNLLRSNCPVTNQPDWGVVQIEMTSEYDLDFGEFLKYILSFRQHNGFHEQCVERIFADMMTYFKPVSLKVLANYTRRGGIDINPVRVFNTDKGQIKRLIRQ

SEQ ID NO: 47535 - protein, 280 aa, Moraxella catarrhalis
  REGION 1..280: note = tr|A0A198XA21|A0A198XA21_MORCA NADPH-dependent 7-cyano-7-deazaguanine reductase OS=Moraxella catarrhalis; OX = 480 GN=AO367_1491 PE=3 SV=1
MSIHGVLGETTSYPKNYDASILFAISRSLGRDEVLKQTGIQADKLTDGVDVWQAFELSWLNLQGICKVAIARIRVPANSPNIVESKSLKLYLNSLNFTKFGDMAEVQALIQKDLSACVGAEVSVEIVPLGGSGFEVQEPLGICIDEVLDTEGEVIACDDINSAILSQPPVHQVMTYQFHTNLLRSNCPVTSQPDWGTLSVSITTNKALDYQKILRYVLTFRQHNGFHEQCVERIFADLLVNFEPSSLMVQANYTRRGGIDINPVRVLNHALPAVTRQVRQ

SEQ ID NO: 47536 - protein, 280 aa, Moraxella catarrhalis
  REGION 1..280: note = tr|A0A3A9MUI6|A0A3A9MUI6_MORCA NADPH-dependent 7-cyano-7-deazaguanine reductase OS=Moraxella catarrhalis; OX = 480 GN=queF PE=3 SV=1
MSIHGVLGETTSYPKNYDASILFAISRSLGRDEVLKQTGIQADQLTDGVDVWQAFELSWLNLQGICKVAIARIRIPANSPNIVESKSLKLYLNSLNFTKFGDMAEVQALIQKDLSACVGIKVSVEIVPLGGSGFEVQEPLGVCIDEVLDTEGEVIACDDINSAILSQPPVHQMMTYQFHTNLLRSNCPVTSQPDWGTLSVSITTNKALDYQKILRYVLTFRQHNGFHEQCVERIFADFLVNFEPSALMVQANYTRRGGIDINPVRVLNHALPAVTRQVRQ

SEQ ID NO: 47537 - protein, 280 aa, Moraxella caviae
  REGION 1..280: note = tr|A0A1S9ZWB0|A0A1S9ZWB0_9GAMM NADPH-dependent 7-cyano-7-deazaguanine reductase OS=Moraxella caviae; OX = 34060 GN=queF PE=3 SV=1
MSIHGVLGESTSYPKSYAPDVLYPIARSLGRDEIAKTGFAGDYQGVDVWQAFEVSWLDLQGVSQVATARFEIPASSPNIVESKSLKLYLNSLNFTEFANAKAVQDTITKDLSACVGANVAVALHSLDGDDFTVQRPLGECIDQALQTDNTQKVALSDDIDSTFLQGFRKLAAPKSYALYSDLLRSNCPVTNQPDWGTVQISITTNYELNHAAILRYVLSYRQHNGFHEQCVEQIFADFMQNFAPTSLKVQANYTRRGGIDINPVRVFNAEIGKVGRFVRQ

SEQ ID NO: 47538 - protein, 280 aa, Moraxella cuniculi
  REGION 1..280: note = tr|A0A3S4SYN4|A0A3S4SYN4_9GAMM NADPH-dependent 7-cyano-7-deazaguanine reductase OS=Moraxella cuniculi; OX = 34061 GN=queF PE=3 SV=1
MSIHGVLGETTSYPKTYDASVLFAITRTLGRDEIYQATSVASDDLAVGVDVWQAFELSWLDEFGISQVAVARLIIPADSPNIVESKSLKLYLNSLNFTRFATVSAVQAVIERDVSACIGAMVQVQIEPLNTTAFDLVAPLGECIDDVLSRAGVAVELSDDIDSTLLQPKAGQMMQYQFHSHLLRSNCPVTNQPDWGTLSVAISTDKVVDYQQVLAYILTFRQHNGFHEQCVERIFADFLRLFAPTSLMVQANYTRRGGIDINPVRVKNHPVPKIGRQIRQ

SEQ ID NO: 47539 - protein, 280 aa, Moraxella cuniculi
  REGION 1..280: note = tr|A0A1N7E734|A0A1N7E734_9GAMM NADPH-dependent 7-cyano-7-deazaguanine reductase OS=Moraxella cuniculi DSM 21768 OX=1122245 GN=SAMN02745664_103136 PE=3 SV=1
MSIHGVLGETTSYPKTYDASVLFAITRTLGRDEIYQATSVAGDDLAVGVDIWQAFELSWLDEFGISQVAVARLIIPADSPNIVESKSLKLYLNSLNFTRFATVSAVQAVIERDVSACIGAMVQVQIEPLDTTAFDLVAPLGECIDDVLSRAGVAVELSDDIDSTLLQPKAGQMMQYQFHSHLLRSNCPVTNQPDWGTLSVAISTDKVVDYQQVLAYILTFRQHNGFHEQCVERIFADFLRLFAPTSLMVQANYTRRGGIDINPVRVKNHPVPKIGRQIRQ

SEQ ID NO: 47540 - protein, 285 aa, Moraxella equi
  REGION 1..285: note = tr|A0A378QS43|A0A378QS43_9GAMM NADPH-dependent 7-cyano-7-deazaguanine reductase OS=Moraxella equi; OX = 60442 GN=queF PE=3 SV=1
MSIHGVLGESTTYSKTYDPTILYPISRQIGRDEILKDVGFDFNNCYDDLKHGVDIWQAFELSWLNPIGISQVAMARFTIPANSPNIVESKSLKLYLNSLNFTKFSSIDELKTILQKDLSICVGADVGVEIIDLNGDELNIVKPIGSCIDDVLNDSSDDIILSDDIDSEFLKNAKKGELVTYQFYSNLLRSNCPVTNQPDWGVVQIEMTSEYDLDFGEFLKYILSFRQHNGFHEQCVERIFADMMTYFKPVSLKVLANYTRRGGIDINPVRVFNADKGQIKRLIRQ

SEQ ID NO: 47541 - protein, 285 aa, Moraxella lacunata
  REGION 1..285: note = tr|A0A1B8Q5T2|A0A1B8Q5T2_MORLA NADPH-dependent 7-cyano-7-deazaguanine reductase OS=Moraxella lacunata; OX = 477 GN=A9309_03535 PE=3 SV=1
MSIHGVLGESTTYSKTYDPTILYPISRQIGRDEILKDVGFDFNNYHDEFKKGVDIWQAFELSWLNPIGISQVAMARFAIPANSPNIVESKSLKLYLNSLNFTKFSSIDELKITLQKDLSACVGANVDVEIIDLNSDELAIVKPIGICIDDVLNHLSDEVILSDDIDSKFLKNAKKGELKAYQFYSNLLRSNCPVTNQPDWGTVQIEMTSEYALDFGEFLKYILSFRQHNGFHEQCVERIFADMMMYFKPTSLKVLANYTRRGGIDINPVRVFNADKGRIRRLIRQ

SEQ ID NO: 47542 - protein, 285 aa, Moraxella lacunata
  REGION 1..285: note = tr|A0A1V4H3K1|A0A1V4H3K1_MORLA NADPH-dependent 7-cyano-7-deazaguanine reductase OS=Moraxella lacunata; OX = 477 GN=queF PE=3 SV=1
MSIHGVLGESTTYSKTYDPAILYPISRQIGRDEILKEVNFDFNEYDDDLKKGADIWQAFELSWLNPIGVSQVAMARFIIPANSPNIIESKSLKLYLNSLNFTKFHHINELKSTLQKDLSICVGADVGVEIIEMDSDELTIARPMGICIDEALHDFSDEVILTDDIDSKFLKNTQKGELKAYQFYSNLLRSNCPVTNQPDWGTVQIEMASEYALDFGEFLKYILSFRQHNGFHEQCVERIFADMMTYFKPTSLRVLANYTRRGGIDINPVRVFHADKGQIKRLIRQ

SEQ ID NO: 47543 - protein, 287 aa, Moraxella lincolnii
  REGION 1..287: note = tr|A0A1T0CD49|A0A1T0CD49_9GAMM NADPH-dependent 7-cyano-7-deazaguanine reductase OS=Moraxella lincolnii; OX = 90241 GN=B0682_07530 PE=3 SV=1
MNTKQTPENSHLGQSTTYPKTYAPNILYPIPRALGRKKLALPADQLSCGTDFWHVFELSWLNPQGISQVAMARLAIPATSEYIIESKSLKLYFNSLNFSEFNSQSEIQNVIEKDLSTCLNADVTIQIFDVKTADSLPISEPQGECVDDLFDDFADGGQKITMTQDVDSGYLAFATDGQMSKKQIFHSHLLRSNCPVTNQPDWGTVEIMIDCPSIDKVGLLTYILSFRNHNGFHEQCVEQIFSDLTHVFSPKSLVVRAWYTRRGGIDINPCRASDLSLLPKPSRLNRQ

SEQ ID NO: 47544 - protein, 285 aa, unidentified
  source 1..285: note = Moraxella macacae
  REGION 1..285: note = tr|L2FB69|L2FB69_9GAMM NADPH-dependent 7-cyano-7-deazaguanine reductase OS=Moraxella macacae 0408225 OX=1230338 GN=queF PE=3 SV=1
MTTNQHHSIKQKHGILGQIIEYPKTYSPQILHPIPRRFGRENLALPDEKLSQGFDYWHIFELSWLKPNGVSSVATARMTIPATSEFIVESKSLKLYLNSLNFIQFDNVAQVKQTLQHDLSECLKTEVGFEIFALHDEALTIDQVQGDCLDNLAIDKVVLTDNVDNSLLSFAKTVDNKPKQQRFYSHLLRSNCPVTNQPDWGTVEILLESLPIDKLALLKYLLSYRQHNGFHEQCVEQIFSDLMQKFYPVSLMVRAWYTRRGGIDINPVRASDVSLLPNKSRLIRQ

SEQ ID NO: 47545 - protein, 285 aa, Moraxella nonliquefaciens
  REGION 1..285: note = tr|A0A1B8QM22|A0A1B8QM22_MORNO NADPH-dependent 7-cyano-7-deazaguanine reductase OS=Moraxella nonliquefaciens OX=478 GN=A7456_01770 PE=3 SV=1
MSIHGVLGESTTYSKTYDPAILYPISRQIGRDEILKEVNFDFNEYDDDLKKGADIWQAFELSWLNPIGVSQVAMARFIIPANSPNIIESKSLKLYLNSLNFTKFHHINELKSILQKDLSICVGADVGVEIIEMDSDELTIARPMGICIDEALHDFSDEVILTDDIDDGFLKNANKGELKTYQFYSNLLRSNCPVTNQPDWGTVQIEITSEYELDFGDVLKYILSFRQHNGFHEQCVERIFADLMMSFHPTSLKVLANYTRRGGIDINPVRVFHANRGQMLRLIRQ

SEQ ID NO: 47546 - protein, 285 aa, Moraxella nonliquefaciens
  REGION 1..285: note = tr|A0A1B8PLM5|A0A1B8PLM5_MORNO NADPH-dependent 7-cyano-7-deazaguanine reductase OS=Moraxella nonliquefaciens OX=478 GN=A9Z60_06365 PE=3 SV=1
MSIHGVLGESTTYSKTYDPAILYPISRQIGRDEILKEVNFDFNEYDDDLKKGADIWQAFELSWLNPIGVSQVAMARFIIPANSPNIIESKSLKLYLNSLNFTKFHHINELKSTLQKDLSICVGADVGVEIIEMDSDELTIARPMGICIDEALHDFSNEVILTDDIDDGFLKNANKGELKTYQFYSNLLRSNCPVTNQPDWGTVQIEITSEYELDFGDVLKYILSFRQHNGFHEQCVERIFADLMMSFHPTSLKVLANYTRRGGIDINPVRVFHANRGQMLRLIRQ

SEQ ID NO: 47547 - protein, 283 aa, Moraxella osloensis
  REGION 1..283: note = tr|A0A173MUA4|A0A173MUA4_9GAMM NADPH-dependent 7-cyano-7-deazaguanine reductase OS=Moraxella osloensis; OX = 34062 GN=MOSL_0545 PE=3 SV=1
MKPLETHGILGQSTSYPKTYAPDMLYPIPRALGRAKLALPADALSIGMDWWQVFEMSWLNSHGISQVAMARLAIPATSNYIVESKSLKLYFNSLNFTEFDNQQAVKATVEKDLSACLKTDVTLEIFEVNIANSLPISAPQGDCIDNALDSSDKKIAIVSDVDPSSLTVAHQGAFDSQLQILHSHLLRSNCPVTNQPDWGTLEIQIDSQQIDCAGLLEYILSFRQHNGFHEQCVEQIFSDLTQVFAPKTLMVRAWYTRRGGIDINPCRVSDVSLLPPPSRLNRQ

SEQ ID NO: 47548 - protein, 283 aa, Moraxella osloensis
  REGION 1..283: note = tr|A0A270AUF9|A0A270AUF9_9GAMM NADPH-dependent 7-cyano-7-deazaguanine reductase OS=Moraxella osloensis; OX = 34062 GN=B8W92_07005 PE=3 SV=1
MKPLETHGILGQSTSYPKTYAPDMLYPIPRALGRAKLALPTDALSIGMDWWQVFEMSWLNLHGISQVAMARLAIPATSDYIVESKSLKLYFNSLNFTEFDNQQAVKAAVEKDLSACLKTDVTLEIFEVNIANSLPISAPQGDCIDNALDNSGKKIAIVSDVDSSSLTVADQGASDSQLQILHSHLLRSNCPVTNQPDWGTLEIQIDSQPIDRAGLLEYILSFRQHNGFHEQCVEQIFSDLTQAFAPKTLMVRAWYTRRGGIDINPCRVSDISLLPPPSRLNRQ

SEQ ID NO: 47549 - protein, 285 aa, Moraxella ovis
  REGION 1..285: note = tr|A0A378PM09|A0A378PM09_9GAMM NADPH-dependent 7-cyano-7-deazaguanine reductase OS=Moraxella ovis; OX = 29433 GN=queF PE=4 SV=1
MSIHGVLGESTTYSKTYDPTILYPISRQIGRDEILKDVGFDFNDCHDELKNGVDIWQAFELSWLNPIGISQVAMARFTIPANSPNIVESKSLKLYLNSLNFTKFSSIDELKTTLQKDLSICVGANVGVEIIGLNDDGLDIHAPVGICIDDVLDNTKKEILLLDDIDNVFLKNAKKGALTQYKFYSNLLRSNCPVTNQPDWGAVQIEIATEYELDFGEFLKYILSFRQHNGFHEQCVERIFADCMIHYRPVFLRVLANYTRRGGIDINPVRVYHRDVGEVKRLVRQ

SEQ ID NO: 47550 - protein, 280 aa, Moraxella pluranimalium
  REGION 1..280: note = tr|A0A1T0CJU2|A0A1T0CJU2_9GAMM NADPH-dependent 7-cyano-7-deazaguanine reductase QueF OS=Moraxella pluranimalium OX=470453 GN=B0680_09255 PE=4 SV=1
MSIHGVLGESTSYPQSYDNSMLFAISRTLGRDEILAKSGVSAEHLVAGVDVWQAFELSWLNPQGISKVAIARIHIPADSPNIVESKSLKLYLNSLNFTQFDDVAAVKQTIERDLTACVGATVTVEIGALDGTDFAVVAPMGECIDTVLDGGDGLAVVDDVDASLLGTADDGVMQTYQFHTNLLRSNCPVTNQPDWGTLLVSITTAKQVEYAKVLAYVLSFRKHNGFHEQCVEQIFADLLTVYAPTSLMVQANYTRRGGIDINPVRVLNHPVPNIGRLVRQ

SEQ ID NO: 47551 - protein, 280 aa, Moraxella porci
  REGION 1..280: note = tr|A0A1T0CPQ5|A0A1T0CPQ5_9GAMM NADPH-dependent 7-cyano-7-deazaguanine reductase OS=Moraxella porci DSM 25326 OX=573983 GN=B0681_07375 PE=3 SV=1
MSIHGVLGESTSYPQSYDSSVLFAISRTIGRDEILAKSGVSAEHLMAGVDVWQAFELSWLNPQGISKVAIARITIPADSPNIVESKSLKLYLNSLNFTQFDDVSAVKQTIERDLTACVGASVTVQISSLDGADFAVVRPVGECIDAVLDGGDAVAVVDDVDASLLGTAVDGVVQTFQFHTNLLRSNCPVTNQPDWGTLSVSITTAKQVEYAKVLAYVLSFRKHNGFHEQCVEQIFADLLTVYAPTSLMVQANYTRRGGIDINPVRVLNHPMPSIGRLVRQ

SEQ ID NO: 47552 - protein, 280 aa, Moraxella sp.
  REGION 1..280: note = tr|A0A229GY98|A0A229GY98_9GAMM NADPH-dependent 7-cyano-7-deazaguanine reductase OS=Moraxella sp. VT-16-12; OX = 2014877 GN=CEW93_03740 PE=3 SV=1
MSIHGVLGEHTSYPTTYDPTILYPISRRIGRDEILKDTGIKLHDDCHGVDVWQAFELSWLNTVGISQVAMARFTIPASSPNIVESKSLKLYLNSLNFTPFATIDDVKQTIATDLSACVGADVGVQIVGLGDDTLAVCSPVGVCIDDSLADSQEMVALSDDVDSRFLTATQGELTHYQFYSHLLRSNCPVTNQPDWGTVSVEMTTNRQLQFGEILKYILSFRQHNGFHEQCVERIFADFMKVFEPSSLLVQANYTRRGGIDINPVRVFNCDVGVLGRLVRQ

SEQ ID NO: 47553 - protein, 280 aa, Moraxella sp.
  REGION 1..280: note = tr|A0A2K0XQH3|A0A2K0XQH3_9GAMM NADPH-dependent 7-cyano-7-deazaguanine reductase OS=Moraxella sp. RCAD0137; OX = 1775913 GN=AZ602_09150 PE=3 SV=1
MSIHGVLGESTSYPQSYDNSVLFAISRKIGRDEILAKSGVSAEHLMAGVDVWQAFELSWLNPQGVSKVAIARIIIPADSPNIVESKSLKLYLNSLNFTQFDDVSAVKQTIERDLTAGVGASVTVLISSLNDADFAVVRPVGECIDVVLDGGDVVAVVDDVDASLLGTAVDGVVQTFQFHTNLLRSNCPVTNQPDWGTLSVSITTAKQVEYAKVLAYVLSFRKHNGFHEQCVEQIFADLLTVYAPTSLMVQANYTRRGGIDINPVRVLNHPMPSIGRLVRQ

SEQ ID NO: 47554 - protein, 275 aa, unidentified
  source 1..275: note = Moraxellaceae bacterium
  REGION 1..275: note = tr|A0A345P713|A0A345P713_9GAMM NADPH-dependent 7-cyano-7-deazaguanine reductase OS=Moraxellaceae bacterium HYN0046 OX=2283318 GN=queF PE=3 SV=1
MSVNDSALGQETVYPDHYNPTLLFPIARAEGRALLGATYPETVNQGVDIWHIFELSWLDRSGKPVVAVGRMTLPADSPYLIESKSLKLYFNSLNFETFADPDAFLAVVIKDLSAAAQAPVQLELLGVDELTTHLPQGIYLDGLATTQSPSPTEPDASLLMLAEGTSEIVEETLYSNLLRSNCPVTGQPDWGTVFIRYRGAKLCQSSLLTYIISYRKHSGFHEQCVEQIFADIWQYLKPEALAVHAQYTRRGGLDINPCRTSDLRWLPQVTRLARQ

SEQ ID NO: 47555 - protein, 272 aa, unidentified
  source 1..272: note = Moraxellaceae bacterium
  REGION 1..272: note = tr|A0A4V2ABN2|A0A4V2ABN2_9GAMM NADPH-dependent 7-cyano-7-deazaguanine reductase OS=Moraxellaceae bacterium OX=1889775 GN=queF PE=3 SV=1
MSVEQSLLGQTTSYPTDYAPEILFPIARAPSRQAYADIAGISQGMDWWHAFELSWLDLANKPQVAIGRLHIPADSEFLIESKSLKLYFNSLNFKSFADQLAFIDCVERDLSHTANARVKLELYDTDALLVSQPMGFCLDPLTPAGFSLHPDASLLRLENAKTQQISEVSLYSHLLRSNCPVTGQPDWGTLFIKYQGIKPCYSSLLAYIISYRQHSGFHEQCVEQIFADIWQQLQPERLMVYAAYTRRGGLDINPCRVSDLDWLPSPIRLARQ

SEQ ID NO: 47556 - protein, 283 aa, Morganella morganii
  REGION 1..283: note = tr|A0A422UE49|A0A422UE49_MORMO NADPH-dependent 7-cyano-7-deazaguanine reductase OS=Morganella morganii subsp. morganii OX=180434 GN=queF PE=3 SV=1
MSLYEGKAELASLTLGKKTGYEQHYNPALLQGVPRSLNRDALHLHADNLPFRGADLWTLYELSWLQPNGVPCIALGYVSLDAAGLNLIESKSFKLYLNSFNQTVFASADDVRRTLEQDLSACAQGKVTVELLRPEQFTEQKIIDFTGECIDYQDITITDYQFSSDYLIDAVNENDDVVEETLVSHLLKSNCLITQQPDWGSVAIQYRGPKIDREKLLRYLVSFRNHNEFHEQCVERIFTDLNTHCRPVALTVYARYTRRGGLDINPWRTNTDFTPSADRLARQ

SEQ ID NO: 47557 - protein, 283 aa, Morganella morganii
  REGION 1..283: note = tr|A0A1M7LQU6|A0A1M7LQU6_MORMO NADPH-dependent 7-cyano-7-deazaguanine reductase OS=Morganella morganii; OX = 582 GN=queF PE=3 SV=1
MSLYEGKAELASLTLGKKTGYEQHYNPALLQGVPRSLNRDALHLHADNLPFRGADLWTLYELSWLQPNGVPCIALGYVSLDAAGLNLIESKSFKLYLNSFNQTVFASADDVRRTLEQDLSACAQGTVTVELLRPDQFTEQKIIDFTGECIDYQDITITDYQFSSDYLIDAVNENDDVVEETLVSHLLKSNCLITQQPDWGSVAIQYRGPKIDREKLLRYLVSFRNHNEFHEQCVERIFTDLNTHCRPVALTVYARYTRRGGLDINPWRTNTDFTPSADRLARQ

SEQ ID NO: 47558 - protein, 283 aa, Morganella psychrotolerans
  REGION 1..283: note = tr|A0A1B8H1T0|A0A1B8H1T0_9GAMM NADPH-dependent 7-cyano-7-deazaguanine reductase OS=Morganella psychrotolerans OX=368603 GN=queF PE=3 SV=1
MSLYEGKAELASLTLGKKTGYEQHYNPALLQGVPRSLNRDALHLHADNLPFRGADLWTLYELSWLQPNGVPCIALGYVSLDAGGLNLIESKSFKLYLNSFNQTVFASADDVRKTLEQDLSACAQGEVTVKLLRPEQFAEQKIVDFTGECLDYQDITIADYQFSSEYLIDAVNDNDDFVEETLVSHLLKSNCLITQQPDWGSVSIQYRGPRIDRAKLLRYLVSFRNHNEFHEQCVERIFTDINTHCRPATLTVYARYTRRGGLDINPWRTNTDFTPSAARLARQ

SEQ ID NO: 47559 - protein, 283 aa, Morganella psychrotolerans
  REGION 1..283: note = tr|A0A1B8HBZ2|A0A1B8HBZ2_9GAMM NADPH-dependent 7-cyano-7-deazaguanine reductase OS=Morganella psychrotolerans OX=368603 GN=queF PE=3 SV=1
MSLYEGKAELASLTLGKKTGYEQHYNPALLQGVPRSLNRDALHLHADNLPFRGADLWTLYELSWLQPNGIPCIALGYVSLDARGLNLIESKSFKLYLNSFNQTVFASADDVQKTLEQDLSTCAQGEVTVELLRPEQFAEQKIVDFTGECLDYQDITIADYQFSSEYLIDAVNDNDDFVEETLVSHLLKSNCLITQQPDWGSVSIQYRGPQIDRAKLLRYLVSFRNHNEFHEQCVERIFTDINTHCRPATLTVYARYTRRGGLDINPWRTNTDFTPSAARLARQ

SEQ ID NO: 47560 - protein, 283 aa, Morganella sp.
  REGION 1..283: note = tr|A0A3D3HW65|A0A3D3HW65_9GAMM NADPH-dependent 7-cyano-7-deazaguanine reductase OS=Morganella sp. (in: Bacteria) OX=1912315 GN=queF PE=3 SV=1
MSLYDGKAELASLTLGKKTGYEQHYNPALLQGVPRSLNRDALHLHADNLPFRGADLWTLYELSWLQPNGIPCIALGYVSLDARGLNLIESKSFKLYLNSFNQTVFASAADVQKILEQDLSTCAQGGVTVELLRPEQFAEQKIVDFTGECLDYQDITIADYQFSSEYLIDAVNDNGDFVEETLVSHLLKSNCLITQQPDWGSVSIHYRGPRIDRAKLLRYLVSFRNHNEFHEQCVERIFTDINTHCRPATLTVYARYTRRGGLDINPWRTNTDFTPSAARLARQ

SEQ ID NO: 47561 - protein, 284 aa, Moritella marina
  REGION 1..284: note = tr|A0A5J6WUI0|A0A5J6WUI0_MORMI NADPH-dependent 7-cyano-7-deazaguanine reductase QueF OS=Moritella marina ATCC 15381 OX=1202962 GN=queF PE=4 SV=1
MTPANRYQDSTALDKLNLGQKTEYISQYQPSLLQPVPRQLNRDDLALSDQLPFTGCDLWNLYELSWLNSKGKPIVAVAEVKVCATSVNLIESKSFKLYLNSFNQTRFTSTQEVTETLQRDLASCAEGAVTVEMFDDLDTAPSQITKISGTCIDHLDIDVDGYEFNAALLQGAADNSEQVDEIIYSHLLKSNCLVTNQPDWGSVYIAYQGNKIDQEALLRYLISFRQHNEFHEQCVERIFTDIMHFCKPEQLTVYARYTRRGGLDINPFRTNCDANIENIRLIRQ

SEQ ID NO: 47562 - protein, 289 aa, Moritella sp.
  REGION 1..289: note = tr|A0A2G2IM18|A0A2G2IM18_9GAMM NADPH-dependent 7-cyano-7-deazaguanine reductase OS=Moritella sp. OX=78556; GN = queF PE=3 SV=1
MTPANRYQDSTALDKLNLGQKTEYISQYQPSLLQPVPRQLNRDDLALSDQLPFTGCDLWNLYELSWLNSKGKPIVAVAEVKVCATSVNLIESKSFKLYLNSFNQTRFSSTDEVTETLQRDLAACAQGPVEVLVFDDLDKAPSQITKITGSCIDHLDIDVEDYEFNAELLTAATDNNAADNNNNVEEVLYSHLLKSNCLVTNQPDWGSVYIAYQGNKIDQEALLRYLISFRQHNEFHEQCVERIFTDIMHFCKPEQLTVYARYTRRGGLDINPFRTNCDAKIDNIRLIRQ

SEQ ID NO: 47563 - protein, 284 aa, Moritella sp.
  REGION 1..284: note = tr|A6F6I5|A6F6I5_9GAMM NADPH-dependent 7-cyano-7-deazaguanine reductase OS=Moritella sp. PE36; OX = 58051 GN=queF PE=3 SV=1
MTPANRYQDSTALDKLNLGQKTEYISQYQPSLLQPVPRQLNRDDLALSDQLPFTGCDLWNLYELSWLNSKGKPIVAVAEVKVCATSVNLIESKSFKLYLNSFNQTRFSSTDEVTDTLQRDLAACAQGPVEVLVFDDLDKAPSQITKITGSCIDHLDIDVEDYEFNAELLNSAADNNDNVDEVLYSHLLKSNCLVTNQPDWGSVYIAYQGNKIDPEALLRYLISFRQHNEFHEQCVERIFTDIMHFCKPEQLTVYARYTRRGGLDINPFRTNCDAKIDNIRLIRQ

SEQ ID NO: 47564 - protein, 284 aa, Moritella viscosa
  REGION 1..284: note = tr|A0A090KD04|A0A090KD04_9GAMM NADPH-dependent 7-cyano-7-deazaguanine reductase OS=Moritella viscosa; OX = 80854 GN=queF PE=3 SV=1
MTITNRYQDSTALDKLNLGQKTEYISQYQPNLLQPVPRQLNRDDLSLSDQLPFTGCDLWNLYELSWLNSKGKPIVAVAEVKVCATSVNLIESKSFKLYLNSFNQTRFNSTEAVTETLQRDLAACAQGPVEVVMFDDLDKAPSQITKITGTCIDHLDIDIDNYEFNADLLKAAADNNDVVNEVVYSHLLKSNCLVTNQPDWGSVYIAYQGNKIDQEALLRYLISFRQHNEFHEQCVERIFTDIMRFCKPEQLTVYARYTRRGGLDINPFRTNCDAKIDNIRLIRQ

SEQ ID NO: 47565 - protein, 284 aa, Moritella yayanosii
  REGION 1..284: note = tr|A0A330LT47|A0A330LT47_9GAMM NADPH-dependent 7-cyano-7-deazaguanine reductase OS=Moritella yayanosii; OX = 69539 GN=queF PE=3 SV=1
MTPANRYQDSTALNKLNLGKKTEYISQYQPSLLQPVPRQLNRDDLALSDQLPFTGCDLWNLYELSWLNSKGKPIVAVAEVRVCATSVNLIESKSFKLYLNSFNQTRFSSTDEVTETLQRDLAACAQGLVEVLMFDDLDKAPSQITKITGSCIDHLDIDVEDYEFNAELLTSAADNNDNVDEVLYSHLLKSNCLVTNQPDWGSVYIAYQGNKIDPEALLRYLISFRQHNEFHEQCVERIFIDIMHFCKPEQLTVCARYTRRGGLDINPFRTNCDAKIDNIRLIRQ

SEQ ID NO: 47566 - protein, 157 aa, Morococcus cerebrosus
  REGION 1..157: note = tr|A0A0C1GMH9|A0A0C1GMH9_9NEIS NADPH-dependent 7-cyano-7-deazaguanine reductase OS=Morococcus cerebrosus; OX = 1056807 GN=queF PE=3 SV=1
MSRNTEELQGISLLGNQKTQYPTGYAPEILEAFDNKHPDNDYFVKFVCPEFTSLCPMTGQPDFATIYIRYIPHIKMVESKSLKLYLFSFRNHGDFHEDCVNIIMKDLIALMDPKYIEVFGEFTPRGGIAIHPFANYGKAGTEFETLARKRLFEHDSQ

SEQ ID NO: 47567 - protein, 281 aa, unidentified
  source 1..281: note = Motilimonas sp.
  REGION 1..281: note = tr|A0A418YK43|A0A418YK43_9GAMM NADPH-dependent 7-cyano-7-deazaguanine reductase OS=Motilimonas sp. PLHSC7-2 OX=2303987 GN=queF PE=3 SV=1
MSKYQGHQALAGLTLGQQSDYSHGYDASLLQPVPRSLNRDDLGLVAGQLPFHGFDSWGLYELSWLNSKGKPVVATGQVRVDANSVNLIESKSFKLYLNSLNQHKFASTEAVQQALTQDLSACAEGQVEVALHTQLDTNNDVLGSFTGTLIDDLDIEVAGFEFNPDWLVGSTQDELVSETLYSHLLKSNCLVTNQPDWGSVLIKYQGRKIQQEKLLQYLISFRQHNEFHEQCVERIFQDIMRYCQPERLTVLAKYTRRGGLDINPFRSNFETELTTPRLLRQ

SEQ ID NO: 47568 - protein, 275 aa, unidentified
  source 1..275: note = Motiliproteus coralliicola
  REGION 1..275: note = tr|A0A369WNN8|A0A369WNN8_9GAMM NADPH-dependent 7-cyano-7-deazaguanine reductase OS=Motiliproteus coralliicola OX=2283196 GN=queF PE=3 SV=1
MSSDNHEAIKQAPLGQDTQYVCHYDPTQLFSIERANNWQKLGYDKPPFRGFDLWNAYELSWLDPKGKPQVAIAEFRIPCDSSHIVESKSFKLYLNSFNLTRFDSVEQVQQHLVEDLSRAFGGTVSVAIQTLDAAGIIEPLKGESLDQLDIEVEHYQPAPQLLSSAEGDPVDEQLYSHLLKSNCPVTGQPDWASIQIEYRGQPIDREGLLKYLISYREHGDFHEQCVEQIFLDIYQRCQPEQLSVYARYVRRGGLDINPYRSTEAFTPDNIRLLRQ

SEQ ID NO: 47569 - protein, 279 aa, unidentified
  source 1..279: note = Motiliproteus sp.
  REGION 1..279: note = tr|A0A1R1MEI9|A0A1R1MEI9_9GAMM NADPH-dependent 7-cyano-7-deazaguanine reductase OS=Motiliproteus sp. MSK22-1 OX=1897630 GN=queF PE=3 SV=1
MTHDTNKTDEDRLKHTPLGQETNYVVHYDPKQLCPIPRANNWHHRDYQKAPFSGCDIWNAYEISWLNPKGLPQVAIAEFRFPCDSPHIVESKSFKLYLNSFNLTRFETADEVQSLMAGDLSQCAGADVKVVLLPVDIGSEISTLQGHCIDHQDIEIEHYQPVPEVLRSVAGTEVQEQLYSHLLKSNCPVTGQPDWASIQIEYLGPAIDQATLLKYLVSYREHGDFHEQCVEQIFMDLLEQCKPKELSVFARYVRRGGLDINPYRSTEPQPTVNNRLIRQ

SEQ ID NO: 47570 - protein, 279 aa, unidentified
  source 1..279: note = Muribacter muris
  REGION 1..279: note = tr|A0A4Y9K5M1|A0A4Y9K5M1_9PAST NADPH-dependent 7-cyano-7-deazaguanine reductase OS=Muribacter muris; OX = 67855 GN=queF PE=3 SV=1
MTYQDSSLTALKLGQKTDYASEYDPTLLQAVPRRLNRDELGISEQQPFDRGADIWTLYELSWLNSKGVPQVAIADVAVDFRSENLIESKSFKLYLNSFNQTKFESIAAVERCLVEDLSRCASGRVTVNIHKLDAYRQQPIADFDGERIDDLDIEIHDYHFSNCILENIAQGERVEETLVSHLLKSNCLITNQPDWGSVQIHYVGKRLDREKLLRYLISFRQHNEFHEQCVERIFTDLMRFAKPEKLTVYARYTRRGGLDINPFRSNFESEPQNQRLARQ

SEQ ID NO: 47571 - protein, 279 aa, unidentified
  source 1..279: note = Muribacter muris
  REGION 1..279: note = tr|A0A0J5P868|A0A0J5P868_9PAST NADPH-dependent 7-cyano-7-deazaguanine reductase OS=Muribacter muris; OX = 67855 GN=queF PE=3 SV=1
MTYQDSSLTALKLGQKTDYASEYDPTLLQAVPRRLNRDELGISEQQPFDRGADIWTLYELSWLNSKGVPQVAIADVAVDFRSENLIESKSFKLYLNSFNQTKFESIAAVERCLVEDLSRCASGQVTVNIHKLDAYRQQPIADFGGERIDDLDIEIHDYQFSNRILENIAQDERVEETLVSHLLKSNCLITNQPDWGSVQIHYVGKRLDREKLLRYLISFRQHNEFHEQCVERIFTDLMRFAEPEKLTVYARYTRRGGLDINPFRSNFESEPQNQRLARQ

SEQ ID NO: 47572 - protein, 162 aa, unidentified
  source 1..162: note = Muribaculaceae bacterium
  REGION 1..162: note = tr|A0A4S4GQP4|A0A4S4GQP4_9BACT NADPH-dependent 7-cyano-7-deazaguanine reductase OS=Muribaculaceae bacterium OX=2498093 GN=queF PE=3 SV=1
MSRVENELAGLKHLGSQGTEYVYQYNPGLLETFPNKHTDADYMVTLLCPEFTSLCPKTGQPDYAKIIINYIPDRLMVESKSLKLYLFSFRNHGDFHEDCVNIILHDLVRLMQPRYIEVVGLFTPRGGIAIHPFANYADAAHKELAAQRLSSAMPLHMPDRMY

SEQ ID NO: 47573 - protein, 158 aa, unidentified
  source 1..158: note = Muribaculaceae bacterium
  REGION 1..158: note = tr|A0A3N2NLR8|A0A3N2NLR8_9BACT NADPH-dependent 7-cyano-7-deazaguanine reductase OS=Muribaculaceae bacterium Isolate-114 (HZI) OX=2486475 GN=queF PE=3 SV=1
MRTEKELEGVSLLGNQGVKYPTDYDPSLLETFENKHPENEYVVTFDCPEFTTLCPKTGQPDFGHIYITYIPRERMVESKSLKLYLFSFRNHGDFHEDCVNIIMKDLARLMDPKYIEVRGVFMPRGGISIYPFANMGDADHQDYVKARRLSVMAESAGR

SEQ ID NO: 47574 - protein, 156 aa, unidentified
  source 1..156: note = Muribaculum intestinale
  REGION 1..156: note = tr|A0A4S1ZT54|A0A4S1ZT54_9BACT NADPH-dependent 7-cyano-7-deazaguanine reductase OS=Muribaculum intestinale OX=1796646 GN=queF PE=3 SV=1
MSRQDNEMPGLSLLGNTATNYPDKYAPQVLETFPNKHPDNEYLVTFLCPEFTSLCPKTGQPDFAKIIISYIPRERMVESKSLKLYLFSFRNHGDFHEDCVNIIMKDLVALMDPRYLEVKGIFTPRGGIAIHPFANYADDEHRDMARSRMLASFPES

SEQ ID NO: 47575 - protein, 156 aa, unidentified
  source 1..156: note = Muribaculum intestinale
  REGION 1..156: note = tr|A0A1B1SBR5|A0A1B1SBR5_9BACT NADPH-dependent 7-cyano-7-deazaguanine reductase OS=Muribaculum intestinale OX=1796646 GN=queF PE=3 SV=1
MSRQDNEMPGLSLLGNTATNYPDKYAPQVLETFPNKHPDNEYLVTFHCPEFTSLCPKTGQPDFAKIIISYIPRERMVESKSLKLYLFSFRNHGDFHEDCVNIIMKDLVALMDPRYLEVKGIFTPRGGIAIHPFANYADDEHRDMARSRMLASFPES

SEQ ID NO: 47576 - protein, 156 aa, unidentified
  source 1..156: note = Muribaculum sp.
  REGION 1..156: note = tr|A0A4P7W3K6|A0A4P7W3K6_9BACT NADPH-dependent 7-cyano-7-deazaguanine reductase OS=Muribaculum sp. H5; OX = 2530393 GN=queF PE=3 SV=1
MRNESELNGVSLLGNTGVKYPTQYAPEVLETFVNKHPDNEYLVTFTCPEFTSLCPKTGQPDFAKILISYIPREKMVESKSLKLYLFSFRNHGDFHEDCVNIIMKDLIALMDPRYIEVKGIFTPRGGIAILPFANYGDSQHQEMVKQRMLASFPDNF

SEQ ID NO: 47577 - protein, 157 aa, unidentified
  source 1..157: note = Muribaculum sp.
  REGION 1..157: note = tr|A0A4P7VR26|A0A4P7VR26_9BACT NADPH-dependent 7-cyano-7-deazaguanine reductase OS=Muribaculum sp. TLL-A4; OX = 2530390 GN=queF PE=3 SV=1
MSRTDNEMPGVTLLGNQATKYPSEYAPEVLETFINKHPDNEYLVTFTCPEFTSLCPKTGQPDFARIIINYIPREKMVESKSLKLYLFSFRNHGDFHEDCINIIMKDLVALMNPRYLEVIGLFTPRGGISIYPFANYGDEEHQDMVKARMLASFRNDF

SEQ ID NO: 47578 - protein, 164 aa, Muricauda sp.
  REGION 1..164: note = tr|A0A558P4B7|A0A558P4B7_9FLAO NADPH-dependent 7-cyano-7-deazaguanine reductase OS=Muricauda sp. MT-229; OX = 2597517 GN=queF PE=3 SV=1
MAGRDEDTLDHLTLLGNQETKYKYEYAPEVLEAIDNMHTRDYFVKFNNPEFTSLCPQTGQPDFATIYLSFIPDKKLVESKSLKLYFFSFRNHGDFHEDVVNIIMNDLIELLDPRYIEVWGKFTPRGGLSIDPYTNHGKPGTKYEEMASYRMINHDMNPETITNR

SEQ ID NO: 47579 - protein, 274 aa, unidentified
  source 1..274: note = Mycoavidus cysteinexigens
  REGION 1..274: note = tr|A0A2Z6EU08|A0A2Z6EU08_9BURK NADPH-dependent 7-cyano-7-deazaguanine reductase OS=Mycoavidus cysteinexigens OX=1553431 GN=queF PE=3 SV=1
MNPHQSPLGQATQYNTQYDAKLLFPIARQPMREQMGLCATLPFLGADIWNAYELSWLNERGKPQIALARIIIPADSPNLVESKSLKLYLGSFAQTKFASADQIRTLMGEDLSALCGMPVSVSLTSPAAFATVPRQELDGLLLDRLELDIEQYQIAPELLSAHFNQAAIEETLVSNLLRSNCPVTGQPDWASIQIRYAGAPIEHAGLLRYLVSYRLHTGFHEQCVERIFMDLMQMCRPTQLAVYARYTRRGGLDINPFRTNFNQPLPDNMRTARQ

SEQ ID NO: 47580 - protein, 145 aa, unidentified
  source 1..145: note = Mycobacterium angelicum
  REGION 1..145: note = tr|A0A1W9ZW09|A0A1W9ZW09_9MYCO Uncharacterized protein OS=Mycobacterium angelicum OX=470074; GN = BST12_11170 PE=4 SV=1
MGAVSDGPPPVTSLGQTVDPDAPVRLEFFPVPKPVRVTFHTAELQALCPAVAGIQPDIYQAEISYTALTHAIESKSLKLWLVAFRDRRIFAEHLAIELHDGVAAHAPAVGDVRVRLTQNVRGGIVTVIEHPAAASSPSGSCATSR

SEQ ID NO: 47581 - protein, 158 aa, Mycobacterium sp.
  REGION 1..158: note = tr|A0A554UBC6|A0A554UBC6_9MYCO NADPH-dependent 7-cyano-7-deazaguanine reductase OS=Mycobacterium sp. KBS0706 OX=2578109 GN=queF PE=3 SV=1
MARKAKTKGTEALTQLGQATALPASPEEAVLETVPNPRPKQLYLVRFTAPEFTSLCPITGQPDFAHLVIDYAPAAKIVESKSLKLFLGSFRNHGAFHEDCTVYVAERLIKAMKPRWLRIGGYWYPRGGIPIDVFYQSGPAPEGLWLPDQGVPPYRGRG

SEQ ID NO: 47582 - protein, 108 aa, Mycobacterium szulgai
  REGION 1..108: note = tr|A0A1X2F2V2|A0A1X2F2V2_MYCSZ Uncharacterized protein OS=Mycobacterium szulgai OX=1787 GN=AWC27_22040; PE = 4 SV=1
MRLEFFPVHKPVRVTFHTAELQALCPAVAGIQPDVYQAEISYTALTHAIESKSLKLWLVAFRDRRIFAEHLAIELHDGVAAHAPAVGDVRIRLTQNVRGGIVTVIEHP

SEQ ID NO: 47583 - protein, 154 aa, Mycoplana dimorpha
  REGION 1..154: note = tr|A0A2T5B171|A0A2T5B171_MYCDI NADPH-dependent 7-cyano-7-deazaguanine reductase OS=Mycoplana dimorpha; OX = 28320 GN=queF PE=3 SV=1
MTKTDVSNLSQLGRNVGLPQSPEEAVLEKVPSGHKGADFVVRFTAPEFTSLCPMTGQPDFAHIVIDYVPDGWLVESKSLKLYLHSFRNHGAFHEDCTLDIGRRLVDLLAPKWLRIGAYWYPRGGIPIDVFWQTGAPPEGVWVPDQGVAPYRGRG

SEQ ID NO: 47584 - protein, 99 aa, unidentified
  source 1..99: note = Myxococcaceae bacterium
  REGION 1..99: note = tr|A0A4Q5ZII6|A0A4Q5ZII6_9DELT NADPH-dependent 7-cyano-7-deazaguanine reductase (Fragment); OS = Myxococcaceae bacterium OX=2484252 GN=queF PE=3 SV=1
MSSQPSKEVQTFPNPAPERDYEIAFDVPEFTCLCPLTGQPDFARFTIKYVPDQLCVELKSLKLYMWSYRNEGAFHEKVTNTIADDIVKAIQPRKLTVVG

SEQ ID NO: 47585 - protein, 121 aa, unidentified; identical to SEQ ID NO: 45450
  source 1..121: note = Myxococcaceae bacterium
  REGION 1..121: note = tr|A0A4Q5ZB19|A0A4Q5ZB19_9DELT NADPH-dependent 7-cyano-7-deazaguanine reductase OS=Myxococcaceae bacterium OX=2484252 GN=queF PE=3 SV=1

SEQ ID NO: 47586 - protein, 119 aa, unidentified
  source 1..119: note = Myxococcales bacterium
  REGION 1..119: note = tr|A0A2F0AN88|A0A2F0AN88_9DELT NADPH-dependent 7-cyano-7-deazaguanine reductase OS=Myxococcales bacterium; OX = 2026763 GN=queF PE=3 SV=1
MSTKPSRDLQSFPNPKPERDYEIHFDCPEFTCLCPATGQPDFAKIRIRYIADQRCVELKSLKLYLWSYRDEGAFHEAVTNQILDDLVAAISPRFMEIEGDFYVRGGIGTIVIARHGQRP

SEQ ID NO: 47587 - protein, 189 aa, unidentified
  source 1..189: note = Myxococcales bacterium
  REGION 1..189: note = tr|A0A2D9HBK3|A0A2D9HBK3_9DELT NADPH-dependent 7-cyano-7-deazaguanine reductase OS=Myxococcales bacterium; OX = 2026763 GN=queF PE=3 SV=1
MDAVAFPSSSLARSATKSDCSGAAGGKNGCSGLAESLTGQSGLARGGDESQEPTMMTTQPNRNLETFANPSPGRDYEVEILCPEFTCLCPKTGQPDFAIFRLRYVPSERCVELKSLKLYFWSFRDEGHFHEDVTNRILDDLVQGISPRAMELEGVFNIRGGLTTTVIARHGDETLLTPRHRLAGLNSVS

SEQ ID NO: 47588 - protein, 122 aa, Myxococcus fulvus
  REGION 1..122: note = tr|F8CFR1|F8CFR1_MYXFH NADPH-dependent 7-cyano-7-deazaguanine reductase OS=Myxococcus fulvus (strain ATCC BAA-855 / HW-1) OX=483219 GN=queF PE=3 SV=1
MPSQPSKELQTFPNPAADRDYEIAFDVPEFTCLCPLTGQPDFARFKITYVPDQTCIELKSLKLYMWAYRNEGAFHEKVTNTIADDIIKAIQPRKLTVVGDFFVRGGIGTIVTVTHDKSKQQG

SEQ ID NO: 47589 - protein, 120 aa, Myxococcus fulvus
  REGION 1..120: note = tr|A0A511SZM6|A0A511SZM6_MYXFU NADPH-dependent 7-cyano-7-deazaguanine reductase OS=Myxococcus fulvus; OX = 33 GN=queF PE=3 SV=1
MPSQPTKDLQTFPNPAPERDYEIAFDVPEFTCLCPLTGQPDFARFKITYVPDQSCIELKSLKLYMWAYRNEGAFHEKVTNTIAEDIIKAIQPRKLTVVGDWFVRGGIGTIVTVTHEQKKA

SEQ ID NO: 47590 - protein, 122 aa, unidentified
  source 1..122: note = Myxococcus hansupus
  REGION 1..122: note = tr|A0A0H4WQ07|A0A0H4WQ07_9DELT NADPH-dependent 7-cyano-7-deazaguanine reductase OS=Myxococcus hansupus; OX = 1297742 GN=queF PE=3 SV=1
MPSQPSKELQTFPNPAADRDYEITFDVPEFTCLCPLTGQPDFARFKITYVPDQSCIELKSLKLYMWAYRNEGAFHEKVTNTIADDIIKAIQPRKLTVVGDFFVRGGIGTIVTVTHDKSKQQA

SEQ ID NO: 47591 - protein, 122 aa, unidentified; identical to SEQ ID NO: 47588
  source 1..122: note = Myxococcus macrosporus
  REGION 1..122: note = tr|A0A250K2S9|A0A250K2S9_9DELT NADPH-dependent 7-cyano-7-deazaguanine reductase OS=Myxococcus macrosporus DSM 14697 OX=1189310 GN=queF PE=3 SV=1

SEQ ID NO: 47592 - protein, 118 aa, Myxococcus sp.
  REGION 1..118: note = tr|A0A540WT49|A0A540WT49_9DELT NADPH-dependent 7-cyano-7-deazaguanine reductase OS=Myxococcus sp. AM401; OX = 2590453 GN=queF PE=3 SV=1
MPSQPTKELQTFPNPAPERDYEIAFDCPEFTCLCPLTGQPDFARFKITYVPDQLCIELKSLKLYMWAYRNEGAFHEKVTNTIADDIIKAIQPRKLTLVGDWFVRGGIGTIVTVTHEKK

SEQ ID NO: 47593 - protein, 130 aa, Myxococcus stipitatus
  REGION 1..130: note = tr|L7UJN0|L7UJN0_MYXSD NADPH-dependent 7-cyano-7-deazaguanine reductase OS=Myxococcus stipitatus (strain DSM 14675 / JCM 12634 / Mx s8) OX=1278073 GN=queF; PE = 3 SV=1
MTPSPGVLDDTAMPSQPTKELQTFPNPASDRDYEIAFDCPEFTCLCPLTGQPDFARFKITYVPDQSCIELKSLKLYLWAYRNEGAFHEKVTNTIADDIIKAIQPRKLTVVGDWFVRGGIGTIVTVTHEKK

SEQ ID NO: 47594 - protein, 122 aa, Myxococcus virescens
  REGION 1..122: note = tr|A0A511H9A0|A0A511H9A0_9DELT NADPH-dependent 7-cyano-7-deazaguanine reductase OS=Myxococcus virescens; OX = 83456 GN=queF PE=3 SV=1
MPSQPSKELQTFPNPAADRDYEIVFDVPEFTCLCPLTGQPDFARFKISYVPDQSCIELKSLKLYMWAYRNEGAFHEKVTNTIADDIIKAIQPRKLTVVGDFFVRGGIGTIVTVTHDKSKQQA

SEQ ID NO: 47595 - protein, 122 aa, Myxococcus xanthus; identical to SEQ ID NO: 47594
  REGION 1..122: note = tr|A0A4Y6C1K6|A0A4Y6C1K6_MYXXA NADPH-dependent 7-cyano-7-deazaguanine reductase OS=Myxococcus xanthus; OX = 34 GN=queF PE=3 SV=1

SEQ ID NO: 47596 - protein, 134 aa, Myxococcus xanthus
  REGION 1..134: note = tr|Q1CYT2|Q1CYT2_MYXXD NADPH-dependent 7-cyano-7-deazaguanine reductase OS=Myxococcus xanthus (strain DK 1622) OX=246197 GN=queF PE=3 SV=1
MTRGVGVVDDSAMPSQPSKELQTFPNPAADRDYEIVFDVPEFTCLCPLTGQPDFARFKITYVPDQSCIELKSLKLYMWAYRNEGAFHEKVTNTIADDIIKAIQPRKLTVVGDFFVRGGIGTIVTVTHDKSKQQA

SEQ ID NO: 47597 - protein, 125 aa, Nannocystis exedens
  REGION 1..125: note = tr|A0A1I1Z413|A0A1I1Z413_9DELT NADPH-dependent 7-cyano-7-deazaguanine reductase OS=Nannocystis exedens; OX = 54 GN=queF PE=3 SV=1
MRAVSTVPSRELATFANPRPGRDYEVRFDCPEFTCLCPMTGQPDFATIRIRYRPRARCVELKSLKLYLWSFRDTGAFHEAVTNQILDDLVAVLDPEWLEVEGDFLVRGGIHTVVRARHVGAPLPG

SEQ ID NO: 47598 - protein, 160 aa, Natranaerobius trueperi
  REGION 1..160: note = tr|A0A226BXF5|A0A226BXF5_9FIRM NADPH-dependent 7-cyano-7-deazaguanine reductase OS=Natranaerobius trueperi OX=759412 GN=queF PE=3 SV=1
MSNAEDLTILGSNQTEYPSDYTTEILECFDNRHPDRDYMVTFNCPEFTTLCPKTNQPDFATIYIQYIPDKKLVESKSLKLYLFSFRNTGEFHEDSVNTILNDLKELMDPKYIEVWGKFTPRGGISIDPYVNYGRPGTEYEEMAKKRLQEHNMYPEKIDNR

SEQ ID NO: 47599 - protein, 162 aa, Natribacillus halophilus
  REGION 1..162: note = tr|A0A1G8PD28|A0A1G8PD28_9BACI NADPH-dependent 7-cyano-7-deazaguanine reductase OS=Natribacillus halophilus OX=549003 GN=queF PE=3 SV=1
MTEENHAELTQLGNEGTQYNFEYDPGLLETFDNQHPYRDYFVKFNTPEFTTLCPITGQPDFATLYISYIPDEKMVESKSLKMYLFSFRNHGDFHEDVINIIVNDLVEAMAPRYIEVWGKFTPRGGISIDPYVNYGKPESKYEQMAEQRLLYHDLYPETITNR

SEQ ID NO: 47600 - protein, 293 aa, Natronoflexus pectinivorans
  REGION 1..293: note = tr|A0A4R2GDI5|A0A4R2GDI5_9BACT 7-cyano-7-deazaguanine reductase OS=Natronoflexus pectinivorans OX=682526 GN=EV194_11544 PE=4 SV=1
MQPIEAKLLGQQIAYPQKYTPEILVAVPRSLNREIYKIDDKQLPFIGCDIWHTYELSFLTLRGLPVAGMLKLRYSSDSTFLVESKSLKLYLNSFNMERFGSDAETGVKEVVEIIKKDLSDILKTAVEVTFFSDSDEVITHFDFHGYQLLETLDEIKNVDFNTFNETPELLIPTDKLTGKITVATHLLRSNCKITNQPDWGSAFILLKAEQLPELKGLLQYLVSIRNENHFHEEICEMIYKRLWDKFSPEELMVACIYTRRGGIDICPVRANSEELFPKFLCNAKELSAKMLRQ

SEQ ID NO: 47601 - protein, 146 aa, Natronoflexus pectinivorans
  REGION 1..146: note = tr|A0A4R2GJB9|A0A4R2GJB9_9BACT NADPH-dependent 7-cyano-7-deazaguanine reductase OS=Natronoflexus pectinivorans OX=682526 GN=EV194_104123 PE=3 SV=1
MERKTLTYKDIDASILKSLPNPTGEAYEIKIKIPEFTFLGVKEQPDFADVFLTFYPKKKIIELKALKQYVYHLRNITVSYERLINVFYDHIMEVYEPERVRVVMVFNPRGGISSKLTIDSDWKVRGGEEKFGDWKNNMEDQWTVTL

SEQ ID NO: 47602 - protein, 282 aa, unidentified
  source 1..282: note = Natronospirillum operossus
  REGION 1..282: note = tr|A0A4Z0WJ88|A0A4Z0WJ88_9BACT NADPH-dependent 7-cyano-7-deazaguanine reductase QueF OS=Natronospirillum operossus OX=2562806 GN=queF PE=3 SV=1
MAEHKQGNGSPLVASALGRETDYPQQYDPEVLYPVPRQHNRDALQVRGWPWFGFDLWYAYELSWLNERGLPQVALAALTLPADSPYLIESKSLKLYLNSFNMTRFASAEAVRERMVTDLSARAGGPVQVRMHGPEAPLLQGKERLAQATLLDTLDIATEQYELDSSLLALAAGGGQHEACLYSHLLRSNCPVTGQPDWGSVVIDYAGPALDLVSVLRYLVSFRNHTGFHEDCVERIFTDLLALGDFSRLVVSAHYLRRGGLDINPCRSLQPLEPDMGRWARQ

SEQ ID NO: 47603 - protein, 129 aa, Nautilia profundicola
  REGION 1..129: note = tr|B9L738|B9L738_NAUPA NADPH-dependent 7-cyano-7-deazaguanine reductase OS=Nautilia profundicola (strain ATCC BAA-1463 / DSM 18972 / AmH) OX=598659 GN=queF; PE = 3 SV=1
MSEIRYGEKEILEFNPENMEIWPNKHKKNYLIKITLPEFMCKCPRSGYPDFATVYLEYTPDEWVVELKALKLYINSFMNRYISHEDSANEIFDTLYNKLKPKYMKITMDFNPRGNVHTVIEIDSDKIEK

SEQ ID NO: 47604 - protein, 127 aa, Nautilia sp.
  REGION 1..127: note = tr|A0A432RSN1|A0A432RSN1_9PROT NADPH-dependent 7-cyano-7-deazaguanine reductase OS=Nautilia sp.; OX = 2231114 GN=queF PE=3 SV=1
MKYGEKEILEFNVDEMEIWPNKHKKDYLIKITLPEFMAKCPRSGYPDFATIYIEYIPDKYVVELKALKLYINSFMNRYISHEDSANEIYDTIYNKIKPKKLKVTADFNPRGNVHTIIEIDSEIVNKN

SEQ ID NO: 47605 - protein, 126 aa, Nautilia sp.
  REGION 1..126: note = tr|A0A3T0L4A5|A0A3T0L4A5_9PROT NADPH-dependent 7-cyano-7-deazaguanine reductase OS=Nautilia sp. PV-1; OX = 2579250 GN=queF PE=3 SV=1
MRYGEKEILEFNPENMEIWPNKHKKNYLIKITLPEFMCKCPRSGYPDFATVYLEYTPDEWVVELKALKLFINSFMNRYISHEDSANEIFDTLYNKLKPKYMKVTMDFNPRGNVHTVIEIDSDKIEK

SEQ ID NO: 47606 - protein, 157 aa, Neisseria animalis
  REGION 1..157: note = tr|A0A3N3EG78|A0A3N3EG78_NEIAN NADPH-dependent 7-cyano-7-deazaguanine reductase OS=Neisseria animalis; OX = 492 GN=queF PE=3 SV=1
MSRNAQELEGITLLGNQNTQYHSEYAPEVLEAFDNKHPGNDYFVKFICPEFTSLCPMTGQPDFATLYIRYIPDVKMVESKSLKLYLFSFRNHGDFHEDCVNIIMKDLIALMNPKYIEVYGDFTPRGGIAIHPFANYGRKDTEFEALARKRLFEHDMQ

SEQ ID NO: 47607 - protein, 157 aa, Neisseria animaloris
  REGION 1..157: note = tr|A0A1X3CMM5|A0A1X3CMM5_9NEIS NADPH-dependent 7-cyano-7-deazaguanine reductase OS=Neisseria animaloris; OX = 326522 GN=queF PE=3 SV=1
MTRKTEELHGISLLGNQNTQYKTEYAPEVLEAFENKHPDNDYFVKFICPEFTSLCPMTGQPDFATIHIRYIPHIKMVESKSLKLYLFSFRNHGDFHEDCVNIIMKDLIKLMQPKYIEVFGEFTPRGGIAIHPFANYGKAGTEFEKLARDRLFAHDTL

SEQ ID NO: 47608 - protein, 157 aa, unidentified
  source 1..157: note = Neisseria arctica
  REGION 1..157: note = tr|A0A0J0YSQ0|A0A0J0YSQ0_9NEIS NADPH-dependent 7-cyano-7-deazaguanine reductase OS=Neisseria arctica; OX = 1470200 GN=queF PE=3 SV=1
MSRSEQELDGITLLGDNNTQYKTEYAPEVLEAFDNKHPDNEYLVKFVCPEFTSLCPMTGQPDFATIYIRYIPDVKMVESKSLKLYLFSFRNQGDFHEDCVNIIMKDLILLMQPKYIEVLGEFTPRGGIAIHPFANYGRPGTRFEKMAENRLFTYDLP

SEQ ID NO: 47609 - protein, 156 aa, Neisseria bacilliformis
  REGION 1..156: note = tr|F2BE51|F2BE51_9NEIS NADPH-dependent 7-cyano-7-deazaguanine reductase OS=Neisseria bacilliformis ATCC BAA-1200 OX=888742 GN=queF PE=3 SV=1
MTRSSDELRGLSLLGGSTQYPDRYAPEVLEAFDNKHPGNDYFVKFVCPEFTSLCPMTGQPDFATILIRYIPDAKMVESKSLKLYLFGFRNHGDFHEDCVNIIMKDLISLMNPKYIEVSGIFTPRGGIAIHPFANYGRPDTPFAQMARERLFRHDMQ

SEQ ID NO: 47610 - protein, 157 aa, Neisseria canis
  REGION 1..157: note = tr|A0A1X3CX71|A0A1X3CX71_9NEIS NADPH-dependent 7-cyano-7-deazaguanine reductase OS=Neisseria canis OX=493; GN = queF PE=3 SV=1
MTREIEELGGITLLGSRKTQYPATYTPSILEAFDNKHQGNDYFVKFICPEFTSLCPMTGQPDFATIHIRYIPDVKMVESKSLKLYLFSFRNHGDFHEDCVNIIMKDLIALMQPKYIEVFGEFTPRGGIAIHPFANYGRSGTPFEKLAQERLFKHDMQ

SEQ ID NO: 47611 - protein, 157 aa, Neisseria cinerea
  REGION 1..157: note = tr|D0W3A4|D0W3A4_NEICI NADPH-dependent 7-cyano-7-deazaguanine reductase OS=Neisseria cinerea ATCC 14685 OX=546262 GN=queF PE=3 SV=1
MSRNTEELQGISLLGNQKTQYPTGYAPEILEAFDNKHPDNDYFVKFVCPEFTSLCPMTGQPDFATIYIRYIPHIKMVESKSLKLYLFSFRNHGDFHEDCVNIIMKDLIALMDPKYIEVFGEFTPRGGIAIHPFANYGKAGTEFETLARKRLFEHDAQ

SEQ ID NO: 47612 - protein, 157 aa, Neisseria cinerea
  REGION 1..157: note = tr|A0A2X3ZD19|A0A2X3ZD19_NEICI NADPH-dependent 7-cyano-7-deazaguanine reductase OS=Neisseria cinerea; OX = 483 GN=queF PE=3 SV=1
MSRNNEELQGISLLGNQKTQYPTGYAPEILEAFDNKHPDNDYFVKFVCPEFTSLCPMTGQPDFATIYIRYIPHIKMVESKSLKLYLFSFRNHGDFHEDCVNIIMKDLIALMDPKYIEVFGEFTPRGGIAIHPFANYGKAGTEFETLARKRLFEHDAQ

SEQ ID NO: 47613 - protein, 158 aa, Neisseria dentiae
  REGION 1..158: note = tr|A0A1X3DDU4|A0A1X3DDU4_9NEIS NADPH-dependent 7-cyano-7-deazaguanine reductase OS=Neisseria dentiae; OX = 194197 GN=queF PE=3 SV=1
MTRSSDELHGITLLGSQNVSYRTEYAPEVLEAFDNKHPGNDYFVKFICPEFTSLCPMTGQPDFATIYIRYIPAEKMVESKSLKLYLFSFRNHGDFHEDCVNIIMKDLIALMQPKYIEVYGEFTPRGGIAIHPFANYGRPGTEFEQLAKTRLFAHDARA

SEQ ID NO: 47614 - protein, 158 aa, unidentified
  source 1..158: note = Neisseria dumasiana
  REGION 1..158: note = tr|A0A1X3DLZ4|A0A1X3DLZ4_9NEIS NADPH-dependent 7-cyano-7-deazaguanine reductase OS=Neisseria dumasiana; OX = 1931275 GN=queF PE=3 SV=1
MTRNTDELHGITLLGNQNVSYKTEYAPEVLEAFDNKHPGNDYFVKFVCPEFTSLCPMTGQPDFATIYIRYIPDIKMVESKSLKLYLFSFRNHGDFHEDCVNIIMKDLIALMQPKYIEVFGEFTPRGGIAIHPFANYGKPDTEFEQLAKQRLFAHDSAL

SEQ ID NO: 47615 - protein, 157 aa, Neisseria elongata
  REGION 1..157: note = tr|D4DMX8|D4DMX8_NEIEG NADPH-dependent 7-cyano-7-deazaguanine reductase OS=Neisseria elongata subsp. glycolytica ATCC 29315 OX=546263 GN=queF PE=3 SV=1
MTRSSEELRGITLLGNQHTQYKTEYAPEVLEAFDNKHPDNDYFVKFICPEFTSLCPMTGQPDFATIHIRYIPGNKMVESKSLKLYLFSFRNHGDFHEDCVNIIMKDLIGLMQPKYIEVFGEFTPRGGIAIHPFANYGQEGTEFEQLARERLFKHDMP

SEQ ID NO: 47616 - protein, 157 aa, Neisseria elongata
  REGION 1..157: note = tr|A0A378TVW9|A0A378TVW9_NEIEL NADPH-dependent 7-cyano-7-deazaguanine reductase OS=Neisseria elongata; OX = 495 GN=queF PE=3 SV=1
MTRSSEELRGITLLGNQHTQYKTEYAPEVLEAFDNKHPDNDYFVKFICPEFTSLCPMTGQPDFATIHIRYIPGEKMVESKSLKLYLFSFRNHGDFHEDCVNIIMKDLIGLMQPKYIEVFGEFTPRGGIAIHPFANYGQKETEFEQLARERLFKHDML

SEQ ID NO: 47617 - protein, 157 aa, Neisseria flavescens
  REGION 1..157: note = tr|C0EM46|C0EM46_NEIFL NADPH-dependent 7-cyano-7-deazaguanine reductase OS=Neisseria flavescens NRL30031/H210 OX=546264 GN=queF PE=3 SV=1
MSRNNEELQGISLLGNQKTQYPSEYAPEILEAFDNKHPDNDYFVKFVCPEFTSLCPMTGQPDFATIYIRYIPHIKMVESKSLKLYLFSFRNHGDFHEDCVNIIMKDLIALMDPKYIEVFGEFTPRGGIAIHPFANYGKAGTEFEALAHKRLFEHDAQ

SEQ ID NO: 47618 - protein, 157 aa, Neisseria flavescens
  REGION 1..157: note = tr|A0A154TMM7|A0A154TMM7_NEIFL NADPH-dependent 7-cyano-7-deazaguanine reductase OS=Neisseria flavescens; OX = 484 GN=queF PE=3 SV=1
MSRNNEELQGISLLGNQKTQYPSEYAPEILEAFDNKHPDNDYFVKFVCPEFTSLCPMTGQPDFATIYIRYIPHIKMVESKSLKLYLFSFRNHGDFHEDCVNIIMKDLIALMDPKYIEVFGEFTPRGGIAIHPFANYGKAGTEFEALARKRLFEHDAQ

SEQ ID NO: 47619 - protein, 157 aa, Neisseria gonorrhoeae
  REGION 1..157: note = tr|A0A0M3GZ55|A0A0M3GZ55_NEIGO NADPH-dependent 7-cyano-7-deazaguanine reductase OS=Neisseria gonorrhoeae MIA_2011_03-10 OX=1351790 GN=queF PE=3 SV=1
MSRNNEELQGISLLGNQKTQYPTGYAPEILEAFDNKHPDNDYFVKFVCPEFTSLCPMTGQPDFATIVIRYIPHIKMVESKSLKLYLFSFRNHGDFHEDCVNIIMKDLIALMDPKYIEVFGEFTPRGGIAVHPFANYGKAGTEFEALARKRLFEHDAQ

SEQ ID NO: 47620 - protein, 157 aa, Neisseria gonorrhoeae; identical to SEQ ID NO: 47619
  REGION 1..157: note = sp|Q5F678|QUEF_NEIG1 NADPH-dependent 7-cyano-7-deazaguanine reductase OS=Neisseria gonorrhoeae (strain ATCC 700825 / FA 1090) OX=242231 GN=queF PE=3 SV=1

SEQ ID NO: 47621 - protein, 157 aa, Neisseria iguanae
  REGION 1..157: note = tr|A0A2P7TYL2|A0A2P7TYL2_9NEIS NADPH-dependent 7-cyano-7-deazaguanine reductase OS=Neisseria iguanae; OX = 90242 GN=queF PE=3 SV=1
MSRNTEELNGISLLGNRHTQYPTEYTPNILEAFDNKHPDNDYFVKFICPEFTSLCPMTGQPDFATIYIRYIPHIKMVESKSLKLYLFSFRNYGDFHEDCVNTIMKDLISLMDPKYIEVYGDFTPRGGIAIHPFANYGKTHTEFESLARKRLFEHDAH

SEQ ID NO: 47622 - protein, 157 aa, Neisseria lactamica
  REGION 1..157: note = tr|E4ZB88|E4ZB88_NEIL0 NADPH-dependent 7-cyano-7-deazaguanine reductase OS=Neisseria lactamica (strain 020-06) OX=489653 GN=queF PE=3 SV=1
MSRNNEELQGISLLGNQKTRYPTEYAPEILEAFDNKHPDNDYFVKFVCPEFTSLCPMTGQPDFATIYIRYIPHIKMVESKSLKLYLFSFRNHGDFHEDCVNIIMKDLIALMDPKYIEVFGEFTPRGGIAIHPFANYGKAGTEFETLARKRLFEHDAK

SEQ ID NO: 47623 - protein, 157 aa, Neisseria lactamica
  REGION 1..157: note = tr|D0WCI2|D0WCI2_NEILA NADPH-dependent 7-cyano-7-deazaguanine reductase OS=Neisseria lactamica ATCC 23970 OX=546265 GN=queF PE=3 SV=1
MSRNTEELQGISLLGNQKTRYPSEYAPEILEAFGNKHPDNDYFVKFVCPEFTSLCPMTGQPDFATIYIRYIPHIKMVESKSLKLYLFSFRNHGDFHEDCVNIIMKDLIALMDPKYIEVFGEFTPRGGIAIHPFANYGKAGTEFETLARKRLFEHDAQ

SEQ ID NO: 47624 - protein, 157 aa, Neisseria macacae; identical to SEQ ID NO: 47566
  REGION 1..157: note = tr|F9F015|F9F015_9NEIS NADPH-dependent 7-cyano-7-deazaguanine reductase OS=Neisseria macacae ATCC 33926 OX=997348 GN=queF PE=3 SV=1

SEQ ID NO: 47625 - protein, 157 aa, Neisseria meningitidis
  REGION 1..157: note = tr|A0A1V3SMX5|A0A1V3SMX5_NEIME NADPH-dependent 7-cyano-7-deazaguanine reductase OS=Neisseria meningitidis; OX = 487 GN=queF PE=3 SV=1
MSRNTEELQGISLLGNQKTQYPIGYAPEILEAFDNKHPDNDYFVKFVCPEFTSLCPMTGQPDFATIVIRYIPHIKMVESKSLKLYLFSFRNHGDFHEDCVNIIMKDLIALMDPKYIEVFGEFTPRGGIAIHPFANYGKAGTEFEALARKRLFEHDAQ

SEQ ID NO: 47626 - protein, 157 aa, Neisseria meningitidis
  REGION 1..157: note = sp|A1KVW5|QUEF_NEIMF NADPH-dependent 7-cyano-7-deazaguanine reductase OS=Neisseria meningitidis serogroup C / serotype 2a (strain ATCC 700532 / DSM 15464 / FAM18) OX =272831 GN=queF PE=3 SV=1
MSRNTEELQGISLLGNQKTRYPTGYAPEILEAFDNKHPDNDYFVKFVCPEFTSLCPMTGQPDFATIYIRYIPHIKMVESKSLKLYLFSFRNHGDFHEDCVNIIMKDLIALMDPKYIEVFGEFTPRGGIAIHPFANYGKAGTEFETLARKRLFEHDSQ

SEQ ID NO: 47627 - protein, 157 aa, Neisseria mucosa
  REGION 1..157: note = tr|A0A2R4AYJ4|A0A2R4AYJ4_NEIMU NADPH-dependent 7-cyano-7-deazaguanine reductase OS=Neisseria mucosa; OX = 488 GN=queF PE=3 SV=1
MSRNTEELQGISLLGNQKTQYPTGYAPEILEAFDNKHPDNDYFVKFVCPEFTSLCPMTGQPDFATIYIRYIPHIKMVESKSLKLYLFSFRNHGDFHEDCVNIIMKDLIALMDPKYIEVFGEFTPRGGIAIHPFANYGKAGTEFEALARKRLFEHDSQ

SEQ ID NO: 47628 - protein, 157 aa, Neisseria mucosa
  REGION 1..157: note = tr|D2ZYQ6|D2ZYQ6_NEIMU NADPH-dependent 7-cyano-7-deazaguanine reductase OS=Neisseria mucosa ATCC 25996 OX=546266 GN=queF PE=3 SV=1
MSRNTEELQGISLLGNQKTQYPTGYAPEILEAFDNKHPDNDYFVKFVCPEFTSLCPMTGQPDFATIYIRYIPHIKMVESKSLKLYLFSFRNHGDFHEDCVNIIMKDLIALMDPKYIEVFGAFTPRGGIAIHPFANYGKAGTEFEALARKRLFEHDSQ

SEQ ID NO: 47629 - protein, 157 aa, Neisseria perflava; identical to SEQ ID NO: 47618
  REGION 1..157: note = tr|A0A2I1Y3K8|A0A2I1Y3K8_NEIPE NADPH-dependent 7-cyano-7-deazaguanine reductase OS=Neisseria perflava; OX = 33053 GN=queF PE=3 SV=1

SEQ ID NO: 47630 - protein, 157 aa, Neisseria polysaccharea
  REGION 1..157: note = tr|E2PCA6|E2PCA6_NEIPO NADPH-dependent 7-cyano-7-deazaguanine reductase OS=Neisseria polysaccharea ATCC 43768 OX=546267 GN=queF PE=3 SV=1
MSRNTEELQGISLLGNQKTQYPIGYAPEILEAFDNKHPDNDYFVKFVCPEFTSLCPMTGQPDFATIYIRYIPHIKMVESKSLKLYLFSFRNHGDFHEDCVNIIMKDLIALMDPKYIEVFGEFTPRGGIAIHPFANYGKAGTEFETLARKRLFEHDAQ

SEQ ID NO: 47631 - protein, 156 aa, Neisseria shayeganii
  REGION 1..156: note = tr|G4CJM5|G4CJM5_9NEIS NADPH-dependent 7-cyano-7-deazaguanine reductase OS=Neisseria shayeganii 871 OX=1032488 GN=queF PE=3 SV=1
MRTSNELDGLTLLGKQQTVYRSDYAPEVLEAFDNKHPGNDYFVKFICPEFTSLCPMTGQPDFATIVIRYIPDVKMVESKSLKLYLFSFRNHGDFHEDCVNIIMKDLIALMDPKYIEVFGDFTPRGGIAIHPFANYGRPGTPFVDMARERLLRHDMQ

SEQ ID NO: 47632 - protein, 82 aa, Neisseria sicca
  REGION 1..82: note = tr|C6M3Q2|C6M3Q2_NEISI NADPH-dependent 7-cyano-7-deazaguanine reductase OS=Neisseria sicca ATCC 29256 OX=547045 GN=queF PE=3 SV=1
MVESKSLKLYLFSFRNHGDFHEDCVNIIMKDLIALMDPKYIEVFGEFTPRGGIAIHPFANYGKAGTEFEALARKRLFEHDSQ

SEQ ID NO: 47633 - protein, 157 aa, Neisseria sicca
  REGION 1..157: note = tr|A0A2I1X9L5|A0A2I1X9L5_NEISI NADPH-dependent 7-cyano-7-deazaguanine reductase OS=Neisseria sicca OX=490; GN = queF PE=3 SV=1
MSRNTEELQGISLLGNQKTQYPTGYAPEILEAFDNKHPDNDYFVKFVCPEFTSLCPMTGQPDFATIYIRYIPHIKMVESKSLKLYLFSFRNHGDFHEDCVNIIMKDLIALMDPQYIEVFGEFTPRGGIAIHPFANYGKAGTEFEALARKRLFEHDSQ

SEQ ID NO: 47634 - protein, 157 aa, Neisseria sp.; identical to SEQ ID NO: 47618
  REGION 1..157: note = tr|A0A1S1CVL3|A0A1S1CVL3_9NEIS NADPH-dependent 7-cyano-7-deazaguanine reductase OS=Neisseria sp. HMSC064D07 OX=1715087 GN=queF PE=3 SV=1

SEQ ID NO: 47635 - protein, 157 aa, Neisseria sp.
  REGION 1..157: note = tr|A0A2H9X001|A0A2H9X001_9NEIS NADPH-dependent 7-cyano-7-deazaguanine reductase OS=Neisseria sp. N95_16; OX = 2024408 GN=queF PE=3 SV=1
MSRNTEELNGISLLGNQHTQYPTEYDPNILEAFDNKHPGNDYFVKFICPEFTSLCPMTGQPDFATIYIRYIPHIKMVESKSLKLYLFSFRNHGDFHEDCVNTIMKDLIALMDPKYIEVYGDFTPRGGIAIHPFANYGKADTEFENLARKRLFEHDAH

SEQ ID NO: 47636 - protein, 157 aa, Neisseria subflava; identical to SEQ ID NO: 47618
  REGION 1..157: note = tr|A0A4D7WE88|A0A4D7WE88_NEISU NADPH-dependent 7-cyano-7-deazaguanine reductase OS=Neisseria subflava; OX = 28449 GN=queF PE=3 SV=1

SEQ ID NO: 47637 - protein, 82 aa, Neisseria subflava
  REGION 1..82: note = tr|D3A1E4|D3A1E4_NEISU NADPH-dependent 7-cyano-7-deazaguanine reductase OS=Neisseria subflava NJ9703 OX=546268 GN=queF PE=3 SV=1
MVESKSLKLYLFSFRNHGDFHEDCVNIIMKDLIALMDPKYIEVFGEFTPRGGIAIHPFANYGKAGTEFEALARKRLFEHDAQ

SEQ ID NO: 47638 - protein, 157 aa, Neisseria wadsworthii
  REGION 1..157: note = tr|G4CTL6|G4CTL6_9NEIS NADPH-dependent 7-cyano-7-deazaguanine reductase OS=Neisseria wadsworthii 9715 OX=1030841 GN=queF PE=3 SV=1
MTREIEELGGITLLGSQKTQYPSTYTPAILEAFDNKHQNNDYFVKFICPEFTSLCPMTGQPDFATIHIRYIPDIKMVESKSLKLYLFSFRNHGDFHEDCVNIIMKDLIALMQPKYIEVFGEFTPRGGIAIHPFANYGRPNTPFEKLAQERLFKHDMQ

SEQ ID NO: 47639 - protein, 157 aa, Neisseria weaveri
  REGION 1..157: note = tr|A0A448VLR2|A0A448VLR2_9NEIS NADPH-dependent 7-cyano-7-deazaguanine reductase OS=Neisseria weaveri; OX = 28091 GN=queF PE=3 SV=1
MTRNTEELSGLTLLGNQNTLYKTSYAPEVLETFENKHLDNDYFVKFICPEFTSLCPMTGQPDFATIHIRYIPDIKMVESKSLKLYLFSFRNHGDFHEDCVNIIMKDLIRIMQPKYIEVFGEFTPRGGIAIHPFANYGKPETGFEALARERLFAHDMQ

SEQ ID NO: 47640 - protein, 158 aa, unidentified
  source 1..158: note = Neisseria zalophi
  REGION 1..158: note = tr|A0A5J6PYK1|A0A5J6PYK1_9NEIS NADPH-dependent 7-cyano-7-deazaguanine reductase QueF OS=Neisseria zalophi; OX = 640030 GN=queF PE=4 SV=1
MTRSTQELQDITLLGNQNVVYQTEYAPEILEAFDNKHPDNDYFVTFTCPEFTSLCPITGQPDFATIYIRYIPHIKMVESKSLKLYLFSFRNHGDFHEDCVNIIMKDLIKLMQPKYIEVFGEFTPRGGIAIHPFANYGKPDSEYEQLAKTRLFAHEMRS

SEQ ID NO: 47641 - protein, 158 aa, Neisseria zoodegmatis
  REGION 1..158: note = tr|A0A378X6U2|A0A378X6U2_9NEIS NADPH-dependent 7-cyano-7-deazaguanine reductase OS=Neisseria zoodegmatis; OX = 326523 GN=queF PE=3 SV=1
MTRNTEELHGITLLGNQNVSYKTEYAPEVLEAFDNKHPGNDYFVKFICPEFTSLCPMTGQPDFATIYIRYIPDIKMVESKSLKLYLFSFRNHGDFHEDCVNIIMKDLIKLMQPKYIEVFGEFTPRGGIAIHPFANYGKPNTEFEQLAKKRLFSHDSSL

SEQ ID NO: 47642 - protein, 158 aa, Neisseria zoodegmatis
  REGION 1..158: note = tr|A0A1X3CSV2|A0A1X3CSV2_9NEIS NADPH-dependent 7-cyano-7-deazaguanine reductase OS=Neisseria zoodegmatis; OX = 326523 GN=queF PE=3 SV=1
MTRNTEELHGITLLGNQNVSYKTEYAPEVLEAFDNKHLGNDYFVKFICPEFTSLCPMTGQPDFATIYIRYIPDIKMVESKSLKLYLFSFRNHGDFHEDCVNIIMKDLIKLMQPKYIEVFGEFTPRGGIAIHPFANYGKPNTEFEQLAKKRLFSHDSSL

SEQ ID NO: 47643 - protein, 273 aa, unidentified
  source 1..273: note = Neisseriaceae bacterium
  REGION 1..273: note = tr|A0A2I7N300|A0A2I7N300_9NEIS NADPH-dependent 7-cyano-7-deazaguanine reductase OS=Neisseriaceae bacterium DSM 100970 OX=2052837 GN=queF PE=3 SV=1
MNPELSQLGRKSEYRAHYAPELLFPIPRKIKRDEIGIDEANLPFHGIDIWNHYEVSWLNLKGKPEVAIATIIVPAASPNIIESKSMKLYFNSFNNDKFVSSKDVEDIMSRDLTLAAGAEVTVDLHPLESGLFTIHQPSGLLIDTLDVAIDEYIVNPSLLKVKNDEIVTEKLYSNLLKSNCLVTNQPDWATVVIEYTGKAIDHASLLKYIISFRNHNEFHEQCVERIFSDIMKHCLVNELTVSARFTRRGGLDINPLRTTKADFTTDNLRLIRQ

SEQ ID NO: 47644 - protein, 273 aa, unidentified
  source 1..273: note = Neisseriaceae bacterium
  REGION 1..273: note = tr|A0A431ITS8|A0A431ITS8_9NEIS NADPH-dependent 7-cyano-7-deazaguanine reductase OS=Neisseriaceae bacterium OX=2014784 GN=queF PE=3 SV=1
MNIQNSALGKKSAYISEYAPELLFPIARKIKRDEIGIDENNLPFYGVDIWNHYEVSWLNFKGKPMVACAVLYIPANSSNIIESKSMKLYFNSFNNHKFATKQELAEIITKDLSQAANVAVRVELYELNHKGFAISEPAGECLDDLDITITDYTVNPQLLGANPNKQVKEKLYSNLLKSNCLVTYQPDWATLLIEYRGAQIDREALLRYIISFRNHNEFHEQCVERIFNDISKFCAPDELIVMARFTRRGGLDINPIRASQPLSNYPNLRLIRQ

SEQ ID NO: 47645 - protein, 273 aa, unidentified
  source 1..273: note = Neisseriales bacterium
  REGION 1..273: note = tr|A0A5C8B181|A0A5C8B181_9NEIS NADPH-dependent 7-cyano-7-deazaguanine reductase OS=Neisseriales bacterium; OX = 2053582 GN=queF PE=3 SV=1
MNPELSQLGKKSEYRAHYAPELLFPIPRKIKRDEIGIDEANLPFHGIDIWNHYEVSWLNLKGKPEVAIATIVVPATSLNIIESKSVKLYFNSFNNDRFASSKDVEDIMSRDLTLAAGAEVTVDLHPLESGLFAIHQPDGVLIDTLDVAIDEYIVNPLLLKVKNDEIITEKLYSNLLKSNCLVTNQPDWATVAIEYTGRAIDHASLLKYIISFRNHNEFHEQCVERIFSDIMKYCVVNELTVSARFTRRGGLDINPIRTTKADLTTDNLRLIRQ

SEQ ID NO: 47646 - protein, 156 aa, Neoasaia chiangmaiensis
  REGION 1..156: note = tr|A0A1U9KRJ1|A0A1U9KRJ1_9PROT NADPH-dependent 7-cyano-7-deazaguanine reductase OS=Neoasaia chiangmaiensis OX=320497 GN=queF PE=3 SV=1
MTTAQNDLDALRQLGQHTAQPQSPEEATLDRVPSPHQGRQYVVRFTAPEFTSLCPVTGQPDFAHIVIDYIPDQWIVESKSLKLYLTSFRNHGAFHEDCSISIATRLVEELSPVWLRIGAYWYPRGGIPIDVFWQTGAPPDGVWIPTQDVPGYRGRG

SEQ ID NO: 47647 - protein, 286 aa, Neochlamydia sp.
  REGION 1..286: note = tr|A0A0C1K964|A0A0C1K964_9BACT NADPH-dependent 7-cyano-7-deazaguanine reductase OS=Neochlamydia sp. EPS4; OX = 1478175 GN=queF PE=3 SV=1
MKLYFIGKVAFMKDETLINSPLGKQTFYDTVYDPSLLCPLPRDKQRQAIGIADVNLPFQGYDVWNAYELSWLNVKGKPLLAIGEFFFPCQSPYIVESKSFKLYLNSFHQTTFANLEDVQAILEKDLAKCVGQPVKVNLIQSKDYASLCLKNLPGFCLDNLDIETNLYAVDPSILEHAAELVEEEFYSNLLKSNCPVTKQPDWASLYIHYIGPKINKESLLKYIISFRSHYEFGEHCIERIFMDLQKYCRCHKLTIYGRYTRRGGIDLNPFRSNFESFMRNIRDYRQ

SEQ ID NO: 47648 - protein, 275 aa, Neochlamydia sp.
  REGION 1..275: note = tr|A0A3Q9XVC1|A0A3Q9XVC1_9BACT NADPH-dependent 7-cyano-7-deazaguanine reductase OS=Neochlamydia sp. S13; OX = 1353976 GN=NCS13_1_1769 PE=3 SV=1
MKDETLINSPLGKQTFYDTVYDPSLLCPLPRDKQRQAIGIADVNLPFQGYDVWNAYELSWLNVKGKPLLAIGEFFFPCQSPYIVESKSFKLYLNSFHQTTFANLEDVQAILEKDLAKCVGQPVKVNLIQSKDYASLCLRNLPGFCLDNLDIETNLYAVDPSILGHAAELVEEEFYSNLLKSNCPVTKQPDWASLYIHYIGPKINKESLLKYIISFRSHYEFGEHCIERIFMDLQKYCRCHKLTIYGRYTRRGGIDLNPFRSNFESFMRNIRDYRQ

SEQ ID NO: 47649 - protein, 164 aa, Neokomagataea sp.
  REGION 1..164: note = tr|A0A506ULK0|A0A506ULK0_9PROT NADPH-dependent 7-cyano-7-deazaguanine reductase OS=Neokomagataea sp. Jb2; OX = 2558904 GN=queF PE=3 SV=1
MSSSSAPPSGPSAPGTDALSQLGRQSTQPASPEEAVLERVPAPHPDKRYVVRFTAPEFTSLCPVTGQPDFAHLVIDYIPRNWIVESKSLKLYLTSFRNHGAFHEDCSVSIATRLVELLDPQWLRIGAYWYPRGGMPIDVFWQTGPAPQDVWVPPQDVPGYRGRG

SEQ ID NO: 47650 - protein, 159 aa, Neokomagataea tanensis
  REGION 1..159: note = tr|A0A4Y6V4E0|A0A4Y6V4E0_9PROT NADPH-dependent 7-cyano-7-deazaguanine reductase OS=Neokomagataea tanensis; OX = 661191 GN=queF PE=3 SV=1
MSHPGPSAPGTDALSQLGQHVVPAASPEEAILERVPAPHKGRQYVVRFTAPEFTSLCPVTGQPDFAHIVIDYIPRDWIVESKSLKLYLTSFRNHGAFHEDCSVTIAERLVELLDPEWLRIGAYWYPRGGIPIDVFWQSGTPPESVWIPPQDVPGYRGRG

SEQ ID NO: 47651 - protein, 154 aa, unidentified
  source 1..154: note = Neorhizobium alkalisoli
  REGION 1..154: note = tr|A0A561QW64|A0A561QW64_9RHIZ NADPH-dependent 7-cyano-7-deazaguanine reductase OS=Neorhizobium alkalisoli OX=528178 GN=queF PE=3 SV=1
MTMTDVSGLSQLGQQVEAPTSPETAVLEKVPNGNQGTDYVVRFTAPEFTSLCPMTGQPDFAHIVIDYIPDGFLVESKSLKLFLHSFRNHGAFHEDCSVYIAKRIVELLNPKWLRIGAYWYPRGGIPIDVFWQTGEAPKGVWLPEQGVATYRGRG

SEQ ID NO: 47652 - protein, 154 aa, unidentified
  source 1..154: note = Neorhizobium galegae
  REGION 1..154: note = tr|A0A0T7GHE4|A0A0T7GHE4_RHIGA NADPH-dependent 7-cyano-7-deazaguanine reductase OS=Neorhizobium galegae bv. officinalis OX=323656 GN=queF PE=3 SV=1
MTMTDVTGLSQLGSQVEAPQSPETAVLEKVPNGNQGTDYVVRFTAPEFTSLCPMTGQPDFAHIVIDYIPDGFLVESKSLKLFLHSFRSHGAFHEDCSIYIAKRIVDLLAPKWLRIGAYWYPRGGIPIDVFWQTGEAPAGVWLPEQGVATYRGRG

SEQ ID NO: 47653 - protein, 154 aa, unidentified
  source 1..154: note = Neorhizobium galegae
  REGION 1..154: note = tr|A0A0T7FHI4|A0A0T7FHI4_RHIGA NADPH-dependent 7-cyano-7-deazaguanine reductase OS=Neorhizobium galegae bv. officinalis OX=323656 GN=queF PE=3 SV=1
MTMTDVTGLSQLGSQVEAPQSPETAVLERVPNGNQGTDYVVRFTAPEFTSLCPMTGQPDFAHIVIDYIPDGFLVESKSLKLFLHSFRNHGAFHEDCSIYIAKRIVDLLAPKWLRIGAYWYPRGGIPIDVFWQTGEAPAGVWLPEQGVATYRGRG

SEQ ID NO: 47654 - protein, 154 aa, unidentified
  source 1..154: note = Neorhizobium sp.
  REGION 1..154: note = tr|A0A386E0H4|A0A386E0H4_9RHIZ NADPH-dependent 7-cyano-7-deazaguanine reductase OS=Neorhizobium sp. NCHU2750 OX=1825976 GN=queF PE=3 SV=1
MTMTDVSGLSQLGKQVETPNSPEEAVMERVPNSNQGMDYVTRFTAPEFTSLCPMTGQPDFAHIVIDYIPDAWLVESKSLKLFLTSFRNHGAFHEDCSVYIAKRLVDLLQPKWLRIGAYWYPRGGIPIDVFWQTGDVPAGVWLPDQGVPTYRGRG

SEQ ID NO: 47655 - protein, 154 aa, unidentified
  source 1..154: note = Neorhizobium sp.
  REGION 1..154: note = tr|A0A4R3XPI3|A0A4R3XPI3_9RHIZ NADPH-dependent 7-cyano-7-deazaguanine reductase OS=Neorhizobium sp. S3-V5DH OX=2485166 GN=queF PE=3 SV=1
MTMTDVSGLSQLGANVSTPQSPEAAVLEKVPNGNQGTDYVVRFTAPEFTSLCPMTGQPDFAHIVIDYIPDGFLVESKSLKLFLHSFRNHGAFHEDCSIYIARRIVDLLQPKWLRIGAYWYPRGGIPIDVFWQTGEAPAGVWLPEQGVPTYRGRG

SEQ ID NO: 47656 - protein, 274 aa, Neptuniibacter sp.
  REGION 1..274: note = tr|A0A136H8H7|A0A136H8H7_9GAMM NADPH-dependent 7-cyano-7-deazaguanine reductase OS=Neptuniibacter sp. Phe_28 OX=1795871 GN=queF PE=3 SV=1
MDTNDVVTQSPLGKDTEYINSYDPSLLYPIARDTNWQAQGIDRETLPFKGVDIWNAYELSWINHRGKPEVRLAEFRVFADSKNIIESKSFKLYLNSFNLSKFASQKEVEALLIKDLSEAAEGRVTVRIYHPDQAPEFGQFTGFCIDNQDVDITAYTPAPDLLFTGEDEVEEVLYSHLLKSNCPVTGQPDWATLGISYSGKEIDREGLLKYIISYREHGDFHEQCVENIFMHIWERCKPDSLNVYARYVRRGGLDINPFRSSEMDDIDNLRLSRQ

SEQ ID NO: 47657 - protein, 274 aa, Neptunomonas antarctica
  REGION 1..274: note = tr|A0A1N7M6H5|A0A1N7M6H5_9GAMM NADPH-dependent 7-cyano-7-deazaguanine reductase OS=Neptunomonas antarctica OX=619304 GN=queF PE=3 SV=1
MSEQKVLDQSPLGSDTAYVNQYDPGLLFPIQRDLNWQKRGVEREDLPFQGTDIWNGYEVSWINLKGKPVVRIAAFFIPASSKNIIESKSFKLYLNSFNLSQFESEDSVKQLMQKDLSDIAGGEVRVEFYHPDRMPDLSRFDGECLDELDISVEHYQPEPGLLQVGERQVEQALYSHLLKSNCPVTGQPDWASIQITYSGLEINQEGLLKYLISYREHGDFHEQCVENIFMDIWQRCHPESLTVYARYVRRGGLDINPIRSSEPVTAINFRLSRQ

SEQ ID NO: 47658 - protein, 274 aa, unidentified
  source 1..274: note = Neptunomonas qingdaonensis
  REGION 1..274: note = tr|A0A1I2NVP9|A0A1I2NVP9_9GAMM NADPH-dependent 7-cyano-7-deazaguanine reductase OS=Neptunomonas qingdaonensis OX=1045558 GN=queF PE=3 SV=1
MTEQKVLDQSPLGSDTAYVNQYSPQLLFPIQRDLNWHKRGIERADLPFYGEDLWNGYEISWLNLKGKPVVRIAAFVIPADSRNIIESKSFKLYLNSFNLSRFENEEAVIALMQNDLSLAAGGDVRVEFFHPDGMPELGRFEGKCLDELDISVTHYQPEISLLSTGERHVDEMLYSHLLKSNCPVTGQPDWASIQISYVGKEINQEGLLEYLISYREHGDFHEQCVENIFMDIWTHCQPESLIVYARYVRRGGLDINPLRSSKAIAAVNLRLSRQ

SEQ ID NO: 47659 - protein, 276 aa, Neptunomonas sp.
  REGION 1..276: note = tr|A0A437QC45|A0A437QC45_9GAMM NADPH-dependent 7-cyano-7-deazaguanine reductase OS=Neptunomonas sp. HPM-16 OX=1815562 GN=queF PE=3 SV=1
MNEEQTLEASPLGSDTAYVNEYDASLLFPIARQLNWQTRGIERGALPIKGEDIWNGYEVSWLNTKGKPVVRVARFHIPASSHNIIESKSFKLYLNSFNLSRFETEQLVIDAMTRDLSSAAGAPVAVFLQHPDALEEIKPLEGVCIDELDIEVEHYAPDASLLTTTADQPVEETLYSHLLKSNCPVTGQPDWASIVVAYKGKPISREGLLQYVISYREHGDFHEQCVENIFMDIWERCEPEKLSVYARYLRRGGLDINPFRSSHLESAPHNRRLGRQ

SEQ ID NO: 47660 - protein, 153 aa, Nesiotobacter exalbescens
  REGION 1..153: note = tr|A0A1U7JJ42|A0A1U7JJ42_9RHOB NADPH-dependent 7-cyano-7-deazaguanine reductase OS=Nesiotobacter exalbescens OX=197461 GN=queF PE=3 SV=1
MSHTEQGLSQLGAASALPQCPDEAVLERVPNPHPDTNYVTRFTMPEFTSICPVTSQPDFAHLVLDFVADKWLVESKSLKLYLLSFRNHGAFHEDCTVAIGKRIVALIEPRWLRIGGYWYPRGGMPIDVFWQHGEVPSGTWVPDQGVQPYRGRG

SEQ ID NO: 47661 - protein, 137 aa, unidentified; identical to SEQ ID NO: 43476
  source 1..137: note = Nevskiales bacterium
  REGION 1..137: note = tr|A0A2E9ZUK0|A0A2E9ZUK0_9GAMM NADPH-dependent 7-cyano-7-deazaguanine reductase OS=Nevskiales bacterium; OX = 2026766 GN=queF PE=3 SV=1

SEQ ID NO: 47662 - protein, 150 aa, Niastella koreensis
  REGION 1..150: note = tr|G8TK85|G8TK85_NIAKG NADPH-dependent 7-cyano-7-deazaguanine reductase OS=Niastella koreensis (strain DSM 17620 / KACC 11465 / GR20-10) OX=700598; GN = Niako_0118 PE=3SV=1
MSEQITREPVKTYKDIDRSILKPIPNPTDQAYEIKIKIPEFTFLGVKEQPDFAVIYCTFYPGKKIIELKSLKHYVFQLRNIVVSYERLINIIYDDLVAVYEPSRIRLVMVCNPRGGISSKLTIDSDWKIRGGKEQFNDWQIVEDEWSVEM

SEQ ID NO: 47663 - protein, 146 aa, Niastella populi
  REGION 1..146: note = tr|A0A1V9G8J1|A0A1V9G8J1_9BACT NADPH-dependent 7-cyano-7-deazaguanine reductase OS=Niastella populi; OX = 550983 GN=A4R26_13070 PE=3 SV=1
MTREPVKTYRDIDRSILKPIPNPSEQAYEIKIKIPEFTFLGVKEQPDFAVIYCTFYPGKKIIELKSLKQYVFQLRNIVVSYERLINIIYDDLVAVYEPARLRLVMICNPRGGISSKLTIDSDWKIRGGKEQFNDWQIVEDEWSVEM

SEQ ID NO: 47664 - protein, 150 aa, Niastella sp.
  REGION 1..150: note = tr|A0A4R2W095|A0A4R2W095_9BACT NADPH-dependent 7-cyano-7-deazaguanine reductase OS=Niastella sp. CF465; OX = 2135684 GN=C8K05_105428 PE=3 SV=1
MSEQITREAVKTYKDIDRSILKPIPNPSDQAYEIKIKIPEFTFLGVKEQPDFAVIYCTFYPGKKIIELKSLKQYVFQLRNIVVSYERLINIIYDDLVAIYEPARLRLVMICNPRGGISSKLTIDSDWKIRGGKEQFNDWQIVEDEWSVEM

SEQ ID NO: 47665 - protein, 150 aa, Niastella sp.
  REGION 1..150: note = tr|A0A4S8HYV2|A0A4S8HYV2_9BACT NADPH-dependent 7-cyano-7-deazaguanine reductase OS=Niastella sp. HX-2-15; OX = 2570359 GN=queF PE=3 SV=1
MSEQIVKESVKTYKDIDRRILKPIPNPTDQAYEIKIKIPEFTFLGVKEQPDFAVIYCTFYPGKKIIELKSLKQYVFQLRNIVVSYERLINIIYDDLCAVYEPSRLRLVMICNPRGGISSKLTIDSDWKIRGGKEQFNDWQIVEDEWSVEM

SEQ ID NO: 47666 - protein, 150 aa, unidentified
  source 1..150: note = Niastella vici
  REGION 1..150: note = tr|A0A1V9FZ19|A0A1V9FZ19_9BACT NADPH-dependent 7-cyano-7-deazaguanine reductase OS=Niastella vici; OX = 1703345 GN=A3860_24210 PE=3 SV=1
MSEQLTREPVKTYKDIDRSILKPIPNPTDQAYEIKIKIPEFTFLGVKEQPDFAVIYCTFYPGKKIIELKSLKHYVFQLRNIVVSYERLINIIYDDLCAVYEPDRLRLVMVCNPRGGISSKLTIDSDWKIRGGKEQFNDWQIVEDEWSVEM

SEQ ID NO: 47667 - protein, 150 aa, Niastella yeongjuensis
  REGION 1..150: note = tr|A0A1V9FC73|A0A1V9FC73_9BACT NADPH-dependent 7-cyano-7-deazaguanine reductase OS=Niastella yeongjuensis; OX = 354355 GN=A4H97_20630 PE=3 SV=1
MSEQISREPVKTYKDIDRSILKPIPNPTDQAYEIKIKIPEFTFLGVKEQPDFAVIYCTFYPGKKIIELKSLKHYVFQLRNIVVSYERLINIIYDDLVAVYEPSRLRLVMVCNPRGGISSKLTIDSDWKIRGGKEQFNDWQIVEDEWSVEM

SEQ ID NO: 47668 - protein, 122 aa, unidentified
  source 1..122: note = Nibricoccus aquaticus
  REGION 1..122: note = tr|A0A290QK02|A0A290QK02_9BACT NADPH-dependent 7-cyano-7-deazaguanine reductase OS=Nibricoccus aquaticus; OX = 2576891 GN=queF PE=3 SV=1
MSDAKLLETFPNPAPHRDFLIDHTHHEFTSVCPMTGHPDFADITVRYVPDKTCVELKSLKLYFHAFRNQGIFFEAVTNKICDDLGKALKPRSLTIISKWKARGGFTSVVTAEWSGKNAKMTR

SEQ ID NO: 47669 - protein, 277 aa, Nicoletella semolina
  REGION 1..277: note = tr|A0A4R2NAF4|A0A4R2NAF4_9PAST NADPH-dependent 7-cyano-7-deazaguanine reductase OS=Nicoletella semolina; OX = 271160 GN=queF PE=3 SV=1
MYDHQSLSTLKLGKKTEYKHAYDASLLQSVPRQLNRTDLGIMENPPFVGADLWTLYELSWLNMRGVPQVAIADVVINADSQNLIESKSFKLYLNSFNQTRFASWNDVQTTLQHDLQSCASGEISVKLCKLADYTNQPITTLEGELIDEQDIEINDYQFSVEHLAQVATGEMVEEKLVSHLLKSNCLITNQPDWGSVQIHYVGKRLDREKLLRYLVSFREHNEFHEQCVERIFCDLMRFAKPEKLTVYARYTRRGGLDINPFRSNFEPLPANLRLARQ

SEQ ID NO: 47670 - protein, 157 aa, Nisaea sp.; identical to SEQ ID NO: 45035
  REGION 1..157: note = tr|A0A2D7JNZ8|A0A2D7JNZ8_9PROT NADPH-dependent 7-cyano-7-deazaguanine reductase OS=Nisaea sp. OX=2024842; GN = queF PE=3 SV=1

SEQ ID NO: 47671 - protein, 156 aa, Nisaea sp.
  REGION 1..156: note = tr|A0A2D7Z484|A0A2D7Z484_9PROT NADPH-dependent 7-cyano-7-deazaguanine reductase OS=Nisaea sp. OX=2024842; GN = queF PE=3 SV=1
  VARIANT 61: note = Xaa can be any naturally occurring amino acid
MTADTDRLSTLTQLGAAADMPDNPEAAVLERVANGQSGVDYVVRFTCPEFTSLCPMTGQPXFAHLVIDYVPEDWLVESKSLKLFLGAFRNHGAFHEDCTVMIARRLVDTLAPKWLRIGGYWYPRGGIPIDVFYQTGPVPADVWLPDQGVPPYRGRG

SEQ ID NO: 47672 - protein, 281 aa, unidentified
  source 1..281: note = Nissabacter sp.
  REGION 1..281: note = tr|A0A4P8SKG3|A0A4P8SKG3_9GAMM NADPH-dependent 7-cyano-7-deazaguanine reductase OS=Nissabacter sp. SGAir0207 OX=2126321 GN=queF PE=3 SV=1
MSSYQEHQALQQLTLGKPTAYQDHYDAALLQAVPRSMNREPLGLYPDNLPFHGADIWTLYELSWLNANGLPQVAVGEVRLDASSQNLVESKSFKLYLNSFNQTHFASWEEVQATLQRDLSRCADGEVTVELFRLSEVEGQPISRFHGECIDEQDIRIDSYEFSTDFLEQARGGAPVEETLVSHVLKSNCLITHQPDWGSVQIHYRGNQIDREALLRYLVSFRHHNEFHEQCVERIFNDLMRFFQPEKLAVYARYTRRGGLDINPWRANFDFTPANGRLVRQ

SEQ ID NO: 47673 - protein, 125 aa, Nitratifractor salsuginis
  REGION 1..125: note = tr|E6X2U0|E6X2U0_NITSE NADPH-dependent 7-cyano-7-deazaguanine reductase OS=Nitratifractor salsuginis (strain DSM 16511 / JCM 12458 / E9I37-1); OX = 749222 GN=queF PE=3SV=1
MKYGEKEIKDFDINRAENFWSNEHEKEYTIDIELPEFMCRCPRSGYPDFATLHLSYVPDKKVIELKALKLYINSFMDRYISHENAANEIFDTLYGKLKPKHMKLVADFNPRGNVHTVITIDSDTM

SEQ ID NO: 47674 - protein, 166 aa, Nitratireductor aquibiodomus
  REGION 1..166: note = tr|I5BY82|I5BY82_9RHIZ NADPH-dependent 7-cyano-7-deazaguanine reductase OS=Nitratireductor aquibiodomus RA22 OX=1189611 GN=queF PE=3 SV=1
MTDKTIYDNLTLLGGRTELPASPEDAVLERVPNPQEDVLYAVRFTAPEFTSLCPLTGQPDFAHLVIDYVPADWLVESKSLKLYLGAFRNHGAFHEDCTVSIGRRLCDLLDPHWLRIGGYWYPRGGMPIDVFYQTGEPPKGVWIPDQACRPIAGEAEMFALLRPFSP

SEQ ID NO: 47675 - protein, 155 aa, Nitratireductor indicus
  REGION 1..155: note = tr|K2P2M9|K2P2M9_9RHIZ NADPH-dependent 7-cyano-7-deazaguanine reductase OS=Nitratireductor indicus C115 OX=1231190 GN=queF PE=3 SV=1
MSDENIYANLTQLGRRTELPTSPEQAVLERVPNPQKDARYAVRFTAPEFTSLCPLTGQPDFAHLVIDYVPAGWLVESKSLKLYLGSFRNHGAFHEDCTVSIGRRLADLLEPEWLRIGGYWYPRGGMPIDVFYQTGEPPRDVWLPDQGVATYRGRG

SEQ ID NO: 47676 - protein, 155 aa, Nitratireductor pacificus
  REGION 1..155: note = tr|K2LQD8|K2LQD8_9RHIZ NADPH-dependent 7-cyano-7-deazaguanine reductase OS=Nitratireductor pacificus pht-3B OX=391937 GN=queF PE=3 SV=1
MTRDALYDTLTLLGGKTELPQSPEEAVLERVANPQADARYAVRFTAPEFTSLCPLTGQPDFAHLVIDYVPGGWLVESKSLKLYLGAFRNHGAFHEDCTVGIGRRLATLLEPEWLRIGGYWYPRGGMPIDVFYQTGEAPRDVWLPDQGVPPYRGRG

SEQ ID NO: 47677 - protein, 155 aa, Nitratireductor sp.
  REGION 1..155: note = tr|A0A1H4LE49|A0A1H4LE49_9RHIZ NADPH-dependent 7-cyano-7-deazaguanine reductase OS=Nitratireductor sp. ES.061 OX=1855335 GN=queF PE=3 SV=1
MTDKTIYDDLTLLGGRTELPASPEEAVLERVPNPQEDVRYAVRFTAPEFTSLCPLTGQPDFAHLVIDYVPAGWLVESKSLKLYLGAFRNHGAFHEDCTVSIGRRLCDLLDPHWLRIGGYWYPRGGMPIDVFYQTGEPPKGVWIPDQGVPPYRGRG

SEQ ID NO: 47678 - protein, 131 aa, Nitratiruptor sp.
  REGION 1..131: note = sp|A6Q0W4|QUEF_NITSB NADPH-dependent 7-cyano-7-deazaguanine reductase OS=Nitratiruptor sp. (strain SB155-2) OX=387092 GN=queF PE=3 SV=1
MRYGEKEIQEFDPKKDLEIWPNKHNKPYKIKITLPEFSCLCPRSGYPDYATMHLEYIPDQYVVELKALKLYINSFRNRYISHEDSTNEIFDTLYSKLKPKYMRLVADFNPRGNVHTLIEIDSEEIEKVSNG

SEQ ID NO: 47679 - protein, 129 aa, Nitratiruptor tergarcus
  REGION 1..129: note = tr|A0A1W1WR54|A0A1W1WR54_9PROT NADPH-dependent 7-cyano-7-deazaguanine reductase OS=Nitratiruptor tergarcus DSM 16512 OX=1069081 GN=queF PE=3 SV=1
MRYGEKEIKEFDPKKDLEIWENKHEKSYKIRITLPEFSCLCPRSGYPDYATIYLDYIPNKYVVELKALKLYINSFRDRYISHEDSANEIFDTLYEKLQPRYMKLVADFNPRGNVHTIIEIDSDQLEKEK

SEQ ID NO: 47680 - protein, 275 aa, Nitrincola lacisaponensis
  REGION 1..275: note = tr|A0A063Y0A7|A0A063Y0A7_9GAMM NADPH-dependent 7-cyano-7-deazaguanine reductase OS=Nitrincola lacisaponensis OX=267850 GN=queF PE=3 SV=1
MTENDVVIHSPLGQETVYANQYDPSLLYPIARHLNWDARGVQRDSLPFKGVDLWNAYEISWLNTDGKPLVRIGEFRIPANSSHIIESKSFKLYLNSFNLTRFATETEVVSRMQQDLSQAAGGAVSVRLMKVNDAAPIERLQGECLDELPLKVSHYTPAPELLQTSGHRIVEESLVSHLLKSNCPVTGQPDWASIQIRYKGTAIDHTGLLAYLISYREKGDFHEQCVENIFMDIWQRCKPQKLTVYARYLRRGGLDINPYRSSLAGEPNNPRLSRQ

SEQ ID NO: 47681 - protein, 274 aa, unidentified
  source 1..274: note = Nitrincola nitratireducens
  REGION 1..274: note = tr|W9V846|W9V846_9GAMM NADPH-dependent 7-cyano-7-deazaguanine reductase OS=Nitrincola nitratireducens OX=1229521 GN=queF PE=3 SV=1
MSDHEIIKQSPLGQGTAYVNTYDPSLLYPISRQISWDEKGVNRASLPFRGVDIWNAFEVSWLNPKGKPIVRIAEFRIPSHSPNIIESKSFKLYLNSFNLTCFASESDVVALMRRDLSAAAGATVQVQLSKLDAAPPFERFQGECLDELDVEVTHYQPNPQLLRAGSRIVDESLYSHLLKSNCPVTGQPDWASIQIRYKGPALDRAGLLAYLISYREKGDFHEQCVETIFMDIWQQCKPQKLTVYARYVRRGGLDINPYRSSLDSLPRNCRLSRQ

SEQ ID NO: 47682 - protein, 274 aa, Nitrincola sp.
  REGION 1..274: note = tr|A0A5A9W889|A0A5A9W889_9GAMM NADPH-dependent 7-cyano-7-deazaguanine reductase OS=Nitrincola sp. MEB193; OX = 1708751 GN=queF PE=3 SV=1
MNEHEVIQRSPLGQETDYVNQYDPSLLYPIAREINWQARGIQRGSLPFKGVDIWNAYEVSWLNPKGKPVVRLAEFRIAADSTHIIESKSFKLYLNSFNLSCFANEAEVLKRLESDLAQAAGGRVQVFLRKLDAPLQLERLQGECLDELDIEVKHYQPEPKLLRTTDRVVEETLVSHLLKSNCPVTGQPDWASVQIHYKGPSIDRAGLLAYLISYREHGDFHEQCVETIFMDIWNQCRPQKLTVYARYVRRGGLDINPYRSSLAAEPANPRLARQ

SEQ ID NO: 47683 - protein, 274 aa, Nitrincola sp.
  REGION 1..274: note = tr|A0A5J6LC84|A0A5J6LC84_9GAMM NADPH-dependent 7-cyano-7-deazaguanine reductase QueF OS=Nitrincola sp. KXZD1103 OX=2614693 GN=queF PE=4 SV=1
MTENDVVTHSPLGQETGYTNQYEPSLLYPIARDLNWQARGIERDSLPFKGVDLWNAYEISWLDQNGKPLVRIGEFRIPANSSHIIESKSFKLYLNSFNLTRFQSESEVLARMQQDLSTAAGGKVQVRLIKVNDTAPIERLQGECLDELPLMVTQYSPAPEYLKTTARVVEECLVSHLLKSNCPVTGQPDWASIQIRYKGPAIDHAGLLAYLISYREKGDFHEQCVENIFMDIWQGCKPQKLTVYARYLRRGGLDINPYRSSLAGEPGNPRLSRQ

SEQ ID NO: 47684 - protein, 274 aa, unidentified
  source 1..274: note = Nitrincola tibetensis
  REGION 1..274: note = tr|A0A364NL80|A0A364NL80_9GAMM NADPH-dependent 7-cyano-7-deazaguanine reductase OS=Nitrincola tibetensis; OX = 2219697 GN=queF PE=3 SV=1
MSDHEIIKQSPLGQGTAYVNTYDPSLLYPISRQISWDEKGVNRASLPFRGVDIWNAFEVSWLNYKGKPLVRIAEFRIPSHSPNIIESKSFKLYLNSFNLTCFASESDVLALMRKDLSAAAGAPVQVQFSKLDAALPFERFQGECLDDIDIEVTDYQPNPQLLSVGSRIVEESLYSHLLKSNCPVTGQPDWASIQIRYKGPALDRTGLLAYLISYREKGDFHEQCVETIFMDIWHQCKPQKLTVYARYVRRGGLDINPYRSSLDSLPRNCRLSRQ

SEQ ID NO: 47685 - protein, 158 aa, Nitrobacter hamburgensis
  REGION 1..158: note = sp|Q1QMJ0|QUEF_NITHX NADPH-dependent 7-cyano-7-deazaguanine reductase OS=Nitrobacter hamburgensis (strain DSM 10229 / NCIMB 13809 / X14); OX = 323097 GN=queF PE=3 SV=1
MPRKLPSSPKTSALQLGRAVAWPGSPEEAKLDRVPNPQKGTNYVARFTAPEFTTLCPVTGQPDFAHLVIDYVPGSWLLESKSLKLYLASFRNHGAFHEDCTVAIGKRIATAVRPKWLRIGGYWYPRGGIPIDVFWQTGTVPKGVWIPDQSVPAYRGRG

SEQ ID NO: 47686 - protein, 158 aa, Nitrobacter sp.
  REGION 1..158: note = tr|A0A1M3CAF5|A0A1M3CAF5_9BRAD NADPH-dependent 7-cyano-7-deazaguanine reductase OS=Nitrobacter sp. 62-23; OX = 1895798 GN=queF PE=3 SV=1
MPRKPPSPPNSSALQLGRAVTWPDSPEAAKLDRVPNPQRDTNYVARFTAPEFTALCPVTGQPDFAHLVIDYVPGSWLLESKSLKLYLASFRNHGAFHEDCTVAIGKRIAAAVGPKWLRIGGYWYPRGGIPIDVFWQTGKAPKGLWIPDQDVAPYRGRG

SEQ ID NO: 47687 - protein, 145 aa, Nitrobacter sp.
  REGION 1..145: note = tr|A3WZI3|A3WZI3_9BRAD NADPH-dependent 7-cyano-7-deazaguanine reductase OS=Nitrobacter sp. Nb-311A OX=314253 GN=queF PE=3 SV=1
MQLGRAVAWPDSPEKAKLDRVPNPQKDTSYVARFTAPEFTALCPVTGQPDFAHLVIDYVPASWLLESKSLKLYLASFRNHGAFHEDCTVAIGKRIVGAIKPKWLRIGGYWFPRGGIPIDVFWQTGTAPRGVWIPDQDVASYRGRG

SEQ ID NO: 47688 - protein, 158 aa, Nitrobacter vulgaris
  REGION 1..158: note = tr|A0A1V4HY93|A0A1V4HY93_NITVU NADPH-dependent 7-cyano-7-deazaguanine reductase OS=Nitrobacter vulgaris; OX = 29421 GN=queF PE=3 SV=1
MPGKLLSSPKSSPLQLGRAVAWPDSPEKAKLDRVPNPQRGTNYVARFTVPEFTALCPVTGQPDFAHLVIDYVPGSWLLESKSLKLYLASFRNHGAFHEDCTVAIGKRIVSAVRPKWLRIGGYWFPRGGIPIDVFWQTGTAPKGVWIPDQAVPSYRGRG

SEQ ID NO: 47689 - protein, 145 aa, Nitrobacter winogradskyi
  REGION 1..145: note = tr|A0A4Y3W9U2|A0A4Y3W9U2_NITWI NADPH-dependent 7-cyano-7-deazaguanine reductase OS=Nitrobacter winogradskyi OX=913 GN=queF PE=3 SV=1
MQLGRAVAWPDSPERAKLDRVPNPQKGTDYVARFTAPEFTALCPVTGQPDFAHLVIDYVPGSWLLESKSLKLYLASFRNHGAFHEDCTVAIGKRIVGAVKPKWLRIGGYWFPRGGIPIDVFWQTGAAPKGVWIPDQDVPSYRGRG

SEQ ID NO: 47690 - protein, 158 aa, Nitrobacter winogradskyi
  REGION 1..158: note = sp|Q3SRK3|QUEF_NITWN NADPH-dependent 7-cyano-7-deazaguanine reductase OS=Nitrobacter winogradskyi (strain ATCC 25391 / DSM 10237 / CIP 104748 / NCIMB 11846 / Nb-255)OX=323098 GN=queF PE=3 SV=1
MPRKPPSSPKSSPLQLGRAVAWPDSPEQAKLDRVPNPQKGTNYVARFTAPEFTALCPVTGQPDFAHLVIDYVPGSWLLESKSLKLYLASFRNHGAFHEDCTVAIGKRIVAAIKPKWLRIGGYWFPRGGIPIDVFWQTGAAPRGVWIPDQDVPSYRGRG

SEQ ID NO: 47691 - protein, 129 aa, Nitrococcus mobilis
  REGION 1..129: note = tr|A4BM27|A4BM27_9GAMM NADPH-dependent 7-cyano-7-deazaguanine reductase OS=Nitrococcus mobilis Nb-231 OX=314278 GN=queF PE=3 SV=1
MATKPNRELTTFPNPQPERDYTLHIRIPEFTCLCPKTGQPDFATLHIDYVPDQHCVELKSLKQYIWSYRDEGAFHEAVTNHILSDLVNALAPRFARLTAEFNVRGGIYTTVVAEHRQAGWQPAPPVHLP

SEQ ID NO: 47692 - protein, 119 aa, unidentified
  source 1..119: note = Nitrolancea hollandica
  REGION 1..119: note = tr|I4EHQ5|I4EHQ5_9CHLR NADPH-dependent 7-cyano-7-deazaguanine reductase OS=Nitrolancea hollandica Lb OX=1129897 GN=queF PE=3 SV=1
MPTQPSKRLETFPNPKPERDYEIQISTPEFTCVCPMSGQPDFAEITIRYVPDQRCVELKSLKLYLWSYRNEGAFHEKVTNTILDDLVEAIAPRRATVVGDFNVRGGLHTVVTASYERPE

SEQ ID NO: 47693 - protein, 129 aa, unidentified
  source 1..129: note = Nitrosococcus halophilus
  REGION 1..129: note = tr|D5C140|D5C140_NITHN NADPH-dependent 7-cyano-7-deazaguanine reductase OS=Nitrosococcus halophilus (strain Nc4) OX=472759 GN=queF PE=3 SV=1
MPSQPSRELETFPNPFPERDYTIRIKIPEFTCLCPKTGQPDFATLHLEYVPDRTCVELKSLKLYIWSYRDQGAFHEAVTNQILDDLVAACTPRFMRLRAEFNVRGGIYTTVVAEYRQPEWDAPEVVRLP

SEQ ID NO: 47694 - protein, 129 aa, Nitrosococcus oceani
  REGION 1..129: note = tr|A0A0E2ZM06|A0A0E2ZM06_9GAMM NADPH-dependent 7-cyano-7-deazaguanine reductase OS=Nitrosococcus oceani C-27 OX=314279 GN=queF PE=3 SV=1
MPSQPNRELETFANPLPERDYTIRIRIPEFTCLCPKTGQPDFATLQLEYVPDQACVELKSLKLYIWSYRDQGAFHEAVTNQILDDLTAVCKPRFMRLTAEFNVRGGIYTTVAAEYRQPGWDAPKIVRLP

SEQ ID NO: 47695 - protein, 129 aa, Nitrosococcus oceani; identical to SEQ ID NO: 47694
  REGION 1..129: note = sp|Q3JAH8|QUEF_NITOC NADPH-dependent 7-cyano-7-deazaguanine reductase OS=Nitrosococcus oceani (strain ATCC 19707 / BCRC 17464 / NCIMB 11848 / C-107); OX = 323261 GN=que F PE=3 SV=1

SEQ ID NO: 47696 - protein, 129 aa, unidentified
  source 1..129: note = Nitrosococcus wardiae
  REGION 1..129: note = tr|A0A4P7C014|A0A4P7C014_9GAMM NADPH-dependent 7-cyano-7-deazaguanine reductase OS=Nitrosococcus wardiae; OX = 1814290 GN=queF PE=3 SV=1
MPSQPSRELETFPNPFPERDYTIRIKIPEFTCLCPKTGQPDFATLHLEYVPDRACVELKSLKLYVWSYRDQGAFHEAVTNQILDDLVAACTPRFMRLRAEFNVRGGIYTTVVAEYRQPEWNAPQVVRLP

SEQ ID NO: 47697 - protein, 129 aa, unidentified
  source 1..129: note = Nitrosococcus watsoni
  REGION 1..129: note = tr|D8K613|D8K613_NITWC NADPH-dependent 7-cyano-7-deazaguanine reductase OS=Nitrosococcus watsoni (strain C-113) OX=105559 GN=queF PE=3 SV=1
MPSQPNRELEIFANPLPERDYTIRIRIPEFTCLCPKTGQPDFATLQLEYVPDQACVELKSLKLYTWSYREQGAFHEAVTNQILDDLSAVCKPRFMRLTAEFNVRGGIYTTVVAEYRQPGWSAPEIVRLP

SEQ ID NO: 47698 - protein, 139 aa, unidentified
  source 1..139: note = Nitrosomonadaceae bacterium
  REGION 1..139: note = tr|A0A2E6USP0|A0A2E6USP0_9PROT NADPH-dependent 7-cyano-7-deazaguanine reductase OS=Nitrosomonadaceae bacterium OX=2026767 GN=queF PE=3 SV=1
MPKKSIHKLETFPNPSSKRDYHIHMEIPEFTCLCPKTGQPDFATLILDYIPDKKCIELKSLKLYIWSYRDKNAFHEAVTNHILNDLVTAIRPKYMRLIAKFYVRGGIFTNILVEHRKAKWKQKPIVHLEEFEKQSNTRP

SEQ ID NO: 47699 - protein, 139 aa, unidentified
  source 1..139: note = Nitrosomonadaceae bacterium
  REGION 1..139: note = tr|A0A4P5UFX8|A0A4P5UFX8_9PROT NADPH-dependent 7-cyano-7-deazaguanine reductase OS=Nitrosomonadaceae bacterium OX=2026767 GN=queF PE=3 SV=1
MSDCLTKTLETFLNPAPTRDYHIHMEIPEFTCLCPKTGQPDFATIILDYIPDKICIELKSLKLYIWSYRNENTFHEAATNRILNDLIAALKPRYVRITAKFYVRGGIFTNIVAEYREPKWNPLPTIELTRFESESNTCK

SEQ ID NO: 47700 - protein, 139 aa, unidentified
  source 1..139: note = Nitrosomonadales bacterium
  REGION 1..139: note = tr|A0A524MEQ9|A0A524MEQ9_9PROT NADPH-dependent 7-cyano-7-deazaguanine reductase OS=Nitrosomonadales bacterium OX=2026761 GN=queF PE=3 SV=1
MPIQPTKKLETFLNPTPSRDYHIHMEIPEFTCLCPKTGQPDFATLILDYIPDKRCIELKSLKLYIWSYRNENTFHEAVTNRILDDMVVAIKPKYMHLTAKFYVRGGIFTNIVAEHRKSGWKPKPAVNLKEFEKQSNICK

SEQ ID NO: 47701 - protein, 139 aa, unidentified
  source 1..139: note = Nitrosomonadales bacterium
  REGION 1..139: note = tr|A0A1E4GB51|A0A1E4GB51_9PROT NADPH-dependent 7-cyano-7-deazaguanine reductase OS=Nitrosomonadales bacterium SCN 54-20 OX=1660164 GN=queF PE=3 SV=1
MPSNPGKNLETFPNPAQERDYHIHMEIPEFTCLCPKTGQPDFATLILDYIPDKKCVELKSLKLYIWSFRDENAFHEAVTNRIADDLVTAMEPRYLRLTAKFYVRGGIFTTVVADHRQSGWAPLPSVDLLHFDSQPSTRG

SEQ ID NO: 47702 - protein, 140 aa, Nitrosomonas aestuarii
  REGION 1..140: note = tr|A0A1I3YPU7|A0A1I3YPU7_9PROT NADPH-dependent 7-cyano-7-deazaguanine reductase OS=Nitrosomonas aestuarii; OX = 52441 GN=queF PE=3 SV=1
MSTKPSKHLETFPNPFVKRDYQIHMEIPEFTCVCPKTGQPDFASLILDYIPDKKCVELKSLKLYIWSYRDEAAFHEAVTNQVLEDLVVVLKPRYIRLTARFFVRGGIFTNVIVDHRKSGWKPQSCISLHSFAEQSNIKRY

SEQ ID NO: 47703 - protein, 139 aa, Nitrosomonas communis
  REGION 1..139: note = tr|A0A1I4R5X6|A0A1I4R5X6_9PROT NADPH-dependent 7-cyano-7-deazaguanine reductase OS=Nitrosomonas communis; OX = 44574 GN=queF PE=3 SV=1
MASKPSKKLETFDNPFTARDYRIHMEIPEFTCLCPKTGQPDFARLILDYIPDKKCVELKSLKLYIWSYRDEGAFHEAVTNQILDDLVAALRPRYMRLIAKFFVRGGIFTNVIAEHRKKDWKPEPAVFLEAFEEQSNTRG

SEQ ID NO: 47704 - protein, 140 aa, Nitrosomonas communis
  REGION 1..140: note = tr|A0A0F7KCD9|A0A0F7KCD9_9PROT NADPH-dependent 7-cyano-7-deazaguanine reductase OS=Nitrosomonas communis; OX = 44574 GN=queF PE=3 SV=1
MASKPSKKLETFDNPFIARDYRIHMEIPEFTCLCPKTGQPDFARLILDYIPDKKCVELKSLKLYIWSYRDEGAFHEAVTNQILDDLVAVLKPRYMRLIAKFFVRGGIFTNVIAEHRKKGWKPEPAVFLEAFEEQSNTRGD

SEQ ID NO: 47705 - protein, 139 aa, unidentified
  source 1..139: note = Nitrosomonas cryotolerans
  REGION 1..139: note = tr|A0A1N6IRH6|A0A1N6IRH6_9PROT NADPH-dependent 7-cyano-7-deazaguanine reductase OS=Nitrosomonas cryotolerans ATCC 49181 OX=1131553 GN=queF PE=3 SV=1
MTSKPEKKLEVFANPTQKRDYRIHIEIPEFTCLCPKTGQPDFATLILDYIPDKKCIELKSLKLYIWSYRNEGAFHEAVTNLILDDLIAALKPRYIRLIARFYVRGGLFTNIVAEHRKTGWKPLPAVLLEEFDEQSNTRK

SEQ ID NO: 47706 - protein, 139 aa, Nitrosomonas europaea
  REGION 1..139: note = tr|A0A1I0A3V3|A0A1I0A3V3_NITER NADPH-dependent 7-cyano-7-deazaguanine reductase OS=Nitrosomonas europaea; OX = 915 GN=queF PE=3 SV=1
MTTQPSKQLETFENPVQTRDYRIHMEIPEFTCLCPKTGQPDFARLTLDYIPDKKCIELKSLKLYIWSYRDEGAFHEAVTNRILDDLVAAMKPRFIRLTSKFYVRGGIFTNVVAEHRKKGWQPQPPVLLEVFEQQFNTHG

SEQ ID NO: 47707 - protein, 139 aa, Nitrosomonas europaea; identical to SEQ ID NO: 47706
  REGION 1..139: note = sp|Q82SM6|QUEF_NITEU NADPH-dependent 7-cyano-7-deazaguanine reductase OS=Nitrosomonas europaea (strain ATCC 19718 / CIP 103999 / KCTC 2705 / NBRC 14298); OX = 228410 GN =queF PE=3 SV=1

SEQ ID NO: 47708 - protein, 139 aa, Nitrosomonas eutropha
  REGION 1..139: note = tr|A0A1I7HBB2|A0A1I7HBB2_9PROT NADPH-dependent 7-cyano-7-deazaguanine reductase OS=Nitrosomonas eutropha; OX = 916 GN=queF PE=3 SV=1
MTTQPSKQLETFENPIQTRDYRIHMEIPEFTCLCPKTGQPDFARLALDYIPDKKCIELKSLKLYIWSYRNEGTFHEAVTNQILDDLVAAMKPRFIRLTSKYYVRGGIFTNVVAEHRKKGWHPQPPVFLEALDEQFNTRG

SEQ ID NO: 47709 - protein, 139 aa, Nitrosomonas eutropha
  REGION 1..139: note = sp|Q0AE87|QUEF_NITEC NADPH-dependent 7-cyano-7-deazaguanine reductase OS=Nitrosomonas eutropha (strain DSM 101675 / C91) OX=335283 GN=queF PE=3 SV=1
MTTQPSKQLETFENPIQTRDYRIHMEIPEFTCLCPKTGQPDFARLTLDYIPDKKCIELKSLKLYIWSYRNEGTFHEAVTNQILDDLVIAMKPRFIRLTSKFYVRGGIFTNVVAEHRKKGWHPQPPVFLESFDEQFNTRS

SEQ ID NO: 47710 - protein, 146 aa, Nitrosomonas halophila
  REGION 1..146: note = tr|A0A1H3KX12|A0A1H3KX12_9PROT NADPH-dependent 7-cyano-7-deazaguanine reductase OS=Nitrosomonas halophila; OX = 44576 GN=queF PE=3 SV=1
MEKTEKATFSRPSKSLETFDNPVRARDYRIHMEIPEFTCLCPKTGQPDFARLTLDYIPDKKCIELKSLKLYIWSYRDEGAFHEAVTNQILDDLVVVLKPRFMRLTSKFYVRGGIFTNVVAEHRKKGWQPQLPVFLEAFDQQSNTRG

SEQ ID NO: 47711 - protein, 139 aa, Nitrosomonas marina
  REGION 1..139: note = tr|A0A1H9ZTZ4|A0A1H9ZTZ4_9PROT NADPH-dependent 7-cyano-7-deazaguanine reductase OS=Nitrosomonas marina; OX = 917 GN=queF PE=3 SV=1
MSTKPSKQLETFPNPFVKRDYQIHMEIPEFTCVCPKTGQPDFATLTLDYIPDKKCIELKSLKLYIWSYRDEAAFHEAVTNRILEDLVGVLKPRYIRLAARFFVRGGIFTNVIADHQKSGWTPQPLITLHHCDEQSSTRK

SEQ ID NO: 47712 - protein, 139 aa, Nitrosomonas marina
  REGION 1..139: note = tr|A0A1H8DM27|A0A1H8DM27_9PROT NADPH-dependent 7-cyano-7-deazaguanine reductase OS=Nitrosomonas marina; OX = 917 GN=queF PE=3 SV=1
MSTKPSKQLETFPNPFVKRDYQIHMEIPEFTCVCPKTGQPDFATLILDYIPDKKCIELKSLKLYIWSYRDEAAFHEAVTNQILEDLVGVLKPRYIRLTARFFVRGGIFTNVIVDHRKSGWTPQPIISLHHCDEQSNTRK

SEQ ID NO: 47713 - protein, 157 aa, unidentified
  source 1..157: note = Nitrosomonas mobilis
  REGION 1..157: note = tr|A0A1G5SFW1|A0A1G5SFW1_9PROT NADPH-dependent 7-cyano-7-deazaguanine reductase OS=Nitrosomonas mobilis; OX = 51642 GN=queF PE=3 SV=1
MRILNEKCAIRPESPEVTMSTQPDKHLETFDNPVKTRDYRIHMEIPEFTCLCPKTGQPDFARLTLDYIPDKKCIELKSLKLYIWSYREQGAFHEAVTNQILDDLVTTMKPRFIRLTANFYVRGGIFTNVVAEHRKKGWQPLPPIFLEGFDPQMNFRG

SEQ ID NO: 47714 - protein, 140 aa, Nitrosomonas nitrosa
  REGION 1..140: note = tr|A0A3D0FB38|A0A3D0FB38_9PROT NADPH-dependent 7-cyano-7-deazaguanine reductase OS=Nitrosomonas nitrosa; OX = 52442 GN=queF PE=3 SV=1
MPSKPSKKLETFDNPFPARDYRIHMEIPEFTCLCPKTGQPDFARLILDFIPDKKCVELKSLKLYIWSFRNEGVFHEAVTNQILDDLVAVMKPRYMRLTAKFYVRGGIFTNVIVEHRKKGWLPVPPVFLDAIDEQSNITGN

SEQ ID NO: 47715 - protein, 140 aa, Nitrosomonas nitrosa
  REGION 1..140: note = tr|A0A1I4M4U9|A0A1I4M4U9_9PROT NADPH-dependent 7-cyano-7-deazaguanine reductase OS=Nitrosomonas nitrosa; OX = 52442 GN=queF PE=3 SV=1
MPSKPSKKLETFDNPFPARDYRIHMEIPEFTCLCPKTGQPDFARLILDFIPDKKCVELKSLKLYIWSFRNEGVFHEAVTNQILDDLVAVMKPRYMRLTAKFYVRGGIFTNVIVEHRKKGWLPDPPVFLDAIDEQSNITGN

SEQ ID NO: 47716 - protein, 139 aa, Nitrosomonas oligotropha
  REGION 1..139: note = tr|A0A1H8K9X9|A0A1H8K9X9_9PROT NADPH-dependent 7-cyano-7-deazaguanine reductase OS=Nitrosomonas oligotropha OX=42354 GN=queF PE=3 SV=1
MASKPEKTLETFPNPFTSRDYHIHMEIPEFTCLCPKTGQPDFATLILDYIPDKKCVELKSLKLYIWSYRNEGVFHEAVTNKILDDLVAVLKPRYIRLTARFYVRGGIFTNVIVDHRKKGWQPKPVVLLQEFNSQSNIRE

SEQ ID NO: 47717 - protein, 139 aa, Nitrosomonas oligotropha
  REGION 1..139: note = tr|A0A2T5HZX1|A0A2T5HZX1_9PROT NADPH-dependent 7-cyano-7-deazaguanine reductase OS=Nitrosomonas oligotropha OX=42354 GN=queF PE=3 SV=1
MASKPEKTLETFPNPFTSRDYHIHMEIPEFTCLCPKTGQPDFATLILDYIPDKKCVELKSLKLYIWSYRNEGVFHEAVTNKILDDLVAVLKPRYIRLTARFYVRGGIFTNVIVDHRKKGWQPKPAVLLQEFNSQSNIRE

SEQ ID NO: 47718 - protein, 139 aa, Nitrosomonas sp.
  REGION 1..139: note = tr|A0A1H3PSX1|A0A1H3PSX1_9PROT NADPH-dependent 7-cyano-7-deazaguanine reductase OS=Nitrosomonas sp. Nm58; OX = 200126 GN=queF PE=3 SV=1
MASKPSKKLETFDNPFPVRDYRIHMEIPEFTCLCPKTGQPDFARLILDYIPDKKCVELKSLKLYIWSYRNEGVFHEAVTNQILDDLVTALKPRYMRLTAKFYVRGGIFTNVIVEHRKKDWKPAPALFFEPFDEQSNTRG

SEQ ID NO: 47719 - protein, 139 aa, Nitrosomonas sp.
  REGION 1..139: note = tr|F8GJ97|F8GJ97_NITSI NADPH-dependent 7-cyano-7-deazaguanine reductase OS=Nitrosomonas sp. (strain Is79A3) OX=261292 GN=queF PE=3 SV=1
MASKLEKTLETFPNPFMGRDYHIHMEIPEFTCLCPKTGQPDFATLILDYIPDKKCVELKSLKLYIWSYRNEGVFHEAVTNKILDDLVAALKPRYIRLIARFYVRGGIFTNVTVDYRKKGWQPKSTILLQEFNSQSNIRE

SEQ ID NO: 47720 - protein, 138 aa, unidentified
  source 1..138: note = Nitrosomonas stercoris
  REGION 1..138: note = tr|A0A4Y1YLN5|A0A4Y1YLN5_9PROT NADPH-dependent 7-cyano-7-deazaguanine reductase OS=Nitrosomonas stercoris; OX = 1444684 GN=queF PE=3 SV=1
MTTQPSKQLEIFENPVQTRDYRIHMEIPEFTCLCPKTGQPDFARLTLDYIPDKKCVELKSLKLYIWSYRDEGTFHEAVTNQILDDLVAAMKPRFIRLTSKFYVRGGIFTNVVVEHRKKGWRPKTQVFLEAFDEQFNTR

SEQ ID NO: 47721 - protein, 139 aa, Nitrosomonas ureae
  REGION 1..139: note = tr|A0A1H9BTT2|A0A1H9BTT2_9PROT NADPH-dependent 7-cyano-7-deazaguanine reductase OS=Nitrosomonas ureae; OX = 44577 GN=queF PE=3 SV=1
MASKPEKNLETFPNPFINRDYHIHMEIPEFTCLCPKTGQPDFATLILDYVPDKKCIELKSLKLYIWSYRNDGVFHEAVTNLILDDLIAVLKPRYIRLIARFYVRGGIFTNIIVDHRKKGWRSKSMIPIGELSGKLNFRE

SEQ ID NO: 47722 - protein, 139 aa, Nitrosomonas ureae
  REGION 1..139: note = tr|A0A0S3AJ94|A0A0S3AJ94_9PROT NADPH-dependent 7-cyano-7-deazaguanine reductase OS=Nitrosomonas ureae; OX = 44577 GN=queF PE=3 SV=1
MASKPEKNLETFPNPFINRDYHIHMEIPEFTCLCPKTGQPDFATLILDYVPDKKCIELKSLKLYIWSYRNDGVFHEAVTNLILDDLIAVLKPRYIRLIARFYVRGGIFTNIIVDHRKKGWMSKSMIPIGELSGQLNFRE

SEQ ID NO: 47723 - protein, 139 aa, Nitrosospira briensis
  REGION 1..139: note = tr|A0A1I5A6G3|A0A1I5A6G3_9PROT NADPH-dependent 7-cyano-7-deazaguanine reductase OS=Nitrosospira briensis; OX = 35799 GN=queF PE=3 SV=1
MPSSPTKNLEIFDNPAPARDYQIHMEIPEFTCLCPKTGQPDFATLILDYIADEKCIELKSLKLYIWSYRNEATFHEAVTNRIVDDLVAVLEPRYLRLTAKFYVRGGIFTNVVVEHRKSGWQPLPPVDLAKFGSQPPIRE

SEQ ID NO: 47724 - protein, 139 aa, unidentified
  source 1..139: note = Nitrosospira lacus
  REGION 1..139: note = tr|A0A1W6SN51|A0A1W6SN51_9PROT NADPH-dependent 7-cyano-7-deazaguanine reductase OS=Nitrosospira lacus; OX = 1288494 GN=queF PE=3 SV=1
MPSRPTKELEIFPNPTPARDYHIHMEVPEFTCLCPKTGQPDFATLILDYIPDKKCIELKSLKLYIWSYRNEGAFHEAVTNRIVDDLTAVLKPRYLRLAAKFFVRGGIFTTIVAEHRKSGWKPLPAVDLGKFEGQSTTRG

SEQ ID NO: 47725 - protein, 139 aa, Nitrosospira multiformis
  REGION 1..139: note = tr|A0A2T5IDF6|A0A2T5IDF6_9PROT NADPH-dependent 7-cyano-7-deazaguanine reductase OS=Nitrosospira multiformis OX=1231 GN=queF PE=3 SV=1
MPSNPGKNLETFPNPAQERDYHIHMEIPEFTCLCPKTGQPDFATLILDYIPDKKCVELKSLKLYIWSFRDENAFHEAVTNRIVDDLVTALEPRYLRLAAKFYVRGGIFTTVVADHRQSGWAPLPSVDLLRFDSQSSTRG

SEQ ID NO: 47726 - protein, 139 aa, Nitrosospira multiformis
  REGION 1..139: note = sp|Q2YBC0|QUEF_NITMU NADPH-dependent 7-cyano-7-deazaguanine reductase OS=Nitrosospira multiformis (strain ATCC 25196 / NCIMB 11849 / C 71); OX = 323848 GN=queF PE=3 SV= 1
MPSRPDKNLETFPNPTQERDYHIHMEIPEFTCLCPKTGQPDFATLILDYIPDKKCVELKSLKLYIWSFRDENAFHEAVTNRIVDDLATALQPRYLRLTAKFYVRGGIFTTVVAEHRHSGWTPLPSVDLFHFDSQPSTRG

SEQ ID NO: 47727 - protein, 139 aa, Nitrosospira sp.
  REGION 1..139: note = tr|A0A495EG83|A0A495EG83_9PROT NADPH-dependent 7-cyano-7-deazaguanine reductase OS=Nitrosospira sp. Nsp44; OX = 1945879 GN=queF PE=3 SV=1
MPSSPTKTLEIFPNPTPKRDYQIHMEIPEFTCLCPKTGQPDFATLILDYIPDKKCVELKSLKLYIWSYRNEGAFHEAVTNRIVDDLVTVLKPRYLRLAAKFNVRGGIFTNIVVDHRKTGWEPLPGVDLAKFENASPTRG

SEQ ID NO: 47728 - protein, 139 aa, Nitrosospira sp.
  REGION 1..139: note = tr|A0A0C3RRA3|A0A0C3RRA3_9PROT NADPH-dependent 7-cyano-7-deazaguanine reductase OS=Nitrosospira sp. NpAV; OX = 58133 GN=queF PE=3 SV=1
MPSRPTKELEIFPNPTPARDYHIHMEIPEFTCLCPKTGQPDFATLILDYIPDKKCIELKSLKLYIWSYRNEGAFHEAVTNRIVDDLAAVLKPRYLRLTAKFFVRGGIFTNIIVEHRKSGWKPLPLVELGKFEDQSTTRG

SEQ ID NO: 47729 - protein, 139 aa, unidentified
  source 1..139: note = Nitrosovibrio sp.
  REGION 1..139: note = tr|A0A497X7L1|A0A497X7L1_9PROT NADPH-dependent 7-cyano-7-deazaguanine reductase OS=Nitrosovibrio sp. Nv12; OX = 2135773 GN=queF PE=3 SV=1
MPSSPTKDLEIFANPATGRDYHIHMEIPEFTCLCPKTGQPDFATLILDYIPDRKCVELKSLKLYIWSYRNEETFHEAVTNRIVDDLVAVLKPRYLRLTAKFYVRGGIFTNVVVEHRKPGWNPPPAVDLVRFESQSATRG

SEQ ID NO: 47730 - protein, 139 aa, unidentified
  source 1..139: note = Nitrosovibrio sp.
  REGION 1..139: note = tr|A0A1K1M495|A0A1K1M495_9PROT NADPH-dependent 7-cyano-7-deazaguanine reductase OS=Nitrosovibrio sp. Nv17; OX = 1855339 GN=queF PE=3 SV=1
MPSQPSKALEVFPNPTPARDYHIHMEIPEFTCLCPKTGQPDFATLILDYVPDRRCVELKSLKLYIWSYRDEDAFHEAVTNRIVDDLSAVLKPRYLRLTARFFVRGGIYTTVVAEHRKRGWKPPPRVELGHFESPSPTRG

SEQ ID NO: 47731 - protein, 139 aa, unidentified
  source 1..139: note = Nitrosovibrio tenuis
  REGION 1..139: note = tr|A0A1H7GRD7|A0A1H7GRD7_9PROT NADPH-dependent 7-cyano-7-deazaguanine reductase OS=Nitrosovibrio tenuis; OX = 1233 GN=queF PE=3 SV=1
MPSTPAKELEIFHNPTPSRDYLIHMEIPEFTCLCPKTGQPDFATLILDYIPDKRCVELKSLKLYIWSYRNEGAFHEAVTNRIVDDLAAALKPRYLRLTAKFYVRGGIFTTVVAEHRKSGWKPLLAVELGAFENQSPTRC

SEQ ID NO: 47732 - protein, 133 aa, Nitrospina gracilis
  REGION 1..133: note = tr|M1YG17|M1YG17_NITG3 NADPH-dependent 7-cyano-7-deazaguanine reductase OS=Nitrospina gracilis (strain 3/211) OX=1266370 GN=queF PE=3 SV=1
MSKKQSSKELEVFTNPNPDRDYEINMECPEFTCLCPKTGQPDFATIDITYIPDKLCIELKSLKLYLWSYRDEGAFHEKVINEILDDLVKACRPRYMQVVGEFNVRGGIYTTVSAEHYGKSGTKRKSKTKRPSS

SEQ ID NO: 47733 - protein, 128 aa, Nitrospina sp.
  REGION 1..128: note = tr|A0A3D2V0Y0|A0A3D2V0Y0_9BACT NADPH-dependent 7-cyano-7-deazaguanine reductase OS=Nitrospina sp.; OX = 2024844 GN=queF PE=3 SV=1
MKKEVLQIETFPNPFPERDYTIDMECPEFTCLCPKTGQPDFATLYISYIPDKLCVELKSLKLYLVSYRNEGGFHEKLTNIILDDLVSACRPRIMKIVGDFNVRGGIHTTVTVEHQAKIKKSANKRVSK

SEQ ID NO: 47734 - protein, 127 aa, Nitrospina sp.
  REGION 1..127: note = tr|A0A523MUG1|A0A523MUG1_9BACT NADPH-dependent 7-cyano-7-deazaguanine reductase OS=Nitrospina sp.; OX = 2024844 GN=queF PE=3 SV=1
MKKQSSKVIEVFPNPHPERDYEIHMECPEFTCLCPKTGQPDFAEIDILYTPDRKCLELKSLKLYLWSYRNQGAFHEAVTNKILDDLVAACQPRWMQVMGDFNVRGGIHTTVRVEYSAPAKKPGKARS

SEQ ID NO: 47735 - protein, 131 aa, unidentified
  source 1..131: note = Nitrospinae bacterium
  REGION 1..131: note = tr|A0A1G1DEI8|A0A1G1DEI8_9BACT NADPH-dependent 7-cyano-7-deazaguanine reductase OS=Nitrospinae bacterium RIFCSPLOWO2_01_FULL_39_10 OX=1801683 GN=queF PE=3 SV=1
MRKYGERAVKNIKLLAWDNPYPDRDYKIEISFPEFTCLCPRSGYPDFATFIINYIPHKHIIELKSLKLYLNSYRSQYISHEAVTNKIYDDLNKILKPHFMEVIGDFNERGNVKTVIKVTSDGSRQSKRIKK

SEQ ID NO: 47736 - protein, 122 aa, unidentified
  source 1..122: note = Nitrospinae bacterium
  REGION 1..122: note = tr|A0A351RU23|A0A351RU23_9BACT NADPH-dependent 7-cyano-7-deazaguanine reductase OS=Nitrospinae bacterium; OX = 2026769 GN=queF PE=3 SV=1
MKYGEKAIKNAKLEAWDNPYPGRDYKIEINFPEFTCLCPRSGYPDFATIVINYIPDKYIIELKSLKMYMNSYRNKYISHEAVTNKIYDDLNKILKPHFMEVIGDFNERGNVKTVIRVTSQPD

SEQ ID NO: 47737 - protein, 128 aa, unidentified
  source 1..128: note = Nitrospira bacterium
  REGION 1..128: note = tr|A0A0S8AQ86|A0A0S8AQ86_9BACT NADPH-dependent 7-cyano-7-deazaguanine reductase OS=Nitrospira bacterium SG8_35_4 OX=1704025 GN=queF PE=3 SV=1
MNKNDKSKYGKKAIARAKLEKWENPYPDRDYTIDISFSEFTCLCPRSGYPDFAIIRIDYVPNQYIVELKSLKLYLNSFRDESISHESSTNQIFDDLKKLLKPRHLEVTGDFNPRGNVKTVIRVSTGHS

SEQ ID NO: 47738 - protein, 123 aa, unidentified
  source 1..123: note = Nitrospira bacterium
  REGION 1..123: note = tr|A0A2N1UJL4|A0A2N1UJL4_9BACT NADPH-dependent 7-cyano-7-deazaguanine reductase OS=Nitrospira bacterium HGW-Nitrospira-1 OX=2013825 GN=queF PE=3 SV=1
MKYGEKAIKNVRLSTWENQYPKRDYEIDISFPEFTCLCPISGYPDYATIRIKYIPDEKIVELKSLKLYLNSYRNLYISHEESTNKIFAELKKKLKPRFLEVVGDFNPRGNVKTVIRVSTDQKK

SEQ ID NO: 47739 - protein, 142 aa, unidentified
  source 1..142: note = Nitrospira defluvii
  REGION 1..142: note = tr|D8PBH8|D8PBH8_9BACT NADPH-dependent 7-cyano-7-deazaguanine reductase OS=Nitrospira defluvii; OX = 330214 GN=queF PE=3 SV=1
MAAKGNKKQKPAGATTRLGYNERHAKSGISTPLPDIETFPNQYKGYEITIVIPEYTAICPKTNLPDFGTITLRYQPDKYCLELKALKMYIHAYRNVGIFYENAVNRILQDIVRACRPTKATVTGEFAARGGLRSVIEANYPA

SEQ ID NO: 47740 - protein, 132 aa, unidentified
  source 1..132: note = Nitrospira japonica
  REGION 1..132: note = tr|A0A1W1I4M5|A0A1W1I4M5_9BACT NADPH-dependent 7-cyano-7-deazaguanine reductase OS=Nitrospira japonica; OX = 1325564 GN=queF PE=3 SV=1
MTRRSKTKLGYNDRHAKSGITAPLPDIETFPNQYKGYEITIEIPEYTAICPKTGLPDFGTITIHYMPDKDCLELKSLKMYIHAYRNLGIFYENSVNRVLQDVVTACRPVWAKVTGTFAARGGLRSVIEARYP

SEQ ID NO: 47741 - protein, 138 aa, unidentified
  source 1..138: note = Nitrospira lenta
  REGION 1..138: note = tr|A0A330L2Y4|A0A330L2Y4_9BACT NADPH-dependent 7-cyano-7-deazaguanine reductase OS=Nitrospira lenta; OX = 1436998 GN=queF PE=3 SV=1
MKRESARRTSKTTKLGYNERHAKSGITAPLPSIETFPNQYKGYEITIEIPEYTAICPKTNLPDFGTVTIHYMPNKACLELKSLKMYIHAYRDLGIFYENAVNRILHDVVASCRPVWATVTGGFTARGGLSSKIEAKYP

SEQ ID NO: 47742 - protein, 138 aa, Nitrospira moscoviensis
  REGION 1..138: note = tr|A0A0K2G922|A0A0K2G922_NITMO NADPH-dependent 7-cyano-7-deazaguanine reductase OS=Nitrospira moscoviensis OX=42253 GN=queF PE=3 SV=1
MKREASGRKQRTTKLGYNERHARSGITAPLPDIETFPNQFKGYEITIEIPEYTAICPKTNLPDFGTVTVHYMPDQECLELKSLKMYIHAYRNLGIFYENAVNRILQDVVKACRPVWARVTGTFAARGGLRSVIEAKYP

SEQ ID NO: 47743 - protein, 138 aa, Nitrospira sp.
  REGION 1..138: note = tr|A0A177QH01|A0A177QH01_9BACT NADPH-dependent 7-cyano-7-deazaguanine reductase OS=Nitrospira sp. SCGC AG-212-E16 OX=1799664 GN=queF PE=3 SV=1
MTRETAGRKSKTTKLGYNERHARSGITAPLPDIETFPNQYKGYEITIEIPEYTAICPKTGLADFGTITLHYMPDKQCLELKSLKLYIHAYRNVGIFYENAVNRILQDIVKACRPVWAKVTGTFAARGGLRSVIEARFP

SEQ ID NO: 47744 - protein, 128 aa, Nitrospira sp.
  REGION 1..128: note = tr|A0A354BLQ0|A0A354BLQ0_9BACT NADPH-dependent 7-cyano-7-deazaguanine reductase OS=Nitrospira sp.; OX = 70125 GN=queF PE=3 SV=1
MGYNERHAKSGINAPLPEIETFPNQYKGYEITIEIPEYTAICPKTNLPDFGTITLHYMPDKACLELKALKMYIHAYRNLGIFYENSVNRILHDVVKACRPVWATVTGTFTARGGLSSKIEARYPPQKL

SEQ ID NO: 47745 - protein, 123 aa, unidentified
  source 1..123: note = Nitrospiraceae bacterium
  REGION 1..123: note = tr|A0A3D1BMS6|A0A3D1BMS6_9BACT NADPH-dependent 7-cyano-7-deazaguanine reductase OS=Nitrospiraceae bacterium OX=2026770 GN=queF PE=3 SV=1
MKKHLKYGEEAILKAKLEKWDNPYPDRDYNVEINFPEFSCLCPRSGYPDYATIKINYIPDKFIVELKSLKLYLNKFRDQSLSHEAVTNKIFDDLKKLIKPRRLEVIGDFNPRGNVKTVIRVAS

SEQ ID NO: 47746 - protein, 123 aa, unidentified
  source 1..123: note = Nitrospiraceae bacterium
  REGION 1..123: note = tr|A0A349BN16|A0A349BN16_9BACT NADPH-dependent 7-cyano-7-deazaguanine reductase OS=Nitrospiraceae bacterium OX=2026770 GN=queF PE=3 SV=1
MRYGEEAIKKAELERWDNPYQDRDYVIDISFPEFSCLCPRSGYPDYATIKISYVPDRYIVELRSLKLYLNKYRDQHISHESATNKIYDDLKNLLEPRRIEVTGDWNPRGNVKTVIKVSSETLK

SEQ ID NO: 47747 - protein, 121 aa, unidentified
  source 1..121: note = Nitrospirae bacterium
  REGION 1..121: note = tr|A0A1G1F0R1|A0A1G1F0R1_9BACT NADPH-dependent 7-cyano-7-deazaguanine reductase OS=Nitrospirae bacterium GWB2_47_37 OX=1801692 GN=queF PE=3 SV=1
MRYGEKAIKKIKLEIWDNSNPERDYEINISFPEFTCLCPRSGYPDFATIKINYVPDKKIVELKSLKLYLNSFRDAHISHEEITNKIFTDLEKVLRPRSLEVIGDFNPRGNVKTIIRAASKR

SEQ ID NO: 47748 - protein, 140 aa, unidentified
  source 1..140: note = Nitrospirae bacterium
  REGION 1..140: note = tr|A0A2G4HYH6|A0A2G4HYH6_9BACT NADPH-dependent 7-cyano-7-deazaguanine reductase OS=Nitrospirae bacterium; OX = 2026887 GN=queF PE=3 SV=1
MNRKIVKRKSTTPKLGYDERHAKSGITAPLPDIETFPNQYKGYEITIEIPEYTAICPKTGLPDFGTITLNYVPGKKCLELKSLKMYLHAYRNLGIFYENAVNRILQDIVKACRPIRTKVTGTFAARGGLRSIIEANHPQR

SEQ ID NO: 47749 - protein, 122 aa, unidentified
  source 1..122: note = Nitrospirales bacterium
  REGION 1..122: note = tr|A0A524GCZ2|A0A524GCZ2_9BACT NADPH-dependent 7-cyano-7-deazaguanine reductase OS=Nitrospirales bacterium OX=2358460 GN=queF PE=3 SV=1
MKYGENVIKKAKLELWKNPNQERDYHIDISFPEFTCLCPRSGYPDFAVIKIHYIPDKWIVELKALKLYFNSFRTLAVSHEEVTNTIFADLDKKLKPRFLEVIGDFNPRGNVKTIVRVCSDAD

SEQ ID NO: 47750 - protein, 281 aa, Nocardioides sp.
  REGION 1..281: note = tr|A0A542RWA4|A0A542RWA4_9BURK NADPH-dependent 7-cyano-7-deazaguanine reductase OS=Nocardioides sp. SLBN-35 OX=512030 GN=queF PE=3 SV=1
MNTPEQSQLGKASAYIDLYDASLLFPIPRAGKRAEIGITGAAPFFGADLWTAFELSWLNARGKPQVALAHITVPCETPNIVESKSFKLYLNSFNNTRFADAAEVQARIRADISEAVWRGAEHPATVGVKLIAPELFDQEPVHELDGLSLDRLDVECTQYQPAPELLTAEFNEAPVTETLTSNLLKSNCLVTGQPDWGSVQISYSGPQINQERLLQYLVSFRNHNEFHEQCVERIFMDVWTRCKPIKLTVYARYTRRGGLDINPLRTSHPQGLPRNARTARQ

SEQ ID NO: 47751 - protein, 281 aa, Nocardioides sp.
  REGION 1..281: note = tr|H0BVG8|H0BVG8_9BURK NADPH-dependent 7-cyano-7-deazaguanine reductase OS=Nocardioides sp. SLBN-35 OX=512030 GN=queF PE=3 SV=1
MNTPEQSQLGKASAYVDQYDASLLFPIPRAGKRAEIGITGAAPFFGADLWTAFELSWLNLRGKPQVALAHITVPCETPNIVESKSFKLYLNSFNNTRFADAAEVQARMRTDISEAVWRGAGQSATVGVKLIAPELFDQEPVHELDGLSLDRLDVECTQYQPAPELLTAEFNEAPVTETLTSNLLKSNCLVTGQPDWGSVQISYSGPQINQEGLLQYLVSFRNHNEFHEQCVERIFMDVWTRCKPIKLTVYARYTRRGGLDINPLRTSHPQALPRNVRTARQ

SEQ ID NO: 47752 - protein, 128 aa, Nodularia sp.
  REGION 1..128: note = tr|A0A218Q8Y3|A0A218Q8Y3_9CYAN NADPH-dependent 7-cyano-7-deazaguanine reductase OS=Nodularia sp. NIES-3585 OX=1973477 GN=queF PE=3 SV=1
MSDSSPEMKYGEREITEGKLITFPNPRVGRRYDVSISLPEFTCKCPFSGYPDFATIYITYVPDELVVELKALKLYINSYRDRYISHEESANQILDDFVAACDPLEVTVKADFTPRGNVHTVVEVRHQK

SEQ ID NO: 47753 - protein, 128 aa, Nodularia spumigena
  REGION 1..128: note = tr|A0ZHU1|A0ZHU1_NODSP NADPH-dependent 7-cyano-7-deazaguanine reductase OS=Nodularia spumigena CCY9414 OX=313624 GN=queF PE=3 SV=1
MSNLSPEMKYGEREITEGKLITFPNPRVGRRYDVSISLPEFTCKCPFSGYPDFATIYITYVPDERVVELKALKLYINSYRDRYISHEESANQILDDFVAACDPLEVTVKADFTPRGNVHTVVEVHHQK

SEQ ID NO: 47754 - protein, 128 aa, Nodularia spumigena; identical to SEQ ID NO: 47753
  REGION 1..128: note = tr|A0A166JAP5|A0A166JAP5_NODSP NADPH-dependent 7-cyano-7-deazaguanine reductase OS=Nodularia spumigena CENA596 OX=1819295 GN=queF PE=3 SV=1

SEQ ID NO: 47755 - protein, 162 aa, unidentified
  source 1..162: note = Nosocomiicoccus massiliensis
  REGION 1..162: note = tr|A0A2J6NI23|A0A2J6NI23_9STAP NADPH-dependent 7-cyano-7-deazaguanine reductase OS=Nosocomiicoccus massiliensis OX=1232430 GN=queF PE=3 SV=1
MKDDTMKDLTLLGNQNVQYPTTYDNSVLETFDNSHPEMDYMVKFNCPEFTTLCPMTNQPDFATIYISYIPDIKMVESKSLKLYLFSYRNHGGFHEAAVNTIMRDLIDLMDPKYIEVWGKFTPRGGISIDPYANYGKPGTKFEKMAEKRLFEHDMYPEIIDNR

SEQ ID NO: 47756 - protein, 140 aa, unidentified
  source 1..140: note = Nostoc azollae
  REGION 1..140: note = tr|D7E3R3|D7E3R3_NOSA0 NADPH-dependent 7-cyano-7-deazaguanine reductase OS=Nostoc azollae (strain 0708) OX=551115 GN=queF PE=3 SV=1
MSNSLPDTVTPVNQEMKYGEREIAEGQLIIFPNPRVGRRYNIDITLPEFTCKCPFSGYPDFATIHISYIPDQRVVELKALKLYINSYRDRYISHEESANEILDDFVAACDPLEMTVKADFTPRGNVHTVVEVKHKKEVIF

SEQ ID NO: 47757 - protein, 139 aa, Nostoc calcicola
  REGION 1..139: note = tr|A0A1U7IW31|A0A1U7IW31_9NOSO NADPH-dependent 7-cyano-7-deazaguanine reductase OS=Nostoc calcicola FACHB-389 OX=1357508 GN=queF PE=3 SV=1
MTNNNLPESVSGLSQEMKYGERDIAEGKLITFPNPRVGRRYDINITLPEFTCKCPFSGYPDFATIYITYVPDERVVELKALKLYINSYRDRYISHEESANQILDDFVAACDPLEVTVKTDFTPRGNVHTVVEVRHQKSH

SEQ ID NO: 47758 - protein, 131 aa, unidentified
  source 1..131: note = Nostoc carneum
  REGION 1..131: note = tr|A0A1Z4HQK7|A0A1Z4HQK7_9NOSO NADPH-dependent 7-cyano-7-deazaguanine reductase OS=Nostoc carneum NIES-2107 OX=1973483 GN=queF PE=3 SV=1
MTNNTTEIKYGEREIAEGQLITFPNPRVGRRYDISITLPEFTCKCPFSGYPDFATIYISYVPDERVVELKALKLYINSYRDRYISHEESANQILDDFVVACDPLEAKVKADFTPRGNVHTVVEVRHQKPAK

SEQ ID NO: 47759 - protein, 139 aa, Nostoc commune
  REGION 1..139: note = tr|A0A2R5FLP4|A0A2R5FLP4_NOSCO NADPH-dependent 7-cyano-7-deazaguanine reductase OS=Nostoc commune NIES-4072 OX=2005467 GN=queF PE=3 SV=1
MTTDKLSESVIQASQEIKYGEREIAEGKLITFPNPRVGRRYDISITLPEFTCKCPFSGYPDFATIYVTYIPDERVVELKALKLYINSYRDRYISHEESANQILDDFVAACDPLEATVKADFTPRGNVHTVVEVRHHKYP

SEQ ID NO: 47760 - protein, 132 aa, unidentified; identical to SEQ ID NO: 43981
  source 1..132: note = Nostoc cycadae
  REGION 1..132: note = tr|A0A2H6LBM7|A0A2H6LBM7_9NOSO NADPH-dependent 7-cyano-7-deazaguanine reductase OS=Nostoc cycadae WK-1; OX = 1861711 GN=queF PE=3 SV=1

SEQ ID NO: 47761 - protein, 139 aa, unidentified
  source 1..139: note = Nostoc flagelliforme
  REGION 1..139: note = tr|A0A2K8SX63|A0A2K8SX63_9NOSO NADPH-dependent 7-cyano-7-deazaguanine reductase OS=Nostoc flagelliforme CCNUN1 OX=2038116 GN=queF PE=3 SV=1
MTTDKLSESVTQASEEMKYGERDIAEGKLITFPNPRVGRRYDINITLPEFTCKCPFSGYPDFATIYVTYIPDERVVELKALKLYINSYRDRYISHEESANQILDDFVAACDPLEATVKADFTPRGNVHTVVEVRHHKYP

SEQ ID NO: 47762 - protein, 139 aa, unidentified
  source 1..139: note = Nostoc linckia
  REGION 1..139: note = tr|A0A1Z4LD06|A0A1Z4LD06_NOSLI NADPH-dependent 7-cyano-7-deazaguanine reductase OS=Nostoc linckia NIES-25; OX = 1091006 GN=queF PE=3 SV=1
MTTNNLPESVSGPSQEMKYGERNIAEGQLITFPNPRLGRRYDISISLPEFTCKCPFSGYPDFATIYITYVPDERVVELKALKLYINSYRDRYVSHEESANQILDDFVAACDPLEVTVKADFSPRGNVHTVVEVRHQKNH

SEQ ID NO: 47763 - protein, 139 aa, unidentified
  source 1..139: note = Nostoc linckia
  REGION 1..139: note = tr|A0A2C6W9N6|A0A2C6W9N6_NOSLI NADPH-dependent 7-cyano-7-deazaguanine reductase OS=Nostoc linckia z16; OX = 1628751 GN=queF PE=3 SV=1
MTNNNLSESVSQPTQEMKYGERNIAEGELITFPNPRVGRRYDVSISLPEFTCKCPFSGYPDFATIYITYVPDERVVELKALKLYINSYRDRYISHEESANQILDDFVAACDPLEVTVKADFSPRGNVHTVVEVRHQKSH

SEQ ID NO: 47764 - protein, 137 aa, Nostoc minutum
  REGION 1..137: note = tr|A0A367S002|A0A367S002_9NOSO NADPH-dependent 7-cyano-7-deazaguanine reductase OS=Nostoc minutum NIES-26; OX = 1844469 GN=queF PE=3 SV=1
MTTDKLPEITSQPSQEIKYGEREIAEGELITFPNPRVGRRYDINITLPEFTCKCPFSGYPDFATIYITYIPNERVVELKALKLYINSYRDRYISHEESANQILDDFVAACDPLEVTVKADFTPRGNVHTVIEVQHQK

SEQ ID NO: 47765 - protein, 132 aa, unidentified
  source 1..132: note = Nostoc piscinale
  REGION 1..132: note = tr|A0A0M5MHJ1|A0A0M5MHJ1_9NOSO NADPH-dependent 7-cyano-7-deazaguanine reductase OS=Nostoc piscinale CENA21 OX=224013 GN=queF PE=3 SV=1
MTQDASEVKYGERNIAEGSLITFPNPRVGRRYDINITLPEFTCKCPFSGYPDFATIYITYIPDERVVELKALKLYINSYRDRYISHEESANQILDDMVAACDPLEITVKADFAPRGNVHTIIEVRHQKASAH

SEQ ID NO: 47766 - protein, 140 aa, unidentified
  source 1..140: note = Nostoc punctiforme
  REGION 1..140: note = tr|B2ITS9|B2ITS9_NOSP7 NADPH-dependent 7-cyano-7-deazaguanine reductase OS=Nostoc punctiforme (strain ATCC 29133 / PCC 73102) OX=63737 GN=queF PE=3 SV=1
MTTDKLPESVSQTTQEMKYGERDIAEGKLITFPNPRVGRRYDINITLPEFTCKCPFSGYPDFATIYVTYIPDERVVELKALKLYINSYRDRYISHEESANQILDDFVAACDPLEATVKADFTPRGNVHTVVEVRHHKYPS

SEQ ID NO: 47767 - protein, 137 aa, unidentified
  source 1..137: note = Nostoc punctiforme
  REGION 1..137: note = tr|A0A367RTI1|A0A367RTI1_NOSPU NADPH-dependent 7-cyano-7-deazaguanine reductase OS=Nostoc punctiforme NIES-2108 OX=1356359 GN=queF PE=3 SV=1
MTTDKSSESASQANQEMKYGERDIAEGKLITFPNPRVGRQYDINITLPEFTCKCPFSGYPDFATIYVSYVPDERVVELKALKLYINSYRDRYISHEESANQILDDFVAACDPLEVTVKADFTPRGNVHTVVEVRHQK

SEQ ID NO: 47768 - protein, 131 aa, Nostoc sp.
  REGION 1..131: note = tr|K9QL82|K9QL82_9NOSO NADPH-dependent 7-cyano-7-deazaguanine reductase OS=Nostoc sp. PCC 7107; OX = 317936 GN=queF PE=3 SV=1
MTQDTSEVKYGERNIAEGNLITFPNPRVGRRYDINITLPEFTCKCPFSGYPDFATIYITYIPDERVVELKALKLYINSYRDRYISHEESANQILDDMVTACDPLEITVKADFAPRGNVHTVIEVHHQKTST

SEQ ID NO: 47769 - protein, 136 aa, Nostoc sp.
  REGION 1..136: note = sp|Q8YXQ0|QUEF_NOSS1 NADPH-dependent 7-cyano-7-deazaguanine reductase OS=Nostoc sp. (strain PCC 7120 / SAG 25.82 / UTEX 2576) OX=103690 GN=queF PE=3 SV=1
MSNSSPETVSQPSQEVKYGEREIAEGQLITFPNPRVGRRYDINITLPEFTCKCPFSGYPDFATIYITYVPDERVVELKALKLYINSYRDRYISHEESANQILDDFVAACDPLEANVKADFTPRGNVHTVVEVRHTK

SEQ ID NO: 47770 - protein, 124 aa, unidentified
  source 1..124: note = Nostocales cyanobacterium
  REGION 1..124: note = tr|A0A1Y0RKC5|A0A1Y0RKC5_9CYAN NADPH-dependent 7-cyano-7-deazaguanine reductase OS=Nostocales cyanobacterium HT-58-2 OX=1940762 GN=queF PE=3 SV=1
MEIKYGERNIAEGQLITFPNPRVGRRYNINITLPEFTCKCPFSGYPDFATIHITYIPDERVVELKALKLYINSYRDRYISHEESANQILDDFVAACDPIDVTVKADFTPRGNVHTVIEVQHQKS

SEQ ID NO: 47771 - protein, 153 aa, unidentified
  source 1..153: note = Notoacmeibacter marinus
  REGION 1..153: note = tr|A0A231V5F4|A0A231V5F4_9RHIZ NADPH-dependent 7-cyano-7-deazaguanine reductase OS=Notoacmeibacter marinus OX=1876515 GN=queF PE=3 SV=1
MTDTSNLKMLGSQTEQPQNPDEAILETVPYSGTAEAPCVVRFTCPEFTSLCPMTGQPDFAHLVIDYVPGPKLVESKSLKLFLTSFRNHGAFHEDCTRMVGRRIAQATECRWLRIGGYWYPRGGIPIDVFWQTGPMPGDVWIPDQGVPPYRGRG

SEQ ID NO: 47772 - protein, 153 aa, unidentified
  source 1..153: note = Notoacmeibacter sp.
  REGION 1..153: note = tr|A0A3L7JA38|A0A3L7JA38_9RHIZ NADPH-dependent 7-cyano-7-deazaguanine reductase OS=Notoacmeibacter sp. M2BS9Y-3-1 OX=2448481 GN=queF PE=3 SV=1
MTDTSDLTLLGSKTDQPQNPDEAVLETVPYSGTSEAPCVVRFTCPEFTSLCPMTGQPDFAHLVIDYVPGPKLVESKSLKMFLTSFRNHGAFHEDCTRMVGRRIAEATECQWLRIGGYWYPRGGIPIDVFWQTGPLPADVWIPDQGVPPYRGRG

SEQ ID NO: 47773 - protein, 279 aa, unidentified
  source 1..279: note = Noviherbaspirillum autotrophicum
  REGION 1..279: note = tr|A0A0C2C0G0|A0A0C2C0G0_9BURK NADPH-dependent 7-cyano-7-deazaguanine reductase OS=Noviherbaspirillum autotrophicum OX=709839 GN=queF PE=3 SV=1
MSTNNLPEASPLGKPTAYQAEYAPSLLFPIPRQSKREEIGITGTLPFFGVDIWNAYEVSWLNLRGKPQVAIATFTVPADSPNIIESKSFKLYLNSFNQTRLDGPEALLDLLRTDLSAGVGAPVQVKLMLPDAFPSLQMGELEGLLLDRLDIEVNAYQPMPSLLKANHAEAMVEETLVSHLLKSNCLVTGQPDWGSVQIRYVGAQIDQEGLLQYLIGFRNHNEFHEQCVERIFMDIMRQCRPQKLAVYARYTRRGGLDINPWRSNFTTAQRPSNLRNARQ

SEQ ID NO: 47774 - protein, 279 aa, unidentified
  source 1..279: note = Noviherbaspirillum denitrificans
  REGION 1..279: note = tr|A0A254TPJ5|A0A254TPJ5_9BURK NADPH-dependent 7-cyano-7-deazaguanine reductase OS=Noviherbaspirillum denitrificans OX=1968433 GN=queF PE=3 SV=1
MTTSNLPEASPLGKPTAYQAEYTPSLLFPIPREQKRIEIGVTGTLPFFGVDIWNAYELSWLNLRGKPQVAIATFTVPADSPNIIESKSFKLYLNSFNQTRIASPEALVDMLRTDLSDGFGATVSVKLTMPDAFSSVAMGELDGLLLDRLDIEVNEYSPNPGLLKANQEDAIVEETFVSHLLKSNCLVTGQPDWGSVQIRYVGPQIDQELLLQYLIGFRNHNEFHEQCVERIFMDIMRQCKPQKLSVYARYTRRGGLDINPWRTNFTTGQRPSNLRNARQ

SEQ ID NO: 47775 - protein, 279 aa, unidentified
  source 1..279: note = Noviherbaspirillum humi
  REGION 1..279: note = tr|A0A239CKQ4|A0A239CKQ4_9BURK NADPH-dependent 7-cyano-7-deazaguanine reductase OS=Noviherbaspirillum humi OX=1688639 GN=queF PE=3 SV=1
MTTSDQPGDSPLGKPTEYHAEYAPSVLFPIARQAKREEIGIAGTLPFFGIDIWNAYEVSWLTLRGKPQVGIATLTVPADSPNIIESKSLKLYLNSLNQTRLAGPEALLELLRADLSAGFGAPVQVKLTTPDAFSTLQMGELEGLLLDRLDIEVDQYTPDPGLLRANHEEAIVEETLLSHLLKSNCLVTGQPDWGSVQIRYVGPQIDQERLLKYLIGFRNHNEFHEQCVERIFMDILRQCRPQKLSVYARYTRRGGLDINPWRSNFTTGQRPSNLRNARQ

SEQ ID NO: 47776 - protein, 279 aa, unidentified
  source 1..279: note = Noviherbaspirillum sp.
  REGION 1..279: note = tr|A0A3A3GQC8|A0A3A3GQC8_9BURK NADPH-dependent 7-cyano-7-deazaguanine reductase OS=Noviherbaspirillum sp. K1S02-23 OX=2320865 GN=queF PE=3 SV=1
MSDVSIAAASPLGKPATYRSEYDPSLLFPIARAEKRAELGIAGTLPFFGMDIWNAYEVSWLNARGKPQVAIATFSVPADSPNIIESKSFKLYLNSFNQTRLASPDALVALLRADLSSGFGAPVQVALTLPEAFGELRMGELSGLLLDRLDIEVTEYRPDPSLLSARHDEADVEESLVSHLLKSNCLVTGQPDWGSVQIRYVGAQIDQEGLLRYLIGFREHNEFHEQCVERIFMDILRQCRPQKLSVYARYTRRGGLDINPWRSNFSTGQPPANSRHARQ

SEQ ID NO: 47777 - protein, 279 aa, unidentified
  source 1..279: note = Noviherbaspirillum sp.
  REGION 1..279: note = tr|A0A0Q8RCY3|A0A0Q8RCY3_9BURK NADPH-dependent 7-cyano-7-deazaguanine reductase OS=Noviherbaspirillum sp. Root189 OX=1736487 GN=queF PE=3 SV=1
MNTPNLPEASPLGKPTAYQTAYAPSLLFPIARQQKREEIGIAGSLPFFGIDIWNAYELSWLNLRGKPQVAIATFMVPADSPNIIESKSLKLYLNSFNQTRVASPEALTEMLRVDLSDGFGASVQVKLTLPEGFDKLGMGELEGLLLDRLDIEVDRYTPDATGLKANTDEAIVEETLVSHLLKSNCLVTGQPDWGSVQIRYVGPQIDQEALLRYLIGFREHNEFHEQCVERIFMDIMRQCRPQKLAVYARYTRRGGLDINPWRSNFTTGQRPPNVRNARQ

SEQ ID NO: 47778 - protein, 139 aa, unidentified
  source 1..139: note = Novimethylophilus kurashikiensis
  REGION 1..139: note = tr|A0A2R5F3Y4|A0A2R5F3Y4_9PROT NADPH-dependent 7-cyano-7-deazaguanine reductase OS=Novimethylophilus kurashikiensis OX=1825523 GN=queF PE=3 SV=1
MSTLPSKSLETFDNPQPERDFHIHMEIPEFTCLCPKTGQPDFATLILDYIPDQKCVELKSLKLYIWSFREEGAFHEAVTNRILDDLVAATQPRFMRLTAKFFVRGGIFTNVVAEHRQSGWQPLPRVDLTQFETQSNTRG

SEQ ID NO: 47779 - protein, 166 aa, Novosphingobium aromaticivorans
  REGION 1..166: note = sp|Q2G586|QUEF_NOVAD NADPH-dependent 7-cyano-7-deazaguanine reductase OS=Novosphingobium aromaticivorans (strain ATCC 700278 / DSM 12444 / CIP 105152 / NBRC 16084 /F199) OX=279238 GN=queF PE=3 SV=1
MPSGAFRCRSGHKAVVMANTPLFLGQNSSLPASPDEAVLDYVANPRPGALYMIRFAAPEFTSLCPVTGQPDFAHLVIDYAPGECIVESKALKLFLGSFRNHAGFHEDVTVGIGQRLFDEMKPQWLRIGGYWYPRGGIPIDVFWQSGPPPAGLWLPDQGVAPYRGRG

SEQ ID NO: 47780 - protein, 148 aa, unidentified
  source 1..148: note = Novosphingobium barchaimii
  REGION 1..148: note = tr|A0A561H9Q0|A0A561H9Q0_9SPHN NADPH-dependent 7-cyano-7-deazaguanine reductase OS=Novosphingobium barchaimii OX=1420591 GN=queF PE=3 SV=1
MTPLHLGQTSALPASPEEAVLDYVPNPRQGSLYLVRFAAPEFTSLCPVTGQPDFAHLVIDYAPGETIVESKSLKLFLGAFRNHNGFHEDVTVGIGQRLFDEMKPHWLRIGGYWYPRGGIPIDVFWQSGAAPGGLWVPDQGVQGYRGRG

SEQ ID NO: 47781 - protein, 155 aa, unidentified
  source 1..155: note = Novosphingobium barchaimii
  REGION 1..155: note = tr|A0A0J8A629|A0A0J8A629_9SPHN NADPH-dependent 7-cyano-7-deazaguanine reductase OS=Novosphingobium barchaimii LL02 OX=1114963 GN=queF PE=3 SV=1
MSDTTSPSMPMHLGQQSTLPASPEQAVLDYVPNPRAGSLYLVRFAAPEFTSLCPVTGQPDFAHLVLDYAPGETIVESKSLKLFLGSFRNHCGFHEDVTVGIGQRLVDEMKPRWLRIGGYWYPRGGIPIDVFWQSSAPPEGLWVPDQGVQSYRGRG

SEQ ID NO: 47782 - protein, 153 aa, unidentified
  source 1..153: note = Novosphingobium fuchskuhlense
  REGION 1..153: note = tr|A0A117USV7|A0A117USV7_9SPHN NADPH-dependent 7-cyano-7-deazaguanine reductase OS=Novosphingobium fuchskuhlense OX=1117702 GN=queF PE=3 SV=1
MTDIGATPLHLGQTSSLPASPEEAVLDYVPNPRAGSLFLARFAVPEFTSLCPVTGQPDFAHLVIDYAPGETIVESKSLKLFLGSFRNHAGFHEDVTVGIGQRLFAEMRPRWLRIGGYWYPRGGIPIDVFWQSDTPPAGLWVPDQGVAPYRGRG

SEQ ID NO: 47783 - protein, 152 aa, unidentified
  source 1..152: note = Novosphingobium ginsenosidimutans
  REGION 1..152: note = tr|A0A5B8RZJ2|A0A5B8RZJ2_9SPHN NADPH-dependent 7-cyano-7-deazaguanine reductase OS=Novosphingobium ginsenosidimutans OX=1176536 GN=queF PE=3 SV=1
MSDTLQPLHLGQTSALPASPEEAVLDYVPNPRPNALYLARFAAPEFTSLCPVTGQPDFAHLVIDYAPGQTIVESKSLKLFLGSFRNHAGFHEDVTVGIGQRLFDEMQPRWLRIGGYWYPRGGIPIDVFWQSGAPPEGLWVPDQGVSGYRGRG

SEQ ID NO: 47784 - protein, 155 aa, unidentified
  source 1..155: note = Novosphingobium guangzhouense
  REGION 1..155: note = tr|A0A2K2G756|A0A2K2G756_9SPHN NADPH-dependent 7-cyano-7-deazaguanine reductase OS=Novosphingobium guangzhouense OX=1850347 GN=queF PE=3 SV=1
MTDIPDNSLPLHLGQQTGLPASPEEAVLDYVPNPRVGSLYLVRFAAPEFTSLCPVTGQPDFAHLVIDYAPEATIVESKSLKLFLGSFRNHGAFHEDVTVGIGQRLFDEMKPRWLRIGGYWYPRGGIPIDVFWQSDAPPAGLWVPDQGVPGYRGRG

SEQ ID NO: 47785 - protein, 157 aa, unidentified
  source 1..157: note = Novosphingobium kunmingense
  REGION 1..157: note = tr|A0A2N0HKY4|A0A2N0HKY4_9SPHN NADPH-dependent 7-cyano-7-deazaguanine reductase OS=Novosphingobium kunmingense OX=1211806 GN=queF PE=3 SV=1
MTDTPSSEAQRPLHLGQTSALPASPEAAVLDYVPNPRRSSLYLVRFAAPEFTSLCPVTGQPDFAHLVIDYAPGETIVESKSLKLFLGSFRNHCGFHEDVTVGIGQRLFDEMEPAWLRIGGYWYPRGGIPIDVFWQSGVAPEGLWVPDQGVQGYRGRG

SEQ ID NO: 47786 - protein, 170 aa, unidentified
  source 1..170: note = Novosphingobium lindaniclasticum
  REGION 1..170: note = tr|T0I5T3|T0I5T3_9SPHN NADPH-dependent 7-cyano-7-deazaguanine reductase OS=Novosphingobium lindaniclasticum LE124 OX=1096930 GN=queF PE=3 SV=1
MPPRDLKAGPAAPIKAAMTDTSMTPLHLGQTSALPTSPEDAVLDYVPNPRQGSLYLVRFAAPEFTSLCPVTGQPDFAHLVIDYAPGETIVESKSLKLFLGSFRNHNGFHEDVTVGIGQRLFDEMKPRWLRIGGYWYPRGGIPIDVFWQSGTAPEGLWVPDQGVQGYRGRG

SEQ ID NO: 47787 - protein, 153 aa, unidentified
  source 1..153: note = Novosphingobium malaysiense
  REGION 1..153: note = tr|A0A0B1ZWV9|A0A0B1ZWV9_9SPHN NADPH-dependent 7-cyano-7-deazaguanine reductase OS=Novosphingobium malaysiense OX=1348853 GN=queF PE=3 SV=1
MSETPKPPLHLGQTSTLPSSPEEAVLDYVPNPRAGTLYLVRFAAPEFTSLCPVTGQPDFAHLVIDYAPQATIVESKSLKLFLGAFRNHCGFHEDVTVGIGQRLFDEMQPHWLRIGGYWYPRGGIPIDVFWQSGAAPEGLWVPEQGVQGYRGRG

SEQ ID NO: 47788 - protein, 166 aa, Novosphingobium mathurense
  REGION 1..166: note = tr|A0A1U6HLF8|A0A1U6HLF8_9SPHN NADPH-dependent 7-cyano-7-deazaguanine reductase OS=Novosphingobium mathurense OX=428990 GN=queF PE=3 SV=1
MLVIAARSRHGRGMSETPANPLHLGQQSALPASPTEAVLDYVPNPRAGSLYMVRFAAPEFTSLCPVTGQPDFAHLVIDYAPGETIVESKSLKLFLGSFRNHSGFHEDVTVGIGQRLFDEMKPRWLRIGGYWYPRGGIPIDVFWQSGPVPEGLWVPDQGVQSYRGRG

SEQ ID NO: 47789 - protein, 154 aa, Novosphingobium nitrogenifigens
  REGION 1..154: note = tr|F1ZD97|F1ZD97_9SPHN NADPH-dependent 7-cyano-7-deazaguanine reductase OS=Novosphingobium nitrogenifigens DSM 19370 OX=983920 GN=queF PE=3 SV=1
MFFMADIKPLHLGQSSALPASPDEAVLDYVPNPRTGELYLVRFAAPEFTSLCPVTGQPDFAHLVIDYAPGESIVESKSLKLFLGSFRNHAGFHEDVTVGIGKRLFTEMQPRWLRIGGYWYPRGGIPIDVFWQSDAAPAGLWVPDQGVAPYRGRG

SEQ ID NO: 47790 - protein, 153 aa, Novosphingobium pentaromativorans
  REGION 1..153: note = tr|G6EE69|G6EE69_9SPHN NADPH-dependent 7-cyano-7-deazaguanine reductase OS=Novosphingobium pentaromativorans US6-1 OX=1088721 GN=queF PE=3 SV=1
MSDTPANPLHLGQQSALPASPTEAVLDYVPNPRAGSLYMVRFAAPEFTSLCPVTGQPDFAHLVIDYAPGETIVESKSLKLFLGSFRNHSGFHEDVTVGIGQRLFAEMKPRWLRIGGYWYPRGGIPIDVFWQSGAVPDGLWVPDQGVQSYRGRG

SEQ ID NO: 47791 - protein, 148 aa, Novosphingobium pentaromativorans
  REGION 1..148: note = tr|A0A2W5P4D5|A0A2W5P4D5_9SPHN NADPH-dependent 7-cyano-7-deazaguanine reductase OS=Novosphingobium pentaromativorans OX=205844 GN=queF PE=3 SV=1
MTPLHLGQNSALPASPEAAVLDYVPNPRQGSLYLVRFAAPEFTSLCPVTGQPDFAHLVIDYAPGETIVESKSLKLFLGSFRNHNGFHEDVTVGIGQRLFDEMKPHWLRIGGYWYPRGGIPIDVFWQSGAAPEGLWVPDQGVQGYRGRG

SEQ ID NO: 47792 - protein, 152 aa, Novosphingobium resinovorum
  REGION 1..152: note = tr|A0A031JS63|A0A031JS63_9SPHN NADPH-dependent 7-cyano-7-deazaguanine reductase OS=Novosphingobium resinovorum OX=158500 GN=queF PE=3 SV=1
MTDTSFPLHLGQQSGLPASPEEAQLDYVPNPRVGSLYLVRFAAPEFTSLCPVTGQPDFAHLVIDYAPGETIVESKSLKLFLGSFRNHGAFHEDVTVGIGQRLFNEMKPLWLRIGGYWYPRGGIPIDVFWQSDAPPAGLWVPDQGVPGYRGRG

SEQ ID NO: 47793 - protein, 153 aa, unidentified
  source 1..153: note = Novosphingobium sediminis
  REGION 1..153: note = tr|A0A512AHB5|A0A512AHB5_9SPHN NADPH-dependent 7-cyano-7-deazaguanine reductase OS=Novosphingobium sediminis OX=707214 GN=queF PE=3 SV=1
MTDIGAIPLHLGQTSSLPASPEEAVLDYVPNPRAGSLFLVRFAAPEFTSLCPVTGQPDFAHLVIDYAPGETIVESKSLKLFLGAFRNHAGFHEDVTVGIGQRLFAEMSPRWLRIGGYWYPRGGIPIDVFWQSDAPPAGLWVPDQGVASYRGRG

SEQ ID NO: 47794 - protein, 155 aa, Novosphingobium sp.
  REGION 1..155: note = tr|A0A519QG21|A0A519QG21_9SPHN NADPH-dependent 7-cyano-7-deazaguanine reductase OS=Novosphingobium sp.; OX = 1874826 GN=queF PE=3 SV=1
MSDTPQSSTPLHLGQQSALPASPQAAVLDYVPNPRTGSLYLVRFAAPEFTSLCPVTGQPDFAHLVLDYAPGETIVESKSLKLFLGSFRNHCGFHEDVTVGIGQRLFAEMKPKWLRVGGYWYPRGGIPIDVFWQSDVPPPGLWVPDQGVASYRGRG

SEQ ID NO: 47795 - protein, 150 aa, Novosphingobium sp.
  REGION 1..150: note = tr|A0A3B7DVY9|A0A3B7DVY9_9SPHN NADPH-dependent 7-cyano-7-deazaguanine reductase OS=Novosphingobium sp. THN1 OX=1016987 GN=queF PE=3 SV=1
MTKTPLFLGQNSALPASPDEAVLDYVPNPRPGTLYMIRFAAPEFTSLCPVTGQPDFAHLVIDYAPGETIVESKALKLFLGSFRNHAGFHEDVTVGIGQRLFAEMKPQWLRIGGYWYPRGGIPIDVFWQSDAPPAGLWLPDQGVAPYRGRG

SEQ ID NO: 47796 - protein, 150 aa, Novosphingobium subterraneum
  REGION 1..150: note = tr|A0A0B9A8C4|A0A0B9A8C4_9SPHN NADPH-dependent 7-cyano-7-deazaguanine reductase OS=Novosphingobium subterraneum OX=48936 GN=queF PE=3 SV=1
MTKTPLFLGQNTALPASPEEAVLDYVPNPRPGTLYMIRFAAPEFTSLCPVTGQPDFAHLVIDYAPGETIVESKALKLFLGSFRNHAGFHEDVTVGIGQRLFAEMKPRWLRIGGYWYPRGGIPIDVFWQSDAPPAGLWLPDQGVAPYRGRG

SEQ ID NO: 47797 - protein, 150 aa, Novosphingobium taihuense
  REGION 1..150: note = tr|A0A562JYX2|A0A562JYX2_9SPHN NADPH-dependent 7-cyano-7-deazaguanine reductase OS=Novosphingobium taihuense OX=260085 GN=queF PE=3 SV=1
MTKTPLFLGQNSSLPASPEEAVLDYVPNPRSGTLYMIRFAAPEFTSLCPVTGQPDFAHLVIDYAPGETIVESKALKLFLGSFRNHAGFHEDVTVGIGQRLFDEMKPQWLRIGGYWYPRGGIPIDVFWQSGPPPAGLWLPDQGVASYRGRG

SEQ ID NO: 47798 - protein, 129 aa, Novosphingobium tardaugens
  REGION 1..129: note = tr|U2Y8E4|U2Y8E4_9SPHN NADPH-dependent 7-cyano-7-deazaguanine reductase OS=Novosphingobium tardaugens NBRC 16725 OX=1219035 GN=queF PE=3 SV=1
MLDYVPNPRPDALYTIRFSAPEFTSLCPVTGAPDFAHLVIDYAPGDTIVESKSLKLFLGSFRNHNGFHEDVTVGIGQRLFAEMRPRWFRIGGYWYPRGGIPIDVFWQSGVAPEGLWVPDQGVANYRGRG

SEQ ID NO: 47799 - protein, 282 aa, Obesumbacterium proteus
  REGION 1..282: note = tr|A0A4Q9D4I0|A0A4Q9D4I0_9GAMM NADPH-dependent 7-cyano-7-deazaguanine reductase OS=Obesumbacterium proteus OX=82983 GN=queF PE=3 SV=1
MMSYQDHQALAGLTLGKATEYRDSYDASLLQPVPRSMNREPLGLYPDSLPFTGGDIWTLYELSWLNAKGLPQVAIADVELDAFSQNLIESKSFKLYLNSFNQTRFANWDDVQTTLQRDLSHCAQGDVRVQLMKLDDVEGQPIAAFSGECIDNLDIEIDNYEFDAELLKNAADQQNVVEETLVSHLLKSNCLITHQPDWGSVMIQYRGPAIDREALLRYLVSFRHHNEFHEQCVERIFCDIQRFCQPETLSVYARYTRRGGLDINPWRTNTPFVAPKGRLVRQ

SEQ ID NO: 47800 - protein, 281 aa, Obesumbacterium proteus
  REGION 1..281: note = tr|A0A1B7KKC9|A0A1B7KKC9_9GAMM NADPH-dependent 7-cyano-7-deazaguanine reductase OS=Obesumbacterium proteus ATCC 12841 OX=1354268 GN=queF PE=3 SV=1
MSYQDHQALAGLTLGKATEYRDSYDASLLQPVPRSMNRELLGLYPDSLPFTGGDIWTLYELSWLNAKGLPQVAIADVELDAFSQNLIESKSFKLYLNSFNQTRFANWDDVQTTLQRDLSHCAQGDVCVQLMKLDDVEGQPIAAFSGECIDNLDIEIDNYEFDAELLKNAADQQNVVEETLVSHLLKSNCLITHQPDWGSVMIQYRGPAIDREALLRYLVSFRHHNEFHEQCVERIFCDIQRFCQPETLSVYARYTRRGGLDINPWRTNTPFVAPKGRLVRQ

SEQ ID NO: 47801 - protein, 276 aa, unidentified
  source 1..276: note = Oblitimonas alkaliphila
  REGION 1..276: note = tr|A0A0K1XFK6|A0A0K1XFK6_9GAMM NADPH-dependent 7-cyano-7-deazaguanine reductase OS=Oblitimonas alkaliphila OX=1697053 GN=queF PE=3 SV=1
MQHPAELSPLGKHSAYVSHYDASLLYPIAREIKWAAMGLAAEQLPYVGEDIWNCYELSWLMPTGKPCVAMMSVRVPANSPNIIESKSFKLYLNSFNQSVFSSTEQLQQVLEQDLSATAGAPVQVTISSLSEAAAAGLQQLAGECIDRLDITVADYHAPAPELLRCQSEAQVEAALHSHLLKSNCPVTGQPDWGSVEVVYRGKELDQASFLAYLVSYRQCQDFHEQCAERIFIDLYRLLQPEYLRVTARYLRRGGIDINPVRCTHAEAFANPRLVRQ

SEQ ID NO: 47802 - protein, 153 aa, unidentified
  source 1..153: note = Oceanibacterium hippocampi
  REGION 1..153: note = tr|A0A1Y5U1M1|A0A1Y5U1M1_9PROT NADPH-dependent 7-cyano-7-deazaguanine reductase OS=Oceanibacterium hippocampi OX=745714 GN=queF PE=3 SV=1
MSDYDSHLTQLGGPAAIPETPEKAKLERVPNPHPDSLYVARFTCPEFTSLCPVTGQPDFAHLVIDYLPGPWIVESKSLKLYLTSFRNHGAFHEDCTLSIGMRIAREMEARWLRIGGYWYPRGGIPIDVFWQTGEPPKGLWLPDTGVPTYRGRG

SEQ ID NO: 47803 - protein, 154 aa, Oceanibaculum indicum
  REGION 1..154: note = tr|K2K0N7|K2K0N7_9PROT NADPH-dependent 7-cyano-7-deazaguanine reductase OS=Oceanibaculum indicum P24 OX=1207063 GN=queF PE=3 SV=1
MTDSIYSGLTQLGQATGLPDSPEKAVLETVPNPQGDVRYMVRFVAPEFTSLCPLTGQPDFAHLVIDYVPKDRLVESKSLKLFLGSFRNHGAFHEDCTVSIARRLVEVMQPEWLRIGGYWYPRGGIPIDVFYQTGPAPEGVWIPDQGVPPYRGRG

SEQ ID NO: 47804 - protein, 154 aa, Oceanibaculum indicum
  REGION 1..154: note = tr|A0A420WR58|A0A420WR58_9PROT NADPH-dependent 7-cyano-7-deazaguanine reductase OS=Oceanibaculum indicum; OX = 526216 GN=queF PE=3 SV=1
MTDSIYSGLTQLGQNAGLPDSPEKAVLETVPNPQGEVRYMVRFVAPEFTSLCPLTGQPDFAHLVIDYVPKDRLVESKSLKLFLGSFRNHGAFHEDCTVSIARRLVDVMQPEWLRIGGYWYPRGGIPIDVFYQTGPAPEGVWIPDQGVPPYRGRG

SEQ ID NO: 47805 - protein, 153 aa, Oceanicaulis sp.
  REGION 1..153: note = tr|A0A2E5UZZ9|A0A2E5UZZ9_9RHOB NADPH-dependent 7-cyano-7-deazaguanine reductase OS=Oceanicaulis sp.; OX = 1924941 GN=queF PE=3 SV=1
MTDQRYDNLGQLGATTPLPDNPDTAVLERVANPCDAPYMTRFVCPEFTSLCPVTGAPDFAHLVIDYVPRDWIVESKSLKLYLGSFRNHGAFHEACTTGIGQRLVKELEPVWLRIGGYWYPRGGIPIDVFFATGEPPEGVWIPDQDVPGYRGRG

SEQ ID NO: 47806 - protein, 154 aa, Oceanicaulis sp.
  REGION 1..154: note = tr|A0A2E5AHJ2|A0A2E5AHJ2_9RHOB NADPH-dependent 7-cyano-7-deazaguanine reductase OS=Oceanicaulis sp.; OX = 1924941 GN=queF PE=3 SV=1
MTDERYSKLDMLGSDARAADTPEEARLERVENPTPNADYMIRFACPEFTSICPVTGQPDFAHLVIDYAPSKWIVESKSLKLYLQSFRNHGAFHEACTTMIGQRLVDELDPKWLRIGGYWYPRGGIPIDVFWQSGEVPAGLYVPDTGVASYRGRG

SEQ ID NO: 47807 - protein, 155 aa, unidentified
  source 1..155: note = Oceanicella actignis
  REGION 1..155: note = tr|A0A1M7T1H7|A0A1M7T1H7_9RHOB NADPH-dependent 7-cyano-7-deazaguanine reductase OS=Oceanicella actignis; OX = 1189325 GN=queF PE=3 SV=1
MTDETDLSAITTLGRAAPQPRSPEEARLDPVPNPKRGTLYLARFTCPEFTSLCPVTGQPDFAHLVIDYAPDAHLVESKSLKLFLTSFRNHGAFHEDCTVEVGRRIQEAIRPLWIRVGGYWYPRGGIPIDVFWQSGPPPEGLWLPDQGVPPYRGRG

SEQ ID NO: 47808 - protein, 268 aa, unidentified
  source 1..268: note = Oceanicoccus sagamiensis
  REGION 1..268: note = tr|A0A1X9NCX2|A0A1X9NCX2_9GAMM NADPH-dependent 7-cyano-7-deazaguanine reductase OS=Oceanicoccus sagamiensis OX=716816 GN=queF PE=3 SV=1
MKDILLGKDVEYVDTYSPDLLFPIARQQSRDSLGVAAGQLPFTGVDIWNAYELSWLNAKGKPQVACAEFRFPCESSAIVESKSFKLYLNSFNQTVVRDRAELQARLVQDLSACVQAPVDVIIHNVANGNAISQLEGVCLDDLDISLSSYSPDPLLLGNVGQQVEETLYSHLLRSLCPVTAQPDWASIVVQYTGPQINHEGLLKYLIGYRQHQEFHEQCVERIFTDISAACDPQRLSVRALYTRRGGLDINPFRASYPHDPQNIRLNRQ

SEQ ID NO: 47809 - protein, 283 aa, Oceanimonas baumannii
  REGION 1..283: note = tr|A0A235CNF7|A0A235CNF7_9GAMM NADPH-dependent 7-cyano-7-deazaguanine reductase OS=Oceanimonas baumannii; OX = 129578 GN=queF PE=3 SV=1
MTPEQKYQHSDSLAGLELGKQSSYVSEYDPGQLQAVPRSLNRDDLGLQADALPFSGEDLWNLYELSWLNARGKPVVAMGEVRVPATSTHLIESKSFKLYLNSFNQSRFESLTAVEETLARDLSACADGKVMVKLYELQMAPAQFGRLPGHCIDQLDIDIEHYQPVPDLLANATDTEEVCETLHSHLLKSNCLVTGQPDWGSVMIRYQGPRIREDALLRYLVGFRQHNEFHEQCVERIFMDIMQHCKPSELTVYARYTRRGGLDINPYRSNVAGKAANVRLLRQ

SEQ ID NO: 47810 - protein, 283 aa, Oceanimonas doudoroffii
  REGION 1..283: note = tr|A0A233RI95|A0A233RI95_9GAMM NADPH-dependent 7-cyano-7-deazaguanine reductase OS=Oceanimonas doudoroffii OX=84158 GN=queF PE=3 SV=1
MTPEQKYQQSPALAELPLGKHSDYVSEYDPSQLQAVPRSLNRDDLGLDATALPFSGEDLWNLYELSWLNARGKPMVAMGEVRVPANSTNLIESKSFKLYLNSFNQSRFESLAAVEETLTRDLSACAQGRVSVSLYELQYAPAQFGRLPGHCIDQLDIDIDRYQPDADLLANATDADIVSETLHSHLLKSNCLVTGQPDWGSVMIRYQGPRIHQDALLRYLVGFRQHNEFHEQCVERIFMDLMQHCRPEELTVYARYTRRGGLDINPYRSNVAGKAANVRLLRQ

SEQ ID NO: 47811 - protein, 283 aa, Oceanimonas sp.
  REGION 1..283: note = tr|H2FY09|H2FY09_OCESG NADPH-dependent 7-cyano-7-deazaguanine reductase OS=Oceanimonas sp. (strain GK1) OX=511062 GN=queF PE=3 SV=1
MTPEQKYQQSPSLAGLSLGKQSSYVSEYDPQQLQAVPRSLNRDDLGLEADALPFSGEDLWNLYELSWLNARGKPMVAMGEVRVPATSVNLIESKSFKLYLNSFNQSRFESLAAVEETLARDLSACAQGTVTVKLYELQYAPAQFGRLPGHCIDQLDIDIDRYQPDPALLVDATEPEVVSETLHSHLLKSNCLVTGQPDWGSIMIRYQGPRLRQDALLRYLVGFRQHNEFHEQCVERIFMDLMQHCQPRELTVYARYTRRGGLDINPYRSNVAGKAANVRLQRQ

SEQ ID NO: 47812 - protein, 283 aa, unidentified
  source 1..283: note = Oceanisphaera arctica
  REGION 1..283: note = tr|A0A2P5TRL8|A0A2P5TRL8_9GAMM NADPH-dependent 7-cyano-7-deazaguanine reductase OS=Oceanisphaera arctica; OX = 641510 GN=queF PE=3 SV=1
MTPEQKYQASKALDDLPLGKQSSYVCEYDAGQLQPVPRSLNRDELGLSADALPFAGEDLWNLYELSWLNRKGKPMVAMGEVRVAATSVNLIESKSFKLYLNSFNQSHFDSLEEVEDILTRDLTLCAQGPVKVKLYELQAAPTQFGMLPGDCIDGLDIEIRHYQPQANLLNNATDPEEVNETLHSNLLKSNCLVTGQPDWGSLMIRYQGPRIRREALLRYLVSFRQHNEFHEQCVERIFMDLMQHCHPKELTVYARYTRRGGLDINPYRSNVAGKAANVRLQRQ

SEQ ID NO: 47813 - protein, 283 aa, unidentified
  source 1..283: note = Oceanisphaera avium
  REGION 1..283: note = tr|A0A1Y0CWF8|A0A1Y0CWF8_9GAMM NADPH-dependent 7-cyano-7-deazaguanine reductase OS=Oceanisphaera avium; OX = 1903694 GN=queF PE=3 SV=1
MTPEQKYQASQALDGLSLGKQSSYVCEYDASLLQGVPRSLNREDLGLTCDSLPFAGEDVWNLYELSWLNQKGKPVVAMGEIRVPITSVNLIESKSFKLYLNSFNQSRFDNLEEVSAILSRDLTLCAQAPVKVSLYDLKNAPSQFGMLSGDCIDELDITVEHYQPHQALLTNMTEQAWVSETLHSHLLKSNCLVTEQPDWGSIMIRYQGPLIKREALLRYIVSFRQHNEFHEQCVERIFMDLLTHCQPKELTVYARYTRRGGLDINPYRSNVAGKAANVRLQRQ

SEQ ID NO: 47814 - protein, 283 aa, unidentified
  source 1..283: note = Oceanisphaera profunda
  REGION 1..283: note = tr|A0A1Y0D7H5|A0A1Y0D7H5_9GAMM NADPH-dependent 7-cyano-7-deazaguanine reductase OS=Oceanisphaera profunda; OX = 1416627 GN=queF PE=3 SV=1
MTPEQKYQSSHALDALALGKQSSYVSEYDASQLQGVPRSLNRDDLGLTSETLPFAGEDLWNLYELSWLNRKGKPVVAMGEVRVPITSLNLIESKSFKLYLNSFNQTAFDNIEEVEEVLTRDLSLCAQAAVKVNLYELQNAPSQFGILSGDCIDQLDIDVQHYQPHPELLQNITDDEWVSETLHSHLLKSNCLVTGQPDWGSVMIRYQGPRINREALLRYLVSFRQHNEFHEQCVERIFMDLLQHAKTKELTVYARYTRRGGLDINPYRSNVAGKAANVRLQRQ

SEQ ID NO: 47815 - protein, 283 aa, unidentified
  source 1..283: note = Oceanisphaera psychrotolerans
  REGION 1..283: note = tr|A0A1J4QC33|A0A1J4QC33_9GAMM NADPH-dependent 7-cyano-7-deazaguanine reductase OS=Oceanisphaera psychrotolerans OX=1414654 GN=queF PE=3 SV=1
MTPEQKYQSSSALDALPLGKQSSYVCEYDAGQLQPVPRALNRDDLGLKADALPFAGEDLWNLYELSWLNAKGKPRVAMGEVRVPATSINLIESKSFKLYLNSFNQSRFDSLEEVEDILTRDLSLCAQGQVKVRLYELHSAPSQFGMLPGDCIDDLDIEVSQYQPDAGLLDDAVHSDDVSETLHSHLLKSNCLVTGQPDWGSIMIRYQGPRIRREVLLRYLVSFRQHNEFHEQCVERIFMDLMQHCRPRELTVYARYTRRGGLDINPYRSNVAGKAANVRLHRQ

SEQ ID NO: 47816 - protein, 162 aa, unidentified
  source 1..162: note = Oceanobacillus arenosus
  REGION 1..162: note = tr|A0A3D8PLI3|A0A3D8PLI3_9BACI NADPH-dependent 7-cyano-7-deazaguanine reductase OS=Oceanobacillus arenosus OX=1229153 GN=queF PE=3 SV=1
MKDQDLSDLTLLGNQGTSYDFEYNPKVLESFENKHQNRDYFVKFNCPEFTALCPITAQPDFATVYISYIPDVKMVESKSLKLYLFSFRNHGAFHEDTMNIIMNDLIELMDPRYIEVWGKFTPRGGISIDPYCNYGKPGTKYEQMADHRMMNHDMYPEKIDNR

SEQ ID NO: 47817 - protein, 166 aa, unidentified
  source 1..166: note = Oceanobacillus bengalensis
  REGION 1..166: note = tr|A0A494YS85|A0A494YS85_9BACI NADPH-dependent 7-cyano-7-deazaguanine reductase OS=Oceanobacillus bengalensis OX=1435466 GN=queF PE=3 SV=1
MSGRSQEEGLKDLTLLGNKETNYKTDYTPEVLESVDNIHSNRDYFVKFNCPEFTSLCPITGQPDFATMYISYIPDQKIVESKSLKLYLFSFRNHGDFHEDCVNIIMNDLIELLDPRYIEVWGKFTPRGGISIDPWCNYGKPGTKYEEMATHRLMNHDLNPEKIDNR

SEQ ID NO: 47818 - protein, 166 aa, Oceanobacillus caeni; identical to SEQ ID NO: 44203
  REGION 1..166: note = tr|A0A0N0M8H6|A0A0N0M8H6_9BACI NADPH-dependent 7-cyano-7-deazaguanine reductase OS=Oceanobacillus caeni; OX = 405946 GN=queF PE=3 SV=1

SEQ ID NO: 47819 - protein, 162 aa, unidentified
  source 1..162: note = Oceanobacillus chungangensis
  REGION 1..162: note = tr|A0A3D8PHP7|A0A3D8PHP7_9BACI NADPH-dependent 7-cyano-7-deazaguanine reductase OS=Oceanobacillus chungangensis OX=1229152 GN=queF PE=3 SV=1
MAEQDLSGLTLLGNQGTSYDFEYNPEVLESFENKHQNRDYFVKFNCPEFTALCPITAQPDFATVYISYIPNVKMVESKSLKLYLFSFRNHGAFHEDTMNIIMNDLIELMDPRYIEVWGKFTPRGGISIDPYCNYGKPGTKYEQMADHRMMNHDMYPEKIDNR

SEQ ID NO: 47820 - protein, 163 aa, unidentified
  source 1..163: note = Oceanobacillus halophilus
  REGION 1..163: note = tr|A0A495A770|A0A495A770_9BACI NADPH-dependent 7-cyano-7-deazaguanine reductase OS=Oceanobacillus halophilus OX=930130 GN=queF PE=3 SV=1
MKNEDQLADLTLLGNQGTSYNFEYNPDVIETFDNKHPNRDYFVKFNCPEFTALCPITNQPDFATVYISYIPDIKMVESKSLKLYLFSFRNHGAFHEDTMNIIMNDLIKKMNPRYIEVWGKFTPRGGISIDPYCNYGKPGTKYEKMAEHRMMNHDMYPEKIDNR

SEQ ID NO: 47821 - protein, 162 aa, Oceanobacillus iheyensis
  REGION 1..162: note = tr|A0A2P1WMD0|A0A2P1WMD0_9BACI NADPH-dependent 7-cyano-7-deazaguanine reductase OS=Oceanobacillus iheyensis OX=182710 GN=queF PE=3 SV=1
MKEQDLSELTLLGSQGTTYAFDYNPDVLEIFENNHQDRDYFVKFNCPEFTTLCPMTGQPDFATLYISYIPDVKMVESKALKLYLFSFRNHGGFHEDSINVIMNDLIDLMDPRYIEVWGKFTPRGGISIDPYCNYGKPGTKYEKMAEQRLMNHDLYPEKVDNR

SEQ ID NO: 47822 - protein, 165 aa, Oceanobacillus iheyensis
  REGION 1..165: note = sp|Q8EPA3|QUEF_OCEIH NADPH-dependent 7-cyano-7-deazaguanine reductase OS=Oceanobacillus iheyensis (strain DSM 14371 / CIP 107618 / JCM 11309 / KCTC 3954 / HTE831) OX =221109 GN=queF PE=3 SV=1
MVGRDENELQDVQLLGSQGTTYDFNYTPEVLEVFDNKHVSRDYFVKFNCPEFTTLCPKTNQPDFGTIYISYIPDIKMVESKSLKLYLFSFRNHGDFHEDCINIIMNDLIDLMNPRYIEVRGKFTPRGGISIDPYCNYGRPGTKFEQMADQRLIQHDMYPEKIDNR

SEQ ID NO: 47823 - protein, 89 aa, unidentified
  source 1..89: note = Oceanobacillus limi
  REGION 1..89: note = tr|A0A1I0FMA6|A0A1I0FMA6_9BACI NADPH-dependent 7-cyano-7-deazaguanine reductase OS=Oceanobacillus limi; OX = 930131 GN=queF PE=3 SV=1
MVESKSLKLYLFSFRNHGDFHEDSMNIIMNDLIELMDPRYIEVWGKFTPRGGISIDPYCNYGKPGTKYEQMADHRMMNHDMYPEKIDNR

SEQ ID NO: 47824 - protein, 165 aa, Oceanobacillus oncorhynchi
  REGION 1..165: note = tr|A0A0A1MU50|A0A0A1MU50_9BACI NADPH-dependent 7-cyano-7-deazaguanine reductase OS=Oceanobacillus oncorhynchi OX=545501 GN=queF PE=3 SV=1
MAGRSEKDLQGIELLGNKETKYAFDYTPEILETFDNQHPKRDYFVKLNCPEFTTLCPITNQPDFGTIYISYIPDIKMVESKSLKLYLFSFRNHGDFHEDCVNIIMNDLIELMDPRYIEVRGKFTPRGGISIDPYCNYGKAGTKFEKMAENRLMQHDMYPEKIDNR

SEQ ID NO: 47825 - protein, 162 aa, Oceanobacillus picturae
  REGION 1..162: note = tr|A0A0U9HB90|A0A0U9HB90_9BACI NADPH-dependent 7-cyano-7-deazaguanine reductase OS=Oceanobacillus picturae OX=171693 GN=queF PE=3 SV=1
MKEQDLSELTLLGSQGTTYAFDYNPGVLEIFENNHQDRDYFVKFNCPEFTTLCPMTGQPDFATLYISYIPDVKMVESKALKLYLFSFRNHGGFHEDSINVIMNDLINLMDPRYIEVWGKFTPRGGISIDPYCNYGKPGTKYEKMAEQRLMNHDLYPEKIDNR

SEQ ID NO: 47826 - protein, 162 aa, Oceanobacillus picturae
  REGION 1..162: note = tr|W9AD25|W9AD25_9BACI NADPH-dependent 7-cyano-7-deazaguanine reductase OS=Oceanobacillus picturae OX=171693 GN=queF PE=3 SV=1
MKEQDLSELTLLGSQGTTYAFDYNPDVLEIFENNHPDRDYFVKFNCPEFTTLCPMTGQPDFATLYISYIPDVKMVESKALKLYLFSFRNHGGFHEDSINVIMNDLINLMDPRYIEVWGKFTPRGGISIDPYCNYGKPGTKYEKMAEQRLMNHDLYPEKIDNR

SEQ ID NO: 47827 - protein, 162 aa, Oceanobacillus profundus
  REGION 1..162: note = tr|A0A417Y9W8|A0A417Y9W8_9BACI NADPH-dependent 7-cyano-7-deazaguanine reductase OS=Oceanobacillus profundus OX=372463 GN=queF PE=3 SV=1
MKEQDLSGLTLLGNQGTSYVYEYNPEVLEAFENNHQDRDYFVKLNFPEFTTLCPMTGQPDFATIYISYIPDVKMVESKSLKLYLFSYRNHGGFHEDSVNVIMNDLIKLMDPRYIEVWGKFTPRGGISIDPYCNYGKPGTKYEQMAEHRMMNHDMYPEKVDNR

SEQ ID NO: 47828 - protein, 165 aa, Oceanobacillus sojae
  REGION 1..165: note = tr|A0A511ZLI4|A0A511ZLI4_9BACI NADPH-dependent 7-cyano-7-deazaguanine reductase OS=Oceanobacillus sojae; OX = 582851 GN=queF PE=3 SV=1
MAGRSEKDLQGIELLGNKETKYAFDYTPEILEVFDNQHPNRDYFVKLNCPEFTTLCPMTNQPDFGTIYISYIPDIKMVESKSLKLYLFSFRNHGDFHEDCVNIIMNDLIELMDPRYIEVRGKFMPRGGISIDPYCNYGKTGTKFEKMAEDRLMQHDMYPETVDNR

SEQ ID NO: 47829 - protein, 166 aa, Oceanobacillus sp.
  REGION 1..166: note = tr|A0A345PET9|A0A345PET9_9BACI NADPH-dependent 7-cyano-7-deazaguanine reductase OS=Oceanobacillus sp. 160; OX = 2052660 GN=queF PE=3 SV=1
MSGRSQEQGLKDLTLLGNQKTDYATDYTPEVLESVDNIHSNRDYFVKFNCPEFTSLCPITGQPDFATMYISYIPDQKIVESKSLKLYLFSFRNHGDFHEDCVNIIMNDLIELLDPRYIEVWGKFTPRGGISIDPWCNYGKPGTKYEDMAMHRLMNHDLNPEKIDNR

SEQ ID NO: 47830 - protein, 166 aa, Oceanobacillus sp.
  REGION 1..166: note = tr|A0A498D1I2|A0A498D1I2_9BACI NADPH-dependent 7-cyano-7-deazaguanine reductase OS=Oceanobacillus sp. YLB-02 OX=2448030 GN=queF PE=3 SV=1
MSGRTEEQGLKDLTLLGNQGTKYATDYAPDVLESVENIHSNRDYFVKFNCPEFTSLCPITGQPDFATMYISYIPDKKIVESKSLKLYLFSFRNHGDFHEDCVNIIMNDLIQLLDPRYIEVWGKFTPRGGISIDPWCNYGKPGTKYDEMAMHRLMNHDLYPEKVDNR

SEQ ID NO: 47831 - protein, 274 aa, Oceanobacter sp.
  REGION 1..274: note = tr|A0A2G2JGA7|A0A2G2JGA7_9GAMM NADPH-dependent 7-cyano-7-deazaguanine reductase OS=Oceanobacter sp.; OX = 2030817 GN=queF PE=3 SV=1
MGSVTSTDNPLGQLSAYPDEYDAGLLFPIDRDESWKASGQTRADIQFFGVDIWNGYEVSWLNAKGKPVVCRGEFRVPASSPYLIESKSFKLYLNSFNQTRFVDAESARQRMVVDLSEAAGAEVSVQFHAADATYPTAPEAILIDDLDVDIRSYEPDASLLNTQEGSHFSGWLVSHLLKSNCPVTGQPDWGSLYVFYEGNEIDQAGLLAYIVSLRQHQDFHEQCVERTYRDIQERCKPEKLTVYARYVRRGGLDINPFRTSEEGFEALNFQSFRQ

SEQ ID NO: 47832 - protein, 130 aa, unidentified
  source 1..130: note = Oceanococcus atlanticus
  REGION 1..130: note = tr|A0A1Y1SF70|A0A1Y1SF70_9GAMM NADPH-dependent 7-cyano-7-deazaguanine reductase OS=Oceanococcus atlanticus OX=1317117 GN=queF PE=3 SV=1
MSTRPSKTLETFPNPKPERDYVISMRMPEFTCLCPKTGQPDFATLYLDFIADELCVELKALKLYLWSFRDEGAFHEDVTNRIADDLVAAINPRYLRLKAEFYVRGGIYTTVVAEHRKAGWTPAPRVDLPA

SEQ ID NO: 47833 - protein, 130 aa, unidentified
  source 1..130: note = Oceanococcus sp.
  REGION 1..130: note = tr|A0A520ST55|A0A520ST55_9GAMM NADPH-dependent 7-cyano-7-deazaguanine reductase OS=Oceanococcus sp.; OX = 1958892 GN=queF PE=3 SV=1
MSTRPSKTLETFPNPKPERDYVISMRMPEFTCLCPKTGQPDFATLYLDFIADEMCVELKALKLYLWSFRDDGAFHEDVTNRIADDLVAAINPRYLRLKAEFYVRGGIYTTVVAEHRKAGWTPAPRVDLPA

SEQ ID NO: 47834 - protein, 274 aa, unidentified
  source 1..274: note = Oceanospirillaceae bacterium
  REGION 1..274: note = tr|A0A2E9DMJ2|A0A2E9DMJ2_9GAMM NADPH-dependent 7-cyano-7-deazaguanine reductase OS=Oceanospirillaceae bacterium OX=1899355 GN=queF PE=3 SV=1
MSEHESIKQSPLGQGTRYVNRYDPTLLYPIARDVNWQARGVDRTTLPFRGVDIWNAYELSWLDSRGKPVVRLAEFRIPASSSHIIESKSFKLYLNSYNLTRFGSESEVQSHLRQDLSQAAGADVSVKLFRPDLPVQGGQLEGRCIDDLEIDVEHYTPEPNLLIAGNEVVGETLVSHLLKSNCPVTGQPDWGSLQIRYKGGKIDRKGLLAYIVSYREHGDFHEQCVENIFMDIWQRCRPQKLSVYARYVRRGGLDINPYRTSISDEPGNPRLARQ

SEQ ID NO: 47835 - protein, 273 aa, unidentified
  source 1..273: note = Oceanospirillaceae bacterium
  REGION 1..273: note = tr|A0A2D6DIV3|A0A2D6DIV3_9GAMM NADPH-dependent 7-cyano-7-deazaguanine reductase OS=Oceanospirillaceae bacterium OX=1899355 GN=queF PE=3 SV=1
MDQEKIIAASPLGDKSEYVDQYSPALLFPIPRKEPWRPSFTKRPFYGVDIWNAYEISWLNKQGVPQMAIGEFRLPGDSPNIVESKSFKLYLNSFNQTIVASRDKVQQMMQKDLSEAAGAPMQVRLFGLNEQAMPIMATPGECIDERPIETLVYEPDASLLAAHEDQYRTETLHSHLLKSNCPVTGQPDWATLVVEYEGATLDRSTLLEYIISYRQHGDFHEQCVEQIFLDIMAQCQPKQLTVYARYLRRGGLDINPYRSTRPLDPPNCRTERQ

SEQ ID NO: 47836 - protein, 274 aa, unidentified; identical to SEQ ID NO: 47167
  source 1..274: note = Oceanospirillales bacterium
  REGION 1..274: note = tr|A0A2E5S9D3|A0A2E5S9D3_9GAMM NADPH-dependent 7-cyano-7-deazaguanine reductase OS=Oceanospirillales bacterium OX=1914300 GN=queF PE=3 SV=1

SEQ ID NO: 47837 - protein, 272 aa, unidentified
  source 1..272: note = Oceanospirillales bacterium
  REGION 1..272: note = tr|A0A2A4XK22|A0A2A4XK22_9GAMM NADPH-dependent 7-cyano-7-deazaguanine reductase OS=Oceanospirillales bacterium OX=1914300 GN=queF PE=3 SV=1
MALDNAPLGKASDYPDRYDPALLFPVAREENRRRIGLEDGRWPWFGGDLWQAWEISWLRPGGIPDLAWAEIRFPAASPSIIESKSLKLYLNSLNQTVFSSADQVAETITGDLSSASGAAVNVRFLSVDDSDTAIGRPSGYELIDNEPVEDVVYDYAPESLNASGPVVTEQLCSHLLKSNCPVTGQPDWGTVLISYTGSAIGRAGLLRYIVSFRQKQDFHEHCVETLFTDLLNRCKPQSLTVCARYTRRGGLDINPWRSTEPEEQVGPRLIRQ

SEQ ID NO: 47838 - protein, 291 aa, Oceanospirillum linum
  REGION 1..291: note = tr|A0A1T1HA89|A0A1T1HA89_OCELI NADPH-dependent 7-cyano-7-deazaguanine reductase OS=Oceanospirillum linum; OX = 966 GN=queF PE=3 SV=1
MMSDSKQVHRDEQASPETSLLGKETQYVDQYDAGLLFPIPRQPKRDEIGLGQLDAEEGGLPFFGQDIWNAFELSWLNAKGKPEVAVAVFRIPADSENIIESKSFKLYLNSFNQTKLSGCHELQATLEKDLSSAAGAPVMVELHGLDGAIALQVVEPKGRCIDGLDIEVSHYHPEPSLLKNQSELIVEETLYSHLLRSNCPVTGQPDWATVEISYTGKKIDKAGLLAYIISFRQHNDFHEQCVERMFVDLSQRCKPEELTVVARYTRRGGLDINPWRSSNRPDLENRRFVRQ

SEQ ID NO: 47839 - protein, 284 aa, Oceanospirillum multiglobuliferum
  REGION 1..284: note = tr|A0A1T4KKD4|A0A1T4KKD4_9GAMM NADPH-dependent 7-cyano-7-deazaguanine reductase OS=Oceanospirillum multiglobuliferum OX=64969 GN=queF PE=3 SV=1
MTEQSKQAQVEDSLLGKQTEYVDQYDPSLLFPIPRQPKRDDIQLSAISQSEKLPFFGQDIWNAFELSWLNPKGKPEVAVATFRVPASSPNIIESKSFKLYLNSFNQTRLTSTSELQTRLEQDLSAAAGDAVLVELYSMKEAKYLQVAPASGRCIDDLDIEVQHYHPEPKLLKTQSDLIVEEQLHSHLLRSNCPVTGQPDWATVLVRYKGKKIDKAGLLAYIISFRLHNDFHEQCVERMYVDIMQHCEPEELTVEARYTRRGGLDINPWRSSNLPDLANNRLLRQ

SEQ ID NO: 47840 - protein, 281 aa, Oceanospirillum sp.
  REGION 1..281: note = tr|A0A2D5GF03|A0A2D5GF03_9GAMM NADPH-dependent 7-cyano-7-deazaguanine reductase OS=Oceanospirillum sp.; OX = 2021254 GN=queF PE=3 SV=1
MTITANPEHSPLGKTTEYVDQYDPSLLYPIPRADKRDEIGLPEISPEGKLPFFGQDIWNAFELSWLNPKGKPQAAVAVFRIPASSPNIIESKSFKLYLNSFNQTKLAEQSELQSRLEKDLSEAAGETVVVELYSLEEAQALQIEQPQGRCIDDLDIEIEHYHPQPDLLKTQSDLVVEEQLYSHLLRSNCPVTGQPDWATVHVSYKGAKIDKAGLLAYIVSFRQHNDFHEQCVERMFVDITQRCQPEELTVVARYTRRGGLDINPWRSSNRPDMDNQRLIRQ

SEQ ID NO: 47841 - protein, 155 aa, Ochrobactrum anthropi
  REGION 1..155: note = tr|A0A137XRS0|A0A137XRS0_OCHAN NADPH-dependent 7-cyano-7-deazaguanine reductase OS=Ochrobactrum anthropi; OX = 529 GN=queF PE=3 SV=1
MSEKTIYSDLKQLGSNASIPQSPEEAILERVANPQAGTPYCVRFTAPEFTSLCPMTGQPDFAHLVIDYVPGQWLVESKSLKLFLFSFRNHGAFHEDCTVTIGKRLVELLEPEWLRIGGYWYPRGGIPIDVFFQTGAAPQNVWIPEQGVPNYRGRG

SEQ ID NO: 47842 - protein, 155 aa, Ochrobactrum anthropi
  REGION 1..155: note = tr|A0A011UH82|A0A011UH82_OCHAN NADPH-dependent 7-cyano-7-deazaguanine reductase OS=Ochrobactrum anthropi; OX = 529 GN=queF PE=3 SV=1
MSEKTIYSDLKQLGSNASIPQNPEDAILERVANPQAGTPYCVRFTAPEFTSLCPMTGQPDFAHLVIDYVPGQWLVESKSLKLFLFSFRNHGAFHEDCTVTIGKRLVELLEPEWLRIGGYWYPRGGIPIDVFFQTGAAPQNVWIPEQGVPNYRGRG

SEQ ID NO: 47843 - protein, 155 aa, Ochrobactrum cytisi
  REGION 1..155: note = tr|A0A1J6IJY3|A0A1J6IJY3_9RHIZ NADPH-dependent 7-cyano-7-deazaguanine reductase OS=Ochrobactrum cytisi; OX = 407152 GN=queF PE=3 SV=1
MSEKTIYSDLKQLGSNASIPQNPEDAILERVANPQAGTPYCVRFTAPEFTSLCPMTGQPDFAHLVIDYVPGQWLVESKSLKLLLFSFRNHGAFHEDCTVTIGKRLVELLEPEWLRIGGYWYPRGGIPIDVFFQTGAAPQNVWIPEQGVPNYRGRG

SEQ ID NO: 47844 - protein, 155 aa, Ochrobactrum gallinifaecis
  REGION 1..155: note = tr|A0A502BNI0|A0A502BNI0_9RHIZ NADPH-dependent 7-cyano-7-deazaguanine reductase OS=Ochrobactrum gallinifaecis OX=215590 GN=queF PE=3 SV=1
MSEKTIYSDLKQLGSSSSIPQSPEQAILERVEKPQAGTPYCVRFTAPEFTSLCPMTGQPDFAHLMIDYVPGKWLVESKSLKLFLFSFRNHGAFHEDCTVTIGKRLVELLEPEWLRIGGYWYPRGGIPIDIFYQTGEAPRNVWIPEQSVPNYRGRG

SEQ ID NO: 47845 - protein, 91 aa, Ochrobactrum grignonense
  REGION 1..91: note = tr|A0A256FLI1|A0A256FLI1_9RHIZ NADPH-dependent 7-cyano-7-deazaguanine reductase OS=Ochrobactrum grignonense OX=94627 GN=queF PE=3 SV=1
MIDYVPGEWLVESKSLKLFLFSFRNHGAFHEDCTVTIGKRLVDLLEPEWLRIGGYWYPRGGIPIDVFYQTGATPQNVWIPEQSVPNYRGRG

SEQ ID NO: 47846 - protein, 155 aa, Ochrobactrum haematophilum
  REGION 1..155: note = tr|A0A397L123|A0A397L123_9RHIZ NADPH-dependent 7-cyano-7-deazaguanine reductase OS=Ochrobactrum haematophilum OX=419474 GN=queF PE=3 SV=1
MSENTIYSGLTQLGKEASIPASPEEAVLEKVANPQHGTRYCVRFTAPEFTSLCPMTGQPDFAHLVIDYVPDRWLVESKSLKLFLFSFRNHGVFHEDCTVTIGKRLVDLLQPEWLRIGGYWYPRGGIPIDVFFQTGAAPQDVWIPEQAVANYRGRG

SEQ ID NO: 47847 - protein, 155 aa, Ochrobactrum haematophilum; identical to SEQ ID NO: 44794
  REGION 1..155: note = tr|A0A2P9HNC4|A0A2P9HNC4_9RHIZ NADPH-dependent 7-cyano-7-deazaguanine reductase OS=Ochrobactrum haematophilum OX=419474 GN=queF PE=3 SV=1

SEQ ID NO: 47848 - protein, 156 aa, Ochrobactrum intermedium
  REGION 1..156: note = tr|U4V9D7|U4V9D7_9RHIZ NADPH-dependent 7-cyano-7-deazaguanine reductase OS=Ochrobactrum intermedium 229E OX=1337887 GN=queF PE=3 SV=1
MSEKTIYSDLKQLGSHASVPQKPEDAVLERVANPQAGTPYCVRFTAPEFTSLCPMTGQPDFAHLVIDYVPGQWLVESKSLKLFLFSFRNHGAFHEDCTVTIGKRLVDLLEPEWLRIGGYWYPRGGIPIDVFFQTGAAPPQNVWIPEQGVPNYRGRG

SEQ ID NO: 47849 - protein, 155 aa, Ochrobactrum intermedium
  REGION 1..155: note = tr|C4WK76|C4WK76_9RHIZ NADPH-dependent 7-cyano-7-deazaguanine reductase OS=Ochrobactrum intermedium LMG 3301 OX=641118 GN=queF PE=3 SV=1
MSEKTIYSDLKQLGSHASVPQKPEDAVLERVANPQAGTPYCVRFTAPEFTSLCPMTGQPDFAHLVIDYVPGQWLVESKSLKLFLFSFRNHGAFHEDCTVTIGKRLVDLLEPEWLRIGGYWYPRGGIPIDVFFQTGAAPQNVWIPEQGVPNYRGRG

SEQ ID NO: 47850 - protein, 155 aa, Ochrobactrum lupini; identical to SEQ ID NO: 47842
  REGION 1..155: note = tr|A0A256H044|A0A256H044_9RHIZ NADPH-dependent 7-cyano-7-deazaguanine reductase OS=Ochrobactrum lupini; OX = 255457 GN=queF PE=3 SV=1

SEQ ID NO: 47851 - protein, 155 aa, Ochrobactrum oryzae
  REGION 1..155: note = tr|A0A2S7IY65|A0A2S7IY65_9RHIZ NADPH-dependent 7-cyano-7-deazaguanine reductase OS=Ochrobactrum oryzae; OX = 335286 GN=queF PE=3 SV=1
MSEKTIYSDLKQLGSNASIPQNPEDAILERVINPQAGTAYCVRFTAPEFTSLCPMTGQPDFAHLVIDYVPGQWLVESKSLKLFLFSFRNHGAFHEDCTVTVGKRLVDLLEPEWLRIGGYWYPRGGIPIDVFFQTGATPQDVWIPEQGVANYRGRG

SEQ ID NO: 47852 - protein, 155 aa, Ochrobactrum pecoris
  REGION 1..155: note = tr|A0A5C5CK57|A0A5C5CK57_9RHIZ NADPH-dependent 7-cyano-7-deazaguanine reductase OS=Ochrobactrum pecoris; OX = 867683 GN=queF PE=3 SV=1
MSEKTIYSDLKQLGSNTSIPHAPDEAVLERVANPQAGTPYCVRFTAPEFTSLCPMTGQPDFAHLVIDYVPAQWLVESKSLKLFLFSFRNHGAFHEDCTVTIGKRLVELLEPEWLRIGGYWYPRGGIPIDVFFQTGAAPQNVWIPEQGVPNYRGRG

SEQ ID NO: 47853 - protein, 101 aa, Ochrobactrum pseudogrignonense
  REGION 1..101: note = tr|A0A256GUT6|A0A256GUT6_9RHIZ NADPH-dependent 7-cyano-7-deazaguanine reductase OS=Ochrobactrum pseudogrignonense OX=419475 GN=queF PE=3 SV=1
MTGQPDFAHLMIDYVPGKWLVESKSLKLFLFSFRNHGAFHEDCTVTIGKRLVELLDPEWLRIGGYWYPRGGIPIDVFYQTGETPKNVWIPEQSVPNYRGRG

SEQ ID NO: 47854 - protein, 155 aa, Ochrobactrum pseudogrignonense
  REGION 1..155: note = tr|A0A1A9FLC1|A0A1A9FLC1_9RHIZ NADPH-dependent 7-cyano-7-deazaguanine reductase OS=Ochrobactrum pseudogrignonense OX=419475 GN=queF PE=3 SV=1
MSEKTIYSDLKQLGSNSTIPQSPEEAVLERVANPQAGTPYCVRFTAPEFTSLCPMTGQPDFAHLMIDYVPGKWLVESKSLKLFLFSFRNHGAFHEDCTVTIGKRLVELLDPEWLRIGGYWYPRGGIPIDVFYQTGETPKNVWFPEQSVPNYRGRG

SEQ ID NO: 47855 - protein, 155 aa, unidentified
  source 1..155: note = Ochrobactrum quorumnocens
  REGION 1..155: note = tr|A0A248UFA8|A0A248UFA8_9RHIZ NADPH-dependent 7-cyano-7-deazaguanine reductase OS=Ochrobactrum quorumnocens OX=271865 GN=queF PE=3 SV=1
MSEKTIYSDLKQLGSTAAVPQSPEEAVLERVANPQAGTPYCVRFTAPEFTSLCPMTGQPDFAHLMIDYVPGEWLVESKSLKLFLFSFRNHGAFHEDCTVTIGKRLVELLKPEWLRIGGYWYPRGGIPIDVFYQTGAAPQNVWIPEQSVPNYRGRG

SEQ ID NO: 47856 - protein, 155 aa, Ochrobactrum rhizosphaerae
  REGION 1..155: note = tr|A0A256FII6|A0A256FII6_9RHIZ NADPH-dependent 7-cyano-7-deazaguanine reductase OS=Ochrobactrum rhizosphaerae OX=571254 GN=queF PE=3 SV=1
MSEKTIYSDLQQLGSNTTVPQSPEEAVLERVANPQAGTPYCIRFTAPEFTSLCPMTGQPDFAHLMIDYVPGEWLVESKSLKLFLFSFRNHGAFHEDCTVTIGKRLVELLQPEWLRIGGYWYPRGGIPIDVFYQTGAAPQNVWIPEQSVPNYRGRG

SEQ ID NO: 47857 - protein, 155 aa, Ochrobactrum sp.
  REGION 1..155: note = tr|A0A4R7WVW4|A0A4R7WVW4_9RHIZ NADPH-dependent 7-cyano-7-deazaguanine reductase OS=Ochrobactrum sp. LP_5_YM OX=2485134 GN=queF PE=3 SV=1
MSEKTVYSDLKQLGSSASIPQSPEEAVLERVANPQAGTPYCVRFTAPEFTSLCPMTGQPDFAHLMIDYVPGEWLVESKSLKLFLFSFRNHGAFHEDCTVTIGKRLVQLLKPEWLRIGGYWYPRGGIPIDVFYQTGAAPQNVWIPEQSVPNYRGRG

SEQ ID NO: 47858 - protein, 155 aa, Ochrobactrum sp.
  REGION 1..155: note = tr|A0A4R2Y600|A0A4R2Y600_9RHIZ NADPH-dependent 7-cyano-7-deazaguanine reductase OS=Ochrobactrum sp. BH3; OX = 586218 GN=queF PE=3 SV=1
MSEKTIYSDLKQLGSNSTVPQSPEEAVLERVANPQAGTPYCIRFTAPEFTSLCPMTGQPDFAHLMIDYVPGEWLVESKSLKLFLFSFRNHGAFHEDCTVTIGKRLVELLQPEWLRIGGYWYPRGGIPIDVFYQTGAAPQNVWIPEQSVPNYRGRG

SEQ ID NO: 47859 - protein, 155 aa, Ochrobactrum thiophenivorans
  REGION 1..155: note = tr|A0A256FWZ9|A0A256FWZ9_9RHIZ NADPH-dependent 7-cyano-7-deazaguanine reductase OS=Ochrobactrum thiophenivorans OX=571255 GN=queF PE=3 SV=1
MSEKTIYSELKQLGSNTIAPQSPEEAVLERVANPQAGTPYCVRFTAPEFTSLCPMTGQPDFAHLMIDYVPGNWLVESKSLKLFLFSFRNHGAFHEDCTVTIAKRLVELLEPQWLRIGGYWYPRGGIPIDVFYQTGETPKNVWIPEQSVPNYRGRG

SEQ ID NO: 47860 - protein, 155 aa, unidentified
  source 1..155: note = Unknown
  REGION 1..155: note = tr|A0A2A4Z375|A0A2A4Z375_9PROT NADPH-dependent 7-cyano-7-deazaguanine reductase OS=OCS116 cluster bacterium OX=2030921 GN=queF PE=3 SV=1
MSKEDIYKNLKSLGSHTELPTDPEQDILERVQNPQADVDYAVRFTAPEFTSLCPMTGQPDFAHLVIDYIPGDWLVESKSLKLYLGAFRNHGAFHEDCTVSIARKLADLLDPKWLRIGGYWYPRGGIPIDVFYQTGEIPAGVWVQDQGVPTYRGRG

SEQ ID NO: 47861 - protein, 291 aa, Odoribacter laneus
  REGION 1..291: note = tr|R5UVN9|R5UVN9_9BACT Queuine synthase; OS = Odoribacter laneus CAG:561 OX=1263089 GN=BN709_00111; PE = 4 SV=1
MEEEKLLGKSIAYPKTYCPDILVAVPRHLNREIYQIDPATSFFYGYDSWHCYEASFLTSNGLPVSGILKLVYPAESEYLVESKSLKLYLGSFQMYRLEDTVEESISLFCRKVAEDLGKCLHTSVGIHFYSNSPANLPFDFSDYEILENLPGISQCIFADYQENPVLLKENCSLSPGEIKVGSHLLKSNCKITRQPDWGSIYIRMKASSLPDRFSLLKYIVSLRDENHFHEEVCEMVFKRLTDFFHPEILSVGCLYTRRGGIDICPVRANRPEYLPLYLPCPDILTQKEFRQ

SEQ ID NO: 47862 - protein, 291 aa, Odoribacter laneus
  REGION 1..291: note = tr|H1DFR4|H1DFR4_9BACT Queuine synthase; OS = Odoribacter laneus YIT 12061 OX=742817; GN = HMPREF9449_01100 PE=4 SV=1
MEEEKLLGKSIAYPKTYCPDILVAVPRHLNREIYQIDPATSFFYGYDSWHCYEASFLTSNGLPVSGILKLVYPAESEYLVESKSLKLYLGSFQMYRLEDTVEESISLFCRKVAEDLGKCLHTSVGIHFYSNSPANLPFDFSDYEILENLPGISQCIFADYQENPVLLKENCSLSPGEIKVGSHLLKSNCKITRQPDWGSIYIRMKASSLPDRFSLLKYIVSLRDENHFHEEVCEMVFKRLTDFFYPEILSVGCLYTRRGGIDICPVRANRPEYLPLYLPCPDILTQKEFRQ

SEQ ID NO: 47863 - protein, 292 aa, Odoribacter sp.
  REGION 1..292: note = tr|R5P9N6|R5P9N6_9BACT Queuine synthase; OS = Odoribacter sp. CAG:788 OX=1262909 GN=BN783_02392 PE=4; SV = 1
MQEESKLLGKEIAYPETYCPEILVAVPRRLNREIYGIDRPDSLFCGYDSWHCYEASFLTKQGLPVAGILKLVYASTSEFLVESKSLKLYLGSFNMICLGDSVAEGIAVFKATVARDLSALLHTSVETAFFQTLPDSRPFDFPEYTLLETLPRIAAASFSAYQENPAYLSENVIKYGGEMLVCSHLLKSNCKITHQPDWGSIYIRIKAAHLPDELSLLKYIVSLRDENHFHEEICEMTFKRLTDIFNPEILTVCCLYTRRGGIDICPVRANKAEFIPACLPRADILTASAFRQ

SEQ ID NO: 47864 - protein, 291 aa, Odoribacter sp.
  REGION 1..291: note = tr|A0A1Q6IDY0|A0A1Q6IDY0_9BACT NADPH-dependent 7-cyano-7-deazaguanine reductase QueF OS=Odoribacter sp. 43_10 OX=1897010 GN=BHV82_16235 PE=4 SV=1
MTTEDKLLGKQVEYPQHYCPAILVAVPRRQNREIYGIDHPDHLFCGYDSWHAYEASFILDNGIPVAGMLKITYPASSPSIVESKSLKLYLGSFHMEALGKTLGQAVDRFVATVAADLSALLCTEVKVHFYEDAPSFLPFDFNDYTLLEKEPDTYALQFSVYQENPALLTENIQEAGELKVCSHLLKSNCKITRQPDWGSLYIHLKGRTQPAYASLLKYIVSLRNENHFHEEICEMTFKRLSDLFQPEILMVSCLYTRRGGIDICPCRANKPDYLPHYLPQADILTQRNFRQ

SEQ ID NO: 47865 - protein, 291 aa, Odoribacter splanchnicus
  REGION 1..291: note = tr|R6FDY6|R6FDY6_9BACT 7-cyano-7-deazaguanine reductase OS=Odoribacter splanchnicus CAG:14 OX=1263090; GN = BN493_02204 PE=4 SV=1
MTTEDKLLGKQVEYPQHYCPAILVAVPRRLNREIYGIDHPDRLFCGYDSWHAYEASFILDNGIPVAGMLKITYPASSPSIVESKSLKLYLGSFHMEALGKTLGQAVDRFVATVAADLSALLCTEVKVHFYEDVPSFLPFDFNDYTLLEKEPDTYALQFSVYQENPALLTENIQEAGELKVCSHLLKSNCKITRQPDWGSLYIHLKGRTQPAYASLLKYIVSLRNENHFHEEICEMTFKRLSDLFQPEILMVSCLYTRRGGIDICPCRANKPDYLPHYLPQADILTQRNFRQ

SEQ ID NO: 47866 - protein, 291 aa, Odoribacter splanchnicus; identical to SEQ ID NO: 47864
  REGION 1..291: note = tr|A0A412TJ75|A0A412TJ75_9BACT NADPH-dependent 7-cyano-7-deazaguanine reductase QueF OS=Odoribacter splanchnicus OX=28118 GN=DWW57_18330 PE=4 SV=1

SEQ ID NO: 47867 - protein, 144 aa, unidentified
  source 1..144: note = Okeania hirsuta
  REGION 1..144: note = tr|A0A3N6NQB9|A0A3N6NQB9_9CYAN NADPH-dependent 7-cyano-7-deazaguanine reductase OS=Okeania hirsuta; OX = 1458930 GN=queF PE=3 SV=1
MNYSETNHELSQEFNMQEAKYGERNILEGELITFPNPRVGRRYEINITLPEFTCKCPFSGYPDFATIDVKYVPNERVVELKALKLYINSYRDRYISHEESVNQILDDLVAACDPLEVKIKANFYPRGNVHTTIEVEHYKENLDK

SEQ ID NO: 47868 - protein, 275 aa, unidentified
  source 1..275: note = Oleiagrimonas soli
  REGION 1..275: note = tr|A0A099CYM1|A0A099CYM1_9GAMM NADPH-dependent 7-cyano-7-deazaguanine reductase OS=Oleiagrimonas soli; OX = 1543381 GN=queF PE=3 SV=1
MTTPEDSQLGKATAYRNRYAPDLLFPIPRSKGRAELGLRGELPFQGVDLWNAYELSWLDPRGKPMVALAEFHVPADSPAIIESKSFKLYLNSFSGERLDEATLRNRLARDLGDAAGAPVAVHLTPASAFPAQRIEEPEGLLIDALEIDIDVYGPPDPSFLRADTAAAPVRETLLSNLLKSNCPVTGQPDWASLRIDYVGAPIDREGLLRYVVSFREHREFHEHCVERIFMDLLRHCAPTQLDVGARYTRRGGLDINPFRSSEPGRTPGNPRGARQ

SEQ ID NO: 47869 - protein, 275 aa, unidentified
  source 1..275: note = Oleiagrimonas sp.
  REGION 1..275: note = tr|A0A328T1H8|A0A328T1H8_9GAMM NADPH-dependent 7-cyano-7-deazaguanine reductase OS=Oleiagrimonas sp. MCCC 1A03011 OX=1926883 GN=queF PE=3 SV=1
MTTPEDSQLGKATAYRNRYAPDLLFPIPRSKGRAELGLHGNLPFQGVDIWNAYELSWLDPRGKPVVALAEFHVPSDSPAIIESKSFKLYLNSFSGERLDEATLVERLARDLGEAAGAPVAVHLTPAADFGAQRIEEPEGVLIDALDLDIDVYGPPDPSFLRADTNAAPVRETLLSNLLKSNCPVTGQPDWASLRIDYVGAPIDREGLLRYIVSFREHREFHEHCVERIFMDLIRHCAPARLDVSARYTRRGGLDINPFRSSESGHTPGNPRGARQ

SEQ ID NO: 47870 - protein, 275 aa, Oleibacter marinus
  REGION 1..275: note = tr|A0A1N7PFR4|A0A1N7PFR4_9GAMM NADPH-dependent 7-cyano-7-deazaguanine reductase OS=Oleibacter marinus; OX = 484498 GN=queF PE=3 SV=1
MMGSVHSETNPLGKTSEYPEQYDAGLLFPIDRNESWKASGDDRSAITFYGVDIWNGYEVSWLTPNGKPVVCVAEFRVPSGSPFLVESKSFKLYLNSFNQTRFENESDVKAVMERDLSLAAGGAVTVAFHGMDYAYPAAPDALCIDDVDVDISSYTPSPELLKVVPDSQFDGWICSHLLKSNCPVTGQPDWGSVYIQYKGQEIDKASLLAYLVSLRQHQDFHEQCVERTFRDIQQRCTPESLTVYARYVRRGGLDINPFRTTEETFEALNFRLQRQ

SEQ ID NO: 47871 - protein, 273 aa, Oleibacter sp.
  REGION 1..273: note = tr|A0A2D8AAC5|A0A2D8AAC5_9GAMM NADPH-dependent 7-cyano-7-deazaguanine reductase OS=Oleibacter sp.; OX = 2024845 GN=queF PE=3 SV=1
MASVTSEHNPLGKSSEYRDQYDASLLFPIEREESWKAHGLDRHEVPFFGEDIWNGYEISWLNLKGKPLVALAEFRIPASSRYLVESKSFKLYLNSFNQTRFENGSDVRQLMEKDLSAAVGAQVKVVFHPVYHVFPDAPEALCIDNLDIEVSSYELDDSLLQCGEGQFDGWICSHLLKSNCPVTGQPDWGSLFIRYKGPRIDEAGLLAYIVSLRQHQDFHEHCVERTFRDLWLKCKPESLTVYARYVRRGGLDINPFRTSEDSGEAVNFRLPRQ

SEQ ID NO: 47872 - protein, 281 aa, Oleiphilus messinensis
  REGION 1..281: note = tr|A0A1Y0IAB9|A0A1Y0IAB9_9GAMM NADPH-dependent 7-cyano-7-deazaguanine reductase OS=Oleiphilus messinensis; OX = 141451 GN=queF PE=3 SV=1
MSELKNAPLGKQTLYVSEYDPSLLFPIARALNREELNIGTELPFFGIDLWTGYELSWLDYQGKPQVAIAVFRFPCESRYIIESKSFKLYLNSYNQTRFASSHEVRVQLQKDLAGAVGCAVSVDVHPVSRYLTGEGRDTPSNALDQFVLLDELDVTIDDYQYNPQHLSLNEGSQSGHYRYLSHLLKSNCPVTGQPDWATVYIDLQGEAPDPEGLLKYIISFREYQDFHEHCVEKIYVDLMRHLQPQELTVWARYTRRGGMDINPYRSSSNTRQFDFSRTERQ

SEQ ID NO: 47873 - protein, 290 aa, Oleiphilus messinensis
  REGION 1..290: note = tr|A0A1H5YQ52|A0A1H5YQ52_9GAMM NADPH-dependent 7-cyano-7-deazaguanine reductase OS=Oleiphilus messinensis; OX = 141451 GN=queF PE=3 SV=1
MSDSKQVHRDEQASPETSLLGKETQYVDQYDAGLLFPIPRQPKRDEIGLGQLDAEEGGLPFFGQDIWNAFELSWLNAKGKPEVAVAVFRIPADSENIIESKSFKLYLNSFNQTKLSGCHELQATLEKDLSSAAGAPVMVELHGLDGAIALQVVEPKGRCIDGLDIEVSHYHPEPSLLKNQSELIVEETLYSHLLRSNCPVTGQPDWATVEISYTGKKIDKAGLLAYIISFRQHNDFHEQCVERMFVDLSQRCKPEELTVVARYTRRGGLDINPWRSSNRPDLENRRFVRQ

SEQ ID NO: 47874 - protein, 277 aa, Oleispira antarctica
  REGION 1..277: note = tr|R4YN33|R4YN33_OLEAN NADPH-dependent 7-cyano-7-deazaguanine reductase OS=Oleispira antarctica RB-8 OX=698738 GN=queF PE=3 SV=1
MASVHSENNPLGKNSAYIDRYDPTLLFPISRAEGWSSVGIERDSLPFFGEDVWNGYEVSWLNDKGIPQVAMAEFRLPATSPFLIESKSFKLYLNSYNQTKFANKEMVEQRMEKDLSAAAGGGVSVDILSLQYRFPAEPKSVCIDDLDISMDKYELDPEILTLATGAEAGDFEGLLVSHLLKSNCPVTGQPDWGSIYIEYKGAHIDEKSLLTYIVSLRTHQDFHEQCVERTFWDIWTRCQPESLTVYARYVRRGGLDINPMRSSDKSKQAVNFRTIRQ

SEQ ID NO: 47875 - protein, 266 aa, Oleispira antarctica
  REGION 1..266: note = tr|A0A1Y5I2T3|A0A1Y5I2T3_OLEAN NADPH-dependent 7-cyano-7-deazaguanine reductase (Fragment) OS=Oleispira antarctica OX=188908 GN=A9R00_00955 PE=3 SV=1
GKNSAYIDSYDATLLFPISRAESWKAAGIERNTLPFFGEDIWNGYEISWLNDKGIPQVAMAEFRLPATSPFLIESKSFKLYLNSYNQTRFANKETVERRMVRDLSAAAGGEVKVVILPLNYSFPTEPKAVCIDALDISMDKYELDPEVLKLAEGEEAGEYQGMLVSHLLKSNCPVTGQPDWGSIYIEYKGAHIDEKSLLTYLVSLRTHQDFHEQCVERTFWDIWTRCKPESLTVYARYVRRGGLDINPMRSSDSSKAAINFRTIRQ

SEQ ID NO: 47876 - protein, 277 aa, Oleispira sp.
  REGION 1..277: note = tr|A0A2E3BEP7|A0A2E3BEP7_9GAMM NADPH-dependent 7-cyano-7-deazaguanine reductase OS=Oleispira sp.; OX = 2024846 GN=queF PE=3 SV=1
MASVHSDSNPLGKSSAYIDSYDATLLFPISRAESWKASGIDRDTLPFFGEDIWNGYEISWLNDKGIPQVAMAEFRLPATSPFLIESKSFKLYLNSYNQTRFANKETVEQRMIRDLSAASGGDVKVVILPLNHSFPAEPKALCIDDLDISMDKYELDPSVLALSKGDEAGEFQGMLVSHLLKSNCPVTGQPDWGSIYIEYKGAHIDEATLLTYLVSLRTHQDFHEQCVERTFWDIWTRCKPESLTVYARYVRRGGLDINPMRSSEASKPAINFRTIRQ

SEQ ID NO: 47877 - protein, 150 aa, unidentified
  source 1..150: note = Oleomonas sp.
  REGION 1..150: note = tr|A0A418WEZ9|A0A418WEZ9_9PROT NADPH-dependent 7-cyano-7-deazaguanine reductase OS=Oleomonas sp. K1W22B-8; OX = 2320859 GN=queF PE=3 SV=1
MTTDLHLLGHHANLPASPGEAVLERIANPHPETDYLVRFVCPEFTSLCPVTGQPDFAHLVIDYVPDGWLVESKALKLYMGSFRNHGAFHEDCTVGIGKRLVAELAPKWLRIGGYWYPRGGIPIDVFYATGPAPQGLWLPDQGVAPYRGRG

SEQ ID NO: 47878 - protein, 286 aa, Oligella ureolytica
  REGION 1..286: note = tr|A0A378XJB1|A0A378XJB1_9BURK NADPH-dependent 7-cyano-7-deazaguanine reductase OS=Oligella ureolytica; OX = 90244 GN=queF PE=3 SV=1
MTNKITDSNLGQDTQYPEQYDPTLLFPIARAETRQGSPAEKTPAWIGGDIWTAFEVSWLDSKGKPIVAIASFEFPQTNRYLIESKSFKLYLNSFNQSKFNSAEEVVALFEQDLSKASGGTVKVDIKLSHEWNNCQLINIPGTSVDELEVEIDTYEPNASLLQLKDETGDDSVQVNILYSNLLKSNCPVTNQPDWGTVIVAYKGKTIDPAAFLKYIVSYRLHNGFHELCVEEIYCDLLTQCAPDELFVMARYTRRGGLDINPWRASSEEIIEAVKELVAPFNRLARQ

SEQ ID NO: 47879 - protein, 290 aa, Oligella urethralis
  REGION 1..290: note = tr|A0A095ZBG8|A0A095ZBG8_9BURK NADPH-dependent 7-cyano-7-deazaguanine reductase OS=Oligella urethralis DNF00040 OX=1401065 GN=queF PE=3 SV=1
MPKQISDSNLGQTTQYPNQYDPSLLFPIARVVTREDSRAANTPNWIGADLWTAYEISWLDSRGKPVVAIASFDFAVSNPYLIESKSFKLYLNSFNQSKFDAPEQVIERMTKDLSQAAGGKVTIQLLSPQAWQDAQIIEPLGDCVDDLAISIDCYDANPALLQLLDSETDAEGEQAEQARILYSNLLKSNCPVTNQPDWGTVIIAYQGQTIDPAAFLRYIVSYRQHNGFHELCVEEIYCDLMKYCAPEALFVMARYTRRGGLDINPWRASSQAIIKGMEQLLTPFNRLARQ

SEQ ID NO: 47880 - protein, 290 aa, Oligella urethralis
  REGION 1..290: note = tr|A0A2N6QF07|A0A2N6QF07_9BURK NADPH-dependent 7-cyano-7-deazaguanine reductase OS=Oligella urethralis; OX = 90245 GN=queF PE=3 SV=1
MPKQISDSNLGQTTQYPNQYDPSLLFPIARVVTREDSRAANTPNWIGADLWTAFEISWLDSRGKPVVAIASFDFAVSNPYLIESKSFKLYLNSFNQSKFDAPEQVIERMTKDLSQAAGGKVTIQLLSPQAWQDAQIIEPLGDCVDDLAISIDCYDANPALLQLLDSETDAEGEQAEQARILYSNLLKSNCPVTNQPDWGTVIIAYQGQTIDPAAFLRYIVSYRQHNGFHELCVEEIYCDLMKYCAPEALFVMARYTRRGGLDINPWRASSQAIIKGMEQLLTPFNRLARQ

SEQ ID NO: 47881 - protein, 158 aa, Oligotropha carboxidovorans
  REGION 1..158: note = tr|B6JFY3|B6JFY3_OLICO NADPH-dependent 7-cyano-7-deazaguanine reductase OS=Oligotropha carboxidovorans (strain ATCC 49405 / DSM 1227 / KCTC 32145 / OM5) OX=504832 GN =queF PE=3 SV=1
MSRKPRPAATKAPLQLGRPVTLPASPEEAKLDRVPNPHAGTDYLVRFAAPEFTSLCPITGQPDFAHLVIDYVPGNWLVESKALKLYLASFRNHGAFHEDCTVAIGQRLVREIKPRWLRIGGYWYPRGGIPIDVFWQSGRLPKNVWVPDQGVPPYRGRG

SEQ ID NO: 47882 - protein, 162 aa, Olsenella sp.
  REGION 1..162: note = tr|A0A1T4LR25|A0A1T4LR25_9ACTN NADPH-dependent 7-cyano-7-deazaguanine reductase OS=Olsenella sp. KH1P3; OX = 1945884 GN=queF PE=3 SV=1
MSEAGRSETELDGVTLLGNQNTTYRDDYAPEVLETFVNKHQDRDYMVTFECPEFTTLCPKTGQPDFGTIYINYIPNVRMVESKSLKLYLFSFRNHGDFHEDVVNIIMDDLVRLMEPRYIEVFGKFRPRGGISILPFANWANPEFGYGDLVTRRQFEQLGGHE

SEQ ID NO: 47883 - protein, 162 aa, Olsenella umbonata; identical to SEQ ID NO: 47882
  REGION 1..162: note = tr|A0A1H9P5I7|A0A1H9P5I7_9ACTN NADPH-dependent 7-cyano-7-deazaguanine reductase OS=Olsenella umbonata; OX = 604330 GN=queF PE=3 SV=1

SEQ ID NO: 47884 - protein, 278 aa, unidentified
  source 1..278: note = Unknown
  REGION 1..278: note = tr|A0A520S0M5|A0A520S0M5_9GAMM NADPH-dependent 7-cyano-7-deazaguanine reductase QueF OS=OM182 bacterium; OX = 2510334 GN=queF PE=4 SV=1
MERMCSSMVSSLGSDTTDYVTSYRPSLLESVKRTDQRCKLGLKGEQLPFEGYDVWNAYEFTWLNSRGKPEVALVQLKIPVTSTYIVESKSLKLYFCSFSNTSFQDQVKVIETLKADLSEAFGGSVSVTLKNPDQIFREGINIQGGESIDDLDIDISEYHIRPEYLDMEAEVSGAEMLYSDLFMSLCPITGQPDYATVFVNYSGPLISHRGLLCYLVSYREHADFAEQICERIFMDLIERCNLEALSVGLQFSRRGGIDINAYRMSGIKAPTFVRNWRQ

SEQ ID NO: 47885 - protein, 248 aa, unidentified
  source 1..248: note = Unknown
  REGION 1..248: note = tr|A0A0R2SBW1|A0A0R2SBW1_9GAMM QueF_N domain-containing protein OS=OM182 bacterium BACL3 MAG-120507-bin80 OX=1655577 GN=ABR69_06310 PE=4 SV=1
MFGFDHWQAFELSWLDSSGKPSVAVAELFFDCRSPAIVESKSLKLYLNSFNHERMASTELLASTIKADLEQASGNVVNVLLHSLGEYRALMAKNFAPRLQDNRTVVALDRLPIIDNVAPLDASVIEFIRLDKAPNALSANKETRYTSDLFRSNCPVTNQPDWASLEIKVTGIEIEGASLLSYLCSFREHQGYHEECAERIFVALSNHCRPDSLQVSMNYLRRGGLDINVYRASEAITHADRLARDVRQ

SEQ ID NO: 47886 - protein, 119 aa, unidentified
  source 1..119: note = Omnitrophica bacterium
  REGION 1..119: note = tr|A0A1G1M9C6|A0A1G1M9C6_9BACT NADPH-dependent 7-cyano-7-deazaguanine reductase OS=Omnitrophica bacterium RIFOXYB12_FULL_50_7 OX=1801835 GN=queF PE=3 SV=1
MTMQPSKKLEIFKNPYPRRDYNVEMECPEFTCLCPKTGQPDFATIHISYVPDEFCVELKSLKLYLWGYRNEGTFHETVTNKILDDLVKAVKPRHMSIEADFFVRGGIHTVITAAYSKKK

SEQ ID NO: 47887 - protein, 124 aa, unidentified
  source 1..124: note = Omnitrophica bacterium
  REGION 1..124: note = tr|A0A1G1KT77|A0A1G1KT77_9BACT NADPH-dependent 7-cyano-7-deazaguanine reductase OS=Omnitrophica bacterium RIFCSPLOWO2_12_FULL_44_17 OX=1801832 GN=queF PE=3 SV=1
MSTKPNKNLEVFQNPYSQRNYVINFECPEFTCLCPKTGQPDFATIRIEYIPNKFCVELKSLKLYLWSYRNEGTFHEAVTNQILDDLVKATKPRRMKVVGDFYVRGGIHTVVTAEYSKKAVSTPQ

SEQ ID NO: 47888 - protein, 128 aa, unidentified
  source 1..128: note = Unknown
  REGION 1..128: note = tr|A0A1G1NUI5|A0A1G1NUI5_9BACT NADPH-dependent 7-cyano-7-deazaguanine reductase OS=Omnitrophica WOR_2 bacterium RIFCSPLOWO2_02_FULL_50_19 OX=1801865 GN=queF; PE = 3 SV= 1
MKRSYTAEHAGKGVKDRLPSIEAFPSFHKGYEIKIEIPEYTSVCPKTGLPDFGTITISYMPDKSCIELKSLKYYILGFRNMGIFYENAVNRILKDVVAACKPKRCIVTGEFNVRGGMKTTVTARYGIK

SEQ ID NO: 47889 - protein, 129 aa, unidentified
  source 1..129: note = Unknown
  REGION 1..129: note = tr|A0A0S8IJH2|A0A0S8IJH2_9BACT NADPH-dependent 7-cyano-7-deazaguanine reductase OS=Omnitrophica WOR_2 bacterium SM23_72 OX=1703777 GN=queF PE=3 SV=1
MKKSSYEGLQKNIRKLKTPRIEIWKNQYPDKIYTIHLDVPEFTCICPKTGLPDFAELKIEYSPNTYCVELKSFKMYTIFYRNIGIFHEHVVNKILDDLVRAVHPRWMKITGIFNPRGGITTTVSAEYNK

SEQ ID NO: 47890 - protein, 127 aa, unidentified
  source 1..127: note = Opitutaceae bacterium
  REGION 1..127: note = tr|A0A178IDL1|A0A178IDL1_9BACT NADPH-dependent 7-cyano-7-deazaguanine reductase OS=Opitutaceae bacterium TSB47 OX=1184151 GN=queF PE=3 SV=1
MADPKLLETFPNPAPERDYVIEHTHHEFTSLCPMTGHPDFGDIVVRYVPDKTCVELKSLKLYFHAYRNEGAFFEAVTNRICDDLGRALRPRSLAVISQWKARGGFSSIVTAEWKPPAKTASRAKKKR

SEQ ID NO: 47891 - protein, 119 aa, unidentified
  source 1..119: note = Opitutaceae bacterium
  REGION 1..119: note = tr|A0A2T6E172|A0A2T6E172_9BACT NADPH-dependent 7-cyano-7-deazaguanine reductase OS=Opitutaceae bacterium EW11 OX=2161865 GN=queF PE=3 SV=1
MADPKILETFPNPAPHRDYVIEHTHHEFTSLCPMTGHPDFADITVRYVPDKICVELKSLKLYFHAYRNEGIFFEAATNKICDDLGAALKPRKLTIVADWKARGGFSSVITADWSPKKRR

SEQ ID NO: 47892 - protein, 121 aa, unidentified
  source 1..121: note = Opitutae bacterium
  REGION 1..121: note = tr|A0A2A2QSD8|A0A2A2QSD8_9BACT NADPH-dependent 7-cyano-7-deazaguanine reductase OS=Opitutae bacterium Tous-C5TDCM OX=1982322 GN=queF PE=3 SV=1
MADPKILELFPNPAPHRDYVIAHTQHEFTSMCPITGHPDFAVITVKFTPDKTCVELKSLKLYLHAFRNEGIFFEAVTNKICDDIGAALKPRALTIIADWKGRGGISSLVTCEWSAKQAKKR

SEQ ID NO: 47893 - protein, 140 aa, unidentified
  source 1..140: note = Opitutae bacterium
  REGION 1..140: note = tr|A0A2D8VCW1|A0A2D8VCW1_9BACT NADPH-dependent 7-cyano-7-deazaguanine reductase OS=Opitutae bacterium; OX = 2026771 GN=queF PE=3 SV=1
MTDQNPEHDDLTRLGEGRTEPSRELETFPNRNPDRDYLVELRTSEFSCLCPKTGQPDFADILIRYVPDQKIVESKSLKLYFWSYRDEGVFHEHFANLLLDDLVGALSPRWCRVEVDFNPRGGIGISVMAEHGAAPEGLEG

SEQ ID NO: 47894 - protein, 139 aa, unidentified
  source 1..139: note = Opitutales bacterium
  REGION 1..139: note = tr|A0A2E7PYD6|A0A2E7PYD6_9BACT NADPH-dependent 7-cyano-7-deazaguanine reductase OS=Opitutales bacterium; OX = 2026772 GN=queF PE=3 SV=1
MIDVNPEHENLSELGKGGTQPQRVLETFPNRNPERDYIVDLHTNEFTCLCPKTGQPDFADIVIRYVPDQKIVESKSLKLYLWSYRDEGVFHEHFANLLLDDLVAAIEPRWCRVEVTFNARGGIGITVSADHGAFPEAAY

SEQ ID NO: 47895 - protein, 124 aa, unidentified
  source 1..124: note = Opitutales bacterium
  REGION 1..124: note = tr|A0A2E6N9S5|A0A2E6N9S5_9BACT NADPH-dependent 7-cyano-7-deazaguanine reductase OS=Opitutales bacterium; OX = 2026772 GN=queF PE=3 SV=1
  VARIANT 15: note = Xaa can be any naturally occurring amino acid
  VARIANT 44: note = Xaa can be any naturally occurring amino acid
  VARIANT 46: note = Xaa can be any naturally occurring amino acid
  VARIANT 58: note = Xaa can be any naturally occurring amino acid
  VARIANT 114: note = Xaa can be any naturally occurring amino acid
MDIETFPNPNPERNXTIQHIQEEFTSTCPMTGHPDYATVVFSYXPXEVCIELKAMKLXLHSFRNKGIFFEAATNQIFEDLYATCKPRWARLETIWRGRGGIRSNVVVEDSQDSXDGPVTFPFSA

SEQ ID NO: 47896 - protein, 117 aa, Opitutus sp.
  REGION 1..117: note = tr|A0A1H1PJ22|A0A1H1PJ22_9BACT NADPH-dependent 7-cyano-7-deazaguanine reductase OS=Opitutus sp. GAS368; OX = 1882749 GN=queF PE=3 SV=1
MADKKILETFPNPAPQRDYVIEHTHHEFTSVCPMTGHPDFADITVRYVADKKCVELKSLKLYFHAYRNEGIFFEAVTNKICDDLGTVLKPRSLTIISKWKARGGFSSVVTAEWKRKR

SEQ ID NO: 47897 - protein, 124 aa, Opitutus sp.
  REGION 1..124: note = tr|A0A2T6CZM4|A0A2T6CZM4_9BACT NADPH-dependent 7-cyano-7-deazaguanine reductase OS=Opitutus sp. ER46; OX = 2161864 GN=queF PE=3 SV=1
MADPKILETFPNPAPQRDYVIEHTHHEFTSLCPITGHPDFAHITVRYVADKICVELKSLKLYFHAFRNEGIFFEAVTNKICDDLGTVLKPRQLTIIADWKARGGFTSVITAEWKPAARKGRSAR

SEQ ID NO: 47898 - protein, 119 aa, Opitutus terrae
  REGION 1..119: note = tr|B1ZQ92|B1ZQ92_OPITP NADPH-dependent 7-cyano-7-deazaguanine reductase OS=Opitutus terrae (strain DSM 11246 / JCM 15787 / PB90-1) OX=452637 GN=queF; PE = 3 SV=1
MADIKILETFPNPAPARDYVIEHTHHEFTSVCPITGHPDFADITVRYVADKICVELKSLKLYFHAYRNEGIFFEAVTNRICDDLGKVLNPRSLMVISEWKARGGFTSRITAEWKRKRKS

SEQ ID NO: 47899 - protein, 160 aa, Orbus hercynius
  REGION 1..160: note = tr|A0A495RDB3|A0A495RDB3_9GAMM NADPH-dependent 7-cyano-7-deazaguanine reductase OS=Orbus hercynius; OX = 593135 GN=queF PE=3 SV=1
MSTHHNLALLGDKSARYLIDYTPDVLETFDNKHLNNDYFVKFNCPEFTSLCPVTGQPDFASIYIAYVPNIKMVESKSLKFYLFSFRNHGAFHEDCINIIMQDLIALMDPKYIEVWGKFTPRGGISIDPYANYGKPNTRWQDIAVNRLANHDLYPENIDNR

SEQ ID NO: 47900 - protein, 160 aa, Oribacterium sp.
  REGION 1..160: note = tr|A0A1I2PW56|A0A1I2PW56_9FIRM NADPH-dependent 7-cyano-7-deazaguanine reductase OS=Oribacterium sp. WCC10; OX = 1855343 GN=queF PE=3 SV=1
MRENEDLTLLGNQNVKYKYEYDPSVLESFINKHPDNDYFVKFNCPEFTSLCPITGQPDFATIYISYVPDQKMVESKSLKLYLFSFRNHGDFHEDVVNVIMKDLIKLMDPKYIEVWGKFLPRGGLSIDPYCNYGKKGTSWEKVAWDRLTQHDMYPEKIDNR

SEQ ID NO: 47901 - protein, 160 aa, Oribacterium sp.
  REGION 1..160: note = tr|A0A1S9BTK1|A0A1S9BTK1_9FIRM NADPH-dependent 7-cyano-7-deazaguanine reductase OS=Oribacterium sp. C9; OX = 1943579 GN=queF PE=3 SV=1
MRENEDLTLLGNQQVKYKYEYDPSVLESFNNKHPENDYFVKFNCPEFTSLCPITGQPDFATIYISYVPDKKMVESKSLKLYLFSFRNHGDFHEDVVNVIMKDLIRLMDPKYIEVWGKFLPRGGLSIDPYCNYGKKGTAWEKVAWDRLTQHDMYPEKIDNR

SEQ ID NO: 47902 - protein, 153 aa, unidentified
  source 1..153: note = Oricola cellulosilytica
  REGION 1..153: note = tr|A0A4R0PD13|A0A4R0PD13_9RHIZ NADPH-dependent 7-cyano-7-deazaguanine reductase OS=Oricola cellulosilytica OX=1429082 GN=queF PE=3 SV=1
MTDGTDQLSQLGKPVSTPDAPEQAQLERVENPHPDTDYVARFTVPEFTSVCPVTGQPDFAHLVLDYVPDRWLVESKSLKLFLTSFRNHGAFHEDCTVHIGRKLVELLEPRWFRIGGYWYPRGGIPIDVFWQHGKLPEGVWAPDQGVAPYRGRG

SEQ ID NO: 47903 - protein, 278 aa, unidentified
  source 1..278: note = Orrella dioscoreae
  REGION 1..278: note = tr|A0A1C3JZV7|A0A1C3JZV7_9BURK NADPH-dependent 7-cyano-7-deazaguanine reductase OS=Orrella dioscoreae; OX = 1851544 GN=queF PE=3 SV=1
MTLDLQHAPLGQTVGYPSQYDPALLFPIARAGARGELGLPADAPLPFAGVDLWNAYEVSWLNARGKPEVALARCVVPAESPNLIESKSFKLYLNSYNQTRMADADTVRARIAADLSAAAGAPVAVELILPAAYGELTLGEPEGECVDGLDVEIDQYAPSAELLAVDAARGVVRETLLSRLLKSNCPVTGQPDWATVQVSYEGPAIDRESLLRYVVGFRQHSGFHEQCVERMFLDILARCQPTSLSVYARYTRRGGLDINPWRGTADHLPPADLRTPQQ

SEQ ID NO: 47904 - protein, 281 aa, unidentified
  source 1..281: note = Oryzisolibacter propanilivorax
  REGION 1..281: note = tr|A0A1G9TJY4|A0A1G9TJY4_9BURK NADPH-dependent 7-cyano-7-deazaguanine reductase OS=Oryzisolibacter propanilivorax OX=1527607 GN=queF PE=3 SV=1
MHTPEQSQLGQRSAYVDQYDAGLLFPLPRAPKRLEIGIAGAAPFFGADLWSAYELSWLNERGKPQVAIAHLTVPCETPQLIESKSLKLYLNSFNNTRFVSADEVRARLRADLGEAVWRGSGQSGGVGVRLLAPEQFDAQQVQELDGLLLDRLDLDCTHYQPAPELLEADHTEAPVTETLVSHLLKSNCLVTGQPDWGSVQIAYSGAQIDQAGLLRYLVSFRNHNEFHEQCVERIFMDIWTRCRPIKLAVYARYTRRGGLDINPFRTSHPGPLPANVRTARQ

SEQ ID NO: 47905 - protein, 281 aa, unidentified
  source 1..281: note = Oryzomicrobium terrae
  REGION 1..281: note = tr|A0A5C1EAM6|A0A5C1EAM6_9RHOO NADPH-dependent 7-cyano-7-deazaguanine reductase OS=Oryzomicrobium terrae; OX = 1735038 GN=queF PE=3 SV=1
MTDVSSSRPEHSPLGKAVTYCATYAPELLFPISRDDKRREIGVDPARLPFHGADLWNGYELSWLNPKGKPVAALATFVVPAESPRLIESKSFKLYLNSFNQTSFADAAAVRAVLERDLSAAAGAPVAVTVEPLTTHPAREVGYPQGILLDDLDVACDVYLPAPELLSADPHAAPVEEILVSHLLKSNCLVTGQPDWGCVVVRYRGAPIDRAGLLRYIVSFRNHNEFHEQCVERIYVDILARCRPAFLSVHARYTRRGGLDINPWRSSAPGPMPDNRGEVRQ

SEQ ID NO: 47906 - protein, 141 aa, Oscillatoria acuminata
  REGION 1..141: note = tr|K9TCG4|K9TCG4_9CYAN NADPH-dependent 7-cyano-7-deazaguanine reductase OS=Oscillatoria acuminata PCC 6304 OX=56110 GN=queF PE=3 SV=1
MQSDVSPTATPTDETPQVKYGEREIEEGQLITFPNPRVGRRYDIHITLPEFTCKCPFSGYPDFATIYLSYIPNERVVELKAIKLYINSYRDRYISHEESINQILDDFVAACDPLEATIKGDFHPRGNVHTVIEVRHTKPQT

SEQ ID NO: 47907 - protein, 139 aa, unidentified
  source 1..139: note = Oscillatoria nigroviridis
  REGION 1..139: note = tr|K9VQY7|K9VQY7_9CYAN NADPH-dependent 7-cyano-7-deazaguanine reductase OS=Oscillatoria nigro-viridis PCC 7112 OX=179408 GN=queF PE=3 SV=1
MNNYAPEQTMSQKSSTEAMKYGERQILEGELITFPNPRVGRRYSINITLPEFTCKCPFSGYPDFATIHVTYVPDERVVELKALKLYVNSYRDRYISHEESINQILDDFVAACAPLEATIKGDFSPRGNVHTVIEVSHQK

SEQ ID NO: 47908 - protein, 130 aa, unidentified
  source 1..130: note = [Oscillatoria] sp.
  REGION 1..130: note = tr|D8G3E6|D8G3E6_9CYAN NADPH-dependent 7-cyano-7-deazaguanine reductase OS=[Oscillatoria] sp. PCC 6506 OX=272129 GN=queF PE=3 SV=1
MKYGEREILEGELITFPNPRVGRRYDINITLPEFTCKCPFSGYPDFATIYVSYVPNERVVELKALKLYINSYRDRYISHEESINQILDDFVAACEPLEVTVKGDFLPRGNVHTVIEVRHQLGTREEGARG

SEQ ID NO: 47909 - protein, 141 aa, unidentified
  source 1..141: note = Oscillatoriales cyanobacterium
  REGION 1..141: note = tr|A0A1C0VWL6|A0A1C0VWL6_9CYAN NADPH-dependent 7-cyano-7-deazaguanine reductase OS=Oscillatoriales cyanobacterium USR001 OX=1880991 GN=queF PE=3 SV=1
MNGSPIDRDLSRELSAQEMKYGEREIVEGELITFPNPRVGRRYEISISLPEFTCKCPFSGYPDFATIYLTYVPDERVVELKALKLYINGYRDRYISHEESVNQILDDFVAACEPLEVTVKGDFWPRGNVHTVVEVKHLKGG

SEQ ID NO: 47910 - protein, 126 aa, unidentified
  source 1..126: note = Oscillatoriales cyanobacterium
  REGION 1..126: note = tr|A0A1J5GVU5|A0A1J5GVU5_9CYAN NADPH-dependent 7-cyano-7-deazaguanine reductase OS=Oscillatoriales cyanobacterium CG2_30_44_21 OX=1805292 GN=queF PE=3 SV=1
MTVKYGEQAIAEVTLTTFPNPRIGRDYTVQITLPEYTCKCPFSGYPDFATIYITYTPNRVLVELKAIKLYINSYRDRSISHEEAINQILDDFVKAGDPLRVTVKGDYNPRGNVHTVVEVNYTKETI

SEQ ID NO: 47911 - protein, 290 aa, unidentified
  source 1..290: note = Osedax symbiont
  REGION 1..290: note = tr|S6H8M6|S6H8M6_9GAMM NADPH-dependent 7-cyano-7-deazaguanine reductase OS=Osedax symbiont Rs1; OX = 1330036 GN=queF PE=3 SV=1
MIKQPQGADQQQKEQQALDASPLGSHTAYVNKYDPSLLFPIERDINWRKRSVDRLSLPFLAHSGAVDIWNGYEISWLNSQGKPIVRVAEFRFDARSSHIVESKSFKLYLNSYNLSHFETEAQVIQQMTKDLSNISGAEVSVSFCHLDQLPRLAHFSGTCIDECEVQINQYSPDLTLLKIDPEQQVAEALYSHILKSNCPVTGQPDWASISIDYQGSMIDQASLLRYLVSYREHGDFHEQCVENIFMDIWQQCKPNKLTVYARYIRRGGLDINPFRSSEQAVAKNLRLARQ

SEQ ID NO: 47912 - protein, 287 aa, unidentified
  source 1..287: note = Osedax symbiont
  REGION 1..287: note = tr|S6GQS3|S6GQS3_9GAMM NADPH-dependent 7-cyano-7-deazaguanine reductase OS=Osedax symbiont Rs2; OX = 1330035 GN=queF PE=3 SV=1
MTGNNDAVNSEQQQLDTSPLGNHTAYVNKYDASLLFPIEREINWSARNIQRTPLPFLQHSGAVDIWNGYEISWLDTKGKPLVRVAEFRFDARSKYIVESKSFKLYLNSYNLSHFDSESAVLQQMQADLTKASGAQVLIHFHHLDELPPVQCFNGDCIDELDVQIEQYSPDAQLLQINSDKSTAESLYSHILKSNCPVTGQPDWASISIVYAGPAIVRESLLKYLISYREHGDFHEQCVENIFMDIWQQCQPSELTVYARYIRRGGLDINPFRSSLSALADNLRLSRQ

SEQ ID NO: 47913 - protein, 292 aa, unidentified
  source 1..292: note = Osedax symbiont
  REGION 1..292: note = tr|A0A1Y5G6R7|A0A1Y5G6R7_9BACT NADPH-dependent 7-cyano-7-deazaguanine reductase QueF OS='Osedax' symbiont bacterium Rs2_46_30_T18 OX=1856298 GN=A9R01_18145 PE=3 SV=1
MTANKDTANSDQLQREQQLLDASALGNHTAYVNKYDASLLFPIEREINWSVRNIERHSLPFLQQPGAVDIWNGYEISWLDTKGKPLVRVAEFRFDARSKYIVESKSFKLYLNSYNLSHFNSESAVLEQMQVDLTKASGAQVLIRFHHLDELPAVQRFDGICIDELDVDIEQYSPDAQLLQVNTDKLTAESLYSHVLKSNCPVTGQPDWASISIAYAGPAIVRESLLKYLVSYREHGDFHEQCVENIFMDIWQQCQPSELTVYARYIRRGGLDINPFRSSVSAVAENLRLSRQ

SEQ ID NO: 47914 - protein, 279 aa, unidentified
  source 1..279: note = Otariodibacter oris
  REGION 1..279: note = tr|A0A420XIM7|A0A420XIM7_9PAST NADPH-dependent 7-cyano-7-deazaguanine reductase OS=Otariodibacter oris; OX = 1032623 GN=queF PE=3 SV=1
MDYQDKSLTALKLGQSTEYATSYNPQLLQGVPRQLNRDQLGITAQQPFTKGVDLWTAYEISWLNSKGVPQVAIADIFIDYTSKNLIESKSFKLYLNSFNQTKFTSFQEVQATIQTDLSLCAEGKVEVILKRLDQYQSEQIAHFSGQCIDSQDIEIANYEFDRHILANGTSDHIIEETLVSHLLKSNCLITNQPDWGSIQIHYVGKQIDQEKLLRYLVSFRQHNEFHEQCVERIFCDLMEFAHPEKLTVYARYTRRGGLDINPFRSNFEQAPTNVRLARQ

SEQ ID NO: 47915 - protein, 284 aa, unidentified
  source 1..284: note = Ottowia oryzae
  REGION 1..284: note = tr|A0A2S0MJI0|A0A2S0MJI0_9BURK NADPH-dependent 7-cyano-7-deazaguanine reductase OS=Ottowia oryzae; OX = 2109914 GN=queF PE=3 SV=1
MTSPHTPQDSLLGKASGYADQYDAALLFPIPRAPQRASLGIGSQPPFFGADLWTAFELSWLNARGKPQVAVAHIMVPCETTHIVESKSFKLYLNSFNGTAFASEQEVRQRIQADVSAALWQGGAVQSSASVRLVLPADFDREPIHELDGLSLDRLDVDCDRYQPAPDLLTAAFDEQPVEETLTSQLLKSNCPVTGQPDWASAQIRYAGPQIDQAGLLRYIISFRNHSDFHEHCVERMFTDIWQRCRPTKLTVYARYTRRGGLDINPWRTSHPGALPPNVRTARQ

SEQ ID NO: 47916 - protein, 285 aa, Ottowia sp.
  REGION 1..285: note = tr|A0A5C7UY48|A0A5C7UY48_9BURK NADPH-dependent 7-cyano-7-deazaguanine reductase OS=Ottowia sp. OX=1898956; GN = queF PE=3 SV=1
MTTPATPHDSPLGRASAYSDQYDPTLLFPIARAPQRAQLGIQGQPPFFGADWWTAYELSWLNARGKPQLAIAHIMVPCDSTHIIESKSFKLYLNSFNGTRIDRTEELVRRLRQDVSAAIWQGGPVQAAAGVRLIAPDDFDREAVHELDGVNLDRLDIDVDGWDEPAPQCLSAAFDEQPVEEALTSRLLKSNCPVTGQPDWGSVQIRYAGPQIDQAGLLRYIISFRRHNDFHEHCVERMFTDIRARCRPTKLSVYARYTRRGGLDINPWRTSHPGPLPPNVRTARQ

SEQ ID NO: 47917 - protein, 288 aa, Ottowia sp.
  REGION 1..288: note = tr|A0A5C8J7T0|A0A5C8J7T0_9BURK NADPH-dependent 7-cyano-7-deazaguanine reductase OS=Ottowia sp. GY511; OX = 2603274 GN=queF PE=3 SV=1
MTSSPAHPATPQDSPLGRASAYADQYDASLLFAIPRAPQRAALGINGQPKFFGADLWTAYELSWLNLRGKPQLAIAHVVVPCESTHIVESKSFKLYLNSFNGTPFGSEAEVKQRLQTDLSAALWQGGPVQQSAGVRLVLPADFDREPIHELDGLSLDRLDIDCDRYQPAPDLLTAALDEQPVEETLTSGLLKSNCPVTGQPDWGSVQIRYAGPQIDQAGLLRYIVSFRGHSDFHEHCVERMFTDIWQRCRPTKLTVYARYTRRGGLDINPWRTSHPGALPSAVRTARQ

SEQ ID NO: 47918 - protein, 279 aa, Oxalobacter formigenes
  REGION 1..279: note = tr|C3X6B9|C3X6B9_OXAFO NADPH-dependent 7-cyano-7-deazaguanine reductase OS=Oxalobacter formigenes HOxBLS OX=556268 GN=queF PE=3 SV=1
MTSSDDMKESPLGRSTDYPTRYDPSLLYPIERKPMREKLGITGSLPFFGLDFWNAYELSWLNLRGKPQVAIMNFTVSADSPNIVESKSLKLYLNSFTQTRMDETGDLINILRNDLSDAFGSPVQVSLKQPGDFPAIKLQELEGLLLDRLDIAADEYTPDPSFLKSNQEEYPVEETLVSHLLKTNCPVTGQPDWASLQIHYAGPQIDQAGLLKYIISLRSSQEFHEQCVERIFLDILKMCKPQSLTVYARYTRRGGIDINPWRSNFSSGNRPQLMRTARQ

SEQ ID NO: 47919 - protein, 279 aa, Oxalobacter formigenes
  REGION 1..279: note = tr|C3XCJ0|C3XCJ0_OXAFO NADPH-dependent 7-cyano-7-deazaguanine reductase OS=Oxalobacter formigenes OXCC13 OX=556269 GN=queF PE=3 SV=1
MTSSDKTKNSPLGKSTTYPTQYDPSQLFPIERKPMREKLGITGSLPFFGLDFWNAYELSWLNLRGKPQVGIMNFSVSADSPNIVESKSLKLYLNSFTQTRMDEAGDLIQILRTDLSDAFGSPVQVSIRQPDVFPATRLEELNGLSLDRLDIGTDKYTPDPSFLKSNEEEFPVEETLVSNLLKTNCPVTGQPDWASLQIHYAGPQIDQEGLLKYIISLRSSEDFHEQCVERIFLDILKMCKPQSLTVYARYTRRGGIDINPWRSNFSSGKRPQTLRHARQ

SEQ ID NO: 47920 - protein, 279 aa, Oxalobacter sp.
  REGION 1..279: note = tr|A0A3A6NV87|A0A3A6NV87_9BURK NADPH-dependent 7-cyano-7-deazaguanine reductase OS=Oxalobacter sp.; OX = 2093374 GN=queF PE=3 SV=1
MTNESTPHESPLGKPASYDGAYDPSLLFPILRATTREEFNLGKTTPFFGIDIWNAYELSWLNMRGKPQVALLSVTVPADSPNIVESKSFKLYINSFSQTKVGGPEAMIELLRADLSAAFGAFVSVSLTPQDAFATLALGEMEGLLLDRLDIDADEYSPNASLLRTITEEPPVEEKLVSHLLRTNCPVTGQPDWASVQIHYVGFAINQEYLLKYLISLRTHNGFHEQCIERIFMDILTQCKPTKLAVYGRFTRRGGVDINPWRTNFTIGGRPSNARNARQ

SEQ ID NO: 47921 - protein, 278 aa, unidentified
  source 1..278: note = Oxalobacteraceae bacterium
  REGION 1..278: note = tr|A0A4Q3IXW7|A0A4Q3IXW7_9BURK NADPH-dependent 7-cyano-7-deazaguanine reductase OS=Oxalobacteraceae bacterium OX=1871070 GN=queF PE=3 SV=1
MNTPDQSPLGKSSAYQSQYAPELLFPIARQQKRDELGLFADAGTMPFFGVDIWNAYELSWLNMRGKPQVAIATITVPADSPNIVESKSFKLYLNSFNQTRLAGPDALLALLRDDLSDGFGAPVHVTLTSPEAFGAIKMGELDGVLLDRLDVEIDGYSPSPELLSADHENGQVEETLVSHLLKSNCLVTGQPDWGTVQIRYVGPQIDQEGLLKYLIGFREHNEFHEQCVERIFMDVLRQCKPTKLAVYARYTRRGGLDINPWRANFSTGKPPNLRGARQ

SEQ ID NO: 47922 - protein, 279 aa, unidentified
  source 1..279: note = Oxalobacteraceae bacterium
  REGION 1..279: note = tr|A0A3D1J593|A0A3D1J593_9BURK NADPH-dependent 7-cyano-7-deazaguanine reductase OS=Oxalobacteraceae bacterium OX=1871070 GN=queF PE=3 SV=1
MIIPDQPGASPLGKPAAYKTEYDPSLLFPIARQGKRDELGISGTLPFFGIDIWNAYEVSWLNLRGKPQVAIATITVAADSPNIIESKSFKLYLNSFNQTKFAGSDALLELLRADLSAGFGAPVQIALALADAFVQVQMGELEGLLLDRLDIEVTQYTPDATLLRADAQQPPVEETLVSHLLKSNCLVTGQPDWGSVQIHYIGAPIDQEGLLKYLIGFREHNEFHEQCVERIFMDVLRRCKPQKLAVYARYTRRGGLDINPWRSNFTTGQRPPNVRNARQ

SEQ ID NO: 47923 - protein, 154 aa, Pacificibacter maritimus
  REGION 1..154: note = tr|A0A3N4UJC0|A0A3N4UJC0_9RHOB NADPH-dependent 7-cyano-7-deazaguanine reductase OS=Pacificibacter maritimus OX=762213 GN=queF PE=3 SV=1
MVQTDTSKLTQLGGASDLPASPEAATLERVPHTHEGERYVARFTAPEFTSLCPMTGQPDFGHLMIDYVPRKWLVESKSLKLFLGSFRNHGAFHEDCSVYIGKRLTELLDPEWLRIGAYWYPRGGIPIDVFWASGPEPKDLWIPDQGVPPYRGRG

SEQ ID NO: 47924 - protein, 148 aa, unidentified
  source 1..148: note = Pacificimonas flava
  REGION 1..148: note = tr|M2U551|M2U551_9SPHN NADPH-dependent 7-cyano-7-deazaguanine reductase OS=Pacificimonas flava; OX = 1234595 GN=queF PE=3 SV=1
MEPKFLGQDSPLPTSPEQAGLDYVPNPRTGERYLVRFAAPEFTSLCPVTGQPDFAHLVIDYVPGETIVESKSLKLFLGSFRNHAAFHEDCTVGIGRRLADEMKPEWLRIGGYWYPRGGIPIDVFWQTGAPPADVWVPDQGVAPYRGRG

SEQ ID NO: 47925 - protein, 148 aa, unidentified
  source 1..148: note = Pacificimonas flava
  REGION 1..148: note = tr|A0A219BAA4|A0A219BAA4_9SPHN NADPH-dependent 7-cyano-7-deazaguanine reductase OS=Pacificimonas flava; OX = 1234595 GN=queF PE=3 SV=1
MEPKFLGKDSSLPASPEDAVLDYVPNPRPDERFLVRFTAPEFTSLCPVTGQPDFAQLMIDYVPQETIVESKSLKLFLGSFRNHAAFHEDCTVGIGRRLVDEMKPEWLRIGGYWYPRGGIPIDVFWQTGAPPGGVWVPDQGVPSYRGRG

SEQ ID NO: 47926 - protein, 275 aa, Paenalcaligenes hominis
  REGION 1..275: note = tr|A0A1U9JZ55|A0A1U9JZ55_9BURK NADPH-dependent 7-cyano-7-deazaguanine reductase OS=Paenalcaligenes hominis OX=643674 GN=queF PE=3 SV=1
MRSSHSISDSPLGNEVHYPTRYDPNVLFAIERAPNRTHLTLPENWLGEDIWYAYELSWLNEKGKPMVAIGRFSFPWHSPFLVESKSFKLYLNSLNETHFAAQEDVKALLVRDLSALTQSEVDVQLYLLEHYEGPRAQPLEGTCIDQLDVAITHYQPAPELLTCNADQGTRTETLVSHLLKSNCPVTGQPDWGTVQISYTGTAIDHTALLRYIVSFRKHTEFHEHCVERIYHDLMQRCQPEKLFVMARYTRRGGLDINPWRSNYVKTVPNQRTERQ

SEQ ID NO: 47927 - protein, 167 aa, unidentified
  source 1..167: note = Paenibacillaceae bacterium
  REGION 1..167: note = tr|A0A1H1THI2|A0A1H1THI2_9BACL NADPH-dependent 7-cyano-7-deazaguanine reductase OS=Paenibacillaceae bacterium GAS479 OX=1882832 GN=queF PE=3 SV=1
MSEQGRSSEELSGVTLLGNQGTQYPMTYAPEVLESFVNKHPDRDYRVKFNCPEFTSLCPMTGQPDFATIYIAYIPDKLMVESKALKLYLFSFRNHGDFHEDCMNIIMNDLIKLMEPRFIEVWGKFTPRGGISIDPYCNWGRPGTKYEQMAEYRLMNLDLYPEKIDNR

SEQ ID NO: 47928 - protein, 164 aa, unidentified
  source 1..164: note = Paenibacillaceae bacterium
  REGION 1..164: note = tr|A0A1Y3QKH2|A0A1Y3QKH2_9BACL NADPH-dependent 7-cyano-7-deazaguanine reductase OS=Paenibacillaceae bacterium ZCTH02-B3 OX=1861638 GN=queF PE=3 SV=1
MPEKSGRAPGLTHLGSGETRYAFSYDPDLLETFENRHPDRDYFVKFNCPEFTTLCPITGQPDFGAIYISYIPDRKMVESKSLKLYLFSFRNHGGFHEDCVNTIMNDLIRVMEPRYIEVWGKFMPRGGISIDPFCNWGRPGTKYERMAEYRLLNHDMYPEKVDNR

SEQ ID NO: 47929 - protein, 165 aa, Paenibacillus agaridevorans
  REGION 1..165: note = tr|A0A2R5F2C9|A0A2R5F2C9_9BACL NADPH-dependent 7-cyano-7-deazaguanine reductase OS=Paenibacillus agaridevorans OX=171404 GN=queF PE=3 SV=1
MEGRQKEELDRITLLGNQGTKYPFHYAPEVLESFDNKHPGRDYFVKFNCPEFTSLCPITGQPDFATIYISYIPDVKMVESKSLKLYLFSFRNHGDFHEDCMNIIMNDLIKLMDPRFIEVWGKFTPRGGISIDPYCNWGRPGTKFEEMASYRLMNHDLYPEKVDNR

SEQ ID NO: 47930 - protein, 165 aa, Paenibacillus algorifonticola
  REGION 1..165: note = tr|A0A1I2IK13|A0A1I2IK13_9BACL NADPH-dependent 7-cyano-7-deazaguanine reductase OS=Paenibacillus algorifonticola OX=684063 GN=queF PE=3 SV=1
MSGRKEGELQGISLLGNQGTAYTFEYSPEILESFDNKHPYRDYFVKFNCPEFTSLCPMTGQPDFATIYISYVPDVKMVESKSLKLYLFSFRNHGDFHEDCVNIIMNDLIKLMDPRYIEVWGKFTPRGGISIDPYCNYGKPGTKYEQMAENRLMNHDLYPEKIDNR

SEQ ID NO: 47931 - protein, 163 aa, Paenibacillus alvei
  REGION 1..163: note = tr|S9SPL2|S9SPL2_PAEAL NADPH-dependent 7-cyano-7-deazaguanine reductase OS=Paenibacillus alvei TS-15 OX=1117108 GN=queF PE=3 SV=1
MAGRNEAELHLKQLGLKTEYPSDYAPDILESFDNKHPNRDYFVKFNCPEFTSLCPITGQPDFATIYISYIPDVKCVESKSLKLYLFSFRNHGDFHEDCVNIIMNDLIKLLDPRYIEVWGKFTPRGGISIDPYCNYGQPGTKYEGMAAHRLMNHDMYPEKVDNR

SEQ ID NO: 47932 - protein, 163 aa, Paenibacillus alvei
  REGION 1..163: note = tr|K5ACD6|K5ACD6_PAEA2 NADPH-dependent 7-cyano-7-deazaguanine reductase OS=Paenibacillus alvei (strain ATCC 6344 / DSM 29 / NBRC 3343 / NCIMB 9371 / NCTC 6352) OX=12 06781 GN=queF PE=3 SV=1
MAGRNEAELNLTQLGVKTEYPSDYAPDILESFDNKHPNRDYFVKFNCPEFTSLCPITGQPDFATIYISYIPGVKCVESKSLKLYLFSFRNHGDFHEDCVNIIMNDLIKLLDPRYIEVWGKFTPRGGISIDPYCNYGQPGTKYVEMAAHRLMNHDMYPEKVDNR

SEQ ID NO: 47933 - protein, 163 aa, Paenibacillus amylolyticus
  REGION 1..163: note = tr|A0A100VHQ1|A0A100VHQ1_PAEAM NADPH-dependent 7-cyano-7-deazaguanine reductase OS=Paenibacillus amylolyticus OX=1451 GN=queF PE=3 SV=1
MRQPEEMQDVTLLGNQNVKYTFEYDPGILESFDNKHPYRDYFVKFNCPEFTSLCPITGQPDFATIYISYIPDIKMVESKSLKLYLFSFRNHGDFHEDCVNIIMNDLIKLMDPRYIEVWGKFTPRGGISIDPYTNYGKPGTKYEQMADHRMMNHDMYPETIDNR

SEQ ID NO: 47934 - protein, 163 aa, Paenibacillus amylolyticus
  REGION 1..163: note = tr|A0A1R1BX05|A0A1R1BX05_PAEAM NADPH-dependent 7-cyano-7-deazaguanine reductase OS=Paenibacillus amylolyticus OX=1451 GN=queF PE=3 SV=1
MRQPEEMQDVTLLGNQNVKYTFEYDPGILENFDNKHPYRDYFVKFNCPEFTSLCPITGQPDFATIYISYIPDIKMVESKSLKLYLFSFRNHGDFHEDCVNIIMNDLIKLMDPRYIEVWGKFTPRGGISIDPYTNYGKPGTKYEQMADHRMMNHDMYPETIDNR

SEQ ID NO: 47935 - protein, 165 aa, Paenibacillus antarcticus
  REGION 1..165: note = tr|A0A168QTQ0|A0A168QTQ0_9BACL NADPH-dependent 7-cyano-7-deazaguanine reductase OS=Paenibacillus antarcticus OX=253703 GN=queF PE=3 SV=1
MPGRQPTEMEDLTLLGNQGTKYLVEYDPSILESFDNKHAYRDYFVKFNCPEFTSLCPITGQPDFATIYISYMPDVRMVESKSLKLYLFSFRNHGDFHEDCMNIIMNDLIKLMDPKYIEVWGKFTPRGGISIDPYCNYGRPETKYEEMAQHRLMNHDMYPETIDNR

SEQ ID NO: 47936 - protein, 163 aa, unidentified
  source 1..163: note = Paenibacillus aquistagni
  REGION 1..163: note = tr|A0A1X7LYK8|A0A1X7LYK8_9BACL NADPH-dependent 7-cyano-7-deazaguanine reductase OS=Paenibacillus aquistagni OX=1852522 GN=queF PE=3 SV=1
MAGRSQEELPLTHLGQQTSYKSTYAPEVLEAFPNKHPYRDYFIKFNCPEFTSLCPMTGQPDFATMYISYIADQKCVESKSLKLYLFSFRNQGDFHEDCVNIIMNDLIELLDPRYIEVWGKFTPRGGISIDPYCNYGKPGTVYEDMARQRLMQHDLYPEKVDNR

SEQ ID NO: 47937 - protein, 165 aa, unidentified
  source 1..165: note = Paenibacillus baekrokdamisoli
  REGION 1..165: note = tr|A0A3G9J528|A0A3G9J528_9BACL NADPH-dependent 7-cyano-7-deazaguanine reductase OS=Paenibacillus baekrokdamisoli OX=1712516 GN=queF PE=3 SV=1
MAGRDEAALEGISLLGNQGTQYAATYTPSILEAFDNKHPYRDYRVKFNCPEFTSLCPITGQPDFATIYIAYIPDLKMVESKSLKLYLFSFRNHGDFHEDCINIIMNDLINLMSPRYIEVWGKFTPRGGISIDPYCNYGRPGTKYEEMASYRMMNHDLYPEKVDNR

SEQ ID NO: 47938 - protein, 163 aa, Paenibacillus barcinonensis
  REGION 1..163: note = tr|A0A2V4WLN2|A0A2V4WLN2_PAEBA NADPH-dependent 7-cyano-7-deazaguanine reductase OS=Paenibacillus barcinonensis OX=198119 GN=queF PE=3 SV=1
MRQPDEMQDVTLLGNQNVKYTFEYDPGILESFDNKHPYRDYFVKFNCPEFTSLCPITGQPDFATIYISYIPDIKMVESKSLKLYLFSFRNHGDFHEDCVNIIMNDLIKLMDPRFIEVWGKFTPRGGISIDPYTNYGKPGTKYEQMAEHRMMNHDMNPETIDNR

SEQ ID NO: 47939 - protein, 165 aa, Paenibacillus barengoltzii
  REGION 1..165: note = tr|R9LI86|R9LI86_9BACL NADPH-dependent 7-cyano-7-deazaguanine reductase OS=Paenibacillus barengoltzii G22 OX=1235795 GN=queF PE=3 SV=1
MAGRKPEEMQDVTLLGNQGVKYPFDYAPEVLETFDNKHPYRDYFVKFNCPEFTSLCPITGQPDFATIYISYIPDIKMVESKSLKLYLFSFRNHGDFHEDCVNIIMNDLIKLMDPKYIEVWGKFTPRGGISIDPYCNYGRPGTKYEAMAEHRLLNHDMYPEKVDNR

SEQ ID NO: 47940 - protein, 165 aa, unidentified
  source 1..165: note = Paenibacillus beijingensis
  REGION 1..165: note = tr|A0A0D5NJE5|A0A0D5NJE5_9BACL NADPH-dependent 7-cyano-7-deazaguanine reductase OS=Paenibacillus beijingensis OX=1126833 GN=queF PE=3 SV=1
MEGRTKEELQGVTLLGNQGTKYKFEYTPEILESFVNKHPQRDYFVKFNCPEFTSLCPMTGQPDFATIYISYIPDQLMVESKSLKLYLFSFRNHGDFHEDCMNIIMNDLIALMNPRYIEVWGKFTPRGGISIDPYCNWGRPGTKYEAMADHRLMNHDLYPEKVDNR

SEQ ID NO: 47941 - protein, 166 aa, Paenibacillus borealis
  REGION 1..166: note = tr|A0A089LBS3|A0A089LBS3_9BACL NADPH-dependent 7-cyano-7-deazaguanine reductase OS=Paenibacillus borealis; OX = 160799 GN=queF PE=3 SV=1
MSEGRLKEEMQEVTLLGNQGTKYKFGYAPEILEAFDNKHPGRDYFVKFNCPEFTSLCPVTGQPDFGVMYISYIPDIKMVESKSLKLYLFSFRNHGDFHEDCVNIIMNDLISLMEPRYIEVWGKFTPRGGISIDPYCNWGRPGTKYEAMAEHRLMNHDLYPEKVDNR

SEQ ID NO: 47942 - protein, 166 aa, Paenibacillus borealis
  REGION 1..166: note = tr|A0A1R0YFS7|A0A1R0YFS7_9BACL NADPH-dependent 7-cyano-7-deazaguanine reductase OS=Paenibacillus borealis; OX = 160799 GN=queF PE=3 SV=1
MSEGRLKEEMQEVTLLGNQGTQYKFGYDPEILEVFDNKHPGRDYFVKFNCPEFTSLCPVTGQPDFGVMYISYVPEQKMVESKSLKLYLFSFRNHGDFHEDCVNIIMNDLISLMEPRYIEVWGKFTPRGGISIDPYCNWGRPGTKYEAMAEHRLINHDLYPEKVDNR

SEQ ID NO: 47943 - protein, 165 aa, unidentified
  source 1..165: note = Paenibacillus bovis
  REGION 1..165: note = tr|A0A172ZE72|A0A172ZE72_9BACL NADPH-dependent 7-cyano-7-deazaguanine reductase OS=Paenibacillus bovis; OX = 1616788 GN=queF PE=3 SV=1
MSGRQQDEMQDLTLLGNQGTKYTFEYDPSILESFDNKHTYRDYFVKFNCPEFTSLCPITGQPDFATIYISYIPDVKMVESKSLKLYLFSFRNHGDFHEDCMNIILNDLVKLMDPRYIEVWGKFTPRGGISIDPYTNYGKPGTKYEQMAEHRMMNHDMYPETIDNR

SEQ ID NO: 47944 - protein, 165 aa, unidentified
  source 1..165: note = Paenibacillus catalpae
  REGION 1..165: note = tr|A0A1I1Z6L4|A0A1I1Z6L4_9BACL NADPH-dependent 7-cyano-7-deazaguanine reductase OS=Paenibacillus catalpae; OX = 1045775 GN=queF PE=3 SV=1
MSGRSEEELQGISLLGNQGTRYPMEYSPAVLEAFDNKHPYRDYFVKFNCPEFTSLCPMTGQPDFATIYISYIPDIKMVESKSLKLYLFSFRNHGDFHEDCMNIIMNDLIELMQPRYIEVWGKFTPRGGISIDPYCNYGKPGTKFEQMAEQRLFNHDMYPEKVDNR

SEQ ID NO: 47945 - protein, 165 aa, Paenibacillus cellulosilyticus
  REGION 1..165: note = tr|A0A2V2YWQ7|A0A2V2YWQ7_9BACL NADPH-dependent 7-cyano-7-deazaguanine reductase OS=Paenibacillus cellulosilyticus OX=375489 GN=queF PE=3 SV=1
MTGRQHEEMSDLTLLGNQGTKYPFEYAPSVLETFDNKHPYRDYFVKFNCPEFTSLCPITGQPDFATIYISYIPDVKMVESKSLKLYLFSFRNHGDFHEDCMNIIMNDLIKLMEPRYIEVWGKFTPRGGISIDPYCNYGKPGTKFEDMATQRLMQHDMYPEKVDNR

SEQ ID NO: 47946 - protein, 164 aa, Paenibacillus chitinolyticus
  REGION 1..164: note = tr|A0A410WS43|A0A410WS43_9BACL NADPH-dependent 7-cyano-7-deazaguanine reductase OS=Paenibacillus chitinolyticus OX=79263 GN=queF PE=3 SV=1
MAGRNQEELDLTLLGNQQTQYPFNYAPQVLESFDNKHPYRDYFVKFNCPEFTSLCPITGQPDFATIYISYMPDAKMVESKSLKLYLFSFRNHGDFHEDCMNIIMNDLIKLMDPKYIEVWGKFTPRGGISIDPYCNYGRPGTKYEQMAEHRLMNHDLYPEKVDNR

SEQ ID NO: 47947 - protein, 165 aa, Paenibacillus contaminans
  REGION 1..165: note = tr|A0A329N0L9|A0A329N0L9_9BACL NADPH-dependent 7-cyano-7-deazaguanine reductase OS=Paenibacillus contaminans OX=450362 GN=queF PE=3 SV=1
MTGRSQEELTGVTQLGSQGTEYRFSYSPAILESFENKHPGRDYFVKFNCPEFTSLCPMTGQPDFATLYISYIPDRRMVESKSLKLYLFSFRNHGDFHEDCMNIIMNDLIALMDPRYIEVWGKFTPRGGISIDPYCNWGRPGTKYEQMAEHRLLNHDLYPEKVDNR

SEQ ID NO: 47948 - protein, 165 aa, unidentified
  source 1..165: note = Paenibacillus crassostreae
  REGION 1..165: note = tr|A0A167GR65|A0A167GR65_9BACL NADPH-dependent 7-cyano-7-deazaguanine reductase OS=Paenibacillus crassostreae OX=1763538 GN=queF PE=3 SV=1
MSGRQHHEMEDITLLGNQGTKYLTEYDPSILESFDNKHPYRDYFVKFNCPEFTSLCPITGQPDFATIYISYIPSIRMVESKSLKLYLFSFRNHGDFHEDCMNIIMNDLIKLMDPKYIEVWGKFTPRGGISIDPYCNYGQSGTKYEEMAQYRLMNHDMYPEKVDNR

SEQ ID NO: 47949 - protein, 165 aa, Paenibacillus curdlanolyticus
  REGION 1..165: note = tr|E0I7X0|E0I7X0_9BACL NADPH-dependent 7-cyano-7-deazaguanine reductase OS=Paenibacillus curdlanolyticus YK9 OX=717606 GN=queF PE=3 SV=1
MAGRQHEELGDLTLLGNQGTKYPFEYAPGVLETFDNKHPYRDYMVKFNCPEFTSLCPITGQPDFATIYISYIPDIKMVESKSLKLYLFSFRNHGDFHEDCMNIIMNDLIALMDPRYIEVWGKFTPRGGISIDPYCNYGKPGTKYEQVAEQRLFQHDMYPEKVDNR

SEQ ID NO: 47950 - protein, 166 aa, unidentified
  source 1..166: note = Paenibacillus darwinianus
  REGION 1..166: note = tr|A0A015NNC4|A0A015NNC4_9BACL NADPH-dependent 7-cyano-7-deazaguanine reductase OS=Paenibacillus darwinianus OX=1380763 GN=queF PE=3 SV=1
MTAGRSAEELKDITLLGNQGTSYTFSYDPKLLESFDNKHQGRPYFVKFNCPEFTSLCPMTGQPDFATIYISYIPDVRMVESKSLKLYLFSFRNHGDFHEDCVNIIMNDLIGLMDPLYIEVWGKFTPRGGISIDPYCNYGKPGTKYEAMAEHRLMNHDLYPEKVDNR

SEQ ID NO: 47951 - protein, 163 aa, Paenibacillus dendritiformis
  REGION 1..163: note = tr|A0A2W4GMG4|A0A2W4GMG4_9BACL NADPH-dependent 7-cyano-7-deazaguanine reductase OS=Paenibacillus dendritiformis OX=130049 GN=queF PE=3 SV=1
MAGRNEAELQLKHLGGKTEYATDYAPHVLEAFDNKHPNRDYFVKFNCPEFTSLCPMTGQPDFATMYISYIPDRKCVESKSLKLYMFSFRNHGDFHEDCVNIIMNDLIGLLDPKYIEVWGKFTPRGGISIDPYCNYGRPGTKYEEMAAYRLMNHDLYPETVDNR

SEQ ID NO: 47952 - protein, 163 aa, Paenibacillus dendritiformis; identical to SEQ ID NO: 47951
  REGION 1..163: note = tr|H3SNA5|H3SNA5_9BACL NADPH-dependent 7-cyano-7-deazaguanine reductase OS=Paenibacillus dendritiformis C454 OX=1131935 GN=queF PE=3 SV=1

SEQ ID NO: 47953 - protein, 167 aa, unidentified
  source 1..167: note = Paenibacillus donghaensis
  REGION 1..167: note = tr|A0A2Z2K8R1|A0A2Z2K8R1_9BACL NADPH-dependent 7-cyano-7-deazaguanine reductase OS=Paenibacillus donghaensis OX=414771 GN=queF PE=3 SV=1
MSTEGRTAEEMPQVTLLGNQGTQYKFSYDPGILEVFDNKHPGRDYFVKFNCPEFTSLCPVTGQPDFATLYISYIPEQRMVESKSLKLYLFSFRNHGDFHEDCVNIIMNDLIALMDPRYIEVWGKFTPRGGISIDPYCNWGRPGTKYEAMAEHRLLNHDLYPEKIDNR

SEQ ID NO: 47954 - protein, 166 aa, Paenibacillus durus
  REGION 1..166: note = tr|A0A089HPU4|A0A089HPU4_PAEDU NADPH-dependent 7-cyano-7-deazaguanine reductase OS=Paenibacillus durus; OX = 44251 GN=queF PE=3 SV=1
MSEGRLKEEMPDVTLLGNQGTQYKFGYAPEVLETFDNKHPGRDYFVKFNCPEFTSLCPVTGQPDFATLYISYIPEIKMVESKSLKLYLFSFRNHGDFHEDCVNIIMNDLIKLMDPRYIEVWGKFTPRGGISIDPYCNYGRPGTKYEAMAEHRLLNHDLYPETIDNR

SEQ ID NO: 47955 - protein, 166 aa, Paenibacillus durus; identical to SEQ ID NO: 47954
  REGION 1..166: note = tr|A0A0F7CIV0|A0A0F7CIV0_PAEDU NADPH-dependent 7-cyano-7-deazaguanine reductase OS=Paenibacillus durus ATCC 35681 OX=1333534 GN=queF PE=3 SV=1

SEQ ID NO: 47956 - protein, 164 aa, Paenibacillus elgii
  REGION 1..164: note = tr|A0A165RIW8|A0A165RIW8_9BACL NADPH-dependent 7-cyano-7-deazaguanine reductase OS=Paenibacillus elgii; OX = 189691 GN=queF PE=3 SV=1
MAGRKEDELDLTLLGNQQTKYPMNYAPEMLESFDNKHPYRDYFVKFNCPEFTSLCPITGQPDFATIYISYIPDLKMVESKSLKLYLFSFRNHGDFHEDCMNIIMNDLIKLMDPKYIEVWGKFTPRGGISIDPYCNYGRPGTKYEQMAEHRLLNHDLYPEKVDNR

SEQ ID NO: 47957 - protein, 157 aa, unidentified
  source 1..157: note = Paenibacillus etheri
  REGION 1..157: note = tr|A0A0W1B078|A0A0W1B078_9BACL NADPH-dependent 7-cyano-7-deazaguanine reductase OS=Paenibacillus etheri; OX = 1306852 GN=queF PE=3 SV=1
MQEVTLLGNQGTQYKFGYDPDILEVFDNKHPGRDYFVKFNCPEFTSLCPVTGQPDFATLYISYIPEQKMVESKSLKLYLFSFRNHGDFHEDCVNIIMNDLISLMDPRYIEVWGKFTPRGGISIDPYCNYGRPGTKYEAIAEHRLINHDLYPEKVDNR

SEQ ID NO: 47958 - protein, 165 aa, unidentified
  source 1..165: note = Paenibacillus faecis
  REGION 1..165: note = tr|A0A5D0CZF7|A0A5D0CZF7_9BACL NADPH-dependent 7-cyano-7-deazaguanine reductase OS=Paenibacillus faecis; OX = 862114 GN=queF PE=3 SV=1
MSGRKPEEMQDVTLLGNQGVKYPSTYAPEMLESFDNKHPYRDYFVKFNCPEFTSLCPITGQPDFATIYISYIPDIKMVESKSLKLYLFSFRNHGDFHEDCVNIMMNDLIRLMDPKYIEVWGKFTPRGGISIDPYCNYGRPGTKYETMAEHRLLNHDMYPEKVDNR

SEQ ID NO: 47959 - protein, 166 aa, unidentified
  source 1..166: note = Paenibacillus ferrarius
  REGION 1..166: note = tr|A0A1V4HDQ0|A0A1V4HDQ0_9BACL NADPH-dependent 7-cyano-7-deazaguanine reductase OS=Paenibacillus ferrarius OX=1469647 GN=queF PE=3 SV=1
MSAGRSNEDLKEITLLGNQGTQYVFSYNPAVLEAFDNKHPNRDYFVKFNFPEFTSLCPVTGQPDFATLYISYIPNIKMVESKSLKLYLFSFRNHGDFHEDCVNIIMNDLIALMDPRYIEVWGKFTPRGGISIDPYCNWGQPGTKFEAMAEHRLMNHDLYPEKIDNR

SEQ ID NO: 47960 - protein, 167 aa, Paenibacillus ginsengarvi
  REGION 1..167: note = tr|A0A3B0BIJ9|A0A3B0BIJ9_9BACL NADPH-dependent 7-cyano-7-deazaguanine reductase OS=Paenibacillus ginsengarvi OX=400777 GN=queF PE=3 SV=1
MTEAGRTEGELAGVTLLGNQGTDYRFQYSPDILESFENKHPGRDYFVKFNCPEFTSLCPMTGQPDFATLYISYIPDRRMVESKSLKLYLFSFRNHGDFHEDCMNIIMNDLIALMEPRYIEVWGKFTPRGGISIDPYCNWGQPGTKYERMAEHRLLNHDLYPEKVDNR

SEQ ID NO: 47961 - protein, 165 aa, Paenibacillus glacialis
  REGION 1..165: note = tr|A0A168NN33|A0A168NN33_9BACL NADPH-dependent 7-cyano-7-deazaguanine reductase OS=Paenibacillus glacialis OX=494026 GN=queF PE=3 SV=1
MPGRQPIEMEDLTLLGNQGTKYLVEYDPSILESFDNKHAYRDYFVKFNCPEFTSLCPITGQPDFATIYISYMPDVRMVESKSLKLYLFSFRNHGDFHEDCMNVIMNDLIKLMDPKYIEVWGKFTPRGGISIDPYCNYGRPETKYEEMAHHRLMNHDMYPETIDNR

SEQ ID NO: 47962 - protein, 165 aa, Paenibacillus glucanolyticus
  REGION 1..165: note = tr|A0A163KNC2|A0A163KNC2_9BACL NADPH-dependent 7-cyano-7-deazaguanine reductase OS=Paenibacillus glucanolyticus OX=59843 GN=queF PE=3 SV=1
MAGRKKEEMQDVTLLGNQGTKYTFEYDPSILESFDNKHAYRDYFVKFNCPEFTSLCPITGQPDFATIYISYIPDIKMVESKSLKLYLFSFRNHGDFHEDCMNIIMNDLIKLMDPRYIEVWGKFTPRGGISIDPYCNYGRPGTKYEDIAANRLMNHDLYPETVDNR

SEQ ID NO: 47963 - protein, 166 aa, Paenibacillus graminis
  REGION 1..166: note = tr|A0A089M9R9|A0A089M9R9_9BACL NADPH-dependent 7-cyano-7-deazaguanine reductase OS=Paenibacillus graminis; OX = 189425 GN=queF PE=3 SV=1
MSEGRLKEEMQEVTLLGNQGTTYKFGYDPDILEVFDNKHPGRDYFVKFNCPEFTSLCPVTGQPDFGAMYISYIPEQKMVESKSLKLYLFSFRNHGDFHEDCVNIIMNDLISLMEPRYIEVWGKFTPRGGISIDPYCNWGRPGTKYEAMAEHRLINHDLYPEKVDNR

SEQ ID NO: 47964 - protein, 165 aa, unidentified
  source 1..165: note = Paenibacillus hemerocallicola
  REGION 1..165: note = tr|A0A5C4T8Q4|A0A5C4T8Q4_9BACL NADPH-dependent 7-cyano-7-deazaguanine reductase OS=Paenibacillus hemerocallicola OX=1172614 GN=queF PE=3 SV=1
MAGRTEDELERITLLGNQGTDYRFQYAPDVLETFDNKHPERDYFVKFNCPEFTSLCPMTGQPDFATLYISYIPDRRMVESKSLKLYLFSFRNHGDFHEDCMNIIMNDLIALMEPRYIEVWGKFTPRGGISIDPYCNWGRPGTKYEQMAEHRLLNHDLYPEKVDNR

SEQ ID NO: 47965 - protein, 167 aa, unidentified; identical to SEQ ID NO: 47927
  source 1..167: note = Paenibacillus herberti
  REGION 1..167: note = tr|A0A229NYD8|A0A229NYD8_9BACL NADPH-dependent 7-cyano-7-deazaguanine reductase OS=Paenibacillus herberti; OX = 1619309 GN=queF PE=3 SV=1

SEQ ID NO: 47966 - protein, 165 aa, unidentified
  source 1..165: note = Paenibacillus ihbetae
  REGION 1..165: note = tr|A0A1B2DXL8|A0A1B2DXL8_9BACL NADPH-dependent 7-cyano-7-deazaguanine reductase OS=Paenibacillus ihbetae; OX = 1870820 GN=queF PE=3 SV=1
MAGRQREEMQDVTLLGNQGTKYTFEYDPGILESFDNKHPYRDYFVKFNCPEFTSLCPITGQPDFATIYISYIPDIKMVESKSLKLYLFSFRNHGDFHEDCVNIIMNDLIKLMDPRYIEVWGKFTPRGGISIDPYCNYGRPGTKYEEMAAQRLMNHDLYPEKVDNR

SEQ ID NO: 47967 - protein, 164 aa, Paenibacillus illinoisensis
  REGION 1..164: note = tr|A0A2W0C750|A0A2W0C750_9BACL NADPH-dependent 7-cyano-7-deazaguanine reductase OS=Paenibacillus illinoisensis OX=59845 GN=queF PE=3 SV=1
MTRQPDEMKDVTLLGNQGVKYTFEYDPGILESFDNKHPYRDYFVKFNCPEFTSLCPITGQPDFATIYISYIPDVKMVESKSLKLYLFSFRNHGDFHEDCVNIIMNDLIKLMDPRYIEVWGKFTPRGGISIDPYTNYGKPGTKYEQMAEHRMMNHDMYPETIDNR

SEQ ID NO: 47968 - protein, 166 aa, Paenibacillus jilunlii; identical to SEQ ID NO: 47963
  REGION 1..166: note = tr|A0A1G9KCJ7|A0A1G9KCJ7_9BACL NADPH-dependent 7-cyano-7-deazaguanine reductase OS=Paenibacillus jilunlii; OX = 682956 GN=queF PE=3 SV=1

SEQ ID NO: 47969 - protein, 165 aa, Paenibacillus kribbensis
  REGION 1..165: note = tr|A0A222WSM8|A0A222WSM8_9BACL NADPH-dependent 7-cyano-7-deazaguanine reductase OS=Paenibacillus kribbensis OX=172713 GN=queF PE=3 SV=1
MTGRKPEEMTDVTLLGNQGTQYTFAYDPAILESFDNKHPYRDYFVKFNCPEFTSLCPITGQPDFATIYISYIPDIKMVESKSLKLYLFSFRNHGDFHEDCVNIIMNDLIKLMDPRYIEVWGKFTPRGGISIDPYTNYGKPGTKYEQMAEHRMMNHDMYPETVDNR

SEQ ID NO: 47970 - protein, 165 aa, Paenibacillus lactis
  REGION 1..165: note = tr|G4HI42|G4HI42_9BACL NADPH-dependent 7-cyano-7-deazaguanine reductase OS=Paenibacillus lactis 154 OX=743719 GN=queF PE=3 SV=1
MAGRQREEMQEVTLLGNQGTKYTFEYDPGILESFDNKHPYRDYFVKFNCPEFTSLCPITGQPDFATIYISYIPDIKMVESKSLKLYLFSFRNHGDFHEDCVNIIMNDLIKLMDPRYIEVWGKFTPRGGISIDPYCNYGRPGTKYEEMAAQRLMNHDLYPEKVDNR

SEQ ID NO: 47971 - protein, 172 aa, Paenibacillus larvae
  REGION 1..172: note = tr|A0A2A5K0I4|A0A2A5K0I4_PAELB NADPH-dependent 7-cyano-7-deazaguanine reductase OS=Paenibacillus larvae subsp. larvae (strain NRRL B-3650 / LMG 16245) OX=741161; GN = q ueF PE=3 SV=1
MLFEKERTEVSHEKGIEGLTLLGNQKTQYPTQYDPGVLESFDNKKPDRDYFVKFNCPEFTSLCPMTGQPDFATIYISYIPDQKMVESKSLKLYLFSFRNHGDFHEHCVNVIMDDLIELMQPKYIEVWGKFTPRGGISIDPYCNYGKPGTKYEQMAEHRMMNHDMYPEQVDNR

SEQ ID NO: 47972 - protein, 172 aa, Paenibacillus larvae
  REGION 1..172: note = tr|A0A1V0US90|A0A1V0US90_9BACL NADPH-dependent 7-cyano-7-deazaguanine reductase OS=Paenibacillus larvae subsp. pulvifaciens OX=1477 GN=queF PE=3 SV=1
MLFEKERTEVSHEKGIEGLTLLGNQKTQYPTQYDPGVLEAFDNKKPDRDYFVKFNCPEFTSLCPMTGQPDFATIYISYIPDQKMVESKSLKLYLFSFRNHGDFHEHCVNVIMDDLIELMQPKYIEVWGKFTPRGGISIDPYCNYGKPGTKYEQMAEHRMMNHDMYPEQVDNR

SEQ ID NO: 47973 - protein, 165 aa, Paenibacillus lautus
  REGION 1..165: note = tr|A0A1R1B2I4|A0A1R1B2I4_PAELA NADPH-dependent 7-cyano-7-deazaguanine reductase OS=Paenibacillus lautus; OX = 1401 GN=queF PE=3 SV=1
MAGRQKEEMEDVTLLGNQGTKYTFEYDPGILESFDNKHPYRDYFVKFNCPEFTSLCPITGQPDFATIYISYIPDIKMVESKSLKLYLFSFRNHGDFHEDCVNIIMNDLIKLMDPRYIEVWGKFTPRGGISIDPYCNYGRPGTKYEEIAANRLMNHDLYPEKVDNR

SEQ ID NO: 47974 - protein, 165 aa, unidentified
  source 1..165: note = Paenibacillus lentus
  REGION 1..165: note = tr|A0A3Q8SDH4|A0A3Q8SDH4_9BACL NADPH-dependent 7-cyano-7-deazaguanine reductase OS=Paenibacillus lentus; OX = 1338368 GN=queF PE=3 SV=1
MTGRQNDELQDLTLLGNQNVQYSFTYDPDILESFDNKHPYRDYFVKFNCPEFTSLCPITGQPDFATIYISYIPDIKMVESKSLKLYLFSFRNHGDFHEDCVNIIMNDLIKLMDPRYIEVWGKFTPRGGISIDPYCNYGRPGTKYESMAEQRLIQHDMYPEKIDNR

SEQ ID NO: 47975 - protein, 165 aa, Paenibacillus macerans
  REGION 1..165: note = tr|A0A090ZBY5|A0A090ZBY5_PAEMA NADPH-dependent 7-cyano-7-deazaguanine reductase OS=Paenibacillus macerans; OX = 44252 GN=queF PE=3 SV=1
MAGRKPEEMQDVTLLGNQGVKYPFNYAPEVLESFDNKHPYRDYFVKFNCPEFTSLCPITGQPDFATIYISYIPDVKMVESKSLKLYLFSFRNHGDFHEDCVNIIMNDLIKLMDPKYIEVWGKFTPRGGISIDPYCNYGRPGTKYEAMAEHRLLNHDMYPEKIDNR

SEQ ID NO: 47976 - protein, 165 aa, Paenibacillus macquariensis
  REGION 1..165: note = tr|A0A1N6UX97|A0A1N6UX97_9BACL NADPH-dependent 7-cyano-7-deazaguanine reductase OS=Paenibacillus macquariensis OX=948756 GN=queF PE=3 SV=1
MPGRQPTEMEDLTLLGNQGTKYLVEYDPSILESFDNKHAYRDYFVKFNCPEFTSLCPITGQPDFATIYISYMPDIRMVESKSLKLYLFSFRNHGDFHEDCMNVIMNDLIKLMDPKYIEVWGKFTPRGGISIDPYCNYGRPDTKYEEMAHHRLMNHDMYPETIDNR

SEQ ID NO: 47977 - protein, 165 aa, Paenibacillus macquariensis; identical to SEQ ID NO: 47976
  REGION 1..165: note = tr|A0A168FMI9|A0A168FMI9_PAEMC NADPH-dependent 7-cyano-7-deazaguanine reductase OS=Paenibacillus macquariensis OX=1468 GN=queF PE=3 SV=1

SEQ ID NO: 47978 - protein, 167 aa, unidentified
  source 1..167: note = Paenibacillus montanisoli
  REGION 1..167: note = tr|A0A328TWU2|A0A328TWU2_9BACL NADPH-dependent 7-cyano-7-deazaguanine reductase OS=Paenibacillus montanisoli OX=2081970 GN=queF PE=3 SV=1
MSGRSKEELQSGGVTHLGNQGTSYLFNYSPEVLESFDNKHIGRDYWVKFNCPEFTSLCPITGQPDFATIYISYIPDVKMVESKSLKLYLFSFRNHGDFHEDCMNIIMNDLIALMNPRYIEVWGKFTPRGGISIDPYCNWGRPGTKFEEMAQYRLMNHDLYPEKVDNR

SEQ ID NO: 47979 - protein, 193 aa, Paenibacillus mucilaginosus
  REGION 1..193: note = tr|F8FIL7|F8FIL7_PAEMK NADPH-dependent 7-cyano-7-deazaguanine reductase OS=Paenibacillus mucilaginosus (strain KNP414) OX=1036673 GN=queF PE=3 SV=1
MKLPRRRPFTAPRAFRYNEREARKKGAYLMAGRKEDELDLTLLGSERTKYPMNYAPEMLESFDNKHPYRDYFVKFNCPEFTSLCPITGQPDFATIYISYIPDQKMVESKSLKLYLFSFRNHGDFHEDCMNIIMNDLIKLMDPKYIEVWGKFTPRGGISIDPYCNYGRPGTKYEAMAEHRLLNHDLYPEKVDNR

SEQ ID NO: 47980 - protein, 164 aa, Paenibacillus mucilaginosus
  REGION 1..164: note = tr|H6NKN9|H6NKN9_9BACL NADPH-dependent 7-cyano-7-deazaguanine reductase OS=Paenibacillus mucilaginosus 3016 OX=1116391 GN=queF PE=3 SV=1
MAGRKEDELDLTLLGSERTKYPMNYAPEMLESFDNKHPYRDYFVKFNCPEFTSLCPITGQPDFATIYISYIPDQKMVESKSLKLYLFSFRNHGDFHEDCMNIIMNDLIKLMDPKYIEVWGKFTPRGGISIDPYCNYGRPGTKYEAMAEHRLLNHDLYPEKVDNR

SEQ ID NO: 47981 - protein, 165 aa, Paenibacillus nanensis
  REGION 1..165: note = tr|A0A3A1V0F7|A0A3A1V0F7_9BACL NADPH-dependent 7-cyano-7-deazaguanine reductase OS=Paenibacillus nanensis; OX = 393251 GN=queF PE=3 SV=1
MGGRNKEELNGITHLGNQGTQYPFNYAPEVLETFENKHQNRDYFVKFNCPEFTSLCPITGQPDFATIYISYIPDVLMVESKALKLYLFSFRNHGDFHEDCMNIIMNDLIKLMNPRYIEVWGKFTPRGGISIDPYCNWGRPGTKYEAMAEHRLMNHDMYPEKVDNR

SEQ ID NO: 47982 - protein, 164 aa, Paenibacillus naphthalenovorans
  REGION 1..164: note = tr|A0A0U2MZ47|A0A0U2MZ47_9BACL NADPH-dependent 7-cyano-7-deazaguanine reductase OS=Paenibacillus naphthalenovorans OX=162209 GN=queF PE=3 SV=1
MAGRKEDELELTLLGSQQTRYPMTYAPEMLESFDNKHPYRDYFVKFNCPEFTSLCPITGQPDFATIYISYIPDRKMVESKSLKLYLFSFRNHGDFHEDCVNIIMNDLIKLMDPKYIEVWGKFTPRGGISIDPYCNYGRPGTKYEQMAEHRLLNHDLYPEKVDNR

SEQ ID NO: 47983 - protein, 126 aa, unidentified
  source 1..126: note = Paenibacillus nuruki
  REGION 1..126: note = tr|A0A1E3L6F8|A0A1E3L6F8_9BACL PreQ(1) synthase; OS = Paenibacillus nuruki OX=1886670 GN=queF PE=4 SV=1
MDTLYSIQQITEITGLSAHTLRYYEKIGLVQDIYRDAKGYRQYTETDILWLDFLIRLKETGMPIREMKKFADLRSEGETTVSLRKELLEHHYQYVQSQIRQQQHHLAKIVDKVQYYATLEEQAKQN

SEQ ID NO: 47984 - protein, 165 aa, unidentified
  source 1..165: note = Paenibacillus nuruki
  REGION 1..165: note = tr|A0A1E3KZH5|A0A1E3KZH5_9BACL NADPH-dependent 7-cyano-7-deazaguanine reductase OS=Paenibacillus nuruki; OX = 1886670 GN=queF PE=3 SV=1
MSGRQPDEMQDLTLLGNQGTKYNFEYDPSILENFDNKHPYRDYFVKFNCPEFTSLCPITGQPDFATIYISYIPDQKMVESKSLKLYLFSFRNHGDFHEDCMNIILNDLVKLMDPRYIEVWGKFTPRGGISIDPYTNYGKPGTKYEQMAEHRMMNHDMYPETIDNR

SEQ ID NO: 47985 - protein, 157 aa, Paenibacillus odorifer
  REGION 1..157: note = tr|A0A1R0XS07|A0A1R0XS07_9BACL NADPH-dependent 7-cyano-7-deazaguanine reductase OS=Paenibacillus odorifer; OX = 189426 GN=queF PE=3 SV=1
MQEVTLLGNQGTQYKFGYDPDILEVFDNKHPGRDYFVKFNCPEFTSLCPVTGQPDFATLYISYIPEQKMVESKSLKLYLFSFRNHGDFHEDCVNIIMNDLISLMDPRYIEVWGKFTPRGGISIDPYCNYGRPGTKYEAMAEHRLINHDLYPEKVYNR

SEQ ID NO: 47986 - protein, 157 aa, Paenibacillus odorifer
  REGION 1..157: note = tr|A0A1R0WRT8|A0A1R0WRT8_9BACL NADPH-dependent 7-cyano-7-deazaguanine reductase OS=Paenibacillus odorifer; OX = 189426 GN=queF PE=3 SV=1
MQEVTLLGNQGTQYKFGYDPDILEVFDNKHPGRDYFVKFNCPEFTSLCPVTGQPDFATLYISYIPEQKMVESKSLKLYLFSFRNHGDFHEDCVNIIMNDLISLMDPRYIEVWGKFTPRGGISIDPYCNYGRPGTKYEAMAEHRLINHDLYPEKVDNR

SEQ ID NO: 47987 - protein, 173 aa, unidentified
  source 1..173: note = Paenibacillus oryzae
  REGION 1..173: note = tr|A0A1A5YP78|A0A1A5YP78_9BACL NADPH-dependent 7-cyano-7-deazaguanine reductase OS=Paenibacillus oryzae; OX = 1844972 GN=queF PE=3 SV=1
MKHNTKQTSEGRDSRELDGLTLLGNQGTAYAFSYAPEVLEHFENKHQGRDYFVKFNCPEFTSLCPITGQPDFATIYISYIPDVRMVESKSLKLYLFSFRNHGDFHEDCMNIIMNDLIKLMDPRYIEVWGKFTPRGGISIDPYCNWGRPGTKYEDMAQHRLMNHDLYPEKVDNR

SEQ ID NO: 47988 - protein, 165 aa, unidentified
  source 1..165: note = Paenibacillus oryzisoli
  REGION 1..165: note = tr|A0A198A6A2|A0A198A6A2_9BACL NADPH-dependent 7-cyano-7-deazaguanine reductase OS=Paenibacillus oryzisoli OX=1850517 GN=queF PE=3 SV=1
MAGRSNEDLKEITLLGNQGTKYVFNYDPTLLEAFDNKHPDRAYFVKFNFPEFTSLCPVTGQPDFATLYISYIPTIKMVESKSLKLYLFSFRNHGDFHEDCVNIIMNDLIELMNPRYIEVWGKFTPRGGISIDPYCNWGQPGTKYETMAEHRLMNHDMYPEKIDNR

SEQ ID NO: 47989 - protein, 198 aa, Paenibacillus pabuli
  REGION 1..198: note = tr|A0A327PJH1|A0A327PJH1_9BACL NADPH-dependent 7-cyano-7-deazaguanine reductase OS=Paenibacillus pabuli; OX = 1472 GN=queF PE=3 SV=1
MYLGNEVSFTLQADSPVHIYREASGFDGNKERLRTMRQPDEMQDLTLLGNQGVKYTFEYDPGILENFDNKHPYRDYFVKFNCPEFTSLCPITGQPDFATIYISYIPDVKMVESKSLKLYLFSFRNHGDFHEDCVNIIMNDLIKLMDPRFIEVWGKFTPRGGISIDPYTNYGKPGTKYEQMAEHRMMNHDMYPETIDNR

SEQ ID NO: 47990 - protein, 167 aa, unidentified
  source 1..167: note = Paenibacillus paeoniae
  REGION 1..167: note = tr|A0A371PMY1|A0A371PMY1_9BACL NADPH-dependent 7-cyano-7-deazaguanine reductase OS=Paenibacillus paeoniae; OX = 2292705 GN=queF PE=3 SV=1
MAGRNQEELVQGGITHLGNQGTKYPFTYAPEVLESFDNKHPGRDYFVKFNCPEFTSLCPITGQPDFATIYISYIPDVKMVESKSLKLYLFSFRNHGDFHEDCMNIMMNDLIALMNPRYIEVWGKFTPRGGISIDPYCNWGRPGTKYEAIAEHRLMNHDLYPEKVDNR

SEQ ID NO: 47991 - protein, 169 aa, Paenibacillus pasadenensis
  REGION 1..169: note = tr|A0A2N5N144|A0A2N5N144_9BACL NADPH-dependent 7-cyano-7-deazaguanine reductase OS=Paenibacillus pasadenensis OX=217090 GN=queF PE=3 SV=1
MSEIEQGRSKEELSGVTLLGNQGTQYPVTYAPQVLESFVNKHPGRDYRVKFNCPEFTSLCPMTGQPDFATITIAYIPDELMVESKSLKLYLFSFRNHGDFHEDCMNIIMNDLIALMQPKFIEVWGKFTPRGGISIDPYCNWGRPGTKYEQMAERRMMNLDLYPEKIDNR

SEQ ID NO: 47992 - protein, 166 aa, Paenibacillus pectinilyticus
  REGION 1..166: note = tr|A0A1C0ZR64|A0A1C0ZR64_9BACL NADPH-dependent 7-cyano-7-deazaguanine reductase OS=Paenibacillus pectinilyticus OX=512399 GN=queF PE=3 SV=1
MSAGRSNEDLKEITLLGNQGTKYIFNYDPTLLEAFDNKHPDRAYFVKFNFPEFTSLCPVTGQPDFATLYISYIPTIKMVESKSLKLYLFSFRNHGDFHEDCVNIIMNDLIDLMNPRYIEVWGKFTPRGGISIDPYCNWGQPGTKYEAMAEHRLMNHDLYPEKIDNR

SEQ ID NO: 47993 - protein, 165 aa, Paenibacillus peoriae
  REGION 1..165: note = tr|A0A0K2F4T0|A0A0K2F4T0_9BACL NADPH-dependent 7-cyano-7-deazaguanine reductase OS=Paenibacillus peoriae; OX = 59893 GN=queF PE=3 SV=1
MTGRTPEEMIDVTLLGNQGTQYTFAYDPAILESFDNKHPYRDYFVKFNCPEFTSLCPITGQPDFATIYISYIPDIKMVESKSLKLYLFSFRNHGDFHEDCVNIIMNDLIKLMDPRYIEVWGKFTPRGGISIDPYTNYGKPGTKYEQIAEHRMMNHDMYPEKIDNR

SEQ ID NO: 47994 - protein, 165 aa, Paenibacillus peoriae
  REGION 1..165: note = tr|A0A2S6NWA5|A0A2S6NWA5_9BACL NADPH-dependent 7-cyano-7-deazaguanine reductase OS=Paenibacillus peoriae; OX = 59893 GN=queF PE=3 SV=1
MTGRTPEEMTDVTLLGNQGTQYTFAYDPAILESFDNKHPYRDYFVKFNCPEFTSLCPITGQPDFATIYISYIPDIKMVESKSLKLYLFSFRNHGDFHEDCVNIIMNDLIKLMDPRYIEVWGKFTPRGGISIDPYTNYGKPGTKYEQIAEHRMMNHDMYPEKIDNR

SEQ ID NO: 47995 - protein, 165 aa, Paenibacillus pini
  REGION 1..165: note = tr|W7YSQ4|W7YSQ4_9BACL NADPH-dependent 7-cyano-7-deazaguanine reductase OS=Paenibacillus pini JCM 16418 OX=1236976 GN=queF PE=3 SV=1
MPGRQSNEMEDLTLLGNQGTKYVFEYAPEVLESFDNKHAYRDYFVKFNFPEFTSLCPITGQPDFATLHISYIPDVKMVESKSLKLYLFSFRNHGDFHEDCINIIMNDLIKLMNPRYIEVWGKFTPRGGISIDPYCNYGRPDSKYEQMAEHRMMNHDLYPEKIDNR

SEQ ID NO: 47996 - protein, 167 aa, unidentified
  source 1..167: note = Paenibacillus pinisoli
  REGION 1..167: note = tr|A0A3A6PET2|A0A3A6PET2_9BACL NADPH-dependent 7-cyano-7-deazaguanine reductase OS=Paenibacillus pinisoli; OX = 1276110 GN=queF PE=3 SV=1
MAGRNQEELIQGGITQLGNQGTKYPFNYAPEVLESFDNKHPGRDYFVKFNCPEFTSLCPITGQPDFATIYISYIPDVKMVESKSLKLYLFSFRNHGDFHEDCMNIIMNDLIGLMNPRYIEVWGKFTPRGGISIDPYCNWGRPGTKYEAMAEHRLMNHDMYPEKVDNR

SEQ ID NO: 47997 - protein, 165 aa, Paenibacillus polymyxa; identical to SEQ ID NO: 47969
  REGION 1..165: note = tr|A0A5B8J3W5|A0A5B8J3W5_PAEPO NADPH-dependent 7-cyano-7-deazaguanine reductase OS=Paenibacillus polymyxa; OX = 1406 GN=queF PE=3 SV=1

SEQ ID NO: 47998 - protein, 165 aa, Paenibacillus polymyxa
  REGION 1..165: note = tr|A0A2N9Z4J9|A0A2N9Z4J9_PAEPO NADPH-dependent 7-cyano-7-deazaguanine reductase OS=Paenibacillus polymyxa; OX = 1406 GN=queF PE=3 SV=1
MTGRTPEEMTDVTLLGNQGTQYTFTYDPAILESFDNKHPYRDYFVKFNCPEFTSLCPITGQPDFATIYISYIPDIKMVESKSLKLYLFSFRNHGDFHEDCVNIIMNDLIKLMDPRYIEVWGKFTPRGGISIDPYTNYGKPGTKYEQIAEHRMMNHDMYPEKIDNR

SEQ ID NO: 47999 - protein, 163 aa, unidentified; identical to SEQ ID NO: 47938
  source 1..163: note = Paenibacillus polysaccharolyticus
  REGION 1..163: note = tr|A0A1G5GHJ9|A0A1G5GHJ9_9BACL NADPH-dependent 7-cyano-7-deazaguanine reductase OS=Paenibacillus polysaccharolyticus OX=582692 GN=queF PE=3 SV=1

SEQ ID NO: 48000 - protein, 163 aa, Paenibacillus popilliae
  REGION 1..163: note = tr|M9M533|M9M533_PAEPP NADPH-dependent 7-cyano-7-deazaguanine reductase OS=Paenibacillus popilliae ATCC 14706 OX=1212764 GN=queF PE=3 SV=1
MTGRNEAELQLKHLGGKTEYATDYAPHVLEAFDNKHPDRDYFVKFNCPEFTSLCPMTGQPDFATMYISYIPDRKCVESKSLKLYMFSFRNHGDFHEDCINIIMNDLIGLLDPKYIEIWGKFTPRGGISIDPYCNYGRPGTKFEEMAAYRLMNHDLYPETVDNR

SEQ ID NO: 48001 - protein, 165 aa, Paenibacillus prosopidis
  REGION 1..165: note = tr|A0A368VXP9|A0A368VXP9_9BACL NADPH-dependent 7-cyano-7-deazaguanine reductase OS=Paenibacillus prosopidis OX=630520 GN=queF PE=3 SV=1
MEGRNKEELNGVTLLGNQGTQYLFNYAPDILETFVNKHPNRDYFVKFNCPEFTSLCPMTGQPDFATIYISYIPDLKMVESKSLKLYLFSFRNHGDFHEDCMNIIMNDLIALMEPKYIEVWGKFTPRGGISIDPYCNWGQPGTKYEQMAEHRLMNHDMYPEKIDNR

SEQ ID NO: 48002 - protein, 165 aa, Paenibacillus rhizosphaerae
  REGION 1..165: note = tr|A0A1R1F1W8|A0A1R1F1W8_9BACL NADPH-dependent 7-cyano-7-deazaguanine reductase OS=Paenibacillus rhizosphaerae OX=297318 GN=queF PE=3 SV=1
MSGRQPHEMKDLTLLGNQGTKYVFQYDPELLESFDNKHAYRDYFVKFNFPEFTSLCPITGQPDFATLHISYIPDQKMVESKSLKLYLFSFRNHGDFHEDCMNIIMNDLIKLMDPRYIEVWGKFTPRGGISIDPYCNYGRPGTKYEQWAEQRMINHDLYPEKIDNR

SEQ ID NO: 48003 - protein, 164 aa, Paenibacillus rigui
  REGION 1..164: note = tr|A0A229UIQ4|A0A229UIQ4_9BACL NADPH-dependent 7-cyano-7-deazaguanine reductase OS=Paenibacillus rigui; OX = 554312 GN=queF PE=3 SV=1
MSGRNQEELELQLLGSQKTAYPMTYAPEMLETFDNKHPYRDYFVKFNCPEFTSLCPITGQPDFATIYISYMPDQKMVESKSLKLYLFSFRNHGDFHEDCMNIIMNDLIKLMDPKYIEVWGKFTPRGGISIDPYCNYGRPGTKYEQMAEHRLLNHDLYPEKVDNR

SEQ ID NO: 48004 - protein, 166 aa, Paenibacillus riograndensis
  REGION 1..166: note = tr|A0A0E4HEL6|A0A0E4HEL6_9BACL NADPH-dependent 7-cyano-7-deazaguanine reductase OS=Paenibacillus riograndensis SBR5 OX=1073571 GN=queF PE=3 SV=1
MSEGRLKEEMQEVTLLGNQGTTYTFGYDPDILEVFDNKHPGRDYFVKFNCPEFTSLCPVTGQPDFGAMYISYIPDHKMVESKSLKLYLFSFRNHGDFHEDCVNIIMNDLISLMEPRYIEVWGKFTPRGGISIDPYCNWGRPGTKYEAMAEHRLINHDLYPEKVDNR

SEQ ID NO: 48005 - protein, 166 aa, Paenibacillus riograndensis; identical to SEQ ID NO: 48004
  REGION 1..166: note = tr|A0A132U8R2|A0A132U8R2_9BACL NADPH-dependent 7-cyano-7-deazaguanine reductase OS=Paenibacillus riograndensis OX=483937 GN=queF PE=3 SV=1

SEQ ID NO: 48006 - protein, 166 aa, Paenibacillus sabinae; identical to SEQ ID NO: 47954
  REGION 1..166: note = tr|X4ZZK0|X4ZZK0_9BACL NADPH-dependent 7-cyano-7-deazaguanine reductase OS=Paenibacillus sabinae T27 OX=1268072 GN=queF PE=3 SV=1

SEQ ID NO: 48007 - protein, 166 aa, unidentified
  source 1..166: note = Paenibacillus selenitireducens
  REGION 1..166: note = tr|A0A1T2XKZ6|A0A1T2XKZ6_9BACL NADPH-dependent 7-cyano-7-deazaguanine reductase OS=Paenibacillus selenitireducens OX=1324314 GN=queF PE=3 SV=1
MTTQPNQQPIEGLSLLGNQNTAYTYTYDPNILETFVNKKQDRDYFVKFNCPEFTSLCPMTGQPDFATIYISYVPDVNMVESKSLKLYLFSFRNHGDFHETCVNTIMDDLIAVMDPKYIEVWGKFTPRGGISIDPYCNYGKPGTTWEVIARQRLYQHDMYPESIDNR

SEQ ID NO: 48008 - protein, 163 aa, unidentified; identical to SEQ ID NO: 47938
  source 1..163: note = Paenibacillus silvae
  REGION 1..163: note = tr|A0A2W6N7Z0|A0A2W6N7Z0_9BACL NADPH-dependent 7-cyano-7-deazaguanine reductase OS=Paenibacillus silvae; OX = 1325358 GN=queF PE=3 SV=1

SEQ ID NO: 48009 - protein, 165 aa, unidentified
  source 1..165: note = Paenibacillus solani
  REGION 1..165: note = tr|A0A0M1P146|A0A0M1P146_9BACL NADPH-dependent 7-cyano-7-deazaguanine reductase OS=Paenibacillus solani; OX = 1705565 GN=queF PE=3 SV=1
MSGRQKEEMEDVTLLGNQGTTYTFEYDPGILESFDNKHPYRDYFVKFNCPEFTSLCPITGQPDFATIYISYIPDIKMVESKSLKLYLFSFRNHGDFHEDCVNIIMNDLIKLMDPRYIEVWGKFTPRGGISIDPYCNYGRPGTKYEEIAANRLMNHDLYPEKVDNR

SEQ ID NO: 48010 - protein, 166 aa, Paenibacillus sophorae
  REGION 1..166: note = tr|A0A1H8FNH2|A0A1H8FNH2_9BACL NADPH-dependent 7-cyano-7-deazaguanine reductase OS=Paenibacillus sophorae; OX = 1333845 GN=queF PE=3 SV=1
MSEGRLKEEMPDVTLLGNQGTQYKFGYAPEVLESFDNKHPGRDYFVKFNCPEFTSLCPVTGQPDFATLYISYIPEQKMVESKSLKLYLFSFRNHGDFHEDCVNIIMNDLIKLMDPRYIEVWGKFTPRGGISIDPYCNYGRPGTKYEAMAEHRLLNHDLYPETIDNR

SEQ ID NO: 48011 - protein, 166 aa, Paenibacillus sp.; identical to SEQ ID NO: 47942
  REGION 1..166: note = tr|A0A089I6D0|A0A089I6D0_9BACL NADPH-dependent 7-cyano-7-deazaguanine reductase OS=Paenibacillus sp. FSL H7-0357 OX=1536774 GN=queF PE=3 SV=1

SEQ ID NO: 48012 - protein, 165 aa, Paenibacillus sp.
  REGION 1..165: note = tr|A0A1I6PDS1|A0A1I6PDS1_9BACL NADPH-dependent 7-cyano-7-deazaguanine reductase OS=Paenibacillus sp. 453mf OX=1761874 GN=queF PE=3 SV=1
MAGRQSDELQDITLLGNQGTKYNFEYDPDILETFDNKHPYRDYFVKFNSPEFTSLCPITGQPDFATIYISYIPDIKMVESKSLKLYLFSFRNHGDFHEDVVNIIMNDLIKLMDPRYIEVWGKFTPRGGISIDPYCNYGRPGTKYEELATQRLFQHDMYPEKIDNR

SEQ ID NO: 48013 - protein, 166 aa, Paenibacillus stellifer
  REGION 1..166: note = tr|A0A089N609|A0A089N609_9BACL NADPH-dependent 7-cyano-7-deazaguanine reductase OS=Paenibacillus stellifer OX=169760 GN=queF PE=3 SV=1
MSEGRKKEEMPEVTLLGNQGTAYNFGYDPGVLESFDNKHPGRDYFVKFNCPEFTSLCPVTGQPDFATIYISYIPEVKMVESKSLKLYLFSFRNHGDFHEDCVNIIMNDLISLMDPRYIEVWGKFTPRGGISIDPYCNYGRPGTKYETMAEHRLLNHDLYPEKVDNR

SEQ ID NO: 48014 - protein, 176 aa, unidentified
  source 1..176: note = Paenibacillus swuensis
  REGION 1..176: note = tr|A0A172TF24|A0A172TF24_9BACL NADPH-dependent 7-cyano-7-deazaguanine reductase OS=Paenibacillus swuensis; OX = 1178515 GN=queF PE=3 SV=1
MSQPTINGSTPAPGRAQGELQDLTLLGDQQVKYLFEYSPQILESFDNKHPYRDYFVKFNCPEFTSLCPITGQPDFATIYISYIPDEKMVESKSLKLYLFSFRNHGDFHEDCMNIIMNDLIKLMDPRYIEVWGKFTPRGGISIDPYTNYGKPGTKYEEMAFHRMMNHDLYPEKVDNR

SEQ ID NO: 48015 - protein, 163 aa, Paenibacillus taichungensis
  REGION 1..163: note = tr|A0A329R354|A0A329R354_9BACL NADPH-dependent 7-cyano-7-deazaguanine reductase OS=Paenibacillus taichungensis OX=484184 GN=queF PE=3 SV=1
MRQPDEMQDLTLLGNQGVKYTFEYDPGILENFDNKHPYRDYFVKFNCPEFTSLCPITGQPDFATIYISYIPDVKMVESKSLKLYLFSFRNHGDFHEDCVNIIMNDLIKLMDPRYIEVWGKFTPRGGISIDPYTNYGKPGTKYEQMAEHRMMNHDMYPETIDNR

SEQ ID NO: 48016 - protein, 198 aa, Paenibacillus taichungensis
  REGION 1..198: note = tr|A0A2V3S8B8|A0A2V3S8B8_9BACL NADPH-dependent 7-cyano-7-deazaguanine reductase OS=Paenibacillus taichungensis OX=484184 GN=queF PE=3 SV=1
MYLGNEVSFTLQADSPVHIYREASGFDGNKERLRTMRQPDEMQDLTLLGNLGVKYTFEYDPGILENFDNKHPYRDYFVKFNCPEFTSLCPITGQPDFATIYISYIPDVKMVESKSLKLYLFSFRNHGDFHEDCVNIIMNDLIKLMDPRFIEVWGKFTPRGGISIDPYTNYGKPGTKYEQMADHRMMNHDMYPETIDNR

SEQ ID NO: 48017 - protein, 167 aa, unidentified
  source 1..167: note = Paenibacillus taihuensis
  REGION 1..167: note = tr|A0A3D9Q646|A0A3D9Q646_9BACL NADPH-dependent 7-cyano-7-deazaguanine reductase OS=Paenibacillus taihuensis OX=1156355 GN=queF PE=3 SV=1
MSGRSKEELQEGGVSHLGNQGTQYLFNYSPEVLESFDNKHVGRDYFVKFNCPEFTSLCPITGQPDFATIYISYIPDVKMVESKSLKLYLFSFRNHGDFHEDCMNIIMNDLIALMNPRYIEVWGKFTPRGGISIDPYTNWGRPGTKFEEMAHYRLMNHDLYPEKVDNR

SEQ ID NO: 48018 - protein, 165 aa, Paenibacillus terrae
  REGION 1..165: note = tr|G7VYT2|G7VYT2_PAETH NADPH-dependent 7-cyano-7-deazaguanine reductase OS=Paenibacillus terrae (strain HPL-003) OX=985665 GN=queF PE=3 SV=1
MTGRTPEEMTDVTLLGNQGTQYTFAYDPAILESFDNKHPYRDYFVKFNCPEFTSLCPITGQPDFATIYISYIPDIKMVESKSLKLYLFSFRNHGDFHEDCVNIIMNDLIKLMDPRYIEVWGKFTPRGGISIDPYTNYGKPGTQYEQMAEHRMMNHDMYPETVDNR

SEQ ID NO: 48019 - protein, 165 aa, Paenibacillus terrae
  REGION 1..165: note = tr|A0A4U2PWI5|A0A4U2PWI5_9BACL NADPH-dependent 7-cyano-7-deazaguanine reductase OS=Paenibacillus terrae; OX = 159743 GN=queF PE=3 SV=1
MTGRTPEEMTDVTLLGNQGTQYTFAYDPAILESFDNKHPYRDYFVKFNCPEFTSLCPITGQPDFATIYISYIPDIKMVESKSLKLYLFSFRNHGDFHEDCVNIMMNDLIKLMDPRYIEVWGKFTPRGGISIDPYTNYGKPGTKYEQMAEHRMMNHDMYPETVDNR

SEQ ID NO: 48020 - protein, 165 aa, unidentified
  source 1..165: note = Paenibacillus thermophilus
  REGION 1..165: note = tr|A0A388MLX6|A0A388MLX6_9BACL NADPH-dependent 7-cyano-7-deazaguanine reductase OS=Paenibacillus thermophilus OX=1181891 GN=queF PE=3 SV=1
MAGRKPEEMQDVTLLGNQGVKYPFDYAPEVLESFDNKHPYRDYFVKFNCPEFTSLCPITGQPDFATIYISYIPDVKMVESKSLKLYLFSFRNHGDFHEDCVNIIMNDLIKLMDPKYIEVWGKFTPRGGISIDPYCNYGRPGTKYEAMAEHRLLNHDMYPEKIDNR

SEQ ID NO: 48021 - protein, 163 aa, Paenibacillus thiaminolyticus
  REGION 1..163: note = tr|A0A3A3GCS7|A0A3A3GCS7_PANTH NADPH-dependent 7-cyano-7-deazaguanine reductase OS=Paenibacillus thiaminolyticus OX=49283 GN=queF PE=3 SV=1
MAGRNEAELQLKHLGGKTEYATDYAPHVLEAFDNKHPNRDYFVKFNCPEFTSLCPMTGQPDFATMYISYIPDQKCVESKSLKLYMFSFRNHGDFHEDCVNIIMNDLIELLDPKYIEVWGKFTPRGGISIDPYCNYGRPGTKYEEMAAYRLMNHDLYPETVDNR

SEQ ID NO: 48022 - protein, 163 aa, Paenibacillus thiaminolyticus
  REGION 1..163: note = tr|A0A378ZFL6|A0A378ZFL6_PANTH NADPH-dependent 7-cyano-7-deazaguanine reductase OS=Paenibacillus thiaminolyticus OX=49283 GN=queF PE=3 SV=1
MAGRNEAELQLKHLGGKTEYATDYAPDVLEAFDNKHPNRDYFVKFNCPEFTSLCPMTGQPDFATMYISYIPDRKCVESKSLKLYMFSFRNHGDFHEDCVNIIMNDLIELLDPKYIEVWGKFTPRGGISIDPYCNYGRPGTKYEEMAAYRLMNHDLYPETVDNR

SEQ ID NO: 48023 - protein, 164 aa, Paenibacillus tianmuensis
  REGION 1..164: note = tr|A0A1G4RH04|A0A1G4RH04_9BACL NADPH-dependent 7-cyano-7-deazaguanine reductase OS=Paenibacillus tianmuensis OX=624147 GN=queF PE=3 SV=1
MAGRKEGELDLTLLGNQQTKYPMNYAPEMLESFDNKHPYRDYFVKFNCPEFTSLCPITGQPDFATIYISYIPDLKMVESKSLKLYLFSFRNHGDFHEDCMNIIMNDLIKLMDPKYIEVWGKFTPRGGISIDPYCNYGRPGTKYEQMAEHRLLNHDLYPEKVDNR

SEQ ID NO: 48024 - protein, 166 aa, unidentified
  source 1..166: note = Paenibacillus typhae
  REGION 1..166: note = tr|A0A1G8GWI5|A0A1G8GWI5_9BACL NADPH-dependent 7-cyano-7-deazaguanine reductase OS=Paenibacillus typhae; OX = 1174501 GN=queF PE=3 SV=1
MSEGRLKEEMPEVTLLGNQGTKYNFGYDPEVLEAFDNKHPGRDYFVKFNCPEFTSLCPVTGQPDFGVMYISYIPDIKMVESKSLKLYLFSFRNHGDFHEDCVNIIMNDLISLMNPRYIEVWGKFTPRGGISIDPYCNWGRPGTKYEAMAEHRLMNHDLYPEKVDNR

SEQ ID NO: 48025 - protein, 164 aa, unidentified; identical to SEQ ID NO: 47956
  source 1..164: note = Paenibacillus tyrfis
  REGION 1..164: note = tr|A0A081NXC7|A0A081NXC7_9BACL NADPH-dependent 7-cyano-7-deazaguanine reductase OS=Paenibacillus tyrfis; OX = 1501230 GN=queF PE=3 SV=1

SEQ ID NO: 48026 - protein, 165 aa, Paenibacillus uliginis
  REGION 1..165: note = tr|A0A1X7HNV4|A0A1X7HNV4_9BACL NADPH-dependent 7-cyano-7-deazaguanine reductase OS=Paenibacillus uliginis N3/975 OX=1313296 GN=queF PE=3 SV=1
MAGRQRDEMEDITLLGNQGTKYQFEYDPSILESFDNKHPYRDYFVKFNCPEFTSLCPITGQPDYATIYISYIPDIKMVESKALKLYLFSFRNHGDFHEDCVNIIMNDLIKLMDPRYIEVWGKFTPRGGISIDPYCNYGRPGTKYEEVAAHRLMNHDMYPEKVDNR

SEQ ID NO: 48027 - protein, 165 aa, unidentified
  source 1..165: note = Paenibacillus vortex
  REGION 1..165: note = tr|A0A2R9SYQ4|A0A2R9SYQ4_9BACL NADPH-dependent 7-cyano-7-deazaguanine reductase OS=Paenibacillus vortex V453 OX=715225 GN=queF PE=3 SV=1
MAGRQKEEMQDVTLLGNQGTKYTFEYDPSILESFDNKHAYRDYFVKFNCPEFTSLCPITGQPDFATIYISYIPDIKMVESKSLKLYLFSFRNHGDFHEDCMNIIMNDLIKLMDPRYIEVWGKFTPRGGISIDPYCNYGRPGTKYEDIAANRLMNHDLYPETVDNR

SEQ ID NO: 48028 - protein, 166 aa, unidentified
  source 1..166: note = Paenibacillus whitsoniae
  REGION 1..166: note = tr|A0A3S0BQ70|A0A3S0BQ70_9BACL NADPH-dependent 7-cyano-7-deazaguanine reductase OS=Paenibacillus whitsoniae OX=2496558 GN=queF PE=3 SV=1
MSAGRSHEDLQHISLLGNQGTKYIFSYDPTLLEAFDNKHPNRDYFVKFNFPEFTSLCPVTGQPDFATLYISYIPEIKMVESKSLKLYLFSFRNHGDFHEDCVNIIMNDLIKLMDPRYIEVWGKFTPRGGISIDPYCNYGRPGTKYEAMAEHRLMNHDLYPEKIDNR

SEQ ID NO: 48029 - protein, 166 aa, Paenibacillus wynnii
  REGION 1..166: note = tr|A0A098M591|A0A098M591_9BACL NADPH-dependent 7-cyano-7-deazaguanine reductase OS=Paenibacillus wynnii; OX = 268407 GN=queF PE=3 SV=1
MSEGRIKEDMLEVTLLGNQGTAYKFGYDPDILEVFDNKHPGRDYFVKFNCPEFTSLCPVTGQPDFGTMYISYIPEQKMVESKSLKLYLFSFRNHGDFHEDCVNIIMNDLIALMEPRYIEVWGKFTPRGGISIDPYCNWGRPGTKYEAMAEHRLMNHDLYPEKIGNR

SEQ ID NO: 48030 - protein, 119 aa, unidentified
  source 1..119: note = Paenibacillus xerothermodurans
  REGION 1..119: note = tr|A0A2W1NB97|A0A2W1NB97_9BACL NADPH-dependent 7-cyano-7-deazaguanine reductase OS=Paenibacillus xerothermodurans OX=1977292 GN=queF PE=3 SV=1
MSTKPSRTLLAVPNPHPDREYEVEIESPEFTALCPVTGQPDFATITFKYIPGPSIVELKSLKLYLWSFRDEGHFHEDVTNRILKDFVEQIQPRKLQVVGKFNVRGGIYTTVRAEYEQEK

SEQ ID NO: 48031 - protein, 163 aa, Paenibacillus xylanexedens
  REGION 1..163: note = tr|A0A3N6BR24|A0A3N6BR24_9BACL NADPH-dependent 7-cyano-7-deazaguanine reductase OS=Paenibacillus xylanexedens OX=528191 GN=queF PE=3 SV=1
MRQPDEMQDVTLLGNQNVKYTFEYDPGILENFDNKHPYRDYFVKFNCPEFTSLCPITGQPDFATIYISYIPDIKMVESKSLKLYLFSFRNHGDFHEDCVNIIMNDLIKLMDPRYIEVWGKFTPRGGISIDPYTNYGKPGTKYEQMADHRMMNHDMYPETIDNR

SEQ ID NO: 48032 - protein, 163 aa, Paenibacillus xylanexedens
  REGION 1..163: note = tr|A0A1L5LLN0|A0A1L5LLN0_9BACL NADPH-dependent 7-cyano-7-deazaguanine reductase OS=Paenibacillus xylanexedens OX=528191 GN=queF PE=3 SV=1
MRQPDEMQDVTLLGNQNVKYTFEYDPGILENFDNKHPYRDYFVKFNCPEFTSLCPITGQPDFATIYISYIPDVKMVESKSLKLYLFSFRNHGDFHEDCVNIIMNDLIKLMDPRYIEVWGKFTPRGGISIDPYTNYGKPGTKYEQMADHRMMNHDMYPETIDNR

SEQ ID NO: 48033 - protein, 165 aa, unidentified
  source 1..165: note = Paenibacillus yonginensis
  REGION 1..165: note = tr|A0A1B1MWM3|A0A1B1MWM3_9BACL NADPH-dependent 7-cyano-7-deazaguanine reductase OS=Paenibacillus yonginensis OX=1462996 GN=queF PE=3 SV=1
MSGRQQEEMQDLTLLGNQGTKYPFNYAPEVLESFDNKHPYRDYFVKFNCPEFTSLCPITGQPDFATIYISYIPDVKMVESKSLKLYLFSFRNHGDFHEDCVNIIMNDLIKLMDPRYIEVWGKFTPRGGISIDPYCNYGKPGTKYEQLAEQRLFNHDLYPEKVDNR

SEQ ID NO: 48034 - protein, 153 aa, unidentified
  source 1..153: note = Paenimaribius caenipelagi
  REGION 1..153: note = tr|A0A547PR89|A0A547PR89_9RHOB NADPH-dependent 7-cyano-7-deazaguanine reductase OS=Paenimaribius caenipelagi OX=2489174 GN=queF PE=3 SV=1
MSTDTRGLTQLGQDTAQPMSPETAVLERVPAPHKGRDYMVRFTCPEFTSLCPMTGQPDFAHLVIDYVPGDWLVESKSLKLFLHSFRNHGSFHEDCTMTVVTKIEELLAPKWIRIGGYWYPRGGIPIDIFWQSGPVPDDVWIPGQDVPGYRGRG

SEQ ID NO: 48035 - protein, 154 aa, unidentified
  source 1..154: note = Paenirhodobacter enshiensis
  REGION 1..154: note = tr|A0A086XSC9|A0A086XSC9_9RHOB NADPH-dependent 7-cyano-7-deazaguanine reductase OS=Paenirhodobacter enshiensis OX=1105367 GN=queF PE=3 SV=1
MSETIYDGLTQLGHAAPLPESPEAAILERVPNPQQGIGYLVRFTAPEFTSLCPLTGQPDFAHLMIDYVPGDWLVESKSLKLFLGSFRNHGAFHEDCTISIARRLVETLDPRWLRIGGYWYPRGGIPIDVFWQTGAAPEGVWIPDQGVPPYRGRG

SEQ ID NO: 48036 - protein, 165 aa, unidentified
  source 1..165: note = Paenisporosarcina antarctica
  REGION 1..165: note = tr|A0A4P6ZUH5|A0A4P6ZUH5_9BACL NADPH-dependent 7-cyano-7-deazaguanine reductase OS=Paenisporosarcina antarctica OX=417367 GN=queF PE=3 SV=1
MTGRQKEDLQGINLLGNQNVQYDFSYNPGVLESFENKHPYRDYFVKFNCPEFTSLCPITSQPDFATIYISYIPEINMVESKSLKLYLFSFRNHGDFHEDCMNIILNDLIKLMEPRYIEVWGKFTPRGGISIDPYTNYGKPGTKYEEMATHRMMNHDMYPETINNR

SEQ ID NO: 48037 - protein, 166 aa, Paenisporosarcina quisquiliarum
  REGION 1..166: note = tr|A0A1H8B1P9|A0A1H8B1P9_9BACL NADPH-dependent 7-cyano-7-deazaguanine reductase OS=Paenisporosarcina quisquiliarum OX=365346 GN=queF PE=3 SV=1
MSGRSHDEGLKDLTLLGNQGTKYSFDYAPEVLESVDNMHSTRDYFVKFNCPEFTSLCPITNQPDFATMYISYIPDKKIVESKSLKLYLFSFRNHGDFHEDCVNIIMNDLIELLDPRYIEVWGKFTPRGGISIDPWCNYGRPGTKYVEMADFRLMNHDLYPEKIDNR

SEQ ID NO: 48038 - protein, 165 aa, Paenisporosarcina sp.
  REGION 1..165: note = tr|A0A2T6KGF1|A0A2T6KGF1_9BACL NADPH-dependent 7-cyano-7-deazaguanine reductase OS=Paenisporosarcina sp. OV554 OX=2135694 GN=queF PE=3 SV=1
MSGRQKEELQGINLLGNQNVQYDFSYNPGVLESFENKHPYRDYFVKFNCPEFTSLCPITSQPDFATIYISYIPDIQMVESKSLKLYLFSFRNHGDFHEDCMNIILNDLVKLMDPRYIEVWGKFTPRGGISIDPYTNYGKPGTKYEEMAAHRLMNHDMYPETIDNR

SEQ ID NO: 48039 - protein, 165 aa, Paenisporosarcina sp.
  REGION 1..165: note = tr|S2XIP7|S2XIP7_9BACL NADPH-dependent 7-cyano-7-deazaguanine reductase OS=Paenisporosarcina sp. HGH0030 OX=1078085 GN=queF PE=3 SV=1
MSGRQKEDLEGISLLGNQNVQYDFSYNPGVLESFDNKHPYRDYFVKFNCPEFTSLCPITSQPDFATIYISYIPDIKMVESKSLKLYLFSFRNHGDFHEDCMNIILNDLVELMDPRYIEVWGKFTPRGGISIDPYTNYGKPGTKYEEMAAHRMMNHDMYPETIDNR

SEQ ID NO: 48040 - protein, 153 aa, unidentified
  source 1..153: note = Palleronia abyssalis
  REGION 1..153: note = tr|A0A2R8BW77|A0A2R8BW77_9RHOB NADPH-dependent 7-cyano-7-deazaguanine reductase OS=Palleronia abyssalis; OX = 1501240 GN=queF PE=3 SV=1
MTTDTSSLTQLGHSTETPASPEEAVLERVPSPHRDADYVVRFTCPEFTSLCPMTGQPDFAHLVIDYVPGDWLVESKSLKLFLTSFRNHGSFHEDCTMTVAARIRDLLDPKWLRIGGYWYPRGGIPIDVFWQTGPAPEGVWIPDQGVPPYRGRG

SEQ ID NO: 48041 - protein, 166 aa, unidentified
  source 1..166: note = Paludibacter jiangxiensis
  REGION 1..166: note = tr|A0A161LDE5|A0A161LDE5_9BACT NADPH-dependent 7-cyano-7-deazaguanine reductase OS=Paludibacter jiangxiensis OX=681398 GN=queF PE=3 SV=1
MFSILTCRTVSGKSKKFRIMSLHHLGNKTNYPTDYAPELLETFDNKHPGNDYWVRFNCPEFTSLCPITGQPDFATIVIDYIPAQKMVESKSLKLYLFSFRNRGDFHEDCVNIIMKDLIRLMEPKYIEVTGLFTPRGGISIYPYANYGMPGTEFEEMAKYRLKNKNL

SEQ ID NO: 48042 - protein, 298 aa, Paludibacter propionicigenes
  REGION 1..298: note = tr|E4T438|E4T438_PALPW GTP cyclohydrolase I/Nitrile oxidoreductase OS=Paludibacter propionicigenes (strain DSM 17365 / JCM 13257 / WB4) OX=694427 GN=Palpr_1336 PE=4SV=1
MDFNLKDSLLGKQSSTPETYDASLLFRIPRSENRVRYAIEDEHLPFVGFDVWNCYELSFLTDNGLPVSRVLKLVYPASGQFLVESKSLKLYLNAFNMDRFGKTIAIAESRVADLIRTDLSRLLETDVQVSLFGSGSAVGQPFQAFDGVDLCSQIPESVQESIAFTRFVESPDLLRGSVSDVMKSYVFRTDLLRSNCRVTNQPDWGDLFVSMSAQRDVDLSSVMEYLVSFRKENHFHEEVVEMIYKRFWDIFAPESLMVAAMYTRRGGIDINPIRASHSGLIDKILVDGGLMTAKTWRQ

SEQ ID NO: 48043 - protein, 278 aa, unidentified
  source 1..278: note = Paludibacterium purpuratum
  REGION 1..278: note = tr|A0A4R7BCQ9|A0A4R7BCQ9_9NEIS NADPH-dependent 7-cyano-7-deazaguanine reductase OS=Paludibacterium purpuratum OX=1144873 GN=queF PE=3 SV=1
MTTQQPEHSPLGKKVDYQDHYDPTLLFPIPRRAKREEIGVDEAALPFAGCDIWNGYELSWLNARGKPQIAIATIVIPAESPSLIESKSFKLYLNTFNQTRLDNDQAVIDCLTRDLSHAAGAQVLVTLTRPAAFVAERFAELPGESIDELDIAVDDYSPDPSRLTAHAGDIVEETLCSDLLKSNCLVTGQPDWGSVTVHYRGARIDREGLLRYLIGFRQHNEFHEQCVERIFVDLLRQCRPEVLTVYARYTRRGGLDINPWRSNDPNASAPVNLRTARQ

SEQ ID NO: 48044 - protein, 140 aa, unidentified
  source 1..140: note = Paludifilum halophilum
  REGION 1..140: note = tr|A0A235B5Z9|A0A235B5Z9_9BACL NADPH-dependent 7-cyano-7-deazaguanine reductase OS=Paludifilum halophilum; OX = 1642702 GN=queF PE=3 SV=1
MEKETADQRKYSSIRFDTQDESAIMTDVLETVPYEYPGKDVEVEIPTAEFTSVCPWSGLPDFAEMKITLIPDQHLIEMKSLKYYLTSYRNVGIYQEHATRRILEELVQVAQPKYMKVEALWNPRGGLGTRVVAEYPGEEH

SEQ ID NO: 48045 - protein, 116 aa, unidentified
  source 1..116: note = Paludisphaera borealis
  REGION 1..116: note = tr|A0A1U7CWU4|A0A1U7CWU4_9BACT NADPH-dependent 7-cyano-7-deazaguanine reductase OS=Paludisphaera borealis; OX = 1387353 GN=queF PE=3 SV=1
MAAAVETFPNQFPNREYEIEITCPEFTAVCPKTGQPDFGTIVITYVPAATCLELKSLKLYLFAFRDRGIFYEHTINTILDDLTGSCQPLRMKIVGLFNPRGGMTSRITATYEASGS

SEQ ID NO: 48046 - protein, 136 aa, Panacagrimonas perspica
  REGION 1..136: note = tr|A0A4S3KBQ6|A0A4S3KBQ6_9GAMM NADPH-dependent 7-cyano-7-deazaguanine reductase OS=Panacagrimonas perspica OX=381431 GN=queF PE=3 SV=1
MTASPSKSLETFPNPNPDRDFVIRMRMPEFTCLCPKTGQPDFGTLYLEYIPERLCVELKSLKLYVWSFRDEGAFHEAVTNRILDDLVRATAPRFMRLTGDFGVRGGIFTHVVAEHRAAGWQPAPAVILPPGEWIKQ

SEQ ID NO: 48047 - protein, 79 aa, Pandoraea apista
  REGION 1..79: note = tr|A0A5E5PA33|A0A5E5PA33_9BURK NADPH-dependent 7-cyano-7-deazaguanine reductase OS=Pandoraea apista; OX = 93218 GN=queF_1 PE=4 SV=1
MLEMSDAHRYFFTLRDPCFDSTDALEAHVAGELSRCLRIYDLVRTTPVSSVDSQNGLHRQAVASLHDPLHTAAASRSRR

SEQ ID NO: 48048 - protein, 275 aa, Pandoraea apista
  REGION 1..275: note = tr|A0A0G4JGP0|A0A0G4JGP0_9BURK NADPH-dependent 7-cyano-7-deazaguanine reductase OS=Pandoraea apista; OX = 93218 GN=queF PE=3 SV=1
MTTPNQSPLGKEVAYTEQYTPSLLFPIARAPARAAIGVPDPLPFFGADIWNGYELSWLNEKGKPQIALLTAIVPADSPNIIESKSFKLYLGSFAQTKLANADAARALIQQDLSEAAGAAVQVRLVEPGAFEKLELDELDGLLVDRLDIETDVYAPDATLLKAAEGEPHVDETLVSNLLKSNCPVTGQPDWGSLQIRYVGPPIDQEGLLKYVISYRRHTGFHEQCVEGIFMDILRQCKPSQLAVYARYTRRGGLDINPFRTNFTLPMPDNARTARQ

SEQ ID NO: 48049 - protein, 275 aa, Pandoraea faecigallinarum
  REGION 1..275: note = tr|A0A0H3WXF2|A0A0H3WXF2_9BURK NADPH-dependent 7-cyano-7-deazaguanine reductase OS=Pandoraea faecigallinarum OX=656179 GN=queF PE=3 SV=1
MTTPEQSTLGKEVAYTEHYDPSQLFPIARAPARAQIGVPDTLPFFGADIWNGYELSWLNEKGKPQIALLTAVVPADSPFIIESKSFKLYLGSFAQTKLANPEAARALIQQDLSEAAGAPVQVRLTDPSGFGKLRLDELDGLLVDRLDIDTDVYVPDASLLSAAFDEPHVEETLVSNLLKSNCPVTGQPDWGSLQIRYVGPPIDQEGLLKYVISYRRHTGFHEQCVEGIFMDLLRQCKPSQLAVYARYTRRGGLDINPFRTNFTLPMPDNARTARQ

SEQ ID NO: 48050 - protein, 142 aa, unidentified
  source 1..142: note = Pandoraea fibrosis
  REGION 1..142: note = tr|A0A0B3SVS3|A0A0B3SVS3_9BURK Uncharacterized protein OS=Pandoraea fibrosis OX=1891094 GN=PJ20_11460; PE = 4 SV=1
MNVDHEFVVIPNTIKQQARMRAYEIMFDIPAFRTNEHLHPAEVNVARMKFHYHPRKRLVEFFSFQEYLCKYASLAMTLEQACGSIIDDFFESIEPIQCELIVQNELPDCANVTIRASRGWIDAIHSPAASSPIPGKRIALLT

SEQ ID NO: 48051 - protein, 275 aa, unidentified
  source 1..275: note = Pandoraea fibrosis
  REGION 1..275: note = tr|A0A5E4TJV6|A0A5E4TJV6_9BURK NADPH-dependent 7-cyano-7-deazaguanine reductase OS=Pandoraea fibrosis; OX = 1891094 GN=queF PE=3 SV=1
MTTPDQSPLGKEVAYTEQYTPSLLFPIARAPARAAIGVPDALPFFGADIWNGYELSWLSEKGKPQIALLTAIVPADSPNIIESKSFKLYLGSFAQTKLANVDAARALIQQDLSEAAGAPVQVRLVEPGAFDKLELDELDGLLVDRLDIETDVYTPDATLLKAAEGEPHVDETLVSNLLKSNCPVTGQPDWGSLQIRYVGPPIDQEGLLKYVISYRRHTGFHEQCVEGIFMDILRQCKPSQLAVYARYTRRGGLDINPFRTNFTLPMPDNARTARQ

SEQ ID NO: 48052 - protein, 252 aa, Pandoraea norimbergensis
  REGION 1..252: note = tr|A0A0U2WQ88|A0A0U2WQ88_9BURK QueF_N domain-containing protein OS=Pandoraea norimbergensis; OX = 93219 GN=AT302_22535 PE=4 SV=1
MRGYDLWNDYEVAWLDMHERPQIAVLEIVIPCDSPFTLEMSDARRYVSTLRDLRFESAQALEAHVAGALTHCLKSYVLVRATPVRQAVRATCGDESDTVSLDTEPVGVVRGGVQASLLRTVHDAGGAGIAGNRSKAEDAAPGSATLSHECLSSDLLSSRCPLTGGIDLGTVWIDYTGPRICRQTLLAYLLSFRDSEMFHEQCVETVFLDVLAQCAPTRLTVGARFTRRHGLDINPVRSTHAISIRNVRTVRQ

SEQ ID NO: 48053 - protein, 275 aa, Pandoraea norimbergensis
  REGION 1..275: note = tr|A0A0U2Y6L3|A0A0U2Y6L3_9BURK NADPH-dependent 7-cyano-7-deazaguanine reductase OS=Pandoraea norimbergensis OX=93219 GN=queF PE=3 SV=1
MTTPDQSPLGKEVGYTEQYDPSLLFPIARAPARGAIGVPDALPFFGADIWNGYELSWLGDKGKPHIALLTAIVPADSPNIIESKSFKLYLGSFAQTKLANADAARALIQQDLSEAAGASVQVKLVEPSGFGKLQLDELDGLLVDRLDVETDIYSPDASLLKAAQGEPHVEETLVSNLLKSNCPVTGQPDWGSLQIRYNGPPIDQEGLLKYVISYRRHTGFHEQCVEGIFMDIMRQCKPTQLAVYARYTRRGGLDINPFRTNFTQPMPDNARTARQ

SEQ ID NO: 48054 - protein, 275 aa, Pandoraea oxalativorans
  REGION 1..275: note = tr|A0A0E3YC25|A0A0E3YC25_9BURK NADPH-dependent 7-cyano-7-deazaguanine reductase OS=Pandoraea oxalativorans OX=573737 GN=queF PE=3 SV=1
MTTPEQSSLGKEVAYTEQYDPSQLFPIARAPARAEIGVPDVLPFFGADIWNGYELSWLNEKGKPQIALLTAMVPADSPFIIESKSFKLYLGSFAQTKLANVDAARALIQQDLSEAAGAPVQVRLVEPSGFAKLELDELDGLLVDRLDIDTDIYVPDASLLTAAFDEAPVDETLVSNLLKSNCPVTGQPDWGSLQIRYVGPPINQEGLLKYVISYRRHTGFHEQCVEGIFMDIMRQCKPTQLAVYARYTRRGGLDINPFRTNFTLPMPDNARTARQ

SEQ ID NO: 48055 - protein, 275 aa, Pandoraea pnomenusa
  REGION 1..275: note = tr|A0A378YUN2|A0A378YUN2_9BURK NADPH-dependent 7-cyano-7-deazaguanine reductase OS=Pandoraea pnomenusa; OX = 93220 GN=queF PE=3 SV=1
MTTPDQSPLGKEVAYTEQYDPSLLFPIARAPARAAIGVPDTLPFFGADIWNGYELSWLNEKGKPQIALLTAMVPADSPNIIESKSFKLYLGSFAQTRLANADAARALIQQDLSEAAGAPVQVRLIEPGGFGKLELDELDGLLVDRLDIETDVYAPDATLLKAAFDEPHVDETLVSNLLKSNCPVTGQPDWGSLQIRYVGPPIDQEGLLKYVISYRRHTGFHEQCVEGIFMDILRQCKPSQLAVYARYTRRGGLDINPFRTNFTLPMPDNARTARQ

SEQ ID NO: 48056 - protein, 275 aa, Pandoraea pnomenusa
  REGION 1..275: note = tr|A0A518QYZ9|A0A518QYZ9_9BURK NADPH-dependent 7-cyano-7-deazaguanine reductase OS=Pandoraea pnomenusa; OX = 93220 GN=queF PE=3 SV=1
MTTPDQSPLGKEVAYTEQYDPSLLFPIARAPARAAIGVPDTLPFFGADIWNGYELSWLNEKGKPQIALLTAMVPADSPNIIESKSFKLYLGSFAQTRLANADAARALIQQDLSEAAGAPVQVRLVEPGGFGKLELDELDGLLVDRLDIETDVYAPDAALLKAAFDEPHVDETLVSNLLKSNCPVTGQPDWGSLQIRYVGPPIDQEGLLKYVISYRRHTGFHEQCVEGIFMDILRQCKPSQLAVYARYTRRGGLDINPFRTNFTLPMPDNARTARQ

SEQ ID NO: 48057 - protein, 275 aa, Pandoraea pulmonicola
  REGION 1..275: note = tr|A0A378Z4T7|A0A378Z4T7_9BURK NADPH-dependent 7-cyano-7-deazaguanine reductase OS=Pandoraea pulmonicola; OX = 93221 GN=queF_2 PE=3 SV=1
MTTPDQSPLGKEVSYTEQYAPTLLFPIARAPARAAIGVPDALPFFGADIWNGYELSWLNEKGKPQIALLTAIVPADSPNIIESKSFKLYLGSFAQTRLANADAARALIQQDLSEAAGAAVQVRLVEPGGFGKLELDELDGLLVDRLDIETNVYTPDATLLKAAQDEPHVDETLVSNLLKSNCPVTGQPDWGSLQIRYVGPPIDQEGLLKYVISYRRHTGFHEQCVEGIFMDIMRQCKPSQLAVYARYTRRGGLDINPFRTNFTLPMPDNARTARQ

SEQ ID NO: 48058 - protein, 296 aa, Pandoraea pulmonicola
  REGION 1..296: note = tr|A0A378YZQ4|A0A378YZQ4_9BURK NADPH-dependent 7-cyano-7-deazaguanine reductase OS=Pandoraea pulmonicola; OX = 93221 GN=queF_1 PE=4 SV=1
MTFRDSHRPPQWELADIDLSAARPLSRQRAAIHPIPRSRLRCRPPSAIVAARGYDLWNHYEVSWLDMHERPQIAVVELVIPCSSPYTLEMADAQRYFLTLREQCFESPEALEAHVAGELSRSLQEYVLVRTTPVRQAVRTTMACAPDTQTLDSEPVGVVRGGVRADLLSRARDAAAAPSSCASSSPFPSTVHECLTSDLLSIRCPLSGGVDYGTVWFDYTGTPICRRSLLAYVLSYRDSEMYIEQCVETLFSDILAQCAPTRLVVSARFTRRHGIDINPVRSTHATSVTNLRTVRQ

SEQ ID NO: 48059 - protein, 275 aa, Pandoraea sp.
  REGION 1..275: note = tr|R7X5M7|R7X5M7_9BURK NADPH-dependent 7-cyano-7-deazaguanine reductase OS=Pandoraea sp. SD6-2; OX = 1286093 GN=queF PE=3 SV=1
MTTPDQSPLGKEVAYTEQYAPSLLFPIARAPARAAIGVPDVLPFFGADIWNGYELSWLNEKGKPQIALLTAIVPADSPNIVESKSFKLYLGSFAQTKLANVDAARALIQQDLSEAAGAAVQVRLVEPAAFVKLELDELDGLLVDRLDIETDVYAPDATLLKAAQGEPHVDETLVSNLLKSNCPVTGQPDWGSLQIRYVGPPIDQEGLLKYVISYRRHTGFHEQCVEGIFMDILRQCKPSQLAVYARYTRRGGLDINPFRTNFTLPMPDNARTARQ

SEQ ID NO: 48060 - protein, 274 aa, Pandoraea sp.
  REGION 1..274: note = tr|A0A522ENN0|A0A522ENN0_9BURK NADPH-dependent 7-cyano-7-deazaguanine reductase OS=Pandoraea sp.; OX = 1883445 GN=queF PE=3 SV=1
MQAEHSPLGKPVNYTEQYDPALLFPIERQPAREAIGVPAPLPFFGADLWNAYELSWLNPKGKPQIALLTAIVPADSPNIVESKSFKLYLGSFAQTRLANAEAARQLIQQDLSEACGAAVQVRLTEATRFDQLRLAELEGLSLDRLDIETDIYTPDPTLLRANHDEAPVEETLVSNLLKSNCPVTGQPDWGSVQVRYVGAPIDQAGLLKYLISFRNHTGFHEQCVERIFMDILRACAPGKLAVYARYTRRGGLDINPFRTNFNLPLPDNRRNARQ

SEQ ID NO: 48061 - protein, 275 aa, Pandoraea sputorum
  REGION 1..275: note = tr|A0A239S9W0|A0A239S9W0_9BURK NADPH-dependent 7-cyano-7-deazaguanine reductase OS=Pandoraea sputorum; OX = 93222 GN=queF_1 PE=3 SV=1
MTTPEQSSLGKEVAYTEQYDPSQLFPIARAPARAEIGVPDVLPFFGADIWNGYELSWLNEKGKPQIALLTAMVPADSPFIIESKSFKLYLGSFAQTKLANVDAARALIQQDLSEAAGAPVQVKLVEPSGFAKLELDELDGLLVDRLDIDTDIYVPDASLLTAAFDEAPVDETLVSNLLKSNCPVTGQPDWGSLQIRYVGPPINQEGLLKYVISYRRHTGFHEQCVEGIFMDIMRQCKPTQLAVYARYTRRGGLDINPFRTNFTLPMPDNARTARQ

SEQ ID NO: 48062 - protein, 142 aa, Pandoraea sputorum
  REGION 1..142: note = tr|A0A5E5BJS0|A0A5E5BJS0_9BURK NADPH-dependent 7-cyano-7-deazaguanine reductase OS=Pandoraea sputorum; OX = 93222 GN=queF_2 PE=4 SV=1
MNVDHEFVVIPNVIKQQARMRAYEVTFDVPAFRTNEHLHPSEQNVARLKFRYHPRRQLVEFFSFQTYLSKYAGLAMTLEQACWSIVDDFFESLEPIRCDLIIQNELSDCTNVTIHASRGWTDSIQLTTGSVSPLERKVAAPI

SEQ ID NO: 48063 - protein, 274 aa, unidentified
  source 1..274: note = Pandoraea terrae
  REGION 1..274: note = tr|A0A5E4TXJ3|A0A5E4TXJ3_9BURK NADPH-dependent 7-cyano-7-deazaguanine reductase OS=Pandoraea terrae; OX = 1537710 GN=queF PE=3 SV=1
MTPEKSPLGKEVAYTEQYDPSLLFPIARIAARHEIGVPETLPFFGADLWNGYELSWLNQKGKPQIALVTAIVPADSPNIVESKSFKLYLGSFAQTRLGGSDAVRALLQQDLSEACGASVQVRLTEPSNFGKLQLDELDGLLLDRLDIETDIYVPDASLLRAASGEPPVDETLVSNLLKSNCPVTGQPDWGSVQIRYVGAPIDQEGLLKYIVSFRRHTGFHEQCVERIFMDIMRQCAPSKLAVYARYTRRGGLDINPFRTNFNLPLPDNARTARQ

SEQ ID NO: 48064 - protein, 274 aa, Pandoraea thiooxydans
  REGION 1..274: note = tr|A0A0G3EWL0|A0A0G3EWL0_9BURK NADPH-dependent 7-cyano-7-deazaguanine reductase OS=Pandoraea thiooxydans; OX = 445709 GN=queF PE=3 SV=1
MQAEHSPLGKPVNYTEQYDPALLFPIERQPAREAIGVPAPLPFFGADLWNAYELSWLNPKGKPQIALLTAIVPADSPNIVESKSFKLYLGSFAQTRLANAEAARQLIQQDLSEACGAAVQVRLTEATHFDQLRLAELEGLSLDRLDIETDIYTPDPTLLHANHDEAPVEETLVSNLLKSNCPVTGQPDWGSVQIRYVGAPIDHAGLLKYLISFRNHTGFHEQCVERIFMDILRTCAPGKLAVYARYTRRGGLDINPFRTNFNLPLPDNRRNARQ

SEQ ID NO: 48065 - protein, 275 aa, Pandoraea vervacti
  REGION 1..275: note = tr|A0A0C5JW78|A0A0C5JW78_9BURK NADPH-dependent 7-cyano-7-deazaguanine reductase OS=Pandoraea vervacti; OX = 656178 GN=queF PE=3 SV=1
MTTPEQSTLGKEVAYTEHYDPSQLFPIARAPARAEIGVPDTLPFFGADIWNGYELSWLNEKGKPQIALLTAIVPADSPFIIESKSFKLYLGSFAQTKLANLDAARALIQQDLSEAASAPVQVRLTDPSGFGKLALDELDGLLVDRLDVDTDIYVPDASLLTAAFDEPHVDETLVSNLLKSNCPVTGQPDWGSLQIRYVGPPIDQEGLLKYVISYRRHTGFHEQCVEGIFMDILRQCKPSQLAVYARYTRRGGLDINPFRTNFTLPMPDNARTARQ

SEQ ID NO: 48066 - protein, 155 aa, unidentified
  source 1..155: note = Pannonibacter indicus
  REGION 1..155: note = tr|A0A0K6HSI5|A0A0K6HSI5_9RHOB NADPH-dependent 7-cyano-7-deazaguanine reductase OS=Pannonibacter indicus; OX = 466044 GN=queF PE=3 SV=1
MSDKTIYQNLTQLGSSTALPQSPEEAVLERVPNPQAGTGYMVRFVAPEFTSLCPITGAPDFAHLVIDYVPADWLVESKSLKLFLGSFRNHGAFHEDCTVSIGKRLVDFLSPQWLRIGGYWYPRGGIPIDVFYQTGPAPEGVWIPEQGVQPYRGRG

SEQ ID NO: 48067 - protein, 155 aa, Pannonibacter phragmitetus
  REGION 1..155: note = tr|A0A0U3NAV1|A0A0U3NAV1_9RHOB NADPH-dependent 7-cyano-7-deazaguanine reductase OS=Pannonibacter phragmitetus OX=121719 GN=queF PE=3 SV=1
MSDKTIYQNLTQLGSSTALPQKPEDAVLERVPNPQAGTGYMVRFVAPEFTSLCPITGAPDFAHLVIDYVPADWLVESKSLKLFLGSFRNHGAFHEDCTVSIGKRLVEFLSPQWLRIGGYWYPRGGIPIDVFYQTGPAPEGVWIPDQGVQPYRGRG

SEQ ID NO: 48068 - protein, 155 aa, Pannonibacter phragmitetus
  REGION 1..155: note = tr|A0A379A0N3|A0A379A0N3_9RHOB NADPH-dependent 7-cyano-7-deazaguanine reductase OS=Pannonibacter phragmitetus OX=121719 GN=queF PE=3 SV=1
MSDKTIYQNLTQLGSSTALPQSPEDAVLERVPNPQAGTGYMVRFVAPEFTSLCPITGAPDFAHLVIDYVPGDWLVESKSLKLFLGSFRNHGAFHEDCTVSIGKRLVDFLSPQWLRIGGYWYPRGGIPIDVFYQTGPAPGGVWIPEQGVQPYRGRG

SEQ ID NO: 48069 - protein, 281 aa, unidentified
  source 1..281: note = Pantoea alhagi
  REGION 1..281: note = tr|A0A1W6B653|A0A1W6B653_9GAMM NADPH-dependent 7-cyano-7-deazaguanine reductase OS=Pantoea alhagi; OX = 1891675 GN=queF PE=3 SV=1
MSSYEQHQALAGLTLGKPTAYQDRYEPGLLQAVPRSLNREPLGLYPTHLPFHGADIWTLYELSWLNAKGVPQVAVGEVVLRADSVNLIESKSFKLYLNSFNQTRFADWGEVRQTLERDLRACAQGEVSVALFRLQEIEGQPIGQFDGFCIDEQDISIDDYQFNADYLADAKGEEIVEETLVSHLLKSNCLITHQPDWGSVQIRYRGPRIKREALLRYLVSFRHHNEFHEQCVERIFNDLLRFCQPETLSVYARYTRRGGLDINPWRSNTDFSPSHSRLVRQ

SEQ ID NO: 48070 - protein, 288 aa, Pantoea allii
  REGION 1..288: note = tr|A0A2V2BKK7|A0A2V2BKK7_9GAMM NADPH-dependent 7-cyano-7-deazaguanine reductase OS=Pantoea allii; OX = 574096 GN=queF PE=3 SV=1
MTSVVTVMSSYQPDPALSNLTLGKPTAYHDRYDNSLLQAVPRSMNREPLGLYPDNLPFTGADIWTLYELSWLNSKGVPQVAVGEVVLDARSHNLIESKSFKLYLNSFNQTRFADWGEVRQTLEQDLRACAEGDVRVALFRLNEIEGQPVGHFAGDCIDEQDIEIEDYGFNADYLVDAAGQERVDETLVSHLLKSNCLITNQPDWGSVMIRYKGPRLNREALLRYIISFRQHNEFHEQCVERIFNDLMRFCQPEQLTVYARYTRRGGLDINPWRSNVAFTPGHSRLVRQ

SEQ ID NO: 48071 - protein, 281 aa, Pantoea allii
  REGION 1..281: note = tr|A0A4S3BFB6|A0A4S3BFB6_9GAMM NADPH-dependent 7-cyano-7-deazaguanine reductase OS=Pantoea allii; OX = 574096 GN=queF PE=3 SV=1
MTTHEQDQALSNLTLGKPTAYHDQYDNSLLQAVPRSLNREPLGLFPDSLPFTGSDIWTLYELSWLNSKGLPQVAVGEVVLDAQSRNLIESKSFKLYLNSFNQTRFADWGEVRQTLERDLSACAEGEAQVALFRLNEIEGQPIGHFEGCCIDEQDIAIEDYRFNADYLADATGSEIVEETLVSHLLKSNCLITNQPDWGSVMIRYKGPRIDREALLRYLVSFRQHNEFHEQCVERIFNDVMRFCHPEALTVYARYTRRGGLDINPWRTNVPFSPGFSRLVRQ

SEQ ID NO: 48072 - protein, 281 aa, unidentified
  source 1..281: note = Pantoea ananas
  REGION 1..281: note = tr|A0A2S7ZVJ2|A0A2S7ZVJ2_PANAN NADPH-dependent 7-cyano-7-deazaguanine reductase OS=Pantoea ananas OX=553; GN = queF PE=3 SV=1
MTTHEQDQALSNLTLGKPTAYHDQYDNSLLQSVPRSLNREPLGLFPDSLPFTGSDIWTLYELSWLNSKGLPQVAVGEVVLDAQSRNLIESKSFKLYLNSFNQTRFADWGEVRQTLERDLSACAEGEVQVALFRLSEIEGQPVGHFDGCCIDEQDIAIDDYRFNADYLADAAGSEIVEETLVSHLLKSNCLITNQPDWGSVMIRYTGPRIDREALLRYLVSFRQHNEFHEQCVERIFNDVMRFCHPEALTVYARYTRRGGLDINPWRTNVPFSPGFSRLVRQ

SEQ ID NO: 48073 - protein, 288 aa, unidentified
  source 1..288: note = Pantoea ananas
  REGION 1..288: note = tr|A0A2U1D5H4|A0A2U1D5H4_PANAN NADPH-dependent 7-cyano-7-deazaguanine reductase OS=Pantoea ananas OX=553; GN = queF PE=3 SV=1
MTSVVTVMSSYQPDPALSNLTLGKPTAYHDRYDNSLLQAVPRSMNREPLGLYPDNLPFTGGDIWTLYELSWLNSKGVPQVAVGEVVLDAHSRNLIESKSFKLYLNSFNQTRFADWGEVRQTLEQDLRVCAEGEVRVALFRLNEIEGQPVGHFAGYCIDEQDIEIEDYAFNADYLINAAGQEQVEETLVSHLLKSNCLITNQPDWGSVMIRYKGPRLDREALLRYIISFRQHNEFHEQCVERIFNDLMRFCQPEQLTVYARYTRRGGLDINPWRSNVPFTPGHSRLVRQ

SEQ ID NO: 48074 - protein, 288 aa, Pantoea ananatis; identical to SEQ ID NO: 48073
  REGION 1..288: note = tr|A0A0H3L3K1|A0A0H3L3K1_PANAA NADPH-dependent 7-cyano-7-deazaguanine reductase OS=Pantoea ananatis (strain AJ13355) OX=932677 GN=queF PE=3 SV=1

SEQ ID NO: 48075 - protein, 315 aa, Pantoea ananatis
  REGION 1..315: note = tr|D4GLK6|D4GLK6_PANAM NADPH-dependent 7-cyano-7-deazaguanine reductase OS=Pantoea ananatis (strain LMG 20103) OX=706191 GN=queF PE=3 SV=1
MVKSVNASAVCCIIQILTSDRLHLLTLMTSVVTVMSSYQPDPALSNLTLGKPTAYHDRYDNSLLQAVPRSMNREPLGLYPDNLPFTGGDIWTLYELSWLNSKGVPQVAVGEVVLDAHSRNLIESKSFKLYLNSFNQTRFADWGEVRQTLEQDLRVCAEGEVRVALFRLNEIEGQPVGHFAGYCIDEQDIEIEDYAFNADYLINAAGEEQVEETLVSHLLKSNCLITNQPDWGSVMIRYKGPRLDREALLRYIISFRQHNEFHEQCVERIFNDLMRFCQPEQLTVYARYTRRGGLDINPWRSNVPFTPGHSRLVRQ

SEQ ID NO: 48076 - protein, 281 aa, Pantoea anthophila
  REGION 1..281: note = tr|A0A506NLY1|A0A506NLY1_9GAMM NADPH-dependent 7-cyano-7-deazaguanine reductase OS=Pantoea anthophila; OX = 470931 GN=queF PE=3 SV=1
MTTHEQDQALSNLTLGKPTAYHDRYDNGLLQAVPRSLNREPLSLFPESLPFTGGDIWTLYELSWLNSKGLPQVAVGEVVLDAHSRNLIESKSFKLYLNSFNQTRFADWGEVRQTLERDLRACAEGDVRVALFRLNEIEGQPIGHFEGTCIDEQDIAIEDYRFNADYLADAAGSEIVEETLVSHLLKSNCLITHQPDWGSVMIRYKGPRIHREALLRYLVSFRQHNEFHEQCVERIFNDVMRFCHPEALTVYARYTRRGGLDINPWRTNVPFSPGFSRLVRQ

SEQ ID NO: 48077 - protein, 281 aa, unidentified
  source 1..281: note = Pantoea coffeiphila
  REGION 1..281: note = tr|A0A2S9I915|A0A2S9I915_9GAMM NADPH-dependent 7-cyano-7-deazaguanine reductase OS=Pantoea coffeiphila; OX = 1465635 GN=queF PE=3 SV=1
MSSYNNHQALEGLTLGKPTEYHDSYQPALLQAVPRSLNREPLGLYPDNLPFSGADIWTLYELSWLNSKGLPQVAVGEVSLSADSVNLIESKSFKLYLNSFNQTQFSDWGEVRRTLERDLSACAEGEVSVALFRLQEIEGQPIGHFDGHCIDEQDIVIDSYEFNADYLRDATDGEVVEEQLVSHLLKSNCLITNQPDWGSVQISYRGPRIQREALLRYLVSFRHHNEFHEQCVERIFSDIQRFCQPEALSVYARYTRRGGLDINPWRTNADFKPGRSRLVRQ

SEQ ID NO: 48078 - protein, 281 aa, Pantoea conspicua
  REGION 1..281: note = tr|A0A1X1BVV7|A0A1X1BVV7_9GAMM NADPH-dependent 7-cyano-7-deazaguanine reductase OS=Pantoea conspicua; OX = 472705 GN=queF PE=3 SV=1
MTTHEQDQALSNLTLGKPTAYHDRYDNSLLQAVPRSLNREPLGLFPESLPFNGSDIWTLYELSWLNSKGLPQVAVGEVVLDAHSRNLIESKSFKLYLNSFNQTRFADWGEVRQTLERDLSACADGEVRVALFRLNEVEGQPIGHFDGYCIDEQDIAIDDYRFNADYLADATGSETVEETLVSHLLKSNCLITHQPDWGSVMIRYKGPRIDREALLRYLVSFRQHNEFHEQCVERIFNDLLRFCHPETLTVYARYTRRGGLDINPWRSNVPFSPGYSRLVRQ

SEQ ID NO: 48079 - protein, 281 aa, Pantoea cypripedii
  REGION 1..281: note = tr|A0A1X1EXE6|A0A1X1EXE6_PANCY NADPH-dependent 7-cyano-7-deazaguanine reductase OS=Pantoea cypripedii; OX = 55209 GN=queF PE=3 SV=1
MSTEQQDQVLSGLTLGKPTAYVDHYDNSLLQAVPRSLNREPLGLFPDNLPFHGADIWTLYELSWLNSKGVPQVAVGEVVLNAASRNLIESKSFKLYLNSFNQTVFADWGDVRQTLERDLSACAEGEVSVALFRISEIEGQPIGHFNGEVIDEQDIEIRDYAFNAEYLAQAAGNDIIEETLVSHVLKSNCLITHQPDWGSVMIRYKGPRIDREALLRYLVSFRQHNEFHEQCVERIFNDIQRFCQPEALTVYARYTRRGGLDINPWRSNVPFSPGYSRLVRQ

SEQ ID NO: 48080 - protein, 281 aa, Pantoea deleyi
  REGION 1..281: note = tr|A0A506PYN4|A0A506PYN4_9GAMM NADPH-dependent 7-cyano-7-deazaguanine reductase OS=Pantoea deleyi; OX = 470932 GN=queF PE=3 SV=1
MTTHEQDQALSNLTLGKPTAYHDRYDNGLLQAVPRSLNREPLGLFPDSLPFTGGDIWTLYELSWLNSKGLPQVAVGEVVLDAQSRNLIESKSFKLYLNSFNQTRFADWGEVRQTLERDLSACAEGEVRVALFRLSEVEGQPIGHFEGCCIDEQDITIEDYRFNADYLADAAGSERVEETLVSHLLKSNCLITNQPDWGSVMIRYSGPRIDREALLRYLISFRQHNEFHEQCVERIFNDVMRFCHPDTLTVYARYTRRGGLDINPWRTNVPFTPGFSRLVRQ

SEQ ID NO: 48081 - protein, 281 aa, Pantoea dispersa
  REGION 1..281: note = tr|A0A437T636|A0A437T636_9GAMM NADPH-dependent 7-cyano-7-deazaguanine reductase OS=Pantoea dispersa; OX = 59814 GN=queF PE=3 SV=1
MSSENRDTALSGLTLGKPTAYVDRYDNTLLQAVPRSLNREPLGLYPDNLPFHGADIWTLYELSWLNSKGVPQVAVGEVVLSADSVNLIESKSFKLYLNSFNQTIFADWGAVRQTLERDLSACANGQVSVALFRLSEVEGQPIGHFAGDVIDEQDITISDYGFNADYLASATGSEVVEETLVSHLLKSNCLITNQPDWGSVMIRYQGPRIDREALLRYLISFRQHNEFHEQCVERIFNDIQRFCQPAALTVYARYTRRGGLDINPWRSNVPFTPGYSRLVRQ

SEQ ID NO: 48082 - protein, 281 aa, Pantoea dispersa
  REGION 1..281: note = tr|A0A518XF95|A0A518XF95_9GAMM NADPH-dependent 7-cyano-7-deazaguanine reductase OS=Pantoea dispersa; OX = 59814 GN=queF PE=3 SV=1
MSSENRNSALSGLTLGKPTAYVDHYDNTLLQSVPRSLNREPLGLYPDTLPFHGADIWTLYELSWLNSKGVPQVAVGEVVLRADSASLIESKSFKLYLNSFNQTVFADWGTVRQTLERDLSACAGGEVSVALFRLSEIEGQPIGHFDGSVIDEQDIIIDDYGFSADYLAQAAGNEVVEETLVSHLLKSNCLITNQPDWGSVMIRYKGPRIDREALLRYIVSFRQHNEFHEQCVERIFNDIQRFCRPEALTVYARYTRRGGLDINPWRSNVPFTPCHSRLVRQ

SEQ ID NO: 48083 - protein, 281 aa, Pantoea eucalypti
  REGION 1..281: note = tr|A0A506P781|A0A506P781_9GAMM NADPH-dependent 7-cyano-7-deazaguanine reductase OS=Pantoea eucalypti; OX = 470933 GN=queF PE=3 SV=1
MTTHEQDQALSNLTLGKPTAYHDQYDNSLLQSVPRSLNREPLGLFPDSLPFTGSDIWTLYELSWLNSKGLPQVAVGEVVLDAQSRNLIESKSFKLYLNSFNQTRFADWGEVRQTLERDLSACAEGEVQVALFRLSEIEGQPVGHFDGCCIDEQDIAIDDYRFNADYLADAAGSEIVEETLVSHLLKSNCLITNQPDWGSVMIRYTGPRIDHEALLRYLVSFRQHNEFHEQCVERIFNDVMRFCHPEALTVYARYTRRGGLDINPWRTNVPFSPGFSRLVRQ

SEQ ID NO: 48084 - protein, 281 aa, unidentified
  source 1..281: note = Pantoea latae
  REGION 1..281: note = tr|A0A1V9DBH7|A0A1V9DBH7_9GAMM NADPH-dependent 7-cyano-7-deazaguanine reductase OS=Pantoea latae; OX = 1964541 GN=queF PE=3 SV=1
MSLYEKDQALSSLTLGKPTAYHDKYDPSLLQAVPRSLNRTPLGLQSDSLPFSGADIWTLYELSWLNSKGVPQVALGEVVLNATSEHLIESKSFKLYLNSFNQTRFADWGEVRQTLERDLGACAQGEVSVALFRLSELEGQPIGQFSGSCIDEQDIEISDYRFNADYLAKAAGSEVVEETLVSHLLKSNCLITNQPDWGSVMIRYKGPRIDREALLRYLISFRQHNEFHEQCVERIFNDLLRFCRPEQLTVYARYTRRGGLDINPWRSNVPFRPGFSRLVRQ

SEQ ID NO: 48085 - protein, 281 aa, unidentified
  source 1..281: note = Pantoea rodasii
  REGION 1..281: note = tr|A0A2M9W8H0|A0A2M9W8H0_9GAMM NADPH-dependent 7-cyano-7-deazaguanine reductase OS=Pantoea rodasii; OX = 1076549 GN=queF PE=3 SV=1
MSSENHDRALSGLTLGKPTAYVDRYDNTLLQSVPRSLNREPLGLYPDNLPFQGGDIWTLYELSWLNSKGVPQVAVGEVVLRADSENLIESKSFKLYLNSFNQTIFADWGEVRQTLERDLRACAQGEVSVALFRLSEVEGQPIGHFNGDVIDEQDIEIHDYAFNADYLAHAAGEDVIEETLVSHLLKSNCLITHQPDWGSVMIRYKGPRIDREALLRYLISFRQHNEFHEQCVERIFNDIQRFCQPESLTVYARYTRRGGLDINPWRSNVPFSPTFSRLVRQ

SEQ ID NO: 48086 - protein, 281 aa, unidentified
  source 1..281: note = Pantoea rodasii
  REGION 1..281: note = tr|A0A0B1R651|A0A0B1R651_9GAMM NADPH-dependent 7-cyano-7-deazaguanine reductase OS=Pantoea rodasii; OX = 1076549 GN=queF PE=3 SV=1
MSSENRDQALSGLTLGKPTAYVDRYDNTLLQSVPRSLNREPLGLYPDNLPFQGADIWTLYELSWLNSKGVPQVAVGEVVLRADSENLIESKSFKLYLNSFNQTVFADWGEVRQTLERDLRACANGEVGVALFRLSEVEGQPIGHFNGEVIDEQDIEIQDYAFNADYLAQAAGSEVVEETLVSHLLKSNCLITHQPDWGSVMIRYKGPRIDREALLRYLISFRQHNEFHEQCVERIFNDIQRFCLPECLTVYARYTRRGGLDINPWRSNVPFSPTFSRLVRQ

SEQ ID NO: 48087 - protein, 281 aa, unidentified
  source 1..281: note = Pantoea rwandensis
  REGION 1..281: note = tr|A0A1X1CS22|A0A1X1CS22_9GAMM NADPH-dependent 7-cyano-7-deazaguanine reductase OS=Pantoea rwandensis; OX = 1076550 GN=queF PE=3 SV=1
MSSENRDQALSGLTLGKPTAYVDRYDNTLLQSVPRSLNREPLGLYPDSLPFQGADIWTLYELSWLNSKGVPQVAVGEVVLRADSENLIESKSFKLYLNSFNQTVFADWGEVRQTLERDLRACANGEVSVALFRLSEIEGQPIGHFNGDVIDEQDIEIHDYAFNADYLAQAAGSEVVEETLVSHLLKSNCLITHQPDWGSVMIRYKGPRIDREALLRYLISFRQHNEFHEQCVERIFNDIQRFCQPETLTVYARYTRRGGLDINPWRSNVPFSPGFSRLVRQ

SEQ ID NO: 48088 - protein, 280 aa, unidentified
  source 1..280: note = Pantoea sesami
  REGION 1..280: note = tr|A0A1M5UK99|A0A1M5UK99_9GAMM NADPH-dependent 7-cyano-7-deazaguanine reductase OS=Pantoea sesami; OX = 1881110 GN=queF PE=3 SV=1
MSYENHQALTGLTLGKSTDYRDTYDASLLQGVPRSLNRDPLGLHADALPFVGGDIWTLYELSWLNARGLPQVAVGHVELDYASVNLVESKSFKLYLNSFNQTKFSSWDDVQHTLERDLSACAQGKVSVSLYRLHELEGQPVAHFNGTCIDDQDIEVENYEFSADYLENAASGKVVEETLVSHLLKSNCLITHQPDWGSVQIQYRGPKIDREKLLRYLVSFRHHNEFHEQCVERIFSDIQRFCQPEKLSVYARYTRRGGLDINPWRTNTDFVPATGRLVRQ

SEQ ID NO: 48089 - protein, 281 aa, Pantoea sp.; identical to SEQ ID NO: 48072
  REGION 1..281: note = tr|E0M4Q3|E0M4Q3_9GAMM NADPH-dependent 7-cyano-7-deazaguanine reductase OS=Pantoea sp. aB; OX = 517433 GN=queF PE=3 SV=1

SEQ ID NO: 48090 - protein, 281 aa, Pantoea sp.
  REGION 1..281: note = tr|A0A0F5XUC4|A0A0F5XUC4_9GAMM NADPH-dependent 7-cyano-7-deazaguanine reductase OS=Pantoea sp. 3.5.1; OX = 1522060 GN=queF PE=3 SV=1
MTTHEQDQALSNLTLGKPTAYHDRYDNSLLQAVPRSLNREPLGLYPDSLPFTGGDIWTLYELSWLNSKGLPQVAVGEVVLDAQSRNLIESKSFKLYLNSFNQTRFADWGEVRQTLERDLSACAEGEVRVALFRLNEVEGQPIGHFDGYCIDEQDIAIDDYRFNADYLADATGSEIVEETLVSHLLKSNCLITHQPDWGSVMIRYNGPRIDREALLRYLVSFRQHNEFHEQCVERIFNDVLRFCHPEALTVYARYTRRGGLDINPWRSNVPFTPGYSRLVRQ

SEQ ID NO: 48091 - protein, 281 aa, Pantoea stewartii
  REGION 1..281: note = tr|H3RGX8|H3RGX8_PANSE NADPH-dependent 7-cyano-7-deazaguanine reductase OS=Pantoea stewartii subsp. stewartii DC283 OX=660596 GN=queF PE=3 SV=1
MSSYQPDPALSNLTLGKPTAYHDRYDNSLLQAVPRSMNREPLGLYPDNLPFSGSDIWTLYELSWLNSKGVPQVAVGEVELDARSRNLIESKSFKLYLNSFNQTRFTDWAEVRQTLEQDLRACAEGDVLVALFRLQEIEGQPVGHFAGTCIDEQDIEIEDYGFNADYLIDAAGQEQVQETLVSHLLKSNCLITNQPDWGSVMIRYQGPRIDREALLRYIVSFRQHNEFHEQCVERIFNDLMRFCQPSQLTVYARYTRRGGLDINPWRSNVPFTPGHSRLVRQ

SEQ ID NO: 48092 - protein, 281 aa, Pantoea vagans
  REGION 1..281: note = tr|E1SCS7|E1SCS7_PANVC NADPH-dependent 7-cyano-7-deazaguanine reductase OS=Pantoea vagans (strain C9-1) OX=712898 GN=queF PE=3 SV=1
MTTHEQDQALSNLTLGKPTAYHDRYDNSLLQAVPRSLNREPLGLFPDSLPFTGSDIWTLYELSWLNSKGLPQVAVGEVVLDAQSRNLIESKSFKLYLNSFNQTRFADWGEVRQTLERDLSACAEGEARVALFRLNEIEGQPIGHFEGCCIDEQDIAIEDYRFNADYLADAAGSEIVEETLVSHLLKSNCLITNQPDWGSVMIRYKGPRIAREALLRYLVSFRQHNEFHEQCVERIFNDVMRFCHPEALTVYARYTRRGGLDINPWRTNVPFSPGFSRLVRQ

SEQ ID NO: 48093 - protein, 281 aa, Pantoea vagans; identical to SEQ ID NO: 48086
  REGION 1..281: note = tr|A0A0U3UKG6|A0A0U3UKG6_9GAMM NADPH-dependent 7-cyano-7-deazaguanine reductase OS=Pantoea vagans; OX = 470934 GN=queF PE=3 SV=1

SEQ ID NO: 48094 - protein, 281 aa, unidentified
  source 1..281: note = Pantoea wallisii
  REGION 1..281: note = tr|A0A1X1D9T6|A0A1X1D9T6_9GAMM NADPH-dependent 7-cyano-7-deazaguanine reductase OS=Pantoea wallisii; OX = 1076551 GN=queF PE=3 SV=1
MSSENRDPALSGLTLGKPTAYVDRYDNTLLQSVPRSLNREPLGLYPDNLPFHGADIWTLYELSWLNSKGVPQVAVGEVVLRADSENLIESKSFKLYLNSFNQTIFADWGEVRQTLERDLSHCAKGEVSVALFRLSEVEGQPIGHFSGDVIDEQDITVSDYGFNADYLANATGGEIVEETLVSHLLKSNCLITNQPDWGSVMIRYRGARIDREALLRYLISFRQHNEFHEQCVERIFNDVQRFCHPESLTVYARYTRRGGLDINPWRSNVPFTPGYSRLARQ

SEQ ID NO: 48095 - protein, 154 aa, unidentified
  source 1..154: note = Parabacteroides acidifaciens
  REGION 1..154: note = tr|A0A3D8HDD2|A0A3D8HDD2_9BACT NADPH-dependent 7-cyano-7-deazaguanine reductase OS=Parabacteroides acidifaciens OX=2290935 GN=queF PE=3 SV=1
MDTRKEENELHLLGGSTVYKQDYAPEVLEAFTNKHQGNDYWVRFNCPEFTSLCPITGQPDFATIYIDYIPDVKMVESKSLKLYLFSFRSHGAFHEDCVNIIMKDLIRLMDPKYIEVTGIFTPRGGISIYPYCNYGRPGTKYEQLAEQRLFNHKQ

SEQ ID NO: 48096 - protein, 150 aa, unidentified
  source 1..150: note = Parabacteroides chartae
  REGION 1..150: note = tr|A0A1T5CNM5|A0A1T5CNM5_9BACT NADPH-dependent 7-cyano-7-deazaguanine reductase OS=Parabacteroides chartae OX=1037355 GN=queF PE=3 SV=1
MDEKELSLLGNKTVYKSDYAPEVLEAFTNKHPDNDYWVRFNCPEFTSLCPITGQPDFATIYIDYIPDIKMVESKSLKLYLFSFRNHGDFHEDCVNIIMKDLIKLMDPKYIEVTGIFTPRGGISIHPYCNYGRKGTKFEELAEKRLFAHNS

SEQ ID NO: 48097 - protein, 155 aa, unidentified
  source 1..155: note = Parabacteroides chinchillae
  REGION 1..155: note = tr|A0A1H5YDH4|A0A1H5YDH4_9BACT NADPH-dependent 7-cyano-7-deazaguanine reductase OS=Parabacteroides chinchillae OX=871327 GN=queF PE=3 SV=1
MDTRQNENELHLLGSSTQYKQDYAPEVLEAFTNKHQDNDYWVQFNCPEFTSLCPITGQPDFATIHIDYIPDIKMVESKSLKLYLFSFRNHGAFHEDCVNIIMKDLIRLMDPKYIEITGIFTPRGGISIYPYCNYGRPGTKYEELAEKRLFNHRIQ

SEQ ID NO: 48098 - protein, 154 aa, Parabacteroides distasonis
  REGION 1..154: note = tr|A0A3L7ZMQ5|A0A3L7ZMQ5_9BACT NADPH-dependent 7-cyano-7-deazaguanine reductase OS=Parabacteroides distasonis OX=823 GN=queF PE=3 SV=1
MDERKQEGELHLLGGSTVYRQDYAPEVLEAFTNKHQENDYWVRFNCPEFTSLCPITGQPDFATIHIDYIPDVKMVESKSLKLYLFSFRNHGAFHEDCVNIIMKDLIRLMDPKYIEVTGIFTPRGGISIYPYCNYGRPNTKFELLAEKRLFDHNQ

SEQ ID NO: 48099 - protein, 157 aa, Parabacteroides distasonis
  REGION 1..157: note = sp|A6LIT0|QUEF_PARD8 NADPH-dependent 7-cyano-7-deazaguanine reductase OS=Parabacteroides distasonis (strain ATCC 8503 / DSM 20701 / CIP 104284 / JCM 5825 / NCTC 1115 2) OX=435591 GN=queF PE=3 SV=1
MKEMDERKQEGELHLLGGSTVYKQDYAPEVLEAFTNKHQGNDYWVRFNCPEFTSLCPITGQPDFATIHIDYIPDVKMVESKSLKLYLFSFRNHGAFHEDCVNIIMKDLIKLMDPKYIEITGIFTPRGGISIYPYCNYGRPNTKFEQLAEKRLFDHNQ

SEQ ID NO: 48100 - protein, 154 aa, Parabacteroides goldsteinii
  REGION 1..154: note = tr|K5YYL6|K5YYL6_9BACT NADPH-dependent 7-cyano-7-deazaguanine reductase OS=Parabacteroides goldsteinii CL02T12C30 OX=999418 GN=queF PE=3 SV=1
MDTRKNENELHLLGGSTEYKQDYAPEVLEAFTNKHQGNDYWVRFNCPEFTSLCPITGQPDFATIHIDYIPDVKMVESKSLKLYLFSFRSHGAFHEDCVNIIMKDLIKLMDPKYIEVTGIFTPRGGISIYPYCNYGRPGTKYEQLAEQRLFNHNA

SEQ ID NO: 48101 - protein, 154 aa, Parabacteroides goldsteinii; identical to SEQ ID NO: 48100
  REGION 1..154: note = tr|A0A0J6CB88|A0A0J6CB88_9BACT NADPH-dependent 7-cyano-7-deazaguanine reductase OS=Parabacteroides goldsteinii OX=328812 GN=queF PE=3 SV=1

SEQ ID NO: 48102 - protein, 154 aa, Parabacteroides gordonii
  REGION 1..154: note = tr|A0A0F5JL30|A0A0F5JL30_9BACT NADPH-dependent 7-cyano-7-deazaguanine reductase OS=Parabacteroides gordonii MS-1 = DSM 23371 OX=1203610 GN=queF PE=3 SV=1
MDTRKDENELHLLGGSTEYKQDYAPEVLEAFTNKHPDNDYWVRFNCPEFTSLCPITGQPDFATIHIDYIPDVKMVESKSLKLYLFSFRSHGAFHEDCVNIIMKDLIRLMDPKYIEVTGIFTPRGGISIYPYCNYGRPGTKYEALAEKRLFSHNP

SEQ ID NO: 48103 - protein, 155 aa, Parabacteroides johnsonii
  REGION 1..155: note = tr|A0A1Y3Z3F8|A0A1Y3Z3F8_9BACT NADPH-dependent 7-cyano-7-deazaguanine reductase OS=Parabacteroides johnsonii OX=387661 GN=queF PE=3 SV=1
MDTRKDENELHLLGGSTVYKQDYAPEVLEAFTNKHPDNDYWVRFNCPEFTSLCPITGQPDFATIYIDYIPDVKMVESKSLKLYLFSFRNHGAFHEDCVNIIMKDLIRLMAPKYIEVTGIFTPRGGISIYPYCNYGRPGTKYEGLAEQRLFNHQAR

SEQ ID NO: 48104 - protein, 155 aa, Parabacteroides johnsonii; identical to SEQ ID NO: 48103
  REGION 1..155: note = tr|K5YI38|K5YI38_9BACT NADPH-dependent 7-cyano-7-deazaguanine reductase OS=Parabacteroides johnsonii CL02T12C29 OX=999419 GN=queF PE=3 SV=1

SEQ ID NO: 48105 - protein, 155 aa, Parabacteroides merdae
  REGION 1..155: note = tr|A0A3E4ZS12|A0A3E4ZS12_9BACT NADPH-dependent 7-cyano-7-deazaguanine reductase OS=Parabacteroides merdae; OX = 46503 GN=queF PE=3 SV=1
MDTRKDENELHLLGGSTVYKQDYAPEVLEAFTNKHPDNDYWVHFNCPEFTSLCPITGQPDFATIYIDYIPDVKMVESKSLKLYLFSFRNHGAFHEDCVNIIMKDLIRLMNPKYIEVTGIFTPRGGISIYPYCNYGRPGTKYEKLAEQRLFNHHAK

SEQ ID NO: 48106 - protein, 155 aa, Parabacteroides merdae
  REGION 1..155: note = tr|A0A3R6EZT5|A0A3R6EZT5_9BACT NADPH-dependent 7-cyano-7-deazaguanine reductase OS=Parabacteroides merdae; OX = 46503 GN=queF PE=3 SV=1
MDTRKDENELHLLGGSTVYKQDYAPEVLEAFTNKHPDNDYWVRFNCPEFTSLCPITGQPDFATIYIDYIPDIKMVESKSLKLYLFSFRNHGAFHEDCVNIIMKDLIRLMNPKYIEVTGIFTPRGGISIYPYCNYGRPGTKYEKLAEQRLFNHHAK

SEQ ID NO: 48107 - protein, 154 aa, Parabacteroides sp.
  REGION 1..154: note = tr|E1Z006|E1Z006_9BACT NADPH-dependent 7-cyano-7-deazaguanine reductase OS=Parabacteroides sp. 20_3 OX=469591 GN=queF PE=3 SV=1
MDERKQEGELHLLGGSTVYKQDYAPEVLEAFTNKHQGNDYWVRFNCPEFTSLCPITGQPDFATIHIDYIPDVKMVESKSLKLYLFSFRNHGAFHEDCVNIIMKDLIKLMDPKYIEVTGIFTPRGGISIYPYCNYGRPNTKFEQLAEKRLFDHNQ

SEQ ID NO: 48108 - protein, 154 aa, Parabacteroides sp.; identical to SEQ ID NO: 48107
  REGION 1..154: note = tr|C7X6I3|C7X6I3_9BACT NADPH-dependent 7-cyano-7-deazaguanine reductase OS=Parabacteroides sp. D13 OX=563193 GN=queF PE=3 SV=1

SEQ ID NO: 48109 - protein, 274 aa, unidentified
  source 1..274: note = Paraburkholderia aromaticivorans
  REGION 1..274: note = tr|A0A248VEG4|A0A248VEG4_9BURK NADPH-dependent 7-cyano-7-deazaguanine reductase OS=Paraburkholderia aromaticivorans OX=2026199 GN=queF PE=3 SV=1
MTPEQSPLGKASTYTEQYDVSLLFPIARKNAREAIGIGAQLPFFGTDIWNAYELSWLNARGKPQIAVATFFVPADSPNIVESKSFKLYLGSFAQTAFESMDAVRDTIRRDVSASCGATVSVHLTAPYEFGKLQMEEFEGLSLDRLDLDTDIYQPDASLLKAALHEAPVEETLFSNLLKSNCPVTGQPDWGSVQIHYVGPQIDHAGLLRYIISYRNHTGFHEQCVERIFIDVLKACKPVKLAVYARYTRRGGLDINPFRTNYNLPMPDNMRLARQ

SEQ ID NO: 48110 - protein, 274 aa, unidentified
  source 1..274: note = Paraburkholderia aspalathi
  REGION 1..274: note = tr|A0A1I7ESE3|A0A1I7ESE3_9BURK NADPH-dependent 7-cyano-7-deazaguanine reductase OS=Paraburkholderia aspalathi OX=1324617 GN=queF PE=3 SV=1
MTPEQSPLGKASTYTEQYDASLLFPIARKNAREAIGIGAQLPFFGTDIWNAYELSWLNARGKPQIAVATFFVPADSPNIVESKSFKLYLGSFAQTAFESMEVVRDTIKRDVCASCGATVSVHLAAPYEFGKLQMEEFDGLSLDRLDLDTDVYHPDASLLKAAFDESPVEETLVSNLLKSNCPVTGQPDWGSVQIHYVGPQIDHAGLLRYIISYRNHTGFHEQCVERIFIDVLKACRPVKLAVYARYTRRGGLDINPFRTNFNLPMPDNLRLARQ

SEQ ID NO: 48111 - protein, 274 aa, unidentified
  source 1..274: note = Paraburkholderia azotifigens
  REGION 1..274: note = tr|A0A5C6VQQ4|A0A5C6VQQ4_9BURK NADPH-dependent 7-cyano-7-deazaguanine reductase OS=Paraburkholderia azotifigens OX=2057004 GN=queF PE=3 SV=1
MTPEQSPLGKPSSYTEQYDASLLFPIARKNARDQIGIGATLPFFGTDIWNAYELSWLNARGKPQIAIATFYVPADSPNIVESKSFKLYLGSFAHTSFDSIEVVRDTIKRDVSAACGSSVSLHLYPPAEFSKLGLDEFEGTSLDRLDLDTEMYLPDASLLSAALDEAPVEETVFSNLLKSNCPVTGQPDWGSVQIHYVGPQIDHAGLLRYIISYRNHTGFHEQCVEKIFLDVLKVCQPVKLAVYARYTRRGGLDINPFRTNFNLPMPDNLRTARQ

SEQ ID NO: 48112 - protein, 274 aa, unidentified
  source 1..274: note = Paraburkholderia bryophila
  REGION 1..274: note = tr|A0A329C7J9|A0A329C7J9_9BURK NADPH-dependent 7-cyano-7-deazaguanine reductase OS=Paraburkholderia bryophila OX=420952 GN=queF PE=3 SV=1
MTPEQSPLGKASTYTEQYDASLLFPIARKSAREAIGIGAQLPFFGTDIWNAYELSWLNARGKPQIAVATFFVPADSPNIVESKSFKLYLGSFAQTAFESMEAVRDTIKRDVSASCGATVSVHLTAPYEFGKLQMEEFEGLSLDRLELDTDVYQPDASLLSAALDEAPVEETVFSNLLKSNCPVTGQPDWGTVQIHYVGPQIDHAGLLRYIISYRNHTGFHEQCVERIFIDVLKACKPVKLAVYARYTRRGGLDINPFRTNYNLPMPDNMRLARQ

SEQ ID NO: 48113 - protein, 274 aa, unidentified
  source 1..274: note = Paraburkholderia caballeronis
  REGION 1..274: note = tr|A0A1H7Q0H9|A0A1H7Q0H9_9BURK NADPH-dependent 7-cyano-7-deazaguanine reductase OS=Paraburkholderia caballeronis OX=416943 GN=queF PE=3 SV=1
MTPEQSPLGKPAAYSEQYDASLLFPIPRAAAREAIGIRAQLPFFGTDIWNAYELSWLNARGKPQIAIATFFIPADSANIVESKSFKLYLGSFAQTPFESADVVRETLKRDVSAACGASVSVRLDQPATFGKLQFEEFEGLSLDRLDLDTDVYHPDPSLLKATFDEAPVEETLYSNLLKSNCPVTGQPDWGSVQIHYVGPQIDHAGLLRYIISYRNHTGFHEQCAERMFVDILHACKPIKLAVYARYTRRGGLDINPFRTNYNLPMPDNARLARQ

SEQ ID NO: 48114 - protein, 274 aa, unidentified
  source 1..274: note = Paraburkholderia caffeinilytica
  REGION 1..274: note = tr|A0A346BHH1|A0A346BHH1_9BURK NADPH-dependent 7-cyano-7-deazaguanine reductase OS=Paraburkholderia caffeinilytica OX=1761016 GN=queF PE=3 SV=1
MTPEQSPLGKASAYTEHYDASLLFPIARKNAREAIGIGAQLPFFGTDIWNAYELSWLNARGKPQIAVATFFVPADSPNIVESKSFKLYLGSFAQTSFESMDMVRDTIKRDVSASCGATVSVHLAAPHEFGKLQMEEFEGLSLDRLDLDADVYQPDASLLKAALDEAPVEETLFSNLLKSNCPVTGQPDWGSVQIHYVGPQIDHAGLLRYIISYRNHTGFHEQCVERIFIDVMKACKPVKLAVYARYTRRGGLDINPFRTNYNLPMPDNMRLARQ

SEQ ID NO: 48115 - protein, 274 aa, unidentified
  source 1..274: note = Paraburkholderia caledonica
  REGION 1..274: note = tr|A0A2Z5M8V8|A0A2Z5M8V8_9BURK NADPH-dependent 7-cyano-7-deazaguanine reductase OS=Paraburkholderia caledonica OX=134536 GN=queF PE=3 SV=1
MTPEQSPLGKASTYTEQYDASLLFPIARSNARDAIGIGAQLPFFGTDIWNAYELSWLNQRGKPQIAVATFFVPAESPNIVESKSFKLYLGSFAQTAFESIDVVRDTIRRDVSASCGATVSVHLTAPHDFGKLQMEEFEGMSLDRLDLDTNTYQPDASLLKAALDEAPVEETLFSNLLKSNCPVTGQPDWGSVQIHYVGPQIDHAGLLRYIISYRNHTGFHEQCVEKIFIDVLKACEPVKLAVYARYTRRGGLDINPFRTNYNLPMPDNMRLARQ

SEQ ID NO: 48116 - protein, 274 aa, unidentified
  source 1..274: note = Paraburkholderia caribensis
  REGION 1..274: note = tr|A0A0P0R4G7|A0A0P0R4G7_9BURK NADPH-dependent 7-cyano-7-deazaguanine reductase OS=Paraburkholderia caribensis MBA4 OX=1323664 GN=queF PE=3 SV=1
MTPEQSPLGKPSSYTEQYDASLLFPIARKNAREQIGIGATLPFFGTDIWNAYELSWLNARGKPQIAIATFYVPADSPNIVESKSFKLYLGSFAQTSFDSIETVRDTIKRDVSAACGASVSLHLYPPAEFSKLALDEFEGTSLDRLDLDTDVYLPDASLLKAALDEAPTEETLFSNLLKSNCPVTGQPDWGSVQIHYVGPQIDHASLLRYIISYRNHTGFHEQCVEKIFLDVLKVCQPVKLAVYARYTRRGGLDINPFRTNFNLPMPDNLRTARQ

SEQ ID NO: 48117 - protein, 274 aa, unidentified
  source 1..274: note = Paraburkholderia caribensis
  REGION 1..274: note = tr|A0A2T3Y8I5|A0A2T3Y8I5_9BURK NADPH-dependent 7-cyano-7-deazaguanine reductase OS=Paraburkholderia caribensis OX=75105 GN=queF PE=3 SV=1
MTPEQSPLGKPSSYTEQYDASLLFPIARKNAREQIGIGATLPFFGTDIWNAYELSWLNARGKPQIAIATFYIPAESPNIVESKSFKLYLGSFAQTSFDSIETVRDTIKRDVSAACKASVSLHLYPPAEFSKLSMDEFEGTSLDRLDLDTDVYLPDASMLKAALDEAPTEETLFSNLLKSNCPVTGQPDWGSVQIHYVGPQIDHASLLRYIISYRNHTGFHEQCVEKIFLDVLKVCQPVKLAVYARYTRRGGLDINPFRTNFNLPMPDNLRTARQ

SEQ ID NO: 48118 - protein, 274 aa, unidentified
  source 1..274: note = Paraburkholderia diazotrophica
  REGION 1..274: note = tr|A0A1H6RNC6|A0A1H6RNC6_9BURK NADPH-dependent 7-cyano-7-deazaguanine reductase OS=Paraburkholderia diazotrophica OX=667676 GN=queF PE=3 SV=1
MTPEQSPLGKPATYTEQYDATLLFPIARKNARDQIGIGATLPFFGTDIWNAYELSWLNARGKPQIAIATFYIPADSPNIVESKSFKLYLGSFAQTSFDSIDVVRDAIKRDVSAACGASVSLHLYPPAEFSKLGLDEFEGTSLDRLDLDAEIYQPDAGLLKAALDEAPVEETLFSNLLKSNCPVTGQPDWGSVQIHYVGPQIDHASLLRYIISYRNHTGFHEQCVEKIFTDVLKICQPVKLAVYARYTRRGGLDINPFRTNFNLPMPDNLRTARQ

SEQ ID NO: 48119 - protein, 274 aa, unidentified
  source 1..274: note = Paraburkholderia dipogonis
  REGION 1..274: note = tr|A0A4Y8N782|A0A4Y8N782_9BURK NADPH-dependent 7-cyano-7-deazaguanine reductase OS=Paraburkholderia dipogonis OX=1211383 GN=queF PE=3 SV=1
MTPEQSPLGKASAYTEQYDASLLFPIARKNAREAIGIGAQLPFFGTDIWNAYELSWLNARGKPQIAVATFFVPADSPNIVESKSFKLYLGSFAQTAFESTEAVRDIIKRDVSASCGASVSVHLAAPYEFGKLQMEEFEGLSLDRLDLDTDVYHPDASLLTAALDEAPVEETLVSNLLKSNCPVTGQPDWGSVQIHYVGPQIDHAGLLRYIISYRNHTGFHEQCVEKIFLDVLKACKPVKLAVYARYTRRGGLDINPFRTNYNLPMPDNMRLARQ

SEQ ID NO: 48120 - protein, 274 aa, unidentified
  source 1..274: note = Paraburkholderia eburnea
  REGION 1..274: note = tr|A0A2S4LVX6|A0A2S4LVX6_9BURK NADPH-dependent 7-cyano-7-deazaguanine reductase OS=Paraburkholderia eburnea OX=1189126 GN=queF PE=3 SV=1
MTPEQSPLGKASSYTEQYDAKLLFPIPRIGAREQIGIGAQLPFFGTDIWNAYELSWLTPRGKPQIAIATFFIPADSPNIVESKSFKLYLGSFAQTAFGSADEVRDVLKRDVSAACGASVSVKLDQPGAFGKIAFEEFDGLSLDRLDLDADAYHPDPTLLKAAVDEAPVEETLVSNLLKSNCPVTGQPDWGSVQIHYVGPQIDQAGLLRYIISYRNHTGFHEQCAERIFMDILRECKPDRLAVYARYTRRGGLDINPFRTNFNMPMPDNARLARQ

SEQ ID NO: 48121 - protein, 274 aa, unidentified
  source 1..274: note = Paraburkholderia endofungorum
  REGION 1..274: note = tr|A0A2P5KD08|A0A2P5KD08_9BURK NADPH-dependent 7-cyano-7-deazaguanine reductase OS=Paraburkholderia endofungorum OX=417203 GN=queF PE=3 SV=1
MTPDQSPLGKPVGYAQQYDPTLLFPIERRQGRDAIGVPAVLPFFGTDIWNAYELSWLNERGKPQIALATFHVPAESPNIIESKSFKLYLGSFAQTRIASIDTLRETIHRDVCACAGANVSVRLTPPAEFATLALDELAGTSLDRLDLDTDSYTPDPSLLSADTNQAPVDETVFSNLLKSNCPVTGQPDWGSIQIRYVGPPIDHAGLLRYIVSYRDHTGFHEQCVERIFIDIQRVCKPIKLAVYARYTRRGGLDINPFRTNFNLPLPDNARTARQ

SEQ ID NO: 48122 - protein, 274 aa, unidentified
  source 1..274: note = Paraburkholderia fungorum
  REGION 1..274: note = tr|A0A1H0ZIY2|A0A1H0ZIY2_9BURK NADPH-dependent 7-cyano-7-deazaguanine reductase OS=Paraburkholderia fungorum OX=134537 GN=queF PE=3 SV=1
MTPEQSPLGKASTYTEQYDASLLFPIARKNAREAIGIGAQLPFFGTDIWNAYELSWLNARGKPQIAVATFFVPADSPNIVESKSFKLYLGSFAQTSFESMDAVRDTIKRDVSASCGATVSVHLTAPYEFGKLQMEEFEGLSLDRLDLDTDVYHPDASLLSAAHDESPVEETLFSNLLKSNCPVTGQPDWGTVQIHYVGPQIDHAGLLRYIISYRNHTGFHEQCVERIFIDLMKVCKPVKLAVYARYTRRGGLDINPFRTNYNLPMPDNMRLARQ

SEQ ID NO: 48123 - protein, 274 aa, unidentified
  source 1..274: note = Paraburkholderia fungorum
  REGION 1..274: note = tr|A0A420GQ45|A0A420GQ45_9BURK NADPH-dependent 7-cyano-7-deazaguanine reductase OS=Paraburkholderia fungorum OX=134537 GN=queF PE=3 SV=1
MTPEQSPLGKASAYTEQYDASLLFPIARKNAREAIGIGAQLPFFGTDIWNAYELSWLNARGKPQIAVATFFVPADSPNIVESKSFKLYLGSFAQTAFESMDIVRDTIKRDVSASCGATVSVHLSAPYEFGKLQMEEFEGLSLDRLDLDADVYQPDASLLKAALDEAPVEETLFSNLLKSNCPVTGQPDWGSVQIHYVGPQIDHAGLLRYIISYRNHTGFHEQCVERIFIDVMKACRPVKLAVYARYTRRGGLDINPFRTNYNLPMPDNLRLARQ

SEQ ID NO: 48124 - protein, 274 aa, unidentified
  source 1..274: note = Paraburkholderia ginsengiterrae
  REGION 1..274: note = tr|A0A1A9N0V5|A0A1A9N0V5_9BURK NADPH-dependent 7-cyano-7-deazaguanine reductase OS=Paraburkholderia ginsengiterrae OX=1462993 GN=queF PE=3 SV=1
MTPEQSPLGKPSAYTEQYDASLLFPIARKNAREAIGIGAQLPFFGTDIWNAYELSWLNTRGKPQIAVATFFVPADSPNIVESKSFKLYLGSFAQTAFDSIETVRDTIKRDVSASCGASVSVHLAAPNEFGKLQMDEFEGMSLDRLDLDAEVYQPDASLLKAALDEAPVEETLFSNLLKSNCPVTGQPDWGSVQIHYVGPQIDHAGLLRYIISYRSHTGFHEQCVERIFIDILKACKPVKLAVYARYTRRGGLDINPFRTNYNLPMPDNMRLARQ

SEQ ID NO: 48125 - protein, 274 aa, unidentified
  source 1..274: note = Paraburkholderia graminis
  REGION 1..274: note = tr|B1FWR9|B1FWR9_PARG4 NADPH-dependent 7-cyano-7-deazaguanine reductase OS=Paraburkholderia graminis (strain ATCC 700544 / DSM 17151 / LMG 18924 / NCIMB 13744 / C4D1 M) OX=396598 GN=queF PE=3 SV=1
MTPEQSPLGKASTYTEQYDASLLFPIARKNAREAIGIHAQLPFFGTDIWNAYELSWLNQRGKPQIAVATFFVPADSPNIVESKSFKLYLGSFAQTAFESIEAVRDTIKRDVSASCGATVSVYLTGPHDFGKLKMEEFEGTSLDRLDLDTDVYTPDASLLTAALHEAPVEETVFSNLLKSNCPVTGQPDWGSVQIHYVGPQIDHAGLLRYIISYRNHTGFHEQCVEKIFIDVLKACKPVKLAVYARYTRRGGLDINPFRTNYNLPMPDNMRLARQ

SEQ ID NO: 48126 - protein, 274 aa, unidentified
  source 1..274: note = Paraburkholderia hospita
  REGION 1..274: note = tr|A0A2D0A0Z7|A0A2D0A0Z7_9BURK NADPH-dependent 7-cyano-7-deazaguanine reductase OS=Paraburkholderia hospita OX=169430 GN=queF PE=3 SV=1
MTPEQSPLGKPSSYTEQYDASLLFPIARKNAREQIGIGATLPFFGTDIWNAYELSWLNARGKPQIAIATFYIPAESPNIVESKSFKLYLGSFAQTSFDSIETVRDTIKRDVSAACGSSVSLHLYPPAEFSKLAMDEFEGTSLDRLDLDTDVYLPDAGLLKAALDEAPVEETLFSNLLKSNCPVTGQPDWGSVQIHYVGPQIDQAGLLRYIISYRNHTGFHEQCVEKIFLDVLKVCQPVKLAVYARYTRRGGLDINPFRTNFNLPMPDNLRTARQ

SEQ ID NO: 48127 - protein, 274 aa, unidentified
  source 1..274: note = Paraburkholderia hospita
  REGION 1..274: note = tr|A0A1H6NA96|A0A1H6NA96_9BURK NADPH-dependent 7-cyano-7-deazaguanine reductase OS=Paraburkholderia hospita OX=169430 GN=queF PE=3 SV=1
MTPEQSPLGKPSSYTEQYDASLLFPIARKNAREQIGIGATLPFFGTDIWNAYELSWLNARGKPQIAIATFYIPAESPNIVESKSFKLYLGSFAQTSFDSIETVRDTIKRDVSAACGSSVSLHLYPPAEFSKLAMDEFEGTSLDRLDLDTDVYLPDAGLLKAALDEAPVEETLFSNLLKSNCPVTGQPDWGSVQIHYVGPQIDQAGLLRYIISYRNHTGFHEQCVEKIFLDVLKVCRPVKLAVYARYTRRGGLDINPFRTNFNLPMPDNLRTARQ

SEQ ID NO: 48128 - protein, 274 aa, unidentified
  source 1..274: note = Paraburkholderia insulsa
  REGION 1..274: note = tr|A0A2T0ZX75|A0A2T0ZX75_9BURK NADPH-dependent 7-cyano-7-deazaguanine reductase OS=Paraburkholderia insulsa OX=1441714 GN=queF PE=3 SV=1
MTPEQSPLGKASTYTEQYDASLLFPIARKNAREAIGIGAQLPFFGTDIWNAYELSWLNARGKPQIAVATFFVPADSPNIVESKSFKLYLGSFAQTAFESMDVVRETIKRDVSASCGATVSVHLAAPYEFGKLQMEEFEGLSLDRLDLDTDVYQPDASLLKAALDEAPVEETLFSNLLKSNCPVTGQPDWGSVQIHYVGPQIDHAGLLRYIISYRNHTGFHEQCVERIFIDVLKACRPVKLAVYARYTRRGGLDINPFRTNYNLPMPDNMRLARQ

SEQ ID NO: 48129 - protein, 276 aa, unidentified
  source 1..276: note = Paraburkholderia megapolitana
  REGION 1..276: note = tr|A0A1I3I5G4|A0A1I3I5G4_9BURK NADPH-dependent 7-cyano-7-deazaguanine reductase OS=Paraburkholderia megapolitana OX=420953 GN=queF PE=3 SV=1
MNTTPEHSPLGKATAYTEQYDASLLFPIARNLAREQIGIGAQLPFFGTDIWNAYELSWLNSRGKPQIAIATVYVPADSANIVESKSFKLYLGSFAQTVFDSADAVRDTIRRDVSAACGATVSVHFASPFEFGKLQLEEFDGLSLDRLDLDTDVYHPDPSLLKSALTEAPVEETLISDLLKSNCPVTGQPDWGSVQIHYVGPQIDHAGLLRYLISYRNHTGFHEQCVERIFIDIMRECQPLKLAVYARYTRRGGLDINPFRTNFNQPMPDNLRTARQ

SEQ ID NO: 48130 - protein, 274 aa, unidentified
  source 1..274: note = Paraburkholderia monticola
  REGION 1..274: note = tr|A0A149PYR6|A0A149PYR6_9BURK NADPH-dependent 7-cyano-7-deazaguanine reductase OS=Paraburkholderia monticola OX=1399968 GN=queF PE=3 SV=1
MTPEQSPLGKSSTYTEQYDPTLLFPIARSAAREAIGITARLPFFGTDIWNAYELSWLNSRGKPQIAVATFFVPADSPNIVESKSFKLYLGSFAQTAFESAESVRDTIKRDVSASCGSTVSVHLSTPHEFGKLKMEEFDGLSLDRLDLEASVYQPDASLLSAAHGEAPVEETLFSNLLKSNCPVTGQPDWGSVQIHYAGPQIDQAGLLRYIISYRNHTGFHEQCVERIFVDIMKMCKPLKLAVYARYTRRGGLDINPFRTNYNLPMPDNMRLARQ

SEQ ID NO: 48131 - protein, 274 aa, unidentified
  source 1..274: note = Paraburkholderia phenazinium
  REGION 1..274: note = tr|A0A1G7X0V0|A0A1G7X0V0_9BURK NADPH-dependent 7-cyano-7-deazaguanine reductase OS=Paraburkholderia phenazinium OX=60549 GN=queF PE=3 SV=1
MTPEQSPLGKAAAYTEQYDATLLFPIARKAAREAIGIGAQLPFFGTDIWNAYELSWLNGRGKPQIAVATFYVPADSPNIVESKSFKLYLGSFAQSSFESFEAVRETIKKDVSAACGASVSVHLTGPMDFGKLALEEFEGTSLDRLDLDTDVYQPDASLLKAALDEAPVEETVFSNLLKSNCPVTGQPDWGSVQIHYVGPQIDHAGLLRYIVSYRSHTGFHEQCVERIFVDILKICKPLKLAVYARYTRRGGLDINPFRTNFNLPMPDNLRTARQ

SEQ ID NO: 48132 - protein, 274 aa, unidentified
  source 1..274: note = Paraburkholderia phenazinium
  REGION 1..274: note = tr|A0A1N6L469|A0A1N6L469_9BURK NADPH-dependent 7-cyano-7-deazaguanine reductase OS=Paraburkholderia phenazinium OX=60549 GN=queF PE=3 SV=1
MTPEQSPLGKPAAYTEQYDATLLFPIARKAAREAIGIGAQLPFFGTDIWNAYELSWLNGRGKPQIAVATFYVPADSPNIVESKSFKLYLGSFAQTSFESFEAVRDTIKRDVSAVCGASVSVHLTGPMDFGKLALEEFEGTSLDRLDLDTDVYQPDSSLLKAALEESPVEETLFSNLLKSNCPVTGQPDWGSLQIHYVGPQIDHAGLLRYIVSYRNHTGFHEQCVERIFVDVLKICKPLKLAVYARYTRRGGLDINPFRTNFNLPMPDNFRTARQ

SEQ ID NO: 48133 - protein, 274 aa, unidentified
  source 1..274: note = Paraburkholderia phenoliruptrix
  REGION 1..274: note = tr|K0DI77|K0DI77_9BURK NADPH-dependent 7-cyano-7-deazaguanine reductase OS=Paraburkholderia phenoliruptrix BR3459a OX=1229205 GN=queF PE=3 SV=1
MTPEQSPLGKASTYTEQYDASLLFPIARGNARGAIGIGAQLPFFGTDIWNAYELSWLNQRGKPQIAVATFFVPADSPNIVESKSFKLYLGSFAQTAFDSIEAVRDTIKRDVSASCGSTVSVYLTAPHDFAKLRMEEFEGTPLDRLDLDADVYTPDASLLKAALDEAPVEETVFSNLLKSNCPVTGQPDWGSVQIHYVGPQIDHAGLLRYIISYRNHTGFHEQCVERIFIDVLNACRPVKLAVYARYTRRGGLDINPFRTNYNLPMPDNMRLARQ

SEQ ID NO: 48134 - protein, 274 aa, unidentified
  source 1..274: note = Paraburkholderia phymatum
  REGION 1..274: note = sp|B2JCU2|QUEF_PARP8 NADPH-dependent 7-cyano-7-deazaguanine reductase OS=Paraburkholderia phymatum (strain DSM 17167 / CIP 108236 / LMG 21445 / STM815) OX=391038 GN= queF PE=3 SV=1
MTPEQSPLGKPSSYTEQYDASLLFPIARKNARDQIGIGATLPFFGTDIWNAYELSWLNARGKPQIAIATFYVPADSPNIVESKSFKLYLGSFAQSSFDSIDVVRDTIKRDVSAACGSSVSLHLYPPAEFSKLGLEEFEGTSLDRLDLDAEVYQPDASILKAALDEAPVEETLFSNLLKSNCPVTGQPDWGSVQIHYVGPQIDHAALLRYIISYRNHTGFHEQCVEKIFLDVMKVCQPVKLAVYARYTRRGGLDINPFRTNFNLPMPDNLRTARQ

SEQ ID NO: 48135 - protein, 274 aa, unidentified
  source 1..274: note = Paraburkholderia phytofirmans
  REGION 1..274: note = sp|B2SX29|QUEF_PARPJ NADPH-dependent 7-cyano-7-deazaguanine reductase OS=Paraburkholderia phytofirmans (strain DSM 17436 / LMG 22146 / PsJN); OX = 398527 GN=queF PE=3 S V=1
MTPEQSPLGKPSAYTEQYDASLLFPIARKNAREAIGIGAQLPFFGTDIWNAYELSWLNARGKPQIAVATFFVPADSPNIVESKSFKLYLGSFAQTAFESMETVRDTIKRDVSASCGATVSVHLTAPYEFGKLQMEEFEGLSLDRLDLDTDVYHPDASLLTAALDEAPVEETLVSNLLKSNCPVTGQPDWGSVQIHYVGPQIDHAGLLRYIISYRNHTGFHEQCVEKIFLDVLKACKPVKLAVYARYTRRGGLDINPFRTNYNLPMPDNMRLARQ

SEQ ID NO: 48136 - protein, 274 aa, unidentified
  source 1..274: note = Paraburkholderia piptadeniae
  REGION 1..274: note = tr|A0A1N7RX20|A0A1N7RX20_9BURK NADPH-dependent 7-cyano-7-deazaguanine reductase OS=Paraburkholderia piptadeniae OX=1701573 GN=queF PE=3 SV=1
MTPEQSPLGKPATYTEQYDATLLFPIARKNARDQIGIGATLPFFGTDIWNAYELSWLNARGKPQIAIATFYIPADSPNIVESKSFKLYLGSFAQTSFDSIDVVRNTIKRDVSAACGASVSLHLYPPAEFSKLGLDEFEGTSLDRLDLDAEIYRPDAGLLKAALDEAPVEETLFSNLLKSNCPVTGQPDWGSVQIHYVGPQIDHASLLRYIISYRNHTGFHEQCVEKIFTDVLKVCQPVKLAVYARYTRRGGLDINPFRTNFNLPMPDNLRTARQ

SEQ ID NO: 48137 - protein, 274 aa, unidentified
  source 1..274: note = Paraburkholderia rhizosphaerae
  REGION 1..274: note = tr|A0A4R8M270|A0A4R8M270_9BURK NADPH-dependent 7-cyano-7-deazaguanine reductase OS=Paraburkholderia rhizosphaerae OX=480658 GN=queF PE=3 SV=1
MTPDQSPLGKPAAYLEQYDASLLFPIARSNAREQIGIGARLPFFGTDIWNAYELSWLNARGKPQIAVATFYVPADSPNIVESKSFKLYLGSFAQTKFDSADIVRDTIRRDVSACCGATVSLHLYGPAEFGKLKLDELDGLSLDRLDLDTEVYQPDASLLKAALDEAPVEETLYSNLLKSNCPVTGQPDWGSVQIHYVGPQIDQASLLRYIISYRTHTGFHEQCVEKMFVDLLDACQPVKLAIYARYTRRGGLDINPFRTNFNLPMPDNLRTARQ

SEQ ID NO: 48138 - protein, 294 aa, unidentified
  source 1..294: note = Paraburkholderia rhizoxinica
  REGION 1..294: note = tr|E5ALS2|E5ALS2_PARRH NADPH-dependent 7-cyano-7-deazaguanine reductase OS=Paraburkholderia rhizoxinica (strain DSM 19002 / CIP 109453 / HKI 454); OX = 882378 GN=queF P E=3 SV=1
MGRNGQPGVSIIPRLSPSRNMTPDQSLLGKPVSYAQQYDPTLLFPIERRQGRDAIGVPAVLPFFGTDIWNAYELSWLNERGKPQIALATFHVPAESPNIIESKSFKLYLGSFAQTRIASIDTLRETIHRDVCACAGANVSVRLTPPAEFATLALDELAGTSLDRLDLDTDSYTPDPSLLSADTHQAPVDETVFSNLLKSNCPVTGQPDWGSIQIRYVGPPIDHAGLLRYIVSYRNHTGFHEQCVERIFIDIQRVCKPIKLAVYARYTRRGGLDINPLRTNFNLPLPDNARTARQ

SEQ ID NO: 48139 - protein, 274 aa, unidentified
  source 1..274: note = Paraburkholderia rhynchosiae
  REGION 1..274: note = tr|A0A2N7VW53|A0A2N7VW53_9BURK NADPH-dependent 7-cyano-7-deazaguanine reductase OS=Paraburkholderia rhynchosiae OX=487049 GN=queF PE=3 SV=1
MTPEQSPLGKPSSYTEQYDASLLFPIARSNARETIGIGAQLPFFGTDIWNAYELSWLNQRGKPQIAVATFFVPADSPNIVESKSFKLYLGSFAQTAFESIEAVRDTIKRDVSASCGATVSVYLTGPHDFGKLRMEEFEGMSLDRLDLDTDVYTPDASLLKAALDEAPVEETVFSNLLKSNCPVTGQPDWGSVQIHYIGPQIDHAGLLRYIISYRNHTGFHEQCVEKIFIDVMKACKPVKLAVYARYTRRGGLDINPFRTNYNLPMPDNMRLARQ

SEQ ID NO: 48140 - protein, 274 aa, unidentified
  source 1..274: note = Paraburkholderia ribeironis
  REGION 1..274: note = tr|A0A1N7RLV6|A0A1N7RLV6_9BURK NADPH-dependent 7-cyano-7-deazaguanine reductase OS=Paraburkholderia ribeironis OX=1247936 GN=queF PE=3 SV=1
MTPEQSPLGKSATYTEHYDATLLFPIARKHARDAIGIGAQLPFFGTDIWNAYELSWLNARGKPQIAVATFFVPADSPNIVESKSFKLYLGSFAQTVFESVEAVRDTIRRDVSASCGATVSVHLTTPHEFGRLQMEEFDGLSLDRLDLDTDVYLPDASLLSAAMDEAPVEETLFSNLLKSNCPVTGQPDWGSVQIHYVGPQINQAGLLRYIISYRNHTGFHEQCVERIFVDVLKACKPVKLAVYARYTRRGGLDINPFRTNYNLPMPDNMRLARQ

SEQ ID NO: 48141 - protein, 274 aa, unidentified
  source 1..274: note = Paraburkholderia sacchari
  REGION 1..274: note = tr|A0A0A6Q6Z4|A0A0A6Q6Z4_9BURK NADPH-dependent 7-cyano-7-deazaguanine reductase OS=Paraburkholderia sacchari OX=159450 GN=queF PE=3 SV=1
MTPEQSPLGKAATYTEHYDASLLFPIPRAGARETIGIGAQLPFFGTDIWNAYELSWLNARGKPQIAIATFFIPADSPNIVESKSFKLYLGSFAQTPFESADVVRDTIKRDVSAACGASVSVRLDQPGAFGKIPFEEFDGLSLDRLDLDTEIYHPDPTLLKSAQDESPVEETLISNLLKSNCPVTGQPDWGSVQIHYVGPQIDQAGLLRYIISYRNHTGFHEQCVERIFMDILRECKPDRLAVYARYTRRGGLDINPFRTNFNMPMPDNARLARQ

SEQ ID NO: 48142 - protein, 274 aa, unidentified
  source 1..274: note = Paraburkholderia sartisoli
  REGION 1..274: note = tr|A0A1H3YF86|A0A1H3YF86_9BURK NADPH-dependent 7-cyano-7-deazaguanine reductase OS=Paraburkholderia sartisoli OX=83784 GN=queF PE=3 SV=1
MTPEQSPLGKPSSYTEQYDASLLFPIERSAARETIGIGARLPFFGTDIWNAYELSWLNPRGKPQIAVATFFIPADSPNIVESKSFKLYLGSFAHTAFESIDVVRETIRRDVSAASGASVSLHLAPPAEFGKLALEEFEGLSLDRLDLDASVYHPEPSFLTAALDEAPVEETLFSNLLKSNCPVTGQPDWGSVQIHYVGPQIDHAGLLRYIISYRNHTGFHEQCVERIFVDVMRACRPVKLAVYARYTRRGGLDINPFRTNFNLPMPDNLRTARQ

SEQ ID NO: 48143 - protein, 274 aa, unidentified
  source 1..274: note = Paraburkholderia sediminicola
  REGION 1..274: note = tr|A0A3R7G7G5|A0A3R7G7G5_9BURK NADPH-dependent 7-cyano-7-deazaguanine reductase OS=Paraburkholderia sediminicola OX=458836 GN=queF PE=3 SV=1
MTPEQSPLGKPSAYTEQYDASLLFPIARKNAREAIGIGAQLPFFGTDIWNAYELSWLNARGKPQIAVATFFVPADSPNIVESKSFKLYLGSFAQTAFESMEMVRDTIKRDVSAACGATVSVHLTAPYEFGKLQMEEFEGLSLDRLDLDTDVYQPDASLLKAALDEAPVEETLFSNLLKSNCPVTGQPDWGSVQIHYVGPQIDHAGLLRYIISYRNHTGFHEQCVERIFIDVLKACRPVKLAVYARYTRRGGLDINPFRTNYNLPMPDNLRLARQ

SEQ ID NO: 48144 - protein, 274 aa, unidentified
  source 1..274: note = Paraburkholderia silvatlantica
  REGION 1..274: note = tr|A0A2U0ZRU2|A0A2U0ZRU2_9BURK NADPH-dependent 7-cyano-7-deazaguanine reductase OS=Paraburkholderia silvatlantica OX=321895 GN=queF PE=3 SV=1
MTPDQSPLGKASTYTEQYDASLLFPIPRAGAREQIGIGAQLPFFGTDIWNAYELSWLNARGKPQIAIATFFIPADSPNIIESKSFKLYLGSFAQTPFESADAVRDTIRRDVTAACGAPVSVRLDQPGAFGKIPFEEFDGLSLDRLDLDTEIYHPEPTLLKAAFDEAPVEETLISNLLKSNCPVTGQPDWGSVQIHYVGPQIDQAGLLRYIISYRNHTGFHEQCAERIFMDILRECKPDRLAVYARYTRRGGLDINPFRTNFNMPMPDNARLARQ

SEQ ID NO: 48145 - protein, 274 aa, unidentified
  source 1..274: note = Paraburkholderia sp.
  REGION 1..274: note = tr|A0A2S8RKA8|A0A2S8RKA8_9BURK NADPH-dependent 7-cyano-7-deazaguanine reductase OS=Paraburkholderia sp. BL21I4N1 OX=1938801 GN=queF PE=3 SV=1
MTPEQSPLGKASTYTEQYDASLLFPIARKNAREAIGIGAQLPFFGTDIWNAYELSWLNARGKPQIAVATFFVPADSPNIVESKSFKLYLGSFAQTAFESMEVVRDTIKRDVSASCGATVSVHLTAPYEFGKLQMEEFEGLSLDRLDLDTDIYQPDASLLSAALDEAPVEETVFSNLLKSNCPVTGQPDWGTVQIHYVGPQIDHAGLLRYIISYRNHTGFHEQCVERIFIDVLKACKPVKLAVYARYTRRGGLDINPFRTNYNLPMPDNMRLARQ

SEQ ID NO: 48146 - protein, 274 aa, unidentified
  source 1..274: note = Paraburkholderia sp.
  REGION 1..274: note = tr|A0A1L6HSU3|A0A1L6HSU3_9BURK NADPH-dependent 7-cyano-7-deazaguanine reductase OS=Paraburkholderia sp. SOS3 OX=1926494 GN=queF PE=3 SV=1
MTPDQSPLGKPATYTEQYDASLLFPIARSNAREQIGITARLPFFGTDIWNAYELSWLNARGKPQIAIATFFVPADSPNIVESKSFKLYLGSFAQTKFDSIDVVRDTIRRDVSASCGATVSVHLSAPGEFGKLGLEEFDGLSLDRLDLDTDIYVPDASLLKAAHGEAPVEETLYSNLLKSNCPVTGQPDWGSVQIHYVGPQIDQASLLRYIISYRNHTGFHEQCVEKMFVDLLGACQPVKLAIYARYTRRGGLDINPFRTNFNLPMPDNLRTARQ

SEQ ID NO: 48147 - protein, 274 aa, unidentified
  source 1..274: note = Paraburkholderia sprentiae
  REGION 1..274: note = tr|A0A1I9YHQ3|A0A1I9YHQ3_9BURK NADPH-dependent 7-cyano-7-deazaguanine reductase OS=Paraburkholderia sprentiae WSM5005 OX=754502 GN=queF PE=3 SV=1
MTPEQSPLGKSSTYTEQYDPTLLFPIARSHAREAIGISARLPFFGTDIWNAYELSWLNARGKPQIAVATFFVPADSPNIVESKSFKLYLGSFAQTAFESTESVRDTIKRDVSASCGATVSVHLSTPHEFGKLKMEEFDGLSLDRLELEANVYQPDASLLGAAHDEAPIEETLFSNLLKSNCPVTGQPDWGSVQIHYAGPQIDHAGLLRYIISYRNHTGFHEQCVERIFVDIMKMCKPLKLAVYARYTRRGGLDINPFRTNYNLPMPDNMRLARQ

SEQ ID NO: 48148 - protein, 274 aa, unidentified
  source 1..274: note = Paraburkholderia susongensis
  REGION 1..274: note = tr|A0A1X7JTR9|A0A1X7JTR9_9BURK NADPH-dependent 7-cyano-7-deazaguanine reductase OS=Paraburkholderia susongensis OX=1515439 GN=queF PE=3 SV=1
MTPEQSPLGKSSTYTEQYDPTLLFPIARRNAREAIGINAQLPFFGTDIWNAYELSWLNARGKPQIAVATFFVPADSPNIVESKSFKLYLGSFAQTAFESAESVRDTIKRDVSASCGATVSVHLATPHEFGKLRMEEFDGLSLDRLDLDASAYQPDASLLSAAHDEAPVEETLFSNLLKSNCPVTGQPDWGSVQIHYAGPQIDHAGLLRYIISYRNHTGFHEQCVERIFVDIMKMCKPLKLAVYARYTRRGGLDINPFRTNYNLPMPDNLRLARQ

SEQ ID NO: 48149 - protein, 274 aa, unidentified
  source 1..274: note = Paraburkholderia terrae
  REGION 1..274: note = tr|A0A2I8EFV0|A0A2I8EFV0_9BURK NADPH-dependent 7-cyano-7-deazaguanine reductase OS=Paraburkholderia terrae OX=311230 GN=queF PE=3 SV=1
MTPEQSPLGKPSSYTEQYDASLLFPIARKNAREQIGIGATLPFFGTDIWNAYELSWLNARGKPQVAIATFFIPADSPNIVESKSFKLYLGSFAQTSFDSIETVRDTIKRDVSAACGSSVSLHLYPPAEFSKLAMDEFEGTSLDRLDLDTDVYLPDASLLKAALDEAPVEETLFSNLLKSNCPVTGQPDWGSVQIHYVGPQIDQAGLLRYIISYRNHTGFHEQCVEKIFLDVLKVCQPVKLAVYARYTRRGGLDINPFRTNFNLPMPDNLRTARQ

SEQ ID NO: 48150 - protein, 274 aa, unidentified; identical to SEQ ID NO: 48126
  source 1..274: note = Paraburkholderia terrae
  REGION 1..274: note = tr|I5CZZ4|I5CZZ4_9BURK NADPH-dependent 7-cyano-7-deazaguanine reductase OS=Paraburkholderia terrae BS001 OX=1171375 GN=queF PE=3 SV=1

SEQ ID NO: 48151 - protein, 274 aa, unidentified
  source 1..274: note = Paraburkholderia terricola
  REGION 1..274: note = tr|A0A1M6YA91|A0A1M6YA91_9BURK NADPH-dependent 7-cyano-7-deazaguanine reductase OS=Paraburkholderia terricola OX=169427 GN=queF PE=3 SV=1
MTPEQSPLGKPSAYTEQYDASLLFPIARGNAREAIGISAPLPFFGTDIWNAYELSWLNARGKPQIAVATFFVPADSPNIVESKSFKLYLGSFAQTAFESMDAVRETIKRDVSASCGATVSVHLTAPYEFGKLQMEEFEGLSLDRLDLDTDVYQPDASLLKAALDEAPVEETLFSNLLKSNCPVTGQPDWGSVQIHYIGPQIDHAGLLRYIISYRNHTGFHEQCVEKIFIDVLKACKPVKLAVYARYTRRGGLDINPFRTNYNLPMPDNMRLARQ

SEQ ID NO: 48152 - protein, 274 aa, unidentified
  source 1..274: note = Paraburkholderia tropica
  REGION 1..274: note = tr|A0A1A5XCP6|A0A1A5XCP6_9BURK NADPH-dependent 7-cyano-7-deazaguanine reductase OS=Paraburkholderia tropica OX=92647 GN=queF PE=3 SV=1
MTPEQSPLGKASSYTEQYDAKLLFPIPRVGAREQIGIGAQLPFFGTDIWNAYELSWLNARGKPQIAIATFFIPADSPNIVESKSFKLYLGSFAQTKFESADDVRDVLKRDVSAACGASVSVKLDQPGAFGKIPFEEFDGLSIDRLDLDAEIYHPDATLLKAALDESPVEETLVSNLLKSNCPVTGQPDWGSVQIHYVGPQIDQAGLLRYIISFRNHTGFHEQCAERIFMDILRECKPDRLAVYARYTRRGGLDINPFRTNFNMPMPDNARLARQ

SEQ ID NO: 48153 - protein, 274 aa, unidentified
  source 1..274: note = Paraburkholderia tropica
  REGION 1..274: note = tr|A0A2W7M878|A0A2W7M878_9BURK NADPH-dependent 7-cyano-7-deazaguanine reductase OS=Paraburkholderia tropica OX=92647 GN=queF PE=3 SV=1
MTPEQSPLGKASSYTEQYDAKLLFPIPRVGAREQIGIGAQLPFFGTDIWNAYELSWLNARGKPQIAIATFFIPADSPNIVESKSFKLYLGSFAQTKFESADDVRDVLKRDVSAACGASVSVKLDQPGAFGKIPFEEFDGLSIDRLDLDAEVYHPDATLLKAALDESPVEETLVSNLLKSNCPVTGQPDWGSVQIHYVGPQIDQAGLLRYIISFRNHTGFHEQCAERIFMDILRECKPDRLAVYARYTRRGGLDINPFRTNFNMPMPDNARLARQ

SEQ ID NO: 48154 - protein, 274 aa, unidentified
  source 1..274: note = Paraburkholderia tuberum
  REGION 1..274: note = tr|A0A1H1EFE5|A0A1H1EFE5_9BURK NADPH-dependent 7-cyano-7-deazaguanine reductase OS=Paraburkholderia tuberum OX=157910 GN=queF PE=3 SV=1
MTPEQSPLGKSSTYTEQYDPTLLFPISRSHAREAIGITARLPFFGTDIWNAYELSWLNARGKPQIAVATFFVPADSPNIVESKSFKLYLGSFAQTAFDSAESVRDTIRRDVSASCGATVSVHLSTPHEFGKLKMEEFAGLSLDRLELEASVYQPDASLLSAARDEAPVEETLFSNLLKSNCPVTGQPDWGSVQIHYAGPQIDHAGLLRYIISYRNHTGFHEQCVERIFVDIMKMCKPLKLAVYARYTRRGGLDINPFRTNYNLPMPDNMRLARQ

SEQ ID NO: 48155 - protein, 274 aa, unidentified
  source 1..274: note = Paraburkholderia unamae
  REGION 1..274: note = tr|A0A328WVZ8|A0A328WVZ8_9BURK NADPH-dependent 7-cyano-7-deazaguanine reductase OS=Paraburkholderia unamae OX=219649 GN=queF PE=3 SV=1
MTPDQSPLGKPAAYTEQYDASLLFPIPRAGAREQIGIGAQLPFFGTDIWNAYELSWLNARGKPQIAIATFFIPADSPNIIESKSFKLYLGSFAQTPFESADAVRDTIRRDVTAACGASVSVRLEQPGAFGKIPFEEFDGLSLDRLDLDTEIYHPEPTLLKAALDEAPVEETLVSNLLKSNCPVTGQPDWGSVQIHYVGPQIDQAGLLRYIISYRNHTGFHEQCAERIFMDILRECKPDRLAVYARYTRRGGLDINPFRTNFNMPMPDNARLARQ

SEQ ID NO: 48156 - protein, 274 aa, unidentified
  source 1..274: note = Paraburkholderia xenovorans
  REGION 1..274: note = sp|Q145P6|QUEF_PARXL NADPH-dependent 7-cyano-7-deazaguanine reductase OS=Paraburkholderia xenovorans (strain LB400) OX=266265 GN=queF PE=3 SV=1
MTPEQSPLGKASTYTEQYDASLLFPIARKNAREAIGIGAQLPFFGTDIWNAYELSWLNARGKPQIAVATFFVPADSPNIVESKSFKLYLGSFAQTAFESMDAVRDTIRRDVSASCGATVSVHLTAPYKFGKLQMEEFEGLSLDRLDLDTDVYQPDASLLKAALHEAPVEETVFSNLLKSNCPVTGQPDWGSVQIHYVGPQIDHAGLLRYIISYRNHTGFHEQCVERIFVDVLKACKPVKLAVYARYTRRGGLDINPFRTNYNLPMPDNMRLARQ

SEQ ID NO: 48157 - protein, 154 aa, unidentified
  source 1..154: note = Paracandidimonas soli
  REGION 1..154: note = tr|A0A4R3UTF1|A0A4R3UTF1_9BURK NADPH-dependent 7-cyano-7-deazaguanine reductase OS=Paracandidimonas soli; OX = 1917182 GN=queF PE=3 SV=1
MSSSDVSSLSQLGRMVEAPADPQSAVLERVPNPHPDTAYVARFTAPEFTSLCPVTGQPDFAHLVIDYVPQDWLVESKSLKLYLTSFRNHGAFHEDCTVSIGKRLVALLEPRWLRIAGYWYPRGGIPIDVFWQTGNAPDGVWVPDTGVPAYRGRG

SEQ ID NO: 48158 - protein, 269 aa, Parachlamydia acanthamoebae
  REGION 1..269: note = tr|F8L1L5|F8L1L5_PARAV NADPH-dependent 7-cyano-7-deazaguanine reductase OS=Parachlamydia acanthamoebae (strain UV7) OX=765952 GN=queF PE=3 SV=1
MLDQSPLGKQTTYITTYSPELLFPIPRTMARNKIGLTSLPFTGLDIWNSYELSWLDQKGKPQIAFAEFHFPYDNPNIVESKSFKLYLNSFNQTKIGSLAELNEILERDLSQVSLGPVTVELYSSADFKKQPMREFSGTCLDFLDIETNAYHVSPEFLSTSSDYVEESIYSELLKSNCLATGQPDWGTIYIRYAGHKIAHEGLLKYIISYRKHSGFHEDCVEKIFYDISTYCKPEKLTVYARYVRRGGLDINPFRSNFETDPVNLRLNRQ

SEQ ID NO: 48159 - protein, 273 aa, Parachlamydia acanthamoebae
  REGION 1..273: note = tr|A0A0C1EL00|A0A0C1EL00_9BACT NADPH-dependent 7-cyano-7-deazaguanine reductase OS=Parachlamydia acanthamoebae OX=83552 GN=queF PE=3 SV=1
MRIFMLDQSPLGKQTTYITTYSPELLFPIPRTMARNKIGLTSLPFTGLDIWNSYELSWLDQKGKPQIAFAEFHFPYDNPNIVESKSFKLYLNSFNQTKIGSLAELNEILERDLSQVSLGPVTVELYSSADFKKQPMREFSGTCLDFLDIETNAYHVSPEFLSTSSDYVEESIYSELLKSNCLATGQPDWGTIYIRYAGHKIAHEGLLKYIISYRKHSGFHEDCVEKIFYDISTYCKPEKLTVYARYVRRGGLDINPFRSNFETDPVNLRLNRQ

SEQ ID NO: 48160 - protein, 270 aa, Parachlamydia sp.
  REGION 1..270: note = tr|A0A2H9SRW3|A0A2H9SRW3_9BACT NADPH-dependent 7-cyano-7-deazaguanine reductase QueF OS=Parachlamydia sp.; OX = 2052048 GN=CK425_05570 PE=3 SV=1
MLEQSPLGKQSSYITTYSPELLFPIPRTLARNKIGLKAALPFTGVDIWNSYELSWLNAKGKPQIAFAEFHFPHDNTYIVESKSFKLYLNSFNQTKFATWEQVHATLVKDLSQASGGLAKVFLFSSEEFKKLPLQEFPGTCLDHLDIETDSYQISSHFLSTQPLEVEETVYSELLKSNCLATGQPDWGTVLIRYAGKKILHEGLLKYLISYRNHSGFHEDCVEQIFKDLLTHCQPARLTVYARYVRRGGLDINPFRSNFETSPENVRLNRQ

SEQ ID NO: 48161 - protein, 153 aa, Paracoccus aestuarii
  REGION 1..153: note = tr|A0A419A0G3|A0A419A0G3_9RHOB NADPH-dependent 7-cyano-7-deazaguanine reductase OS=Paracoccus aestuarii; OX = 453842 GN=queF PE=3 SV=1
MAHYTDALTQLGSATTLPQHPDEAVLERVPNPQPGQTYAVRFTQPEFTSLCPLTGQPDFAHLVIDYVPGDWLVESKSLKLFLGAFRNHGAFHEDCTVGIGRRIADLLEPQWLRIGGYWYPRGGMPIDVFWQTGAAPAGLWLPDQGVPTYRGRG

SEQ ID NO: 48162 - protein, 153 aa, Paracoccus alcaliphilus
  REGION 1..153: note = tr|A0A1H8FLL5|A0A1H8FLL5_9RHOB NADPH-dependent 7-cyano-7-deazaguanine reductase OS=Paracoccus alcaliphilus OX=34002 GN=queF PE=3 SV=1
MSHYTDALTQLGAKTPLPQHPDQAVLERVPNPQPGEVYAVRFAQPEFTSLCPITGQPDFAHLVIDYVPGDWLVESKSLKLYLGSFRNHGAFHEDCTVGIGKRLAALLSPLWLRIGGYWFPRGGMPIDVFWQSGAMPEGLWLPDQGVPGYRGRG

SEQ ID NO: 48163 - protein, 154 aa, Paracoccus aminovorans
  REGION 1..154: note = tr|A0A1I3C640|A0A1I3C640_9RHOB NADPH-dependent 7-cyano-7-deazaguanine reductase OS=Paracoccus aminovorans; OX = 34004 GN=queF PE=3 SV=1
MTETIYSGLTQLGGATRLPESPEQAQLERVRNPQADLSYAVRFTAPEFTSLCPMTGQPDFAHLVIDYVPDEWLVESKSLKLYLGSFRNHGAFHEDCTISIARRLVEFLAPRWLRIGGYWYPRGGIPIDVFWQTGPAPDGVWIPDQGVPPYRGRG

SEQ ID NO: 48164 - protein, 154 aa, Paracoccus bengalensis
  REGION 1..154: note = tr|A0A3D9XSX7|A0A3D9XSX7_9RHOB NADPH-dependent 7-cyano-7-deazaguanine reductase OS=Paracoccus bengalensis; OX = 302403 GN=queF PE=3 SV=1
MTETIYSGLKQLGGATRLPESPDQAELERVQNPQADVAYNVRFTAPEFTSLCPMTGQPDFAHLVIDYVPGDWLVESKSLKLYLGSFRNHGAFHEDCTVSIGRRLAGFLKPRWLRIGGYWYPRGGMPIDVFWQTGPMPEAVWIPDQGVPPYRGRG

SEQ ID NO: 48165 - protein, 153 aa, Paracoccus denitrificans
  REGION 1..153: note = tr|A0A533I978|A0A533I978_PARDE NADPH-dependent 7-cyano-7-deazaguanine reductase OS=Paracoccus denitrificans OX=266 GN=queF PE=3 SV=1
MSHYTDNLTQLGQDTKLPNSPDEAVLERVPNPQAGEGYVVRFTQPEFTSLCPMTGQPDFAHMVIDYVPGDWLVESKSLKLFLGSFRNHGAFHEDCTVTIGKRLVETLEPRWLRIGGYWYPRGGMPIDVFWQTGAVPAGIWLPDQGVATYRGRG

SEQ ID NO: 48166 - protein, 154 aa, Paracoccus denitrificans
  REGION 1..154: note = sp|A1B9Q2|QUEF_PARDP NADPH-dependent 7-cyano-7-deazaguanine reductase OS=Paracoccus denitrificans (strain Pd 1222) OX=318586 GN=queF PE=3 SV=1
MTETIYSGLKQLGGATLLPESPDKAELERVRNPQADVAYNVRFTAPEFTSLCPMTGQPDFAHLVIDYVPGEWLVESKSLKLYLGSFRNHGAFHEDCTVSIGRRLAGFLAPRWLRIGGYWYPRGGMPIDVFWQTGPMPEGVWIPDQDVPPYRGRG

SEQ ID NO: 48167 - protein, 153 aa, unidentified
  source 1..153: note = Paracoccus gahaiensis
  REGION 1..153: note = tr|A0A4U0R7Y7|A0A4U0R7Y7_9RHOB NADPH-dependent 7-cyano-7-deazaguanine reductase OS=Paracoccus gahaiensis; OX = 1706839 GN=queF PE=3 SV=1
MSHYTDALTQLGAETRLPASPEEAVLERVPNPQPGQTYVVRFTQPEFTSLCPLTGQPDFAHLVIDYVPGDWLVESKSLKLYLGSFRNHGAFHEDCTVGIGRRIAELLDPAWLRIGGYWYPRGGMPIDVFWQTGAPPAGLWLPDQGVPGYRGRG

SEQ ID NO: 48168 - protein, 153 aa, Paracoccus haeundaensis
  REGION 1..153: note = tr|A0A5C4R2B6|A0A5C4R2B6_9RHOB NADPH-dependent 7-cyano-7-deazaguanine reductase OS=Paracoccus haeundaensis OX=225362 GN=queF PE=3 SV=1
MSHYTDALTQLGSDTPLPQHPDQAVLERVPNPQPGQTYAVRFTQPEFTSLCPLTGQPDFAHLVIDYVPGDWLVESKSLKLFLGSFRNHGAFHEDCTVGIGRRIAELLQPAWLRIGGYWYPRGGMPIDVFWQTGAAPAGLWLPDQGVPTYRGRG

SEQ ID NO: 48169 - protein, 154 aa, Paracoccus halophilus
  REGION 1..154: note = tr|A0A099F3N4|A0A099F3N4_9RHOB NADPH-dependent 7-cyano-7-deazaguanine reductase OS=Paracoccus halophilus; OX = 376733 GN=queF PE=3 SV=1
MTDSIYSELKQLGAATTLPESPERAELERVRNPQADTAYNVRFTAPEFTSLCPMTGQPDFAHLVIDYVPGAWLVESKSLKLYLGSFRNHGAFHEDCTVRIGRRLADFLEPQWLRIGGYWYPRGGMPIDVFWQSGPMPASVWIPDQGVPPYRGRG

SEQ ID NO: 48170 - protein, 153 aa, unidentified
  source 1..153: note = Paracoccus hibiscisoli
  REGION 1..153: note = tr|A0A4U0QYP6|A0A4U0QYP6_9RHOB NADPH-dependent 7-cyano-7-deazaguanine reductase OS=Paracoccus hibiscisoli; OX = 2023261 GN=queF PE=3 SV=1
MSHYTDALTQLGADTPLPQSPEEAVLERVPNPQPGQTYAVRFTQPEFTSLCPLTGQPDFAHLVIDYVPGDWLVESKSLKLFLGSFRNHGAFHEDCTVGIGRRIADLLDPQWLRIGGYWYPRGGMPIDVFWQTGAVPAGLWLPDQGVPTYRGRG

SEQ ID NO: 48171 - protein, 153 aa, Paracoccus homiensis
  REGION 1..153: note = tr|A0A1H9YG47|A0A1H9YG47_9RHOB NADPH-dependent 7-cyano-7-deazaguanine reductase OS=Paracoccus homiensis; OX = 364199 GN=queF PE=3 SV=1
MSHYTDALTQLGAKTDLPDSPESAVLERVPNPQQGETYLVRFTQPEFTSLCPITGQPDFAHLVIDYVPGDWLVESKSLKLFLGSFRNHGAFHEDCTVGIGKRLVGEIAPVWLRIGGYWYPRGGMPIDVFWQTGAAPGNLWLPDQAVPGYRGRG

SEQ ID NO: 48172 - protein, 153 aa, Paracoccus isoporae
  REGION 1..153: note = tr|A0A1G7CBW3|A0A1G7CBW3_9RHOB NADPH-dependent 7-cyano-7-deazaguanine reductase OS=Paracoccus isoporae; OX = 591205 GN=queF PE=3 SV=1
MSHYTDGLTQLGQAAALPASPDEAVLERVPNPQPGEAYVVRFIQPEFTSLCPMTGQPDFAHLVIDYLPQDWLVESKSLKLFLGSFRNHGAFHEDCTVSIGKRLAETLAPQWLRIGGYWYPRGGMPIDVFWQTGAVPDGLWLPDQGVAPYRGRG

SEQ ID NO: 48173 - protein, 154 aa, unidentified
  source 1..154: note = Paracoccus laeviglucosivorans
  REGION 1..154: note = tr|A0A521B4V5|A0A521B4V5_9RHOB NADPH-dependent 7-cyano-7-deazaguanine reductase OS=Paracoccus laeviglucosivorans OX=1197861 GN=queF PE=3 SV=1
MTKSIYQNLTQLGGATVMPESPEKAVLERVTNPQADVSYNVRFTAPEFTSLCPMTGQPDFAHLVIDYVPGDWLVESKSLKLFLGSFRNHGAFHEDCTVSIARRLNDFLAPRWLRIGGYWYPRGGIPIDVFWQTGAMPDGVWIPDQGVPPYRGRG

SEQ ID NO: 48174 - protein, 154 aa, Paracoccus pantotrophus; identical to SEQ ID NO: 48164
  REGION 1..154: note = tr|A0A1K2F204|A0A1K2F204_PARPN NADPH-dependent 7-cyano-7-deazaguanine reductase OS=Paracoccus pantotrophus OX=82367 GN=queF PE=3 SV=1

SEQ ID NO: 48175 - protein, 154 aa, Paracoccus pantotrophus
  REGION 1..154: note = tr|A0A1I5IN03|A0A1I5IN03_PARPN NADPH-dependent 7-cyano-7-deazaguanine reductase OS=Paracoccus pantotrophus OX=82367 GN=queF PE=3 SV=1
MTETIYSGLKQLGGATRLPESPDKAELERVQNPQADVSYNVRFTAPEFTSLCPMTGQPDFAHLVIDYVPGDWLVESKSLKLYLGSFRNHGAFHEDCTVSIGRRLAGFLAPRWLRIGGYWYPRGGMPIDVFWQTGPVPEAVWIPDQGVPPYRGRG

SEQ ID NO: 48176 - protein, 153 aa, Paracoccus saliphilus
  REGION 1..153: note = tr|A0A1N7NQR5|A0A1N7NQR5_9RHOB NADPH-dependent 7-cyano-7-deazaguanine reductase OS=Paracoccus saliphilus; OX = 405559 GN=queF PE=3 SV=1
MSHYTDALTQLGASSELPQSPEEAVLERVPNPQPGEVYAVRFTQPEFTSLCPITGQPDFAHLVIDYVPGEWLVESKSLKLFLGSFRNHGAFHEDCTVGIGKRLVETLSPQWLRIGGYWYPRGGMPIDVFWQTGAAPSGLWLPDQGVPGYRGRG

SEQ ID NO: 48177 - protein, 161 aa, unidentified
  source 1..161: note = Paracoccus sanguinis
  REGION 1..161: note = tr|A0A1H2R0I8|A0A1H2R0I8_9RHOB NADPH-dependent 7-cyano-7-deazaguanine reductase OS=Paracoccus sanguinis; OX = 1545044 GN=queF PE=3 SV=1
MHRPTGTEMPHYTDSLTQLGRPAALPASPDEAVLERVPNPQPGALYAVRFTQPEFTSLCPLTGQPDFAHLVIDYVPGDWLVESKSLKLFLGSFRNHGAFHEDCTVGIGLRLVETLAPRWLRIGGYWYPRGGMPIDVFWQTGAPPEGLFLPDQGVPPYRGRG

SEQ ID NO: 48178 - protein, 153 aa, unidentified
  source 1..153: note = Paracoccus sediminis
  REGION 1..153: note = tr|A0A238X9D3|A0A238X9D3_9RHOB NADPH-dependent 7-cyano-7-deazaguanine reductase OS=Paracoccus sediminis; OX = 1214787 GN=queF PE=3 SV=1
MPHYTDALTQLGAATDLPASPDRAVLERVPNPQAGEVYAIRFTQPEFTSLCPMTGQPDFAHLVIDYVPGDWLVESKSLKLFLGSFRNHGAFHEDCTVGIGKRLAETISPQWLRIGGYWYPRGGMPIDVFWQTGAAPAGLWLPDQGVAGYRGRG

SEQ ID NO: 48179 - protein, 154 aa, Paracoccus seriniphilus
  REGION 1..154: note = tr|A0A239PUM1|A0A239PUM1_9RHOB NADPH-dependent 7-cyano-7-deazaguanine reductase OS=Paracoccus seriniphilus OX=184748 GN=queF PE=3 SV=1
MTKDIYRNLRQLGGETRIPASPAEAELERVPNPQADVAYNVRFTAPEFTSLCPMTGQPDFAHLVIDYVPGPWLVESKSLKLFLTSFRNHGAFHEDCTISIARRLADFLEPQWLRIGGYWYPRGGIPIDVFWQTGPMPEAVWIPDQGVPPYRGRG

SEQ ID NO: 48180 - protein, 153 aa, unidentified
  source 1..153: note = Paracoccus siganidrum
  REGION 1..153: note = tr|A0A419A5A7|A0A419A5A7_9RHOB NADPH-dependent 7-cyano-7-deazaguanine reductase OS=Paracoccus siganidrum; OX = 1276757 GN=queF PE=3 SV=1
MSHYTDALTQLGAKTTLPQSPEEAVLERVPNPQPGEAYVVRFTQPEFTSLCPITGQPDFAHLVIDYVPGDWLVESKSLKLYLGSFRNHGAFHEDCTVGIGKRLVGLLAPRWLRIGGYWYPRGGMPIDVFWQSGAVPEGLWLPEQGVAGYRGRG

SEQ ID NO: 48181 - protein, 153 aa, Paracoccus sp.
  REGION 1..153: note = tr|A0A3A3DHV8|A0A3A3DHV8_9RHOB NADPH-dependent 7-cyano-7-deazaguanine reductase OS=Paracoccus sp. JM45; OX = 2283626 GN=queF PE=3 SV=1
MSHYTDALTQLGANTTLPQSPEEAVLERVPNPQPDTLYAVRFTQPEFTSLCPITGQPDFAHLMIDYVPRDWLVESKSLKLFLGSFRNHGAFHEDCTVGIGKRIVDLLDPQWLRIGGYWYPRGGMPIDVFWQTAAAPAGLWLPDQAVPTYRGRG

SEQ ID NO: 48182 - protein, 153 aa, Paracoccus sp.
  REGION 1..153: note = tr|A0A2K9EM59|A0A2K9EM59_9RHOB NADPH-dependent 7-cyano-7-deazaguanine reductase OS=Paracoccus sp. BM15; OX = 1529068 GN=queF PE=3 SV=1
MSHYTDALTQLGQDTPLPQSPQEAVLERVPNPQGDTLYLVRFTQPEFTSLCPLTGQPDFAHLVIDYAPADWLVESKSLKLFLGSFRNHGAFHEDCTVSIGRRLVDLLAPQWLRIGGYWYPRGGMPIDVFWQTGPVPSGLWAPDQGVPGYRGRG

SEQ ID NO: 48183 - protein, 153 aa, unidentified
  source 1..153: note = Paracoccus tibetensis
  REGION 1..153: note = tr|A0A1G5IZ61|A0A1G5IZ61_9RHOB NADPH-dependent 7-cyano-7-deazaguanine reductase OS=Paracoccus tibetensis; OX = 336292 GN=queF PE=3 SV=1
MSHYTDTLTQLGNATSLPRSPEEAVLERVPNPQAGTAFVVRFTQPEFTSLCPLTGQPDFAHLVIDYVPGDWLVESKSLKLFLGSFRNHGAFHEDCTVGIAKRLVELLDPAWLRIGGYWYPRGGMPIDVFWQTGAAPAGVWVPDQGVAPYRGRG

SEQ ID NO: 48184 - protein, 154 aa, Paracoccus versutus
  REGION 1..154: note = tr|A0A3E0BQ92|A0A3E0BQ92_PARVE NADPH-dependent 7-cyano-7-deazaguanine reductase OS=Paracoccus versutus; OX = 34007 GN=queF PE=3 SV=1
MTETIYSGLKQLGGATRLPESPDQAELERVQNPQADVAYNVRFTVPEFTSLCPMTGQPDFAHLVIDYMPGDWLVESKSLKLYLGSFRNHGAFHEDCTVSIGRRLAGFLKPRWLRIGGYWYPRGGMPIDVFWQTGPMPEAVWIPDQGVPPYRGRG

SEQ ID NO: 48185 - protein, 154 aa, Paracoccus versutus
  REGION 1..154: note = tr|A0A369U2P4|A0A369U2P4_PARVE NADPH-dependent 7-cyano-7-deazaguanine reductase OS=Paracoccus versutus; OX = 34007 GN=queF PE=3 SV=1
MTETIYSGLKQLGGATRLPESPDQAELERVQNPQADVAYNVRFTAPEFTSLCPMTGQPDFAHLVIDYVPGDWLVESKSLKLYLGSFRNHGAFHEDCTVSIGRRLAGFLAPRWLRIGGYWYPRGGMPIDVFWQTGPMPEAVWIPDQGVPPYRGRG

SEQ ID NO: 48186 - protein, 153 aa, unidentified
  source 1..153: note = Paracoccus zhejiangensis
  REGION 1..153: note = tr|A0A2H5EXE4|A0A2H5EXE4_9RHOB NADPH-dependent 7-cyano-7-deazaguanine reductase OS=Paracoccus zhejiangensis OX=1077935 GN=queF PE=3 SV=1
MSHYTDALTQLGQPTRLPQSPEEAVLERVPNPQADTGYVVRFTQPEFTSLCPLTGQPDFAHLVIDYVPGDWLVESKSLKLFLGSFRNHGAFHEDCTVSIGRRLVDLLSPRWLRIGGYWYPRGGMPIDVFWQTGAAPEGIWIPDQGVPGYRGRG

SEQ ID NO: 48187 - protein, 152 aa, Paracraurococcus sp.
  REGION 1..152: note = tr|A0A4R4DR36|A0A4R4DR36_9PROT NADPH-dependent 7-cyano-7-deazaguanine reductase OS=Paracraurococcus sp. NE82 OX=2527868 GN=queF PE=3 SV=1
MTDTSGLTLLGRPAGLPESPDTAVLERVPNPHPGYRYLVRFAAPEFTSLCPLTGQPDFAHLVIDYVPQDWLVESKSLKLYLSAFRNHGAFHEACTVAIARRLVEVLSPAWLRIGGYWYPRGGIPIDVFYQTGPAPEGVWVPEQGVQPYRGRG

SEQ ID NO: 48188 - protein, 165 aa, unidentified
  source 1..165: note = Parageobacillus caldoxylosilyticus
  REGION 1..165: note = tr|A0A023DC10|A0A023DC10_9BACI NADPH-dependent 7-cyano-7-deazaguanine reductase OS=Parageobacillus caldoxylosilyticus NBRC 107762 OX=1220594 GN=queF PE=3 SV=1
MAGRKEEELKDLTLLGNQGTKYLFEYSPEVLEVFENKHPDRDYFVKFNCPEFTSLCPKTGQPDFATIYISYIPDKKCVESKSLKLYLFSFRNHGDFHEDCVNIIMNDLIKVMEPRYIEVWGKFTPRGGISIDPYCNWGRPGTKYEKMAEYRLMNHDLYPEKVDNR

SEQ ID NO: 48189 - protein, 165 aa, unidentified; identical to SEQ ID NO: 48188
  source 1..165: note = Parageobacillus caldoxylosilyticus
  REGION 1..165: note = tr|A0A150L503|A0A150L503_9BACI NADPH-dependent 7-cyano-7-deazaguanine reductase OS=Parageobacillus caldoxylosilyticus OX=81408 GN=queF PE=3 SV=1

SEQ ID NO: 48190 - protein, 165 aa, unidentified; identical to SEQ ID NO: 48188
  source 1..165: note = Parageobacillus genomosp.
  REGION 1..165: note = tr|A0A023CST9|A0A023CST9_9BACI NADPH-dependent 7-cyano-7-deazaguanine reductase OS=Parageobacillus genomosp. 1 OX=1295642 GN=queF PE=3 SV=1

SEQ ID NO: 48191 - protein, 166 aa, unidentified
  source 1..166: note = Parageobacillus thermantarcticus
  REGION 1..166: note = tr|A0A1I0T985|A0A1I0T985_9BACI NADPH-dependent 7-cyano-7-deazaguanine reductase OS=Parageobacillus thermantarcticus OX=186116 GN=queF PE=3 SV=1
MMAGRKEEELKNLTLLGNQGTKYLFEYSPEVLEVFENKHPDRDYFVKFNCPEFTTLCPKTGQPDFATIYISYIPDKKCVESKSLKLYLFSFRNHGDFHEDCVNIIMNDLIKVMEPRYIEVWGKFTPRGGISIDPYCNWGRPGTKYEKMAEYRLMNHDLYPEKVDNR

SEQ ID NO: 48192 - protein, 165 aa, unidentified
  source 1..165: note = Parageobacillus thermoglucosidasius
  REGION 1..165: note = tr|A0A178TY46|A0A178TY46_PARTM NADPH-dependent 7-cyano-7-deazaguanine reductase OS=Parageobacillus thermoglucosidasius OX=1426 GN=queF PE=3 SV=1
MAGRREEELKNLTLLGNQGTKYLFEYSPEVLEVFENKHPDRDYFVKFNCPEFTTLCPKTGQPDFATIYISYIPDKKCVESKSLKLYLFSFRNHGDFHEDCVNIIMNDLIKVMEPRYIEVWGKFTPRGGISIDPYCNWGRPGTKYEKMAEYRLMNHDLYPEKVDNR

SEQ ID NO: 48193 - protein, 166 aa, unidentified
  source 1..166: note = Parageobacillus thermoglucosidasius
  REGION 1..166: note = tr|A0A401XWI3|A0A401XWI3_PARTM NADPH-dependent 7-cyano-7-deazaguanine reductase OS=Parageobacillus thermoglucosidasius OX=1426 GN=queF PE=3 SV=1
MMAGRREEELKNLTLLGNQGTKYLFEYSPEVLEVFENKHPDRDYFVKFNCPEFTTLCPKTGQPDFATIYISYIPDKKCVESKSLKLYLFSFRNHGDFHEDCVNIIMNDLIKVMEPRYIEVWGKFTPRGGISIDPYCNWGRPGTKYEKMAEYRLMNHDLYPEKVDNR

SEQ ID NO: 48194 - protein, 114 aa, unidentified; identical to SEQ ID NO: 46131
  source 1..114: note = Parageobacillus toebii
  REGION 1..114: note = tr|A0A3M0F080|A0A3M0F080_9BACI NADPH-dependent 7-cyano-7-deazaguanine reductase OS=Parageobacillus toebii NBRC 107807 OX=1223503 GN=queF PE=3 SV=1

SEQ ID NO: 48195 - protein, 114 aa, unidentified; identical to SEQ ID NO: 46131
  source 1..114: note = Parageobacillus toebii
  REGION 1..114: note = tr|A0A150N658|A0A150N658_9BACI NADPH-dependent 7-cyano-7-deazaguanine reductase OS=Parageobacillus toebii; OX = 153151 GN=queF PE=3 SV=1

SEQ ID NO: 48196 - protein, 279 aa, unidentified
  source 1..279: note = Paraglaciecola agarilytica
  REGION 1..279: note = tr|K6Y378|K6Y378_9ALTE NADPH-dependent 7-cyano-7-deazaguanine reductase OS=Paraglaciecola agarilytica NO2 OX=1125747 GN=queF PE=3 SV=1
MQDKTLPSDVLSSLTLGKATQYKEHYSPDLLQGVPRSLNRDELNLGDTLPFKGVDRWNGYELSWLNLKGKPQVAILRCEVPCESVNLIESKSFKLYLNSFNQSKVESILHVQKMISKDLSACAGLPVNVQLYAREAFPGLHLGTLEAQCIDDLDITIDNYELEPSILRVEESEVQETLCSHLLKSNCLITNQPDWGSVLIRYQGRKIDQESVLRYLISFRQHNEFHEQCVERIFSDIMKFCKPQKLTVYARYTRRGGLDINPFRSNFETIYPELRLARQ

SEQ ID NO: 48197 - protein, 279 aa, unidentified
  source 1..279: note = Paraglaciecola arctica
  REGION 1..279: note = tr|K6YT01|K6YT01_9ALTE NADPH-dependent 7-cyano-7-deazaguanine reductase OS=Paraglaciecola arctica BSs20135 OX=493475 GN=queF PE=3 SV=1
MSEKIDKHTMLAGLSLGKATEYQEIYTPDLLQAVPRSMNRVELNLASELPFYGTDRWNGYELSWLNTKGKPQVAIMRCEVPASSPNLVESKSFKLYLNSFNQSQFDSLDSVTLALTKDLSQCAGEKVKVTLFKPAEFSQMQIASFDAVSIDDLDIEVKGYQLDPSNLTARGELIKETLTSDLLKSNCLITNQPDWGSVLIRYQGQQINHEGLLRYLISFRQHNEFHEQCVERIFCDIMENCKPNKLSVYARYTRRGGLDINPFRSNFEQIYPEVRLARQ

SEQ ID NO: 48198 - protein, 279 aa, unidentified
  source 1..279: note = Paraglaciecola hydrolytica
  REGION 1..279: note = tr|A0A135ZYV5|A0A135ZYV5_9ALTE NADPH-dependent 7-cyano-7-deazaguanine reductase OS=Paraglaciecola hydrolytica OX=1799789 GN=queF PE=3 SV=1
MDNQADKARILASLSLGKTTPYTETYSPELLQGVPRSLNRDDLNLADDLPFQGVDRWNGYELSWLNAKGKPQVAILQCEVPASSSNLIESKSFKLYLNSFNQSKFASLTQVQNIISQDLSACAKEPVKVIILSPQEFSSLTLSTLDALSLDELDIEVSEYQLNPEVLFSSDEWVEESLCSDLLKSNCLITNQPDWGSVFIRYQGNKIDHEALLRYLISFRQHNEFHEQCVERIFCDIMRYCSPNLLTVYARYTRRGGLDINPFRSNFESIYPEFRLARQ

SEQ ID NO: 48199 - protein, 279 aa, unidentified
  source 1..279: note = Paraglaciecola mesophila
  REGION 1..279: note = tr|K6Z3S2|K6Z3S2_9ALTE NADPH-dependent 7-cyano-7-deazaguanine reductase OS=Paraglaciecola mesophila KMM 241 OX=1128912 GN=queF PE=3 SV=1
MQDKSLPSDILSSLTLGKATQYKEHYSPDLLQGVPRSLNRDELNLGDALPFKGVDRWNGYELSWLNLKGKPEVAILRCEIPCESVNLIESKSFKLYLNSFNQSKIESILHVQKMISKDLSACAGLPVNVELFARETFPGLQLGTLEAQCIDDLDISIDNYDLEPSTLKVEEEQVQETLCSHLLKSNCLITNQPDWGSVLIRYHGRKIEQESVLRYLISFRQHNEFHEQCVERIFSDIMRYCEPQKLTVYARYTRRGGLDINPFRSNFESIYPELRLARQ

SEQ ID NO: 48200 - protein, 279 aa, unidentified
  source 1..279: note = Paraglaciecola polaris
  REGION 1..279: note = tr|K6ZXM9|K6ZXM9_9ALTE NADPH-dependent 7-cyano-7-deazaguanine reductase OS=Paraglaciecola polaris LMG 21857 OX=1129793 GN=queF PE=3 SV=1
MQDKSLPSDILSTLTLGKATLYKEYYSPELLQGVPRSLNRDELNLGDSLPFNGVDRWNGYELSWLNLKGKPQVAILRCEVPCDSVNLVESKSFKLYLNSFNQSKIESIHHVQKMISEDLSACAGLPVNVQLFARKAFPSLKLGTLEAQCIDDLDISIDNYALQPSILTVEEQDVQETLCSHLLKSNCLITNQPDWGSVLIRYQGRKIDQENLLRYLISFRQHNEFHEQCVERIFSDIMRFCKPQKLTVYARYTRRGGLDINPFRSNFESIYPELRLARQ

SEQ ID NO: 48201 - protein, 279 aa, unidentified
  source 1..279: note = Paraglaciecola psychrophila
  REGION 1..279: note = tr|K7A0N3|K7A0N3_9ALTE NADPH-dependent 7-cyano-7-deazaguanine reductase OS=Paraglaciecola psychrophila 170 OX=1129794 GN=queF PE=3 SV=1
MSEKIDKHTMLAGLSLGKATEYREIYAPDLLQAVPRSMNRVELNLTAELPFSGTDRWNGYELSWLNSKGKPLVAIMRCEVPVSSPNLIESKSFKLYLNSFNQSHFDCIESVVETLTADLSHCAGEKVKVMLFKPAEFAHMQISSFDAVSIDDQDIEVKDYQLAPSILHASGEQVEESLTSDLLKSNCLITNQPDWGSVFVRYQGQQINHEGLLRYLISFRQHNEFHEQCVERIFCDIMAHCKPNKLSVYARYTRRGGLDINPFRSNFEQIYPEVRLARQ

SEQ ID NO: 48202 - protein, 279 aa, unidentified
  source 1..279: note = Paraglaciecola sp.
  REGION 1..279: note = tr|A0A2N1DH99|A0A2N1DH99_9ALTE NADPH-dependent 7-cyano-7-deazaguanine reductase OS=Paraglaciecola sp. MB-3u-78 OX=2058332 GN=queF PE=3 SV=1
MSETFDKQATLAGLSLGKATEYREIYAPNLLQAVPRSMNRVELNLTAELPFYGTDRWNGYELSWLNSKGKPQVAIMRCEVPVSSPNLVESKSFKLYLNSFNQSHFDSIELVAEALTKDLSQCAGEKVEVILFKPAAFSQMQISSFDAMSIDDLDIEVKDYQLEPSNLSSGGKQIEETLTSDLLKSNCLITNQPDWGSVFIRYQGQQINHEGLLRYLISFRQHNEFHEQCVERIFCDIMAHCKPNKLSVYARYTRRGGLDINPFRSNFEQIYPEVRLARQ

SEQ ID NO: 48203 - protein, 272 aa, unidentified
  source 1..272: note = Parahaliea aestuarii
  REGION 1..272: note = tr|A0A5C9A7J6|A0A5C9A7J6_9GAMM NADPH-dependent 7-cyano-7-deazaguanine reductase QueF OS=Parahaliea aestuarii OX=1852021 GN=queF PE=4 SV=1
MADIDDKGLLLGRQVPVSEQYAPELLYPIPRCLARDNLGIDGGALPFRGVDLWHAYELSWLDETGRPVSRVGRFTIPATSANLVESKSFKLYLNSLNQERLGDDATACQRICADISAAAGAEVSLELFAPDDPALAGKALPGACLDDQPATWRGGEPDLQQLVPVAGQGMEVHTHLLRSLCPVTGQPDWASVWICTEGGSVEPLGLLEYLLAYRNHQEFHEQCVERIFRDLQAACKPSGLHIQAFYTRRGGLDITPFRTTGKRSPLPRMNRQ

SEQ ID NO: 48204 - protein, 272 aa, unidentified
  source 1..272: note = Parahaliea aestuarii
  REGION 1..272: note = tr|A0A5C8ZT74|A0A5C8ZT74_9GAMM NADPH-dependent 7-cyano-7-deazaguanine reductase OS=Parahaliea aestuarii; OX = 1852021 GN=queF PE=3 SV=1
MADTNDEGLLLGRQVPVSEHYAPELLYPIPRRLARDALGIDASALPFEGVDLWHAYELSWLDGQGRPVSRVGRFSVPAHSANLVESKSFKLYLNSLNQESFESDDEAVQRICTDLSAAAGAEVGLTLFAPDDPGLAGQALPGACLDDLPGRWRAGEPDASQLAQGRAGAMEVHTHLLRSLCPVTGQPDWASVWIAMTGASVDGVSLLNYLLAYRNHQEFHEQCVERIFLDLQSACAPAELHVQAFYTRRGGLDITPFRSTGGRLPLPRMNRQ

SEQ ID NO: 48205 - protein, 276 aa, Paralcaligenes ureilyticus
  REGION 1..276: note = tr|A0A4R3LXL4|A0A4R3LXL4_9BURK NADPH-dependent 7-cyano-7-deazaguanine reductase OS=Paralcaligenes ureilyticus OX=627131 GN=queF PE=3 SV=1
MTDPILANAPLGHDAPYPTAYDPTVLFPIARQNNRQTLALQPLPDWHGADIWNAYELSWLNTRGKPVVATGCFVFSQASPCIIESKSFKLYLNSFNESRYESVESVQRHMEHDLSHAAGAPVDVRLNPLTIGHTENYRPLSGINIDGIDVGIDRYTPAPELLRCVPGATAVSEVLMSDLLKSNCPVTGQPDWGSLQIRYRGPQIDRAALLKYIISLRHHNEFHEHCVERMYCDIWQACRPAELHVYARYTRRGGLDINPWRASVAANVDNRRTVRQ

SEQ ID NO: 48206 - protein, 165 aa, Paraliobacillus ryukyuensis
  REGION 1..165: note = tr|A0A366EDA9|A0A366EDA9_9BACI NADPH-dependent 7-cyano-7-deazaguanine reductase OS=Paraliobacillus ryukyuensis OX=200904 GN=queF PE=3 SV=1
MAGRRDDELQDVSLLGSQGTEYRFDYTPEVLETFDNKHPSRDYFVKFNCPEFTTLCPKTRQPDFGTVYISYIPDVKMVESKSLKLYLFSFRNHGDFHEDSMNIIMNDLIELMDPCYIEVWGKFTPRGGISIDPYCNYGKPGTKYEQMADHRLMNHDMYPEKIDNR

SEQ ID NO: 48207 - protein, 165 aa, Paraliobacillus sp.
  REGION 1..165: note = tr|A0A0U1KJ74|A0A0U1KJ74_9BACI NADPH-dependent 7-cyano-7-deazaguanine reductase OS=Paraliobacillus sp. PM-2 OX=1462524 GN=queF PE=3 SV=1
MAGRKDEDLQDLSLLGSQGTDYHFDYTPEVLETFDNKHPNREYFVKFNCPEFTTLCPKTRQPDFGAVYISYIPGEKMVESKSLKLYLFSFRNHGDFHEDSMNIIMNDLIDLMDPQYIEVWGKFTPRGGISIDPYCNYGKPGTKFEQMATHRLMNHDMYPEKIDNR

SEQ ID NO: 48208 - protein, 153 aa, unidentified
  source 1..153: note = Paramesorhizobium deserti
  REGION 1..153: note = tr|A0A135HZI0|A0A135HZI0_9RHIZ NADPH-dependent 7-cyano-7-deazaguanine reductase OS=Paramesorhizobium deserti OX=1494590 GN=queF PE=3 SV=1
MTDVKGLTQLGAETRIPASPEEAVLETVPYTRGEGPAAIVRFTCPEFTSLCPMTGQPDFAHIVVDYAPDARLVESKSLKLFLFSFRNHGAFHEDCTLQIGRRIVEATKPLWLRIGGYWYPRGGIPIDVFWQTGTPPEGAWVPETGVAPYRGRG

SEQ ID NO: 48209 - protein, 156 aa, unidentified
  source 1..156: note = Paramuribaculum intestinale
  REGION 1..156: note = tr|A0A2V1IZ18|A0A2V1IZ18_9BACT NADPH-dependent 7-cyano-7-deazaguanine reductase OS=Paramuribaculum intestinale OX=2094151 GN=queF PE=3 SV=1
MDQNRHDDNLSLLGQSKATQYPTDYAPQLLESFVNRHPDREYLVTLRCPEFTSLCPITGQPDFAQIIINYIPRQRMVESKSLKLYLFSFRNHGDFHEDCVNIILNDLVRLMDPRYIEVKGIFTPRGGIAIHPFASYADDEHQELARQRMLAAMADK

SEQ ID NO: 48210 - protein, 272 aa, Paraperlucidibaca baekdonensis
  REGION 1..272: note = tr|A0A3E0H2S2|A0A3E0H2S2_9GAMM NADPH-dependent 7-cyano-7-deazaguanine reductase OS=Paraperlucidibaca baekdonensis OX=748120 GN=queF PE=3 SV=1
MDLHTLTQLGQATDYPDSPCAELLQPIPRQFSRQALGIDDDALPFHGVDLWTHYELSWLDPNGKPCVAIGEIRVPANSANIIESKSLKLYFNGLNFTHFANPQAFVKRVETDLSVVAEALVTLTLLPAGVATQLHAFPGVCLDDLPLITETYTPDPSLLKTREGVREQALWHSHLLRTNCPVTDQPDWASVIIHAVGPALDPESLLAYLVSFRRHADFHEQCVERIFHDLMQYAKIEKLTVYARYTRRGGLDINPFRSNFESLTDSLRMARQ

SEQ ID NO: 48211 - protein, 284 aa, unidentified
  source 1..284: note = Paraphotobacterium marinum
  REGION 1..284: note = tr|A0A220VBQ7|A0A220VBQ7_9GAMM NADPH-dependent 7-cyano-7-deazaguanine reductase OS=Paraphotobacterium marinum OX=1755811 GN=queF PE=3 SV=1
MSKRSTDSGTLHLILGKSTKYPSEYNNTLLKGVSRDLNRATLGLTKNCIPFSGFDLWTLYELSWLNMNGLPQVAIGEVRVSSDSDFIIESKSFKLYLNSFNQTNFKSWQEVANTMQKDLSKVANSSVDVTLLPLEEFNNQFIGFFSGICLEKVFSDLSIEQYQYNPKILTNAKGSEIVEEDLYSNLLKSNCLITNQPDWGSIKISYKGPQICKETLLKYIISLRTHNEFHEQCIERIFLDILQYCKPELLTVYARYTRRGGLDINPYRTNQGKVPSENVRFARQ

SEQ ID NO: 48212 - protein, 275 aa, unidentified
  source 1..275: note = Paraphotobacterium marinum
  REGION 1..275: note = tr|A0A220VFW1|A0A220VFW1_9GAMM NADPH-dependent 7-cyano-7-deazaguanine reductase OS=Paraphotobacterium marinum OX=1755811 GN=queF PE=3 SV=1
MLLDNSELGKKSAYKDQYDPSLLFPIPRQTKRDEIHISKDYQFEGCDIWNAFEVSWLNSKGKPVVRIMQFRIDANSLNIIESKSFKLYLNSFNNTKFANEKEVLNTLQKDLELNVKGVVSVKSSHVDKFDDVHSIYQINDTCIDDLDIEIDDYEINPSKLKIDSNTITSETITSHLLKSNCLITNQPDWGSLIIKYEGPKINREGLLKYIISFRNHNEFHEQCVERIYMDIMKEIKPQKLLVYARYTRRGGLDINPLRANYKYDSNLEQMRLVRQ

SEQ ID NO: 48213 - protein, 155 aa, Paraprevotella clara
  REGION 1..155: note = tr|R5NWK6|R5NWK6_9BACT NADPH-dependent 7-cyano-7-deazaguanine reductase OS=Paraprevotella clara CAG:116 OX=1263095 GN=queF PE=3 SV=1
MSSEREKEGLQSLGKKTEYRQDYAPEVLEAFENKHPDNDYWVRFNCPEFTSLCPITGQPDFAEIRISYIPDRRMVESKSLKLYLFSFRNHGDFHEDCVNKIMKDLIRLMDPKYIEVTGIFTPRGGISIYPYANYGRKGTKFEQMAEFRMMNHDLK

SEQ ID NO: 48214 - protein, 155 aa, Paraprevotella clara; identical to SEQ ID NO: 48213
  REGION 1..155: note = tr|G5SQF7|G5SQF7_9BACT NADPH-dependent 7-cyano-7-deazaguanine reductase OS=Paraprevotella clara YIT 11840 OX=762968 GN=queF PE=3 SV=1

SEQ ID NO: 48215 - protein, 155 aa, Paraprevotella xylaniphila
  REGION 1..155: note = tr|F3QSJ4|F3QSJ4_9BACT NADPH-dependent 7-cyano-7-deazaguanine reductase OS=Paraprevotella xylaniphila YIT 11841 OX=762982 GN=queF PE=3 SV=1
MSSEREKEGLQSLGKKTEYRQDYAPEVLEAFENKHPGNDYWVRFNCPEFTSLCPITGQPDFAEIRISYIPDRRMVESKSLKLYLFSFRNHGDFHEDCVNKIMKDLIRLMDPKYIEVTGIFTPRGGISIYPYANYGRKGTKFEQMAEFRMMNHDLK

SEQ ID NO: 48216 - protein, 279 aa, unidentified
  source 1..279: note = Pararheinheimera mesophila
  REGION 1..279: note = tr|A0A3P3QQQ7|A0A3P3QQQ7_9GAMM NADPH-dependent 7-cyano-7-deazaguanine reductase OS=Pararheinheimera mesophila OX=1547515 GN=queF PE=3 SV=1
MTKIQTEQLSGLTLGQVTAYIDHYSPELLQAVPRTLGRQAIGLGAELPFVGQDTWHGYELSWLTPKGKPMVALATFVVPFDTPNLIESKSFKLYLNSLNQSKFADISQLYRTMKADLSACAGGPVQVTLHNVNELTAFQPTWLPGRCIDDLDIEVEHYDYKPELLQLNPSGALVEEKLHSHLLKSNCLITSQPDWASLYIHYKGKAIDHASLLKYLISFRSHNEFHEQCVERIYLDVWKLCQPEFLMVYARYTRRGGLDINPLRSSEPCDQPNVRLTRQ

SEQ ID NO: 48217 - protein, 279 aa, unidentified
  source 1..279: note = Pararheinheimera tangshanensis
  REGION 1..279: note = tr|A0A5C8LQA5|A0A5C8LQA5_9GAMM NADPH-dependent 7-cyano-7-deazaguanine reductase OS=Pararheinheimera tangshanensis OX=400153 GN=queF PE=3 SV=1
MTKIQTEQLAGLTLGQATAYIDHYSPELLQAVPRTLGRQAIGLGAELPFVGQDTWHGYELSWLTPKGKPMVALATFVVPFDTPNLIESKSFKLYLNSLNQSKFADISQLYRTMKADLSACAGGPVQVTLHNVNELTAFQPTWLPGRCIDDLDIEVEHYDYKPELLQLKPTGALVDEKLHSHLLKSNCLITSQPDWASVYIHYKGKAIDHASLLKYLISFRSHNEFHEQCVERIYLDLWKLCEPEFLMVYARYTRRGGLDINPMRSSEACDQPNLRLTRQ

SEQ ID NO: 48218 - protein, 154 aa, unidentified
  source 1..154: note = Pararhizobium polonicum
  REGION 1..154: note = tr|A0A1C7NW47|A0A1C7NW47_9RHIZ NADPH-dependent 7-cyano-7-deazaguanine reductase OS=Pararhizobium polonicum OX=1612624 GN=queF PE=3 SV=1
MTKTDVSGLSQLGQNVAAPQTPEEAVLERVPTSHAGTDFVVRFTAPEFTSLCPMTGQPDFAHIVIDYVPDGWLVESKSLKLYLHSFRNHGAFHEDCTIDIAKRLVDLLAPKWLRIGAYWYPRGGIPIDVFWQTGAPPEGLWLPDQGVQPYRGRG

SEQ ID NO: 48219 - protein, 151 aa, unidentified
  source 1..151: note = Pararhizobium sp.
  REGION 1..151: note = tr|A0A506TYY3|A0A506TYY3_9RHIZ NADPH-dependent 7-cyano-7-deazaguanine reductase OS=Pararhizobium sp. BGMRC6574 OX=2590452 GN=queF PE=3 SV=1
MSEDGATMLGRASAIPASPEEAVLDRVRDPHAAIRYAVRFVAPEFTSLCPVTGQPDFAHLVIDYVPREWLVESKSLKLYLASFRNHGAFHEECTVSIARRLVDRLEPEWLRIGGYWYPRGGIPIDVFYQTGPAPEGIWIPDQGVPPYRGRG

SEQ ID NO: 48220 - protein, 162 aa, unidentified
  source 1..162: note = Parasaccharibacter apium
  REGION 1..162: note = tr|A0A2S4PE07|A0A2S4PE07_9PROT NADPH-dependent 7-cyano-7-deazaguanine reductase OS=Parasaccharibacter apium OX=1510841 GN=queF PE=3 SV=1
MTTHPPKGPTAPGTESLSQLGRQTVQPESPETAELERVPAPHKGRRYVVRFTAPEFTSLCPVTGQPDFAHIVIDYIPRDWIVESKSLKLYLTSFRNHGAFHEDCSVTIATRLVELLDPEWLRIGAYWYPRGGMPIDVFWQTGPAPDDVWIPAQDVPGYRGRG

SEQ ID NO: 48221 - protein, 158 aa, unidentified
  source 1..158: note = Parasaccharibacter apium
  REGION 1..158: note = tr|A0A2C6J174|A0A2C6J174_9PROT NADPH-dependent 7-cyano-7-deazaguanine reductase OS=Parasaccharibacter apium OX=1510841 GN=queF PE=3 SV=1
MSHHPTAPGTDALSQLGRQTIQPESPDKAELERVPAPHKGRRYVVRFTAPEFTSLCPVTGQPDFAHIVIDYIPRNWIVESKSLKLYLTSFRNHGAFHEDCSVTIATRLVELLEPEWLRIGAYWYPRGGMPIDVFWQTGPAPTEVWIPPQDVPGYRGRG

SEQ ID NO: 48222 - protein, 285 aa, unidentified
  source 1..285: note = Parashewanella curva
  REGION 1..285: note = tr|A0A3L8PSS0|A0A3L8PSS0_9GAMM NADPH-dependent 7-cyano-7-deazaguanine reductase OS=Parashewanella curva; OX = 2338552 GN=queF PE=3 SV=1
MTQNHDPYSEAKELKGLTLGQPAQYEAIYNPDVLQAVPRKLNRDAIELTTELPFHGVDVWTGYELSWLNAKGKPMVAIVEFYVDYQSENLIESKSFKLYLNTFNLTRFDSIDDVEKAMIRDLSECAQGKVEVKIIEPKQFGNQRIASLPGTCIDEIDIEVDDYQFNAKYLENCTDEGQIVAETLNSNLLKSNCLITTQPDWGSLMIRYQGPKIDREKLLRYLISFREHNEFHEQCVERIFMDLKRFCNCSKLTVFARYTRRGGLDINPYRSDFEQLNDNVRLARQ

SEQ ID NO: 48223 - protein, 296 aa, unidentified
  source 1..296: note = Parashewanella spongiae
  REGION 1..296: note = tr|A0A3A6TYB4|A0A3A6TYB4_9GAMM NADPH-dependent 7-cyano-7-deazaguanine reductase OS=Parashewanella spongiae OX=342950 GN=queF PE=3 SV=1
MWVYFDTETVLMTQNHDPYNEAEALAELTLGKATGYDEVYNPNLLQGVPRKLNRDAISLTSTLPFHGFDIWTGYELSWLNSKGKPMVAIVEVQLSHTSENLIESKSFKLYLNSFNQTKFDSVEQLQQMLKQDLSLCSNGAVTVNIIEPKHFSTQRVIEFPGTCIDNLDIEVNDYSFNPDYLVDGTDDKQIVAETLNSNLLKSNCLITSQPDWGSVMIRYQGPKINREKLLRYLISFRQHNEFHEQCVERIFVDLKKYCHCSKLTVYARYTRRGGLDINPFRSDFEQPSINLRLARQ

SEQ ID NO: 48224 - protein, 148 aa, unidentified
  source 1..148: note = Parasphingopyxis lamellibrachiae
  REGION 1..148: note = tr|A0A3D9FEN6|A0A3D9FEN6_9SPHN NADPH-dependent 7-cyano-7-deazaguanine reductase OS=Parasphingopyxis lamellibrachiae OX=680125 GN=queF PE=3 SV=1
MDAKHLGKSSSLPSSPEDASLDYVPNPRTGELYLVRFAAPEFTSLCPVTAQPDFAHLVIDYAPGQTIVESKSLKLFLGSFRNHQAFHEDCTVGIGKRLFEEMQPQWLRIGGYWYPRGGIPIDVFWQSGTPPEGLWLPDQGVPPYRGRG

SEQ ID NO: 48225 - protein, 139 aa, Parasutterella excrementihominis
  REGION 1..139: note = tr|F3QM03|F3QM03_9BURK NADPH-dependent 7-cyano-7-deazaguanine reductase OS=Parasutterella excrementihominis YIT 11859 OX=762966 GN=queF PE=3 SV=1
MSTAPCKNLETFPNPQPNRDYLIHIEIPEFTSLCPLTGQPDFATLLLDYIPDQKNVELKALKLYMWSYRQEGAFHEAITNKILDDLVAATSPRFIRLKAKWWVRGGIYTTVVAEYRKEGWTPVKPVELPEFESNDPTRG

SEQ ID NO: 48226 - protein, 135 aa, unidentified
  source 1..135: note = Parcubacteria group
  REGION 1..135: note = tr|A0A554L9H6|A0A554L9H6_9BACT NADPH-dependent 7-cyano-7-deazaguanine reductase OS=Parcubacteria group bacterium Gr01-1014_3 OX=2017173 GN=G01um10143_54 PE=3 SV=1
MAEWSDRSILRALPNPSTAGYEIKIKNPELTFLGVKNQPDFANVFLTVYPDKHIIELRSLKLYFQQFRDKVVSYERLVNVIYDDLVEVYKPTRLRIVMVLRPRGGISSRLTIDSDWSARGGKEQFKDWVGQADEW

SEQ ID NO: 48227 - protein, 275 aa, unidentified
  source 1..275: note = Parendozoicomonas haliclonae
  REGION 1..275: note = tr|A0A1X7APT6|A0A1X7APT6_9GAMM NADPH-dependent 7-cyano-7-deazaguanine reductase OS=Parendozoicomonas haliclonae OX=1960125 GN=queF PE=3 SV=1
MSNTVNDSPLGRHSEYKSEYDASLLFPIPRAPKWEALALDSSNLPFTGTDTWNGPELSWLNEKGKPVVMGGAFILPCHSPNIIESKSFKLYLNSFNQTRFGSPEQVQAIMEKDLSAAAGAPVKVALYTLDELTGQGLHHIAGDCIDDLDVTIDTYTLETGFLAANTDAVMTETLYSHLLKSNCPVTGQPDWGTLVIEYTGPQIDREGLLKYLCSFRQHQDFHEQCVERIFMDLKRLCGAEQLTVYARYVRRGGLDINPWRSDCGKVVDNRRLARQ

SEQ ID NO: 48228 - protein, 196 aa, unidentified
  source 1..196: note = Parvibacter caecicola
  REGION 1..196: note = tr|A0A3N0AE08|A0A3N0AE08_9ACTN NADPH-dependent 7-cyano-7-deazaguanine reductase OS=Parvibacter caecicola; OX = 747645 GN=queF PE=3 SV=1
MKAAEGAGRAAAVSAAGTAPSVSAKPSAPLAAEGFAAREDEGLTKLGSQGTQYPCDYDSSVLETFVNKHQDNDYFVKFNCPEFTSLCPITGQPDFATIYISYVPDVRMVESKSLKLYLFSFRNHGDFHEDCMNIIMKDLIALMDPKYIEVWGKFTPRGGISIDPYCNYGRPGTKWEEVAWQRLSQHDLYPEKVDNR

SEQ ID NO: 48229 - protein, 188 aa, unidentified
  source 1..188: note = Parvibacter caecicola
  REGION 1..188: note = tr|A0A4T9T7Z2|A0A4T9T7Z2_9ACTN NADPH-dependent 7-cyano-7-deazaguanine reductase OS=Parvibacter caecicola; OX = 747645 GN=queF PE=3 SV=1
MKTDEAPKATATIVAAEPSAPSPVEAVSSREGEGLTQLGSQGTRYSADYDPDVLETFVNKHQDNDYFVKFNCPEFTSLCPITGQPDFATIYISYVPDVRMVESKSLKLYLFSFRNHGDFHEDCMNIIMKDLIALMDPKYIEVWGKFTPRGGISIDPYCNYGRPGTKWEEVAWQRLSQHDLYPEKVDNR

SEQ ID NO: 48230 - protein, 154 aa, Parvibaculum lavamentivorans
  REGION 1..154: note = sp|A7HXX4|QUEF_PARL1 NADPH-dependent 7-cyano-7-deazaguanine reductase OS=Parvibaculum lavamentivorans (strain DS-1 / DSM 13023 / NCIMB 13966); OX = 402881 GN=queF PE=3SV=1
MAKKPVKDLKQLGHATPVPASPEEATLERVPNPHPDANYVARFTVPEFTSLCPVTGQPDFAHLVIDYVPGKWLIESKSLKLYLQSFRNHGAFHEDCTLAIGKRLAGTLAPKWLRIGGYWYPRGGIPIDVFWQKGKLPAGVWVPDQGVAPYRGRG

SEQ ID NO: 48231 - protein, 155 aa, Parvibaculum sp.
  REGION 1..155: note = tr|A0A2D4VFU5|A0A2D4VFU5_9RHIZ NADPH-dependent 7-cyano-7-deazaguanine reductase OS=Parvibaculum sp.; OX = 2024848 GN=queF PE=3 SV=1
MSKKNDPHVVTQLGQNVAPAASPEDAQLERVPNPHPDTDYIARFTAPEFTSLCPVTGQPDFAHLVIDYAPGKWLVESKSLKLYFQSFRNHGAFHEDCTVAIGKRLNTLLKPKWLRIGGYWYPRGGIPIDVFWQTGKLPEGVWVPDQGVQPYRGRG

SEQ ID NO: 48232 - protein, 158 aa, Parvibaculum sp.
  REGION 1..158: note = tr|A0A2E1EET3|A0A2E1EET3_9RHIZ NADPH-dependent 7-cyano-7-deazaguanine reductase OS=Parvibaculum sp.; OX = 2024848 GN=queF PE=3 SV=1
MAKSPKKPGAGNLTQLGTATPVPASPEEAKLERVPNPHADTNYVARFTVPEFTSICPVTGQPDFAHLVIDYVPGKWLVESKSLKLYLQSFRNHGAFHEDCTVAIGKRLASLLAPKWIRIGGYWYPRGGIPIDVFWQKGKLPAGVWAPDQGVASYRGRG

SEQ ID NO: 48233 - protein, 151 aa, unidentified
  source 1..151: note = Parvibium lacunae
  REGION 1..151: note = tr|A0A368L7M6|A0A368L7M6_9BURK NADPH-dependent 7-cyano-7-deazaguanine reductase OS=Parvibium lacunae; OX = 1888893 GN=queF PE=3 SV=1
MTDTTATFTPPTPKHRPSKQLDTFPNPNPERDYHIHMEIPEFTCLCPLTGQPDFATLILDYIPDQKNVELKSLKFYMWSYRNEGAFHEAVTNQILTDLVAATAPRFMRLTAKWYVRGGIFTNVVAEHRQAGWAPLPHIEFSQFAPQSNTRG

SEQ ID NO: 48234 - protein, 152 aa, Parvularcula bermudensis
  REGION 1..152: note = tr|E0TBU2|E0TBU2_PARBH NADPH-dependent 7-cyano-7-deazaguanine reductase OS=Parvularcula bermudensis (strain ATCC BAA-594 / HTCC2503 / KCTC 12087); OX = 314260 GN=queF P E=3 SV=1
MTDVPSPQFLGQPSAAPSHPDAARLDPVPNPHPDALYLTRFVVPEFTSLCPVTGQPDFAHLVIDYAPEAHLVESKSLKLLMTSYRNHGAFHEDCTVDIAKRIVAAIAPRWLRISGYWYPRGGIPIDVVYQTGPPPSALYVPETGVPPYRGRG

SEQ ID NO: 48235 - protein, 171 aa, Parvularcula sp.
  REGION 1..171: note = tr|A0A357KZX6|A0A357KZX6_9PROT NADPH-dependent 7-cyano-7-deazaguanine reductase OS=Parvularcula sp.; OX = 1979207 GN=queF PE=3 SV=1
MNVPVRNTSRKKQRPAKAKQDGALSLSQLGRATAAPASPEAAVLETVPNPQVGVLYLARFTAPEFTSLCPVTGQPDFAHLIIDYAPAKKLIESKSLKLYLGSFRNHGAFHEDCTVAIARRIVAAAQPHWLRIAGYWYPRGGIPIDIFYQTGAAPKGLWVPDTGVPAYRGRG

SEQ ID NO: 48236 - protein, 171 aa, Parvularcula sp.
  REGION 1..171: note = tr|A0A355BZA0|A0A355BZA0_9PROT NADPH-dependent 7-cyano-7-deazaguanine reductase OS=Parvularcula sp.; OX = 1979207 GN=queF PE=3 SV=1
MNVPVRNTRRKKQRPAKAKQDGALSLSQLGRATAAPASPEAAVLETVPNPQVGVLYLARFTAPEFTSLCPVTGQPDFAHLIIDYAPAKKLIESKSLKLYLGSFRNHGAFHEDCTVAIARRIVAAAQPHWLRIAGYWYPRGGIPIDIFYQTGAAPKGLWVPDTGVPAYRGRG

SEQ ID NO: 48237 - protein, 162 aa, unidentified
  source 1..162: note = Parvularculaceae bacterium
  REGION 1..162: note = tr|A0A520R2J3|A0A520R2J3_9PROT NADPH-dependent 7-cyano-7-deazaguanine reductase OS=Parvularculaceae bacterium OX=2510335 GN=queF PE=3 SV=1
MNDTRSSDAAQPAATGLTRLGGPGDLPARPEDAVLETAANPHQDTMYLARFAAPEFTSICPVTGQPDFAHLVIDYAPKELIIESKSFKLFLGSFRNHGAFHEDCTVMIAKRLVAAAAPHWLRIAGFWYPRGGIPIDVFYQTGAAPAGLWVPDPGVDAYRGRG

SEQ ID NO: 48238 - protein, 279 aa, Pasteurella aerogenes
  REGION 1..279: note = tr|A0A448K1K0|A0A448K1K0_PASAE NADPH-dependent 7-cyano-7-deazaguanine reductase OS=Pasteurella aerogenes; OX = 749 GN=queF PE=3 SV=1
MHYHDQSLQSLTLGKQTKYAENYDRTLLQPVPRSLNRDNLGITAQQPFTFGADIWTAYEISWLNVKGVPQVAIADVEIDCTSLNLIESKSFKLYLNSFNQSKFSSFDEVCRILQQDLQQCAQGEVKVRLNSLANYHHTPIASFAGDCIDEQDIEVVDYQFNPQLLQHCTGENQVDEVLVSHLLKSNCLITQQPDWGSIQIHYVGKQIDREKLLRYLISYRQHNEFHEQCVERIFCDLMQFAKPEKLTVYARYTRRGGLDINPFRSNFEPIPLNQRLARQ

SEQ ID NO: 48239 - protein, 279 aa, Pasteurella bettyae
  REGION 1..279: note = tr|I3DII3|I3DII3_9PAST NADPH-dependent 7-cyano-7-deazaguanine reductase OS=Pasteurella bettyae CCUG 2042 OX=1095749 GN=queF PE=3 SV=1
MDYQDSSLKKLKLGQKTEYFSNYDRSLLQPVPRALNRDGLGITAHQPFTIGADIWTAYEISWLNPKGLPQVAIADVKIDYRSINLIESKSFKLYLNSFNQTKFESFEQLQSIMQKDLTDCAQGEVTVQLNKLSDYNKQHIQHLDGEYIDEQDIEINNYDFNANLLKNCTKNISVEETLVSQLLKSNCLITNQPDWGTIQIHYIGNQIDREKLLRYLVSFRQHNEFHEQCVERIFCDIMKFAHPEKLTVYARYTRRGGLDINPFRSNFESVPNNQRLARQ

SEQ ID NO: 48240 - protein, 275 aa, unidentified
  source 1..275: note = Pasteurella caecimuris
  REGION 1..275: note = tr|A0A4S2EBC8|A0A4S2EBC8_9PAST NADPH-dependent 7-cyano-7-deazaguanine reductase OS=Pasteurella caecimuris; OX = 1796644 GN=queF PE=3 SV=1
MNKLTSLKLGQKTEYASEYDRTLLQSVPRALNRDDLGITETQPFTIGADIWTAYEISWLNEKGVPQVAIADIYLDQQSQNLIESKSFKLYLNSFNQSKFTDFQQVAQVMQKDLTECAQGEVKVRLNPLSFYQAQKIDHLQGDCIDGQDIDITNYEFNPDWLKDCVSNEKVEEYLVSHLLKSNCLITNQPDWGTLQIHYIGKKINREKLLRYVVSFRQHNEFHEQCVERIFCDLMRYAKPEKLTVYARYTRRGGLDINPFRSNFETLPENLRLARQ

SEQ ID NO: 48241 - protein, 279 aa, Pasteurella canis
  REGION 1..279: note = tr|A0A379EUH1|A0A379EUH1_9PAST NADPH-dependent 7-cyano-7-deazaguanine reductase OS=Pasteurella canis; OX = 753 GN=queF PE=3 SV=1
MHYQHDSLNKLTLGQKTQYATNYDRTLLQAVPRQLNRDSLGITQTQPFTLGADIWTAYEISWLNSKGVPQVAIADIEIDFQSKNLIESKSFKLYLNSFNQTTFDSFSTVQHTLEQDLADCAKGKVRVQLHPLAKYNQESIAQLNGECIDELDITITHYEFDASVLENCCNEIVVEETLVSHLLKSNCLITNQPDWGSLQIHYVGKQIDREKLLRYIISFRQHNEFHEQCVERIFCDLIQFAQPKKLTVYARYTRRGGLDINPFRSNFETVLTNQRLARQ

SEQ ID NO: 48242 - protein, 285 aa, Pasteurella dagmatis
  REGION 1..285: note = tr|C9PR58|C9PR58_9PAST NADPH-dependent 7-cyano-7-deazaguanine reductase OS=Pasteurella dagmatis ATCC 43325 OX=667128 GN=queF PE=3 SV=1
MKGQNNMHYQDDSLNKLTLGQQTQYVSNYDRTLLQPVPRKLNRDGLGITEQKPFNQGADIWTAYEISWLNPKGVPQVAIADVEIDFRSQNLIESKSFKLYLNSFNQTKFDSFAEVERTLAEDLAQCAQGDVKVTLHSLSKYRAEPIAELSGVCIDEQDIEVESYEFNADILQNCVSEQIVEENLVSHLLKSNCLITQQPDWGSVQIHYVGKQIDREKLLRYLISFRQHNEFHEQCVERIFCDLMRFANPEKLTVYARYTRRGGLDINPFRSNFEPIPHNQRLARQ

SEQ ID NO: 48243 - protein, 278 aa, Pasteurella langaaensis
  REGION 1..278: note = tr|A0A2U0SQ43|A0A2U0SQ43_9PAST NADPH-dependent 7-cyano-7-deazaguanine reductase OS=Pasteurella langaaensis DSM 22999 OX=1122935 GN=queF PE=3 SV=1
MNYESQLKSLKLGQKTEYKAQYDCTLLQPVPRALNRDGLGITTQQPFNQGADIWTAYEISWLNAKGLPQVAIADVEIDFRSVNLIESKSFKLYLNSFNQTHFTSFDEVQRTMQQDLSECAQGDVKVRLNSVEFYTNQPINALAGELIDAQDIEISDYGFNAELLADCTDKNWVEERLVSHLLKSNCLITSQPDWGSLQIHYVGKQINREKLLRYIVSFRQHNEFHEQCVERIFCDIMRFAKPEKLTVYARYTRRGGLDINPFRSNFETVPSNLRLARQ

SEQ ID NO: 48244 - protein, 279 aa, unidentified
  source 1..279: note = [Pasteurella] mairii
  REGION 1..279: note = tr|A0A379B3C2|A0A379B3C2_9PAST NADPH-dependent 7-cyano-7-deazaguanine reductase OS=[Pasteurella] mairii; OX = 757 GN=queF PE=3 SV=1
MHYHDQSLQSLPLGKQTKYAENYDRTLLQPVPRSLNRDSLGITARQPFTVGADIWTAYEISWLNTKGVPQVAIADVEIDCTSLNLIESKSFKLYLNSFNQSKFSSFDEVCHILQQDLQQCAQGEVKVRLNSLTNYHHTPIAFFAGDCIDEQGIEIVDYQFNPQLLQHCTGENLVDEVLVSHLLKSNCLITQQPDWGSVQIHYVGKQIDREKLLRYLISYRQHNEFHEQCVERIFCDLMQFAQPEKLTVYARYTRRGGLDINPFRSNFEPIPLNQRLARQ

SEQ ID NO: 48245 - protein, 279 aa, Pasteurella multocida
  REGION 1..279: note = sp|Q9CNF6|QUEF_PASMU NADPH-dependent 7-cyano-7-deazaguanine reductase OS=Pasteurella multocida (strain Pm70) OX=272843 GN=queF PE=3 SV=1
MQYQHDSLDKLKLGQQTQYASNYDHTLLQPVPRHLNRDTLGITHTQPFHFGADIWTAYEISWLNLNGLPQVAIADVAIDFQSENLIESKSFKLYLNSFNQSKFATFEEVQQHLTQDLSNCAKGKVSVKLHPLSKYCHEPIVELAGECIDQQDIEINDYQFNPEILTNCTHDQMVKESLVSHLLKSNCLITNQPDWGTLQIRYEGKQIDREKLLRYIISFRQHNEFHEQCVERIFCDLMQFAKPDKLTVYARYTRRGGLDINPFRSNFEAVPDNQRLARQ

SEQ ID NO: 48246 - protein, 179 aa, Pasteurella multocida
  REGION 1..179: note = tr|J5NIP8|J5NIP8_PASMD 7-cyano-7-deazaguanine reductase (Fragment) OS=Pasteurella multocida subsp. multocida str. Anand1_buffalo OX=1032868 GN=queF PE=4 SV=1
DFQSENLIESKSFKLYLNSFNQSKFATFEEVQQHLTQDLSNCAKGKVSVKLHPLSKFDHEPIVELAGECIDQQDIEINDYQFNPEILTNCTHDQMVKESLVSHLLKSNCLITNQPDWGTLQIRYEGKQIDREKLLRSLFLSVNIMNFMNNALNGFFVISCNLLNQTSSLFMHVILDEED

SEQ ID NO: 48247 - protein, 279 aa, Pasteurella skyensis
  REGION 1..279: note = tr|A0A1H7U0P4|A0A1H7U0P4_9PAST NADPH-dependent 7-cyano-7-deazaguanine reductase OS=Pasteurella skyensis; OX = 97481 GN=queF PE=3 SV=1
MNYNDKSLSALTLGQDTDYKSCYDPNLLHAVPRQLNRDQLGITEKQPFTEGSDIWTLYELSWLNSNGIPQVAIADVWLDFKSENLIESKSFKLYLNSFNQTKFDSIEQVEQRLQTDLSQCASGKILVKIRKLSDYNQQQIAQFEGENIDEQSIEVSDYQFSNLYLKDIAEGEVCEETLVSHLLKSNCLITNQPDWGSLQIRYVGKKLNREKLLRYIISFREHNEFHEQCVERIFCDLMQFAQPEKLTVYARYTRRGGLDINPFRSNFEAVPENYRLARQ

SEQ ID NO: 48248 - protein, 279 aa, Pasteurella sp.
  REGION 1..279: note = tr|A0A4Y9H0K6|A0A4Y9H0K6_9PAST NADPH-dependent 7-cyano-7-deazaguanine reductase OS=Pasteurella sp. WM03; OX = 2558280 GN=queF PE=3 SV=1
MNKQNYGLDALKLGQKTDYANEYDHTLLQPVPRALNRDDLGITKAQPFTIGADIWTAYEISWLNEKGVPQVAIADIYLDHQSQNLIESKSFKLYLNSFNQTKFADFNQVAHIMQQDLAECAQGEVKVWLNPLAFYQTQQIDRLQGECIDEQDIEITDYQFNTGWLENCVSDEVVEEYLVSHLLKSNCLITNQPDWGSLQIHYIGKKIDREKLLRYVVSFRQHNEFHEQCVERIFCDLMHYATPEKLTVYARYTRRGGLDINPFRSNFEPLPENLRLARQ

SEQ ID NO: 48249 - protein, 286 aa, Pasteurella testudinis
  REGION 1..286: note = tr|A0A1W1V0S6|A0A1W1V0S6_9PAST NADPH-dependent 7-cyano-7-deazaguanine reductase OS=Pasteurella testudinis DSM 23072 OX=1122938 GN=queF PE=3 SV=1
MTTYQHTSLDQLTLGKHTDYRSEYDPSLLQAVPRKLNRDALGISQRQPFSSGADIWTLYELSWLNQNGLPQVAIADVYLDFRSVNLIESKSFKLYLNSFNQSRFSDWQTVESTLQRDLAHCADGEVKVRLHRLDDYRHQTIAAFDGDCIDQQDIEITDYEFNPDWLQHCTATATGKTAECVHETLVSHLLKSNCLITSQPDWGSVQIEYRGAKINREALLRYLVSFRQHNEFHEQCVERIFCDLMHYAKPEKLKVYARYTRRGGLDINPYRANYPFEAENQRLARQ

SEQ ID NO: 48250 - protein, 280 aa, unidentified
  source 1..280: note = Pasteurellaceae bacterium
  REGION 1..280: note = tr|A0A5C4QAF7|A0A5C4QAF7_9PAST NADPH-dependent 7-cyano-7-deazaguanine reductase OS=Pasteurellaceae bacterium BK431 OX=2585026 GN=queF PE=3 SV=1
MATYHHSSLDQLTLGKQTDYHSEYDPRLLQAVPRSLNRDSLGISSQQPFNCGADIWTAYEISWLNAKGLPQVAIGDIYLDFQSENLIESKSFKLYLNSFNQSRFDSLQQVEQLIQRDLANCAQGEVKVRLHPLDAYCNQAIDYFQGDCIDEQDIEIDSYEFQPQLLQHCTTAEQVNEVLVSHLLKSNCLITNQPDWGSVQIAYQGAKINREALLRYLVSFRQHNEFHEQCVERIFCDLMHYAKPTKLKVYARYTRRGGLDINPYRANYPLELQNRRLARQ

SEQ ID NO: 48251 - protein, 279 aa, unidentified; identical to SEQ ID NO: 47111
  source 1..279: note = Pasteurellaceae bacterium
  REGION 1..279: note = tr|A0A3Q8GKZ8|A0A3Q8GKZ8_9PAST NADPH-dependent 7-cyano-7-deazaguanine reductase OS=Pasteurellaceae bacterium 12565 OX=2093222 GN=queF PE=3 SV=1

SEQ ID NO: 48252 - protein, 143 aa, unidentified
  source 1..143: note = Paucibacter aquatile
  REGION 1..143: note = tr|A0A2N8L1I3|A0A2N8L1I3_9BURK NADPH-dependent 7-cyano-7-deazaguanine reductase OS=Paucibacter aquatile; OX = 2070761 GN=queF PE=3 SV=1
MPPNPPSAPSKELHVFPNPAPERDYVIQFQVPEFTCHCPLTGQPDFAHFTIDMIADQYCVELKSLKMYFWSYRDEGAFHEKVTNTILEDIVKVTDPRFIRITAKWYVRGGIYTNVVVEHRKKGWKQQPRVDLPAHGFESGLLR

SEQ ID NO: 48253 - protein, 143 aa, Paucibacter sp.
  REGION 1..143: note = tr|A0A3N7C1L6|A0A3N7C1L6_9BURK NADPH-dependent 7-cyano-7-deazaguanine reductase OS=Paucibacter sp. KBW04; OX = 2153361 GN=queF PE=3 SV=1
MPPNPPSRPSKELHVFPNPAPERDYVIQFQVPEFTCHCPLTGQPDFAHFTIDMIADKHCVELKSLKMYFWSYRDEGAFHEKVTNTILEDIVKVTNPRFIRITAKWYVRGGIYTNVVVEHQKKGWKPAPRVDLPTHGFESGLLR

SEQ ID NO: 48254 - protein, 143 aa, Paucibacter sp.
  REGION 1..143: note = tr|A0A0U3EPU7|A0A0U3EPU7_9BURK NADPH-dependent 7-cyano-7-deazaguanine reductase OS=Paucibacter sp. KCTC 42545 OX=1768242 GN=queF PE=3 SV=1
MPPNPPSRPSKELHAFPNPAPERDYVIQFQVPEFTCHCPLTGQPDFAHFTIDMIADKHCVELKSLKMYFWSYRDEGAFHEKVTNTILEDIVRVTQPRFIRITAKWYVRGGIYTNVVVEHQKKGWKPAPRVDLPTHGFESGLLR

SEQ ID NO: 48255 - protein, 157 aa, Paucibacter toxinivorans
  REGION 1..157: note = tr|A0A4R6QTL3|A0A4R6QTL3_9BURK NADPH-dependent 7-cyano-7-deazaguanine reductase OS=Paucibacter toxinivorans OX=270368 GN=queF PE=3 SV=1
MAKTPSKAAPKQREMPPNPPSRPSKELHVFPNPAPERDYVIQFQIPEFTCHCPLTGQPDFAHFTIDMIADKHCVELKSLKMYMWSYRDEGAFHEKVTNTIMDDIIKATNPRFIRITAKWFVRGGIYTNVVVEQAKKGWKPAPRVDLPVHGAESGLLR

SEQ ID NO: 48256 - protein, 276 aa, Paucimonas lemoignei
  REGION 1..276: note = tr|A0A2X4AIX4|A0A2X4AIX4_PAULE NADPH-dependent 7-cyano-7-deazaguanine reductase OS=Paucimonas lemoignei; OX = 29443 GN=queF PE=3 SV=1
MHPAAEHSPLGKSSEYIATYTPSLLFPIPRAAKWAELGLTAETLPYQGVDFWNCYELSWLLPSGKPVVAIAEFSIPADSPNIIESKSFKLYLNSLNQTAFADRTELTTTLVKDLSSAAGKPVGVRIRSLADIEREGVASMPGTCIDELELNISSYDRPQPELLRCDGSQVVEESLHSHLLKSNCPVTSQPDWGSVAVEYRGAKLDAGSLLAYIVSFRQHSDFHEQCVERIFMDLQVLLKPEKLTVYARYVRRGGLDINPYRSTEVINPDNRRLARQ

SEQ ID NO: 48257 - protein, 284 aa, Paucimonas lemoignei
  REGION 1..284: note = tr|A0A4V2UIQ6|A0A4V2UIQ6_PAULE NADPH-dependent 7-cyano-7-deazaguanine reductase OS=Paucimonas lemoignei; OX = 29443 GN=queF PE=3 SV=1
MPDVGPGAENSAASSPLGKPATYVSEYDPSLLFPIARAEKRAELGITGTLPFFGMDIWNAYEVSWLNSRGKPQVAIATFSIPADSPNIIESKSFKLYLNSFNQTRLSSPEALAERLHTDLSAGFGATVHVNLTLPDAFSQLQMGELSGLPLDRLDIDVDEFQPNPGLLQARQDEAVVEETLVSHLLKSNCLVTGQPDWGSVQIRYVGAQIDQEGLLRYLIGFRQHNEFHEQCVERIFMDILRQCRPQKLSVYARYTRRGGLDINPWRSNFTTGHPPGNARLARQ

SEQ ID NO: 48258 - protein, 164 aa, Pectinatus cerevisiiphilus
  REGION 1..164: note = tr|A0A4R3KE21|A0A4R3KE21_9FIRM NADPH-dependent 7-cyano-7-deazaguanine reductase OS=Pectinatus cerevisiiphilus OX=86956 GN=queF PE=3 SV=1
MREKNEVENITLLGKKNVKYNYDYCPEILETFVNKHPDRDYWVKFNCPEFTSLCPITGQPDFATIYISYIPDKIMVESKSLKLYLVSFRNHGDFHEDVVNIIMDDLIKLMQPRYIEIWGKFLPRGGISIDPYVNYGRPNTKYEKIAQQRFVQHDMAGMDKIDNR

SEQ ID NO: 48259 - protein, 282 aa, unidentified
  source 1..282: note = Pectobacterium actinidiae
  REGION 1..282: note = tr|A0A1V2R0B2|A0A1V2R0B2_9GAMM NADPH-dependent 7-cyano-7-deazaguanine reductase OS=Pectobacterium actinidiae OX=1507808 GN=queF PE=3 SV=1
MSVYDKHQALSGLTLGKPTPYHDRYDAALLQPVPRSLNRVPLGIYPDNLPFHGADIWTLYELSWLNNRGVPQVAVGEMHLNAESLNLIESKSFKLYLNSFNQTVFDSWESVRATLAKDLADCAQGDVSITLFKLSELEGQPIAGFTGECIDDQDIQIDSYDFNADYLATNEQDAPIVEETLVSHLLKSNCLITHQPDWGSVQIHYRGKRINREALLRYIVSFRHHNEFHEQCVERIFNDIMRYYQPEKLSVYARYTRRGGLDINPWRSNTPFNAPNGRLPRQ

SEQ ID NO: 48260 - protein, 282 aa, unidentified
  source 1..282: note = Pectobacterium aquaticum
  REGION 1..282: note = tr|A0A3R8QEP5|A0A3R8QEP5_9GAMM NADPH-dependent 7-cyano-7-deazaguanine reductase OS=Pectobacterium aquaticum OX=2204145 GN=queF PE=3 SV=1
MSVYDKHQALSGLTLGKPTPYHDRYDAALLQPVPRSLNRDPLGIYPDSLPFHGADIWTLYELSWLNNRGVPQVAVGEMHLNAESLNLIESKSFKLYLNSFNQTAFDSWESVRATLAKDLAHCAQGDVSITLFKLNELEGQPLAGFTGECIDDQDIQIDSYDFNADYLATNEQDAPVVEETLVSHLLKSNCLITHQPDWGSVQIHYRGKRINREALLRYIVSFRHHNEFHEQCVERIFNDIMHYYQPEKLSVYARYTRRGGLDINPWRSNTPFTAPNGRLPRQ

SEQ ID NO: 48261 - protein, 282 aa, Pectobacterium atrosepticum
  REGION 1..282: note = sp|Q6D8F4|QUEF_PECAS NADPH-dependent 7-cyano-7-deazaguanine reductase OS=Pectobacterium atrosepticum (strain SCRI 1043 / ATCC BAA-672) OX=218491; GN = queF PE=3 SV=1
MSVYDKHQALSRLTLGKPTPYHDRYDAALLQPVPRSLNRDPLGIYPDSLPFHGADIWTLYELSWLNNRGVPQVAVGEMHLNAESLNLIESKSFKLYLNSFNQTTFDSWESVRATLANDLAHCAQGDVSVTLFKLSELEGQPLAGFTGECIDDQDIQIDNYNFNADYLATNEQDAPVVEETLVSHLLKSNCLITHQPDWGSVQIHYRGKRINREALLRYIVSFRHHNEFHEQCVERIFNDLMHYYQPEKLSVYARYTRRGGLDINPWRSNTPFNAPNGRLPRQ

SEQ ID NO: 48262 - protein, 282 aa, Pectobacterium betavasculorum
  REGION 1..282: note = tr|A0A093S6S6|A0A093S6S6_9GAMM NADPH-dependent 7-cyano-7-deazaguanine reductase OS=Pectobacterium betavasculorum OX=55207 GN=queF PE=3 SV=1
MSVYDKQQALSGLTLGKPTAYHDRYDAALLQPVPRSLNRDPLGIYPDNLPFHGADIWTLYELSWLNNHGVPQVAVGEMHLNAESRNLIESKSFKLYLNSFNQTKFDSWESVCATLTNDLAHCAQGDVSVTLFKLSELEGQPLTAFTGECIDEQDIQIDSYDFNADYLATNEQDAPVVEETLVSHLLKSNCLITHQPDWGSVQIHYRGKRINREALLRYIVSFRHHNEFHEQCVERIFNDLMHYYQPEKLSVYARYTRRGGLDINPWRSNYAASVPNGRLPRQ

SEQ ID NO: 48263 - protein, 282 aa, unidentified
  source 1..282: note = Pectobacterium brasiliense
  REGION 1..282: note = tr|A0A0M2F6K8|A0A0M2F6K8_9GAMM NADPH-dependent 7-cyano-7-deazaguanine reductase OS=Pectobacterium brasiliense OX=180957 GN=queF PE=3 SV=1
MSVYDKHQALSGLTLGKPTPYHDRYDAALLQPVPRSLNRDPLGIYPDSLPFHGADIWTLYELSWLNNRGVPQVAVGEMHLNAESLNLIESKSFKLYLNSFNQTAFDSWESVRATLAKDLAHCAQGDVSITLFKLSELEGQPIAGFTGECIDDQDIQIDSYDFNADYLAHNEQDAPVVEETLVSHLLKSNCLITHQPDWGSVQIQYCGKRINREALLRYIVSFRHHNEFHEQCVERIFNDIMRYYQPEKLSVYARYTRRGGLDINPWRSNTPFNAPNGRLPRQ

SEQ ID NO: 48264 - protein, 282 aa, unidentified
  source 1..282: note = Pectobacterium brasiliense
  REGION 1..282: note = tr|A0A086EWG0|A0A086EWG0_9GAMM NADPH-dependent 7-cyano-7-deazaguanine reductase OS=Pectobacterium brasiliense OX=180957 GN=queF PE=3 SV=1
MSVYDKHQALSGLTLGKPTPYHDRYDAALLQPVPRSLNRDPLGIYPDSLPFHGADIWTLYELSWLNNRGVPQVAVGEMHLNAESLNLIESKSFKLYLNSFNQTAFDSWESVRATLAKDLAHCAQGDVSITLFKLSELEGQLIAGFTGECIDDQDIQIDSYDFNADYLATNEQDTPVVEETLVSHLLKSNCLITHQPDWGSVQIQYCGKRINREALLRYIVSFRHHNEFHEQCVERIFNDIMRYYQPEKLSVYARYTRRGGLDINPWRSNTPFNAPNGRLPRQ

SEQ ID NO: 48265 - protein, 282 aa, Pectobacterium carotovorum
  REGION 1..282: note = sp|C6DAH4|QUEF_PECCP NADPH-dependent 7-cyano-7-deazaguanine reductase OS=Pectobacterium carotovorum subsp. carotovorum (strain PC1) OX=561230; GN = queF PE=3 SV=1
MSVYDKHQALSGLTLGKPTPYHDRYDAALLQPVPRSLNRDPLGIHPDSLPFHGADIWTLYELSWLNNRGVPQVAVGEMHLNAESLNLIESKSFKLYLNSFNQTTFDSWESVRATLANDLAHCAQGDVSITLFKLSELEGQPLAGFTGECIDDQDIQIDSYDFNADYLATNEQDAPVVEETLVSHLLKSNCLITHQPDWGSVQIHYRGKRINREALLRYIISFRHHNEFHEQCVERIFNDIMRYYQPEKLSVYARYTRRGGLDINPWRSNTAFNAPNGRLPRQ

SEQ ID NO: 48266 - protein, 282 aa, Pectobacterium carotovorum
  REGION 1..282: note = tr|A0A1M5L091|A0A1M5L091_PECCA NADPH-dependent 7-cyano-7-deazaguanine reductase OS=Pectobacterium carotovorum OX=554 GN=queF PE=3 SV=1
MSVYDKHQALSGLTLGKTTPYHDRYDAALLQPVPRSLNRDPLGIYPDSLPFHGADIWTLYELSWLNNRGVPQVAVGEMHLNAESLNLIESKSFKLYLNSFNQTAFDSWESVRATLAKDLAHCAQGDVSITLFKLSELEGQPIAGFTGECIDDQDIQIDSYDFSADYLATNEQDAPIVEETLVSHLLKSNCLITHQPDWGSVQIHYRGKRINREALLRYIVSFRHHNEFHEQCVERIFNDIMRYYQPEKLSVYARYTRRGGLDINPWRSNTAFNAPNGRLPRQ

SEQ ID NO: 48267 - protein, 282 aa, unidentified
  source 1..282: note = Pectobacterium odoriferum
  REGION 1..282: note = tr|A0A094RX16|A0A094RX16_9GAMM NADPH-dependent 7-cyano-7-deazaguanine reductase OS=Pectobacterium odoriferum OX=78398 GN=queF PE=3 SV=1
MSVYDKHQALSGLTLGKPTPYHDRYDAALLQPVPRSLNRDPLGIYPDNLPFHGADIWTLYELSWLNNRGVPQVAVGEMHLNAESLNLIESKSFKLYLNSFNQTTFDSWESVRATLAKDLAHCAQGDVNITLFKLSELEGQPLAGFTGECIDDQDIQIDSYDFNADYLATNEQNAPVVEETLVSHLLKSNCLITHQPDWGSVQIHYRGKRINREALLRYIVSFRHHNEFHEQCVERIFNDITRYYQPEKLSVYARYTRRGGLDINPWRSNTAFNAPNGRLPRQ

SEQ ID NO: 48268 - protein, 282 aa, unidentified
  source 1..282: note = Pectobacterium parmentieri
  REGION 1..282: note = tr|A0A0H3I644|A0A0H3I644_PECPM NADPH-dependent 7-cyano-7-deazaguanine reductase OS=Pectobacterium parmentieri OX=1905730 GN=queF PE=3 SV=1
MSVYDKHQALSGLTLGKATPYHDRYDAALLQPVPRSLNRDPLGIYPDNLPFHGTDIWTLYELSWLNHRGVPQVAVGEMHLNAESLNLIESKSFKLYLNSFNQTTFDDWEGVRATLAKDLAQCAQGDVNVTLFKLSELEGQPLAGFTGECIDDQDIQIDSYDFNADYLATNEQDAPVVEETLVSHLLKSNCLITHQPDWGSVQIHYCGKRINREALLRYIVSFRHHNEFHEQCVERIFNDIMRYYQPEKLSVYARYTRRGGLDINPWRSNYPFNAPTGRLPRQ

SEQ ID NO: 48269 - protein, 282 aa, unidentified
  source 1..282: note = Pectobacterium peruviense
  REGION 1..282: note = tr|A0A0J5XY31|A0A0J5XY31_9GAMM NADPH-dependent 7-cyano-7-deazaguanine reductase OS=Pectobacterium peruviense OX=2066479 GN=queF PE=3 SV=1
MSVYDKHQALSGLTLGKPTPYHDRYDAALLQPVPRSLNRDPLGIYPDSLPFHGADIWTLYELSWLNNRGVPQVAVGEMHLNAESLNLIESKSFKLYLNSFNQTTFDSWESVHTTLANDLAHCAQGDVSVTLFKLSELEGQPLAGFTGECIDDQDIQIDSYDFNANYLATNEQDAPVVEETLVSHLLKSNCLITHQPDWGSVQIHYRGKRINREALLRYIVSFRHHNEFHEQCVERIFNDLMHYYQPEKLSVYARYTRRGGLDINPWRSNTPFSAPNGRLPRQ

SEQ ID NO: 48270 - protein, 282 aa, unidentified
  source 1..282: note = Pectobacterium polaris
  REGION 1..282: note = tr|A0A3A4AFK0|A0A3A4AFK0_9GAMM NADPH-dependent 7-cyano-7-deazaguanine reductase OS=Pectobacterium polaris; OX = 2042057 GN=queF PE=3 SV=1
MSVYDKHQALSGLTLGKPTPYHDRYDAALLQPVPRSLNRDPLGIYPDSLPFHGADIWTLYELSWLNNRGVPQVAVGEMHLNAESLNLIESKSFKLYLNSFNQTAFDSWESVRATLAKDLAHCAQGDVSITLFKLSELEGQPIAGFTGDCIDDQDIQIDSYDFNADYLATNEQDAPVVEETLVSHLLKSNCLITHQPDWGSVQIHYRGKRINREALLRYIVSFRHHNEFHEQCVERIFNDIMRYYQPEKLSVYARYTRRGGLDINPWRSNTPFNAPNGRLPRQ

SEQ ID NO: 48271 - protein, 282 aa, unidentified
  source 1..282: note = Pectobacterium polaris
  REGION 1..282: note = tr|A0A3S1AUW7|A0A3S1AUW7_9GAMM NADPH-dependent 7-cyano-7-deazaguanine reductase OS=Pectobacterium polaris; OX = 2042057 GN=queF PE=3 SV=1
MSVYDKHQALSGLTLGKPTPYHDLYDAALLQPVPRSLNRDPLGIYPDSLPFHGADIWTLYELSWLNNRGVPQVAVGEMHLNAESLNLIESKSFKLYLNSFNQTAFDSWESVRATLAKDLAHCAQGDVSITLFKLSELEGQPLAGFTGDCIDDQDIQIDSYDFNADYLATNEQDAPVVEETLVSHLLKSNCLITHQPDWGSVQIHYRGKRINREALLRYIVSFRHHNEFHEQCVERIFNDIMRYYQPEKLSVYARYTRRGGLDINPWRSNTPFNAPNGRLPRQ

SEQ ID NO: 48272 - protein, 282 aa, unidentified
  source 1..282: note = Pectobacterium polonicum
  REGION 1..282: note = tr|A0A4U7KJA7|A0A4U7KJA7_9GAMM NADPH-dependent 7-cyano-7-deazaguanine reductase OS=Pectobacterium polonicum OX=2485124 GN=queF PE=3 SV=1
MSVYDKHQALSGLTLGKPTPYHDHYDAALLQPVPRSLNRDPLGIYPDSLPFHGGDIWTLYELSWLNNRGVPQVAVGEMHLNAESLNLIESKSFKLYLNSFNQTTFDSWESVRTTLANDLAHCAQGDVSVTLFKLSELEGQPLAGFIGECIDDQDIQIDSYDFSADYLATNEQDAPVVEETLVSHLLKSNCLITHQPDWGSVQIHYRGKRINREALLRYIVSFRHHNEFHEQCVERIFNDIMRYYQPEKLSVYARYTRRGGLDINPWRSNTPFNAPTGRLPRQ

SEQ ID NO: 48273 - protein, 282 aa, unidentified
  source 1..282: note = Pectobacterium punjabense
  REGION 1..282: note = tr|A0A2T3VYX9|A0A2T3VYX9_9GAMM NADPH-dependent 7-cyano-7-deazaguanine reductase OS=Pectobacterium punjabense OX=2108399 GN=queF PE=3 SV=1
MSVYDKHQALSGLTLGKPTPYHDHYDAALLQPVPRSLNRDPLGIYPDSLPFHGEDIWTLYELSWLNNRGVPQVAVGEMHLNAESLNLIESKSFKLYLNSFNQTTFDSWESVRTTLANDLAHCAQGDVSVTLFKLSELEGQPLAGFTGECIDDQDIQIDSYDFSADYLATNEQDAPVVEETLVSHLLKSNCLITHQPDWGSVQIHYRGNRINREALLRYIVSFRHHNEFHEQCVERIFNDIMRYYQPEKLSVYARYTRRGGLDINPWRSNYPFNAPNGRLPRQ

SEQ ID NO: 48274 - protein, 282 aa, Pectobacterium wasabiae
  REGION 1..282: note = tr|A0A1D7Z3M4|A0A1D7Z3M4_9GAMM NADPH-dependent 7-cyano-7-deazaguanine reductase OS=Pectobacterium wasabiae CFBP 3304 OX=1175631 GN=queF PE=3 SV=1
MSVYDKHQALSGLTLGKPTPYHDRYDAALLQPVPRSLNRDPLGIYPDSLPFHGVDIWTLYELSWLNHRGVPQVAVGEMHLNAESQNLIESKSFKLYLNSFNQTIFDDWEGVRATLAKDLAQCAQGDVSITLFKLSELEGQPLAGFIGECIDDQDIQIDSYDFNADYLATNEQDTPVVEETLVSHLLKSNCLITHQPDWGSVQIHYRGKRINREALLRYIVSFRHHNEFHEQCVERIFNDLMRYYQPEKLSVYARYTRRGGLDINPWRSNYLSNVPNGRLPRQ

SEQ ID NO: 48275 - protein, 191 aa, Pedobacter sp.
  REGION 1..191: note = tr|A0A519YLS2|A0A519YLS2_9SPHI NADPH-dependent 7-cyano-7-deazaguanine reductase QueF (Fragment); OS = Pedobacter sp. OX=1411316 GN=EOO89_33245 PE=4 SV=1
MSSSPLGHKTDYVSSYDASLLFPIPRHESRKTLGLLDDLPFYGQDIWTGYELSWLNIKGKPEVAVAEFSVPFDSPNIIELKSFKLYLNSLNQTRFSGFDEVKELLVKDLSAAAESDVSVSLKSLSDSNLLIDFTVKGVCIDGLDISVESYHPQAEHLKANESEQTSETLCSHLLKSNCPVTGQPDWASVFI

SEQ ID NO: 48276 - protein, 154 aa, Pelagibaca sp.
  REGION 1..154: note = tr|A0A2D6BA84|A0A2D6BA84_9RHOB NADPH-dependent 7-cyano-7-deazaguanine reductase OS=Pelagibaca sp.; OX = 1979400 GN=queF PE=3 SV=1
MTDTIYSNLKQLGGETRIPESPETAELERVANPQADVQYNVRFTAPEFTSLCPMTGQPDFAHLVIDYVPGAWLVESKSLKLYLTSFRNHGAFHEDCTISIARRLVDFLEPAWLRIGGYWYPRGGMPIDVFWQTGAMPRDVWIPDQGVAPYRGRG

SEQ ID NO: 48277 - protein, 150 aa, unidentified
  source 1..150: note = Pelagibacteraceae bacterium
  REGION 1..150: note = tr|A0A2E6J0S1|A0A2E6J0S1_9PROT NADPH-dependent 7-cyano-7-deazaguanine reductase OS=Pelagibacteraceae bacterium OX=2026775 GN=queF PE=3 SV=1
MKKIKLNYLGRNKNLFNDPDKCLLDPIPNKNYKKDYIVRLTINEFTSLCPVTGQPDFAKFIIDYLPNKSLVESKSFKFFIHSFRNHQCFHENCTIFIAEKLLKSIKPKWIRISGYWFPRGGIPIDIFYENKKPPKNLYIPDTGIKPYKGR

SEQ ID NO: 48278 - protein, 151 aa, unidentified
  source 1..151: note = Pelagibacteraceae bacterium
  REGION 1..151: note = tr|A0A1Z8V121|A0A1Z8V121_9PROT NADPH-dependent 7-cyano-7-deazaguanine reductase OS=Pelagibacteraceae bacterium TMED65 OX=1986644 GN=queF PE=3 SV=1
MKNTKKPRYLGSKSNVKSSPDSFILDCVNNPHLDHDYSIRFIAPEFTSICPITSQPDFGKIIIDYVPNKLLMESKSFKLFLFSFRDYGGFHEDCTIKISKKIIKYVKPKWIRVASFWNPRGGIPIDIISQTGKKPVNVIVSELNIPIYGNR

SEQ ID NO: 48279 - protein, 154 aa, unidentified
  source 1..154: note = Pelagibacterales bacterium
  REGION 1..154: note = tr|A0A2E6DY44|A0A2E6DY44_9PROT NADPH-dependent 7-cyano-7-deazaguanine reductase OS=Pelagibacterales bacterium OX=2026776 GN=queF PE=3 SV=1
  VARIANT 10: note = Xaa can be any naturally occurring amino acid
  VARIANT 17: note = Xaa can be any naturally occurring amino acid
  VARIANT 67: note = Xaa can be any naturally occurring amino acid
  VARIANT 71: note = Xaa can be any naturally occurring amino acid
MVQKKINKIXALGNKSXIPNEPSEAFLEKVNNPHSDKLYVARFTVPEFTSLCPVTGQPDFANIIIDXIPKXYLLESKSFKLFMQSFRNHGAFHEDVTLYIAKRIIKEIKPVWLRIGGYFYPRGGIPIDVFWQTDNPPKKVWIPENSIQVYKGRN

SEQ ID NO: 48280 - protein, 149 aa, unidentified
  source 1..149: note = Pelagibacterales bacterium
  REGION 1..149: note = tr|A0A2D5FYG3|A0A2D5FYG3_9PROT NADPH-dependent 7-cyano-7-deazaguanine reductase OS=Pelagibacterales bacterium OX=2026776 GN=queF PE=3 SV=1
MDKIKQLGKKAIFADSPDKAVLEKVKNPHADKLYVARFSAPEFTSLCPVTGQPDFAHIILDYIPNKYLLESKSFKLFIQSFRNHGAFHEDVTLYIAKRIEKEIKPVWLRIGGYFYPRGGIPIDVFWQTDVPPKKVWIPDNNINVYNGRK

SEQ ID NO: 48281 - protein, 153 aa, Pelagibacterium luteolum
  REGION 1..153: note = tr|A0A1G7W2I9|A0A1G7W2I9_9RHIZ NADPH-dependent 7-cyano-7-deazaguanine reductase OS=Pelagibacterium luteolum OX=440168 GN=queF PE=3 SV=1
MNANPLDVTQLGRDVRAAESPEQAVLERVPNPQADTDYVARFTAPEFTSLCPVTGQPDFAHLVIDYVPGDWLVESKSLKLYLTSFRNHGAFHEDCTVSIGRRLTALLEPRWLRIGGYWYPRGGIPIDVFWQTGRPPEHVWLPETGVPTYRGRG

SEQ ID NO: 48282 - protein, 277 aa, unidentified
  source 1..277: note = Pelagibaculum spongiae
  REGION 1..277: note = tr|A0A2V1GY39|A0A2V1GY39_9GAMM NADPH-dependent 7-cyano-7-deazaguanine reductase OS=Pelagibaculum spongiae; OX = 2080658 GN=queF PE=3 SV=1
MKLSIESNPDIPLGKTSEYPQSYDPDLLFPIPRLGKRLELGIDQNQLPFFGVDIWNAWEVSWLNLKGKPCVAIGQIHFPAESEFLVESKSLKLYFNSLNQHRLSSVDALEKLVAADLTHAVGVPVVVTMSHPDRYENCQAPMGQCIDELDVEIDNYSYQPELLKLLEDGEVRHQLLYSHLLKSNCLVTGQPDWGSVWIEYSGQEIDQEALLKYLISFRNHNEFHEQCVERIFTDIKRFCNPQRLTVWARYVRRGGLDINPYRSNCQREFVFERDFRQ

SEQ ID NO: 48283 - protein, 155 aa, unidentified
  source 1..155: note = Pelagicola litorisediminis
  REGION 1..155: note = tr|A0A1Y5RD40|A0A1Y5RD40_9RHOB NADPH-dependent 7-cyano-7-deazaguanine reductase OS=Pelagicola litorisediminis OX=1312363 GN=queF PE=3 SV=1
MNDDNIYKNLKQLGGETKLPDSPEKAELEKVPNPQADVAYNVRFVAPEFTSLCPMTGQPDFAHLVIDYVPGAWLVESKSLKLFLGSFRNHGAFHEDCTVSIARRLADFLDPQWLRIGGYWYPRGGIPIDVFYQTGPMPEGVWIPDQGVPPYRGRG

SEQ ID NO: 48284 - protein, 154 aa, Pelagicola sp.
  REGION 1..154: note = tr|A0A2U2CUK5|A0A2U2CUK5_9RHOB NADPH-dependent 7-cyano-7-deazaguanine reductase OS=Pelagicola sp. LXJ1103; OX = 2175247 GN=queF PE=3 SV=1
MSDSIYSDLKQLGTMTGLPDDPAKAELERVQNPQADVMYNVRFVAPEFTSLCPMTGQPDFAHLVIDYVPGAWLVESKSLKLFLGSFRNHGAFHEDCTITIARRIADFTEAKWLRIGGYWYPRGGIPIDVHYQTGPMPEGLWIPDQGVPPYRGRG

SEQ ID NO: 48285 - protein, 164 aa, unidentified
  source 1..164: note = Pelagirhabdus alkalitolerans
  REGION 1..164: note = tr|A0A1G6GK76|A0A1G6GK76_9BACI NADPH-dependent 7-cyano-7-deazaguanine reductase OS=Pelagirhabdus alkalitolerans OX=1612202 GN=queF PE=3 SV=1
MGRNDQDLTDLSLLGNQETTYDFNYTPEVLETFDNKHPNRDYFVKFNCPEFTTLCPKTNQPDFGTVYLSYIPDEKMVESKSFKLYLFSFRNHGDFHEDSMNIIMNDLIDLMDPKYIEVWGKFTPRGGISIDPYTNYGRPGTKYEKMAEHRMLNHDLYPEKVDNR

SEQ ID NO: 48286 - protein, 154 aa, unidentified
  source 1..154: note = Pelagivirga sediminicola
  REGION 1..154: note = tr|A0A2T7G7R1|A0A2T7G7R1_9RHOB NADPH-dependent 7-cyano-7-deazaguanine reductase OS=Pelagivirga sediminicola OX=2170575 GN=queF PE=3 SV=1
MSENIYSDLKQLGTNTALPDDPAKAELERVQNPQADVDYNVRFVAPEFTSLCPMTGQPDFAHLVIDYVPGAWLVESKSLKLYLGSFRDHGAFHEDCTVSIARRLAEFTQAKWLRIGGYWYPRGGIPIDVFYQTGPMPEGVWIPDQGVPPYRGRG

SEQ ID NO: 48287 - protein, 291 aa, unidentified
  source 1..291: note = Pelistega indica
  REGION 1..291: note = tr|V8FTA6|V8FTA6_9BURK NADPH-dependent 7-cyano-7-deazaguanine reductase OS=Pelistega indica; OX = 1414851 GN=queF PE=3 SV=1
MQTVEKNLLHAPLGKSSDYPTQYDPSLLFPISRQIGRDHLSIKPYPEWYGEDVWRAFEVSWLNPKGKPEIAILRFTIPATSSHIIESKSFKLYLNSFNQEKLSWDNLYAHLVQDLSQAAGGTVNIIRENAHTLLMSDKHSPYPDSTVIAPLEAINIDNLDIECSIYEPTASLLKADTDSIRKEVLVSDLLKSNCPVTSQPDWGSVVISYEGPAIDHASLLEYIVSYRTHNGFHEQCVEQIYCDIWQQCQPTFLEVYARYTRRGGLDISPRRASSSATLDKNYPQIIRTPRQ

SEQ ID NO: 48288 - protein, 143 aa, Pelobacter propionicus
  REGION 1..143: note = tr|A1AU76|A1AU76_PELPD NADPH-dependent 7-cyano-7-deazaguanine reductase OS=Pelobacter propionicus (strain DSM 2379 / NBRC 103807 / OttBd1) OX=338966 GN=queF; PE = 3 SV= 1
MTLHENLKSLGSGTTGYRYARPDATLLEAFPSPFAQPDLNPAGAVGTLHIECPEFTCLCPMTGQPDFARIVIDYQPDTLCVESKSLKLYLGSFRMHGEFHEASVNRICNDLVRLISPLWLTVRGEFTPRGGIPFWPTAEYRRP

SEQ ID NO: 48289 - protein, 116 aa, unidentified
  source 1..116: note = Pelodictyon luteolum
  REGION 1..116: note = tr|A0A165LIY4|A0A165LIY4_PELLU NADPH-dependent 7-cyano-7-deazaguanine reductase OS=Pelodictyon luteolum; OX = 1100 GN=queF PE=3 SV=1
MKQEILEVFDNTYPDRDYTIEIVNPEFTSVCPKTGLPDFGTITVSYVPDKTCIELKSLKYYFLEFRNAGIFYENVTNRILDDLVAVSNPRSMTVRTEWKARGGITETVTVSHNASA

SEQ ID NO: 48290 - protein, 116 aa, unidentified
  source 1..116: note = Pelodictyon luteolum
  REGION 1..116: note = sp|Q3B2F0|QUEF_PELLD NADPH-dependent 7-cyano-7-deazaguanine reductase OS=Pelodictyon luteolum (strain DSM 273 / 2530) OX=319225 GN=queF PE=3 SV=1
MKQEILEVFDNTYPDRDYTIEIVNPEFTSVCPKTGLPDFGTITVSYIPDKTCIELKSLKYYFLEFRNAGIFYENVTNRILDDLVAVSSPRSMTVRTEWKARGGITETVTVSHNASA

SEQ ID NO: 48291 - protein, 116 aa, unidentified
  source 1..116: note = Pelodictyon phaeoclathratiforme
  REGION 1..116: note = sp|B4SDY9|QUEF_PELPB NADPH-dependent 7-cyano-7-deazaguanine reductase OS=Pelodictyon phaeoclathratiforme (strain DSM 5477 / BU-1) OX=324925; GN = queF PE=3 SV=1
MKKDLLELFDNSFPDRDYTIEIVNAEFTSVCPKTGLPDFGTITIRYVPDKSCIELKSLKYYFLEFRNAGIFYENITNRILDDLVTLLQPRSLSVITEWRARGGITETVSVNYSQTL

SEQ ID NO: 48292 - protein, 146 aa, Pelomonas puraquae
  REGION 1..146: note = tr|A0A254NBI2|A0A254NBI2_9BURK NADPH-dependent 7-cyano-7-deazaguanine reductase OS=Pelomonas puraquae; OX = 431059 GN=queF PE=3 SV=1
MREVPKNPPSKPSKDILVFPNPNPERDYVIQFQVPEFTCHCPLTGQPDFAHFTIDMIADELCVELKSLKMYFWSYRNEGAFHEKVTNKILDDIVAVTDPRFIRITAKWYVRGGIYTNVVAEHRKPGWTPAPRVDLPGHGFESGMLG

SEQ ID NO: 48293 - protein, 164 aa, Pelomonas saccharophila
  REGION 1..164: note = tr|A0A4R3V8J6|A0A4R3V8J6_PELSC NADPH-dependent 7-cyano-7-deazaguanine reductase OS=Pelomonas saccharophila OX=304 GN=queF PE=3 SV=1
MATKKSATAPAKKSKPKMREVPPNPPSKPSKDILVFPNPNPERDYVIQFQVPEFTCHCPLTGQPDFAHFTIDMIADELCVELKSLKMYFWSYRNEGAFHEKVTNKILDDIVKVTDPRFIRITAKWYVRGGIYTNVVAEHRKPGWLPAPRVELPAHGFESGMLGA

SEQ ID NO: 48294 - protein, 146 aa, Pelomonas sp.
  REGION 1..146: note = tr|A0A0Q7AV86|A0A0Q7AV86_9BURK NADPH-dependent 7-cyano-7-deazaguanine reductase OS=Pelomonas sp. Root405; OX = 1736529 GN=queF PE=3 SV=1
MREVPKNPPTKPSKDILVFPNPNPERDYVIQFQVPEFTCHCPLTGQPDFAHFTIDMIADELCVELKSLKMYFWSYRNEGAFHEKVTNTILDDIIKVTDPRFIRITAKWYVRGGIYTNVVVEHRKAGWTPAPRVDLPAHGFESGMLG

SEQ ID NO: 48295 - protein, 160 aa, Pelomonas sp.
  REGION 1..160: note = tr|A0A2R7SAF6|A0A2R7SAF6_9BURK NADPH-dependent 7-cyano-7-deazaguanine reductase OS=Pelomonas sp. HMWF004; OX = 2056841 GN=queF PE=3 SV=1
MATKKPASAPKKPKMREVPKNPPSKPSKDLLVFPNPNPERDYVIQFQVPEFTCHCPLTGQPDFAHFTIDMIADERCVELKSLKMYFWSYRNEGAFHEKVTNTILDDIVKVTDPRFIRITAKWYVRGGIYTNVVAEHRKPGWQPAPRVELPAHGFESGMLG

SEQ ID NO: 48296 - protein, 165 aa, Pelosinus sp.
  REGION 1..165: note = tr|A0A075K8A3|A0A075K8A3_9FIRM NADPH-dependent 7-cyano-7-deazaguanine reductase OS=Pelosinus sp. UFO1; OX = 484770 GN=queF PE=3 SV=1
MSRNNKELEGITLLGNQNVKYEYSYTPEVLEVFENKHIENDYWVKFNCPEFTTLCPMTGQPDFATIYIKYIPDVKMVESKSLKLYLLSFRNQGDFHEDVVNIIMKDLIRLMQPRYIEVWGKFLPRGGISIDPYCNYGKPDTKYQSLAWHRMQENDLHSLEKIDNR

SEQ ID NO: 48297 - protein, 164 aa, unidentified
  source 1..164: note = Peptococcaceae bacterium
  REGION 1..164: note = tr|A0A3D3WBC7|A0A3D3WBC7_9FIRM NADPH-dependent 7-cyano-7-deazaguanine reductase OS=Peptococcaceae bacterium OX=2052179 GN=queF PE=3 SV=1
MPNKKSTREGLSLLGNQDVPYRYEYDPGILERFENKHQANDYFVKFNCPEFTSLCPITGQPDFASIYISYVPDVLMVESKSLKLYLFSFRNHGDFHENCINTIMKDLIALMDPKYIEVWGKFTPRGGISIDPYCNYGKPGTAWETTAAKRLHWHDMYPENVDNR

SEQ ID NO: 48298 - protein, 68 aa, unidentified
  source 1..68: note = Peptococcaceae bacterium
  REGION 1..68: note = tr|A0A354FCU8|A0A354FCU8_9FIRM NADPH-dependent 7-cyano-7-deazaguanine reductase QueF (Fragment); OS = Peptococcaceae bacterium OX=2052179 GN=DDY25_02495 PE=4; SV = 1
VTITYIPRDMLVELKSLKYYLNSFRNVGILQEHVVNRVKEDLVKLLNPVTLTVKADFRPRGGIGTCVQ

SEQ ID NO: 48299 - protein, 163 aa, Peptoniphilus asaccharolyticus
  REGION 1..163: note = tr|A0A1W1UQ49|A0A1W1UQ49_PEPAS NADPH-dependent 7-cyano-7-deazaguanine reductase OS=Peptoniphilus asaccharolyticus DSM 20463 OX=573058 GN=queF PE=3 SV=1
MREKEEMKDITLLGNQGTKMPRDYAPEVLEAFDNKHPGNDYFVKFNCPEFTSLCPITGQPDFATIYISYVPNVKMVESKSLKLYLFSFRNRGDFHEDCMNIIMKDLIKLMDPKYIEVWGKFTPRGGISIDPYCNYGKAGTKWEDVAWNRLSNHDLYPENIDNR

SEQ ID NO: 48300 - protein, 163 aa, Peptoniphilus indolicus
  REGION 1..163: note = tr|A0A379DF94|A0A379DF94_9FIRM NADPH-dependent 7-cyano-7-deazaguanine reductase OS=Peptoniphilus indolicus OX=33030 GN=queF PE=3 SV=1
MREREEMKNITLLGNQGTKMPGDYAPEVLEAFDNKHTDNDYFVKFNCPEFTSLCPITGQPDFATIYISYVPNVKMVESKSLKLYLFSFRNRGDFHEDCMNIIMKDLIKLMDPKYIEVWGKFTPRGGISIDPYCNYGKAGTKWEEVAWNRLSNHDLYPENIDNR

SEQ ID NO: 48301 - protein, 163 aa, Peptoniphilus indolicus; identical to SEQ ID NO: 48300
  REGION 1..163: note = tr|G4D609|G4D609_9FIRM NADPH-dependent 7-cyano-7-deazaguanine reductase OS=Peptoniphilus indolicus ATCC 29427 OX=997350 GN=queF PE=3 SV=1

SEQ ID NO: 48302 - protein, 181 aa, Peredibacter sp.
  REGION 1..181: note = tr|A0A2E5CFK9|A0A2E5CFK9_9PROT NADPH-dependent 7-cyano-7-deazaguanine reductase OS=Peredibacter sp.; OX = 2024850 GN=queF PE=3 SV=1
MPAKKIAKKAKSASKQRTEKELKGVTLLGSQKTEYSQDYSPEVLESFPNKNPKFDAWTTFVCTEFTSLCPKTGQPDFAKIFINYIADKTMVESKSLKLYLFSFRNHGDFHEDCIQKICNDLYDLMKPKYIEVIGEFTPRGGIAIFPFSSRSNSQAKYKKVKEERFLSYSPGKYSTDLSKVY

SEQ ID NO: 48303 - protein, 276 aa, Perlucidibaca sp.
  REGION 1..276: note = tr|A0A2P6AT87|A0A2P6AT87_9GAMM NADPH-dependent 7-cyano-7-deazaguanine reductase OS=Perlucidibaca sp. HR-E; OX = 2094561 GN=queF PE=3 SV=1
MDLHALTTLGQATVYPDTHDAGLLQPIPRRLAREALGLAGDGAAPLPFIGVDLWTHYELSWLEPGGKPVVAVGEIRVPADSPALIESKSLKLYFNSLNFTRFATPADFTALVEGELSQAAGAPVTLTLLPADAPLRFGGLPGRCLDDLPLSIEDRREPDPGLLRCDPSRIVDETWHSHLLRSNCPVTDQPDWGSVVVRCHGPRIDPDSLLAYLVSFRRHADFHEQCVERIFLDLQALTGAALLTVHARYTRRGGLDINPFRSTAEELAGSWRTVRQ

SEQ ID NO: 48304 - protein, 271 aa, unidentified
  source 1..271: note = Permianibacter aggregans
  REGION 1..271: note = tr|A0A4R6UAZ3|A0A4R6UAZ3_9GAMM NADPH-dependent 7-cyano-7-deazaguanine reductase OS=Permianibacter aggregans OX=1510150 GN=queF PE=3 SV=1
MAQTELLLGKPVLYKDQYDPSLLFPVPRSQNREQLPPNIAFHGVDIWNGYELSWLNEKGKPEVALGEFAVPYDSPNLIESKSFKLYLNSFNGSRFSSMDDVAKKMRTDLSAAAGKSVEVTLKSAGENVMRPQWPGDGVCIDELDVACQDYEVNADLLRCVDNPETARETLYSQLLKSNCPVTGQPDWATVVVRYRGPKIDEGALLQYIVSFRNHAEFHEHCVERMFCDIMQRCHPQQLSVFAKYTRRGGLDINPFRSNYEDWVDNRRAARQ

SEQ ID NO: 48305 - protein, 131 aa, Persephonella hydrogeniphila
  REGION 1..131: note = tr|A0A285NK08|A0A285NK08_9AQUI NADPH-dependent 7-cyano-7-deazaguanine reductase OS=Persephonella hydrogeniphila OX=198703 GN=queF PE=3 SV=1
MELKYGEREIQEAKLEKWPNPNPEKNYTIDITFPEFTCLCPRSGYPDFATIKITYIPDKYIVELKSLKLYLNKYRNMYISHEEATNKIYDDLYELLQPRFLEVIGDWHPRGNVKTIIKVSSEDQQKEEKSL

SEQ ID NO: 48306 - protein, 128 aa, Persephonella marina
  REGION 1..128: note = tr|C0QTY7|C0QTY7_PERMH NADPH-dependent 7-cyano-7-deazaguanine reductase OS=Persephonella marina (strain DSM 14350 / EX-H1) OX=123214 GN=queF PE=3 SV=1
MSGELKYGEKEIQEAKLEVWPNPNPEKNYTINITFPEFTCLCPRSGYPDFATIKITYVPDQYIVELKSLKLYLNKYRNQYISHEEATNKIYDDLYNLLKPRFLEVIGDWNPRGNVKTVIKISSEEQGK

SEQ ID NO: 48307 - protein, 130 aa, Persephonella sp.
  REGION 1..130: note = tr|A0A432RXU9|A0A432RXU9_9AQUI NADPH-dependent 7-cyano-7-deazaguanine reductase OS=Persephonella sp.; OX = 2060922 GN=queF PE=3 SV=1
MEEKRELKYGEKEILEAKLEPWENPYPDRNYNINITFPEFTCLCPRSGYPDFATIKINYIPDKYIVELKSLKLYLNQYRNRYISHEEATNKIYDDLYNLLKPRFLEVIGDWNPRGNVKTIIKVSSEDNKE

SEQ ID NO: 48308 - protein, 128 aa, Persephonella sp.
  REGION 1..128: note = tr|A0A432S166|A0A432S166_9AQUI NADPH-dependent 7-cyano-7-deazaguanine reductase OS=Persephonella sp.; OX = 2060922 GN=queF PE=3 SV=1
MEDKLKYGEKEILEAKLEPWENPYPDRNYYIDISFPEFTCLCPRSGYPDFATIKIKYIPDKYIVELKSLKLYLNQYRNKYISHEEATNKIYEDLYNLLKPRFLEVIGDWNPRGNVKTVIKVSSEDNKE

SEQ ID NO: 48309 - protein, 156 aa, unidentified
  source 1..156: note = Petrimonas mucosa
  REGION 1..156: note = tr|A0A1G4G7E4|A0A1G4G7E4_9PORP NADPH-dependent 7-cyano-7-deazaguanine reductase OS=Petrimonas mucosa; OX = 1642646 GN=queF PE=3 SV=1
MSQTENLSLLGKKTAYRQDYAPEVLEAFENKHQGNDYWVTFDCPEFTSLCPITGQPDFATIRIDYIPDVKMVESKSLKIYLFSFRNHGAFHEDCVNIIMKDLIGLMDPKYIEVTGIFTPRGGISIYPYANYGRPGTRYEKFAEQRLFNHSIPINRP

SEQ ID NO: 48310 - protein, 155 aa, Petrimonas sp.
  REGION 1..155: note = tr|A0A3G9E1S6|A0A3G9E1S6_9PORP NADPH-dependent 7-cyano-7-deazaguanine reductase OS=Petrimonas sp. IBARAKI; OX = 1978337 GN=queF PE=3 SV=1
MSQTENLSLLGKKTAYKQDYAPEVLEAFENKHQSNDYWVTFDCPEFTSLCPITGQPDFATIRIDYIPDVKMVESKSLKIYLFSFRNHGAFHEDCVNIIMKDLIGLMDPKYIEVTGVFTPRGGISIYPYVNYGRSGTRYERLAEERLFNHSFPLNT

SEQ ID NO: 48311 - protein, 154 aa, Phaeobacter gallaeciensis
  REGION 1..154: note = tr|V9WLP1|V9WLP1_9RHOB NADPH-dependent 7-cyano-7-deazaguanine reductase OS=Phaeobacter gallaeciensis DSM 26640 OX=1423144 GN=queF PE=3 SV=1
MTDDIYKDLKQLGGATVMPTSPEEAELERVPNPQADVAYNIRFTAPEFTSLCPMTGQPDFAHLVIDYVPGKWLVESKSLKLFLGSFRNHGAFHEDCTVSIARRLADFLEPQWLRIGGYWYPRGGIPIDVFWQTGPLPDAIWIPDQGVPPYRGRG

SEQ ID NO: 48312 - protein, 154 aa, Phaeobacter gallaeciensis
  REGION 1..154: note = tr|A0A1B0ZMZ4|A0A1B0ZMZ4_9RHOB NADPH-dependent 7-cyano-7-deazaguanine reductase OS=Phaeobacter gallaeciensis OX=60890 GN=queF1,queF PE=3 SV=1
MTNDIYSNLKQLGGETRIPTSPEEAELERVPNPQADVDYNVRFTAPEFTSLCPMTGQPDFAHLVIDYVPGDWLVESKSLKLFLTSFRNHGAFHEDCTISIARRLVDFLDPRWLRIGGYWYPRGGIPIDVFWQTGPLPESVWIPDQGVPPYRGRG

SEQ ID NO: 48313 - protein, 154 aa, Phaeobacter inhibens
  REGION 1..154: note = tr|I7EJH1|I7EJH1_PHAIB NADPH-dependent 7-cyano-7-deazaguanine reductase OS=Phaeobacter inhibens (strain ATCC 700781 / DSM 17395 / CIP 105210 / JCM 21319 / NBRC 16654/ NCIMB 13546 / BS107) OX=391619 GN=queF PE=3 S
MTDDIYKNLKQLGGATVMPASPEEAELERVPNPQADVAYNIRFTAPEFTSLCPMTGQPDFAHLVIDYVPGKWLVESKSLKLFLGSFRNHGAFHEDCTVSIARRLADFLDPQWLRIGGYWYPRGGIPIDVFWQTGPLPEGVWIPDQGVPPYRGRG

SEQ ID NO: 48314 - protein, 154 aa, Phaeobacter inhibens
  REGION 1..154: note = tr|A0A135II56|A0A135II56_9RHOB NADPH-dependent 7-cyano-7-deazaguanine reductase OS=Phaeobacter inhibens; OX = 221822 GN=queF PE=3 SV=1
MTDDIYKDLKQLGGATVMPASPEEAELERVPNPQADVAYNIRFTAPEFTSLCPMTGQPDFAHLVIDYVPGKWLVESKSLKLFLGSFRNHGAFHEDCTVSIARRLADFLDPQWLRIGGYWYPRGGIPIDVFWQTGPLPEGVWIPDQGVPPYRGRG

SEQ ID NO: 48315 - protein, 154 aa, unidentified
  source 1..154: note = Phaeobacter italicus
  REGION 1..154: note = tr|A0A0H5DEV3|A0A0H5DEV3_9RHOB NADPH-dependent 7-cyano-7-deazaguanine reductase OS=Phaeobacter italicus; OX = 481446 GN=queF PE=3 SV=1
MSEDIYQNLKQLGGATVMPSSPEDAELERVENPQADVAYNVRFTAPEFTSLCPMTGQPDFAHLVIDYVPGKWLVESKSLKLFLGSFRNHGAFHEDCTVSIARRLADFLEPQWLRIGGYWYPRGGIPIDVFWQTGPLPDGVWIPDQGVPPYRGRG

SEQ ID NO: 48316 - protein, 154 aa, unidentified
  source 1..154: note = Phaeobacter piscinae
  REGION 1..154: note = tr|A0A0C2L4D3|A0A0C2L4D3_9RHOB NADPH-dependent 7-cyano-7-deazaguanine reductase OS=Phaeobacter piscinae; OX = 1580596 GN=queF PE=3 SV=1
MTDDIYKDLKQLGGATVMPTSPEDAELERVPNPQADVAYNIRFTAPEFTSLCPMTGQPDFAHLVIDYVPGKWLVESKSLKLFLGSFRNHGAFHEDCTVSIARRLADFLAPQWLRIGGYWYPRGGIPIDVFWQTGPLPEGVWIPDQGVPPYRGRG

SEQ ID NO: 48317 - protein, 154 aa, unidentified
  source 1..154: note = Phaeobacter piscinae
  REGION 1..154: note = tr|A0A291FWZ7|A0A291FWZ7_9RHOB NADPH-dependent 7-cyano-7-deazaguanine reductase OS=Phaeobacter piscinae; OX = 1580596 GN=queF PE=3 SV=1
MTDDIYKDLKQLGGATVMPASPEDAELERVPNPQADVAYNIRFTAPEFTSLCPMTGQPDFAHLVIDYVPGKWLVESKSLKLFLGSFRNHGAFHEDCTVSIARRLADFLEPQWLRIGGYWYPRGGIPIDVFWQTGPLPEGVWIPDQGVPPYRGRG

SEQ ID NO: 48318 - protein, 154 aa, unidentified
  source 1..154: note = Phaeobacter porticola
  REGION 1..154: note = tr|A0A1L3I7N2|A0A1L3I7N2_9RHOB NADPH-dependent 7-cyano-7-deazaguanine reductase OS=Phaeobacter porticola; OX = 1844006 GN=queF PE=3 SV=1
MSDDIYKNLKQLGGATVMPSNPDEAELERVPNPQADVAYNVRFTAPEFTSLCPMTGQPDFAHLVIDYVPGPWLVESKSLKLFLGSFRNHGAFHEDCTVSIARRLADFLDPQWLRIGGYWYPRGGIPIDVFWQTGPMPDGVWIPDQGVPPYRGRG

SEQ ID NO: 48319 - protein, 154 aa, Phaeobacter sp.; identical to SEQ ID NO: 48317
  REGION 1..154: note = tr|A0A384FVQ5|A0A384FVQ5_9RHOB NADPH-dependent 7-cyano-7-deazaguanine reductase OS=Phaeobacter sp. S60; OX = 1569353 GN=queF PE=3 SV=1

SEQ ID NO: 48320 - protein, 154 aa, Phaeobacter sp.
  REGION 1..154: note = tr|A0A0P6R669|A0A0P6R669_9RHOB NADPH-dependent 7-cyano-7-deazaguanine reductase OS=Phaeobacter sp. 11ANDIMAR09 OX=1225647 GN=queF PE=3 SV=1
MSEDIYSNLKQLGGETRVPTSPKEAELERVPNPQVDVAYNVRFTAPEFTSLCPMTGQPDFAHLVIDYVPGPWLIESKSLKLFLTSFRNHGAFHEDCTISIARRLAEFLAPQWLRIGGYWYPRGGIPIDVFWQTGPLPHDVWIPDQGVPPYRGRG

SEQ ID NO: 48321 - protein, 154 aa, Phaeospirillum fulvum
  REGION 1..154: note = tr|A0A1H6IJ60|A0A1H6IJ60_PHAFV NADPH-dependent 7-cyano-7-deazaguanine reductase OS=Phaeospirillum fulvum; OX = 1082 GN=queF PE=3 SV=1
MSGTIPPGLTQLGQATALPSDPAEAVLEVVPNPHPGSLYLVRFTAPEFTSLCPITGQPDFAHLVIDYAPDAALVESKSLKLFLGSFRNHGAFHEDCTLAIAKRVVAATAPTWLRIAGYWYPRGGIPIDVFWQTGPAPAGLWLPDPGVPSYRGRG

SEQ ID NO: 48322 - protein, 153 aa, Phaeospirillum fulvum
  REGION 1..153: note = tr|S9SBR4|S9SBR4_PHAFV NADPH-dependent 7-cyano-7-deazaguanine reductase OS=Phaeospirillum fulvum MGU-K5 OX=1316936 GN=queF PE=3 SV=1
MSGTSPGLTQLGQATALPSDPAEAVLEVVPNPHPGSLYLVRFTAPEFTSLCPITGQPDFAHLVIDYAPDAALVESKSLKLFLGSFRNHGSFHEDCTLAIAKRVVAATAPTWLRIAGYWYPRGGIPIDVFWQTGPAPAGLWLPDPGVPSYRGRG

SEQ ID NO: 48323 - protein, 153 aa, Phaeospirillum molischianum
  REGION 1..153: note = tr|H8FQJ0|H8FQJ0_PHAMO NADPH-dependent 7-cyano-7-deazaguanine reductase OS=Phaeospirillum molischianum DSM 120 OX=1150626 GN=queF PE=3 SV=1
MSGAPPGLTQLGQATALPSDPAEAVLEVVPNPHPGSLYLVRFTAPEFTSLCPITGQPDFAHLVIDYAPDVALVESKSLKLFLGSFRNHGAFHEDCTLGIAKRLVAATAPTWLRIAGYWYPRGGIPIDVFWQTGPAPVGLWLPDPGVPTYRGRG

SEQ ID NO: 48324 - protein, 165 aa, Phascolarctobacterium faecium
  REGION 1..165: note = tr|A0A3G9GU56|A0A3G9GU56_9FIRM NADPH-dependent 7-cyano-7-deazaguanine reductase OS=Phascolarctobacterium faecium OX=33025 GN=queF PE=3 SV=1
MTSGRDQKELTGVSLLGNKTKYPTDYAPEVLEAFINKHPGNDYFVKFNCPEFTSLCPMTGQPDFAAIYISYVPDQKLVESKSLKLYLFSFRNHGDFHEDCVNIIMKDLIKLMEPKYIEVWGKFTPRGGLAIDPYANYGKPGTEWEAAAKKRLMMHDMYPENVSYR

SEQ ID NO: 48325 - protein, 165 aa, Phascolarctobacterium sp.
  REGION 1..165: note = tr|R6I4P2|R6I4P2_9FIRM NADPH-dependent 7-cyano-7-deazaguanine reductase OS=Phascolarctobacterium sp. CAG:207 OX=1262914 GN=queF PE=3 SV=1
MTSGRDQKELTGVSLLGNKTKYPTDYAPEVLEAFINKHPSNDYFVKFNCPEFTSLCPMTGQPDFAAIYISYVPDQKLVESKSLKLYLFSFRNHGDFHEDCVNIIMKDLIKLMEPKYIEVWGKFTPRGGLAIDPYANYGKPGTEWEAAAKKRLMMHDMYPENVSYR

SEQ ID NO: 48326 - protein, 166 aa, Phascolarctobacterium sp.
  REGION 1..166: note = tr|A0A316SAX6|A0A316SAX6_9FIRM NADPH-dependent 7-cyano-7-deazaguanine reductase OS=Phascolarctobacterium sp. OX=2049039 GN=queF PE=3 SV=1
MTSGRTQEELKGVGLLGHKTDYPTDYAPQVLESFVNKHPGNDYFVKFNCPEFTSLCPMTGQPDFATIYISYVPDMKLVESKSLKLYLFSFRNHGDFHEDCVNIIMKDLIKLMEPKYIEVWGKFTPRGGLSIDPYANYGKPGTEWEEVARKRLHYHDMNPEIVNYRK

SEQ ID NO: 48327 - protein, 165 aa, Phascolarctobacterium succinatutens
  REGION 1..165: note = tr|R6WLL2|R6WLL2_9FIRM NADPH-dependent 7-cyano-7-deazaguanine reductase OS=Phascolarctobacterium succinatutens CAG:287 OX=1263101 GN=queF PE=3 SV=1
MTSGRSKEELQGVSLLGNKTAYKSDYAPEVLESFPNKHPQNDYWVKFNCPEFTSLCPMTGQPDFATIYISYVPDERLVESKSLKLYLFSFRNHGDFHEDCVNIIMKDLIKLMEPKYIEVWGKFLPRGGLSIDPYANYGKPGTEWEQAAKKRLFMHDMYPETVNNR

SEQ ID NO: 48328 - protein, 165 aa, Phascolarctobacterium succinatutens; identical to SEQ ID NO: 48327
  REGION 1..165: note = tr|A0A1Q6R1P6|A0A1Q6R1P6_9FIRM NADPH-dependent 7-cyano-7-deazaguanine reductase OS=Phascolarctobacterium succinatutens OX=626940 GN=queF PE=3 SV=1

SEQ ID NO: 48329 - protein, 151 aa, unidentified
  source 1..151: note = Phenylobacterium deserti
  REGION 1..151: note = tr|A0A328AD97|A0A328AD97_9CAUL NADPH-dependent 7-cyano-7-deazaguanine reductase OS=Phenylobacterium deserti OX=1914756 GN=queF PE=3 SV=1
MEETHLTQLGRDVRGFASPEEAVLERVPNPHADSLYLTRFTAPEFTSLCPVTGQPDFAHLVIDYAPADWLVESKSLKLYLTSFRNHGAFHEDCTVAIGRRLVAELEPRWLRIGGYWYPRGGIPIDVFWQTGAPPEGLWLPDQGVPSYRGRG

SEQ ID NO: 48330 - protein, 151 aa, unidentified
  source 1..151: note = Phenylobacterium hankyongense
  REGION 1..151: note = tr|A0A328B0C2|A0A328B0C2_9CAUL NADPH-dependent 7-cyano-7-deazaguanine reductase OS=Phenylobacterium hankyongense OX=1813876 GN=queF PE=3 SV=1
MEETHLTQLGRDARGFASPDEAVLERVPNPHPDALYLARFTVPEFTSLCPVTGQPDFAHLVIDYAPAEWLVESKSLKLYLGSFRNHGAFHEDCTVAIGLRLVAELAPRWLRIGGYWFPRGGIPIDVFWQSGAVPDGLWLPDQGVAPYRGRG

SEQ ID NO: 48331 - protein, 151 aa, unidentified
  source 1..151: note = Phenylobacterium kunshanense
  REGION 1..151: note = tr|A0A328BHH9|A0A328BHH9_9CAUL NADPH-dependent 7-cyano-7-deazaguanine reductase OS=Phenylobacterium kunshanense OX=1445034 GN=queF PE=3 SV=1
MEDTQLTQLGRDVRGFDSPEAAILECVPNPHPGTTYLVRFTAPEFTSLCPVTGQPDFAHLVIDYVPGEWLVESKSLKLYLGAFRNHGAFHEDCTLAIAKRLVETLSPPWLRIGGYWYPRGGIPIDVFWQTGAAPEGLWLPDQGVAPYRGRG

SEQ ID NO: 48332 - protein, 151 aa, Phenylobacterium sp.
  REGION 1..151: note = tr|A0A525JP11|A0A525JP11_9CAUL NADPH-dependent 7-cyano-7-deazaguanine reductase OS=Phenylobacterium sp.; OX = 1871053 GN=queF PE=3 SV=1
MDDTHLTQLGREVRGFASPDAAVLERVPNPQADTLYLARFTAPEFTSLCPVTGQPDFAHLVIDYAPGDWLIESKSLKLYLASFRSHGAFHEDCTVAIGRRIVATAEPRWLRIGGYWFPRGGIPIDVFWQSGPAPEGLWLPDQGVAPYRGRG

SEQ ID NO: 48333 - protein, 151 aa, Phenylobacterium sp.
  REGION 1..151: note = tr|A0A0Q8M0D7|A0A0Q8M0D7_9CAUL NADPH-dependent 7-cyano-7-deazaguanine reductase OS=Phenylobacterium sp. Root700 OX=1736591 GN=queF PE=3 SV=1
MDEMHLTQLGRDVRGFDSPETAVLERVPNPQSDTLYLARFTAPEFTSLCPVTGQPDFAHLVIDYAPGDWLIESKSLKLYLGSFRNHGAFHEDCTVAIGRKIVEIAAPRWLRIGGYWFPRGGIPIDVFWQSGPAPQGLWVPDQGVATYRGRG

SEQ ID NO: 48334 - protein, 151 aa, unidentified
  source 1..151: note = Phenylobacterium zucineum
  REGION 1..151: note = tr|A0A227JMB4|A0A227JMB4_9CAUL NADPH-dependent 7-cyano-7-deazaguanine reductase OS=Phenylobacterium zucineum OX=284016 GN=queF PE=3 SV=1
MTDTHLTQLGQTVPGFAGPEEAVLERVPNPQRDALYLARFTAPEFTSLCPVTGQPDFATLMIDYAPGDWLIESKSLKLYLGSFRNHGAFHEDCTVAIGRKIVEIAQPKWLRIGGYWYPRGGIPIDVFWQTGPAPHGLWLPDQGMPPYRGRG

SEQ ID NO: 48335 - protein, 151 aa, unidentified
  source 1..151: note = Phenylobacterium zucineum
  REGION 1..151: note = tr|B4RF68|B4RF68_PHEZH NADPH-dependent 7-cyano-7-deazaguanine reductase OS=Phenylobacterium zucineum (strain HLK1) OX=450851 GN=queF PE=3 SV=1
MEETHLSQLGRDVRGFDSPEAAVVERVPNPHKGETYLVRFTAPEFTSLCPVTGQPDFAHLVIDYVPGEWLVESKSLKLYLASFRNHGAFHEDCTVAIGKRLVAELAPQWLRIGGYWYPRGGIPIDVFWQTGPAPEGLWLPDQGVAPYRGRG

SEQ ID NO: 48336 - protein, 163 aa, unidentified
  source 1..163: note = Phorcysia thermohydrogeniphila
  REGION 1..163: note = tr|A0A4R1G5W1|A0A4R1G5W1_9BACT NADPH-dependent 7-cyano-7-deazaguanine reductase OS=Phorcysia thermohydrogeniphila OX=936138 GN=queF PE=3 SV=1
MERKDFGTVSKLGKKTDYVFDYSPDVLEKFPNKFPNRIYWVSFNCPEFTTLCPITGQPDFATIYIQYIPDKWLVESKSLKLYLFSFRNARGFHEDTVNVIADDLFKLLNPFYLEVYGEFNPRGGISIDPFVQRYQEVDWVVELARERFKLHRIVPPEIRRNRG

SEQ ID NO: 48337 - protein, 138 aa, unidentified
  source 1..138: note = Phormidesmis priestleyi
  REGION 1..138: note = tr|A0A2T1DCP6|A0A2T1DCP6_9CYAN NADPH-dependent 7-cyano-7-deazaguanine reductase OS=Phormidesmis priestleyi ULC007 OX=1920490 GN=queF PE=3 SV=1
MTHPQTQETSSAPGVKYGERIIEEGGLITFPNPRPGRRYTIAITLPEFTCKCPFSGYPDFGTIYVTYVPDQRVVELKAIKLYINSYRDRYISHEESANQILDDLVAACDPLEINVRADYTPRGNVHTVVEVNHKKGEA

SEQ ID NO: 48338 - protein, 148 aa, unidentified
  source 1..148: note = Phormidesmis priestleyi
  REGION 1..148: note = tr|A0A0P7ZS41|A0A0P7ZS41_9CYAN NADPH-dependent 7-cyano-7-deazaguanine reductase OS=Phormidesmis priestleyi Ana OX=1666911 GN=queF1 PE=3 SV=1
MTKGSITTQDIATTTSSEAVLYGERAIQEGRLITFPNPRIGREYTIRITLPEFTCKCPFSGYPDFATIYIDYVPNQKVVELKAIKLYINSYRDRNISHEESVNLIMDDFVAACDPLSVNIKGDFLPRGNVHTVIEVSHQKDIASVRLE

SEQ ID NO: 48339 - protein, 123 aa, Phormidium ambiguum
  REGION 1..123: note = tr|A0A1U7IEA7|A0A1U7IEA7_9CYAN NADPH-dependent 7-cyano-7-deazaguanine reductase OS=Phormidium ambiguum IAM M-71 OX=454136 GN=queF PE=3 SV=1
MKYGERLIAEGQLITFPNPRIGRRYDVNISLPEFTCKCPFSGYPDFATIYISYVPNEKVVELKSLKLYINSFRDRYISHEESINQILDDFVAACDPLEATVKGDFAPRGNVHTVIEVSHQRNS

SEQ ID NO: 48340 - protein, 144 aa, Phormidium sp.
  REGION 1..144: note = tr|A0A522XJM6|A0A522XJM6_9CYAN NADPH-dependent 7-cyano-7-deazaguanine reductase OS=Phormidium sp. SL48-SHIP OX=2518363 GN=queF PE=3 SV=1
MHDSQRPPNPTNPPDASAMKYGEREIQDGQLITFPNPRPGRRYEIRISLPEFTCKCPFSGYPDFATIHLVYCPDETVVELKALKLYINRYRDRYISHEESANQILDDFVAACDPLEVTLRADFLPRGNVHTEIEIRHVKGESRT

SEQ ID NO: 48341 - protein, 126 aa, Phormidium sp.
  REGION 1..126: note = tr|A0A0N8KPH0|A0A0N8KPH0_9CYAN NADPH-dependent 7-cyano-7-deazaguanine reductase OS=Phormidium sp. OSCR; OX = 1666905 GN=queF1 PE=3 SV=1
MKYGEREIQEGELITFPNPRPGRRYEIRISLPEFTCKCPFSGYPDFATIHLVYVPDETVVELKALKLYINSYRDRYISHEESANQILDDFVAACDPLEVNLRADFLPRGNVHTEIEIRHVKGESGT

SEQ ID NO: 48342 - protein, 143 aa, unidentified
  source 1..143: note = Phormidium tenue
  REGION 1..143: note = tr|A0A1U7J9R4|A0A1U7J9R4_9CYAN NADPH-dependent 7-cyano-7-deazaguanine reductase OS=Phormidium tenue NIES-30 OX=549789 GN=queF PE=3 SV=1
MTIASASASQYGDRAILQTSVDPLEKWPNPSENVYTIHLEHPEFTALCPRSGYPDFGTIVVDYCPGPWVVELKAFKLYINSFRDQRISHENVANQIADRLWNELQPQGLRVIGDYTRRGGVKTVITVKKGSCKEFEPYTPNVL

SEQ ID NO: 48343 - protein, 144 aa, unidentified
  source 1..144: note = Phormidium willei
  REGION 1..144: note = tr|A0A168U8B8|A0A168U8B8_9CYAN NADPH-dependent 7-cyano-7-deazaguanine reductase OS=Phormidium willei BDU 130791 OX=399101 GN=queF PE=3 SV=1
MHDSQRPPNPTNSPEASSMKYGEREIQEGELITFPNPRPGRRYEIRVSLPEFTCKCPFSGYPDFATIHLVYVPDETVVELKALKLYINSYRDRYISHEESANQILDDFVAACDPLEVNLRADFLPRGNVHTEIEIHHVKGESGT

SEQ ID NO: 48344 - protein, 282 aa, Photobacterium angustum
  REGION 1..282: note = tr|Q1ZLJ2|Q1ZLJ2_PHOAS NADPH-dependent 7-cyano-7-deazaguanine reductase OS=Photobacterium angustum (strain S14 / CCUG 15956) OX=314292 GN=queF PE=3; SV = 1
MSKYKDAKELAGLTLGKTTEYKDQYDPSLLQAVPRSLNRTDLNISDDELPFTGYDIWTLYELSWLNSKGLPQVAIGEVRLPASSPNLIESKSFKLYLNSFNQTRFESWQGIADTLQIDLSRCAGADVDVTIQPLEDFSEQPIVNFFGACIDDQDIEINDYGFNPALLENGVDEEEVEEILHSHLLKSNCLITSQPDWGSVRIAYKGKRINREKLLRYIISFRNHNEFHEQCVERIFSDIMKYCKPELLTVYARYTRRGGLDINPYRTNMGKSPSDNFRLARQ

SEQ ID NO: 48345 - protein, 282 aa, Photobacterium angustum
  REGION 1..282: note = tr|A0A2T3LV40|A0A2T3LV40_PHOAN NADPH-dependent 7-cyano-7-deazaguanine reductase OS=Photobacterium angustum OX=661 GN=queF PE=3 SV=1
MSKYKDAKELAGLTLGQTTEYKDQYDPSLLQAVPRSLNRTDLNISDDALPFTGYDIWTLYELSWLNSKGLPQVAIGEVRLPASSPNLIESKSFKLYLNSFNQTRFESWQGIADTLQIDLSRCAGADVDVTIQPLEDFSEQPIVNFFGACIDDQDIEIEDYCFNPALLENSVEEEEVEEILHSHLLKSNCLITSQPDWGSVRIAYKGKRINREKLLRYIISFRNHNEFHEQCVERIFSDIMKYCKPELLTVYARYTRRGGLDINPYRTNMGKSPSDNFRLARQ

SEQ ID NO: 48346 - protein, 129 aa, Photobacterium aphoticum
  REGION 1..129: note = tr|A0A090RJH0|A0A090RJH0_9GAMM NADPH dependent preQ0 reductase OS=Photobacterium aphoticum OX=754436; GN = JCM19237_900 PE=4 SV=1
MTEELNSHLLKSNCLITSQPDWGSVRISYTGKQIDREKLLRYIVSFRNHNEFHEQCVERIFTDIMKYCQPELLTVYARYTRRGGLDINPYRTNMAKRQAITSAWLANKCQDDDKSSKSADFAGLDWLTH

SEQ ID NO: 48347 - protein, 175 aa, Photobacterium aphoticum
  REGION 1..175: note = tr|A0A090QXP8|A0A090QXP8_9GAMM NADPH dependent preQ0 reductase OS=Photobacterium aphoticum OX=754436; GN = JCM19237_899 PE=4 SV=1
MSKYQDAKELAGLTLGKTTEYKDQYDPSLLQPVPRSLNRDDLALGDTLPFTGYDIWTLYELSWLNGKGLPQVAIGEVRLPASSPNLIESKSFKLYLNSFNQTQFDSWQQVADLLQKDLSHCAGADVDVTIQPLSDFTGEEIVNFSGECIDDQDIEITDYGFNQRTWKARQSTAST

SEQ ID NO: 48348 - protein, 281 aa, unidentified
  source 1..281: note = Photobacterium aquae
  REGION 1..281: note = tr|A0A0J1GPD6|A0A0J1GPD6_9GAMM NADPH-dependent 7-cyano-7-deazaguanine reductase OS=Photobacterium aquae; OX = 1195763 GN=queF PE=3 SV=1
MSKYKDAKELAGLTLGKTTEYKDQYDPSLLQPVPRSLNRDDLALGDSLPFTGYDIWTLYELSWLNGKGLPQVAIGEVRLPANSPNLIESKSFKLYLNSFNQTRFDNWQQVADQLQKDLSQCAGADVDVTIQPLSDFTNEEVVAFSGTCIDEQDIEISDYAFNPDHLEGAADGEIVTEELNSNLLKSNCLITSQPDWGSVRISYTGKQINREKLLRYIVSFRNHNEFHEQCVERIFTDIMKYCQPELLTVYARYTRRGGLDINPYRTNMGKTPSNNSRMARQ

SEQ ID NO: 48349 - protein, 283 aa, Photobacterium aquimaris
  REGION 1..283: note = tr|A0A2T3IGB7|A0A2T3IGB7_9GAMM NADPH-dependent 7-cyano-7-deazaguanine reductase OS=Photobacterium aquimaris OX=512643 GN=queF PE=3 SV=1
MSKYKDAKELAGLTLGQKTEYKDQYDPSLLQPVPRSLNRTDINISDDALPFTGYDIWTLYELSWLNKKGLPQVAIGEVRLPASSPNLIESKSFKLYLNSFNQTRFDGWQAIADTLQIDLSRCAGEDVDVTIQPLTDFNDQPIVNFFGECIDDQDIEINDYTFKPEYLEGAANNDDIVEEIVHSHLLKSNCLITNQPDWGSVRIAYKGNRIDREQLLRYIVSFRNHNEFHEQCVERIFNDIMRFCQPELLTVYARYTRRGGLDINPYRTNMGKTPSDNFRLARQ

SEQ ID NO: 48350 - protein, 283 aa, Photobacterium aquimaris
  REGION 1..283: note = tr|A0A1B8I2Q1|A0A1B8I2Q1_9GAMM NADPH-dependent 7-cyano-7-deazaguanine reductase OS=Photobacterium aquimaris OX=512643 GN=queF PE=3 SV=1
MSKYKDAKELAGLTLGQKTEYKDQYDPSLLQPVPRSLNRTDINISDDALPFTGYDIWTLYELSWLNKKGLPQVAIGEVRLPASSPNLIESKSFKLYLNSFNQTRFDGWQAIADTLQIDLSRCAGEDVDVTIQPLTDFNDQPIVNFFGECIDDQDIEINDYTFKPEYLEGAADNNDIVEEIVHSHLLKSNCLITNQPDWGSVRIAYKGNRIDREQLLRYIVSFRNHNEFHEQCVERIFNDIMRFCQPELLTVYARYTRRGGLDINPYRTNMGKTPSDNFRLARQ

SEQ ID NO: 48351 - protein, 283 aa, unidentified
  source 1..283: note = Photobacterium carnosum
  REGION 1..283: note = tr|A0A2N4UPH6|A0A2N4UPH6_9GAMM NADPH-dependent 7-cyano-7-deazaguanine reductase OS=Photobacterium carnosum OX=2023717 GN=queF PE=3 SV=1
MSKYKDAKELAGLTLGKKTEYKDQYDPSLLQPVPRSLNRTDINISNDALPFTGYDIWTLYELSWLNNKGLPQVAIGEVRLPVTSPNLIESKSFKLYLNSFNQTRFDNWQDIADTLQIDLSRCAGEDVDVTIQPLTDFNEQPIVNFFGECIDDQDIEIKDYVFKPEYLEGAADNNDIVEEIVHSHLLKSNCLITNQPDWGSVRIAYKGNRIDREKLLRYIVSFRNHNEFHEQCVERIFNDIMRFCQPELLTVYARYTRRGGLDINPYRTNMGKTPSDNFRLARQ

SEQ ID NO: 48352 - protein, 282 aa, unidentified
  source 1..282: note = Photobacterium damsela
  REGION 1..282: note = tr|A0A1Q9H3A3|A0A1Q9H3A3_PHODP NADPH-dependent 7-cyano-7-deazaguanine reductase OS=Photobacterium damsela subsp. piscicida OX=38294 GN=queF PE=3 SV=1
MSKYQGAEELAGLTLGQKTEYKDQYDPSLLQPVPRSLNRDDLHITDDNLPFTGYDIWTLYELSWLNSKGLPQVAIGEVRLPASSPNLIESKSFKLYLNSLNQTRFASWQKVADVLQIDLSACAGQDVDVTIQPLSDFTEEQIVAFSGHNIDDQDIEIDDYQFNPAYLEDAIDDEIVTEELNSNLLKSNCLITSQPDWGSVRISYKGKRINREKLLRYIISFRNHNEFHEQCVERIFTDIMKYCQPELLTVYARYTRRGGLDINPYRTNQGKTPSNNFRMARQ

SEQ ID NO: 48353 - protein, 282 aa, unidentified
  source 1..282: note = Photobacterium damsela
  REGION 1..282: note = tr|A0A1V1V5B6|A0A1V1V5B6_PHODP NADPH-dependent 7-cyano-7-deazaguanine reductase OS=Photobacterium damsela subsp. piscicida OX=38294 GN=queF PE=3 SV=1
MSKYQGAEELAGLTLGQKTEYKDQYDPSLLQPVPRSLNRDDLHITDDNLPFTGYDIWTLYELSWLNSKGLPQVAIGEVRLPASSPNLIESKSFKLYLNSLNQTRFASWQEVADVLQIDLSACAGQDVDVTIQPLSDFTEEQIVAFSGHNIDDQDIEIDDYQFNPAYLEDAIDDEIVTEELNSNLLKSNCLITSQPDWGSVRISYKGKRINREKLLRYIISFRNHNEFHEQCVERIFTDIMKYCQPELLTVYARYTRRGGLDINPYRTNQGKTPSNNFRMARQ

SEQ ID NO: 48354 - protein, 282 aa, Photobacterium damselae
  REGION 1..282: note = tr|D0YW65|D0YW65_PHODD NADPH-dependent 7-cyano-7-deazaguanine reductase OS=Photobacterium damselae subsp. damselae CIP 102761 OX=675817 GN=queF PE=3; SV = 1
MSKYQGAKELAGLTLGQKTEYKDQYDPSLLQPVPRSLNRNDLHITDDNLPFTGYDIWTLYELSWLNSKGLPQVAIGEVRLPASSPNLIESKSFKLYLNSLNQTRFASWQEVADVLQIDLSACAGQDVDVTIQPLSDFTEEQIVAFTGHNIDDQDIEIDDYQFNPAYLEDAIDDEIVTEELNSNLLKSNCLITSQPDWGSVRISYKGKRINREKLLRYIISFRNHNEFHEQCVERIFTDIMKYCQPELLTVYARYTRRGGLDINPYRTNQGKTPSNNFRMARQ

SEQ ID NO: 48355 - protein, 282 aa, Photobacterium damselae; identical to SEQ ID NO: 48354
  REGION 1..282: note = tr|A0A2T3QIB2|A0A2T3QIB2_9GAMM NADPH-dependent 7-cyano-7-deazaguanine reductase OS=Photobacterium damselae OX=38293 GN=queF PE=3 SV=1

SEQ ID NO: 48356 - protein, 281 aa, Photobacterium frigidiphilum
  REGION 1..281: note = tr|A0A2T3JA28|A0A2T3JA28_9GAMM NADPH-dependent 7-cyano-7-deazaguanine reductase OS=Photobacterium frigidiphilum OX=264736 GN=queF PE=3 SV=1
MSKYKDAKELAGLTLGQKTDYIDQYDASLLQPVPRSLNRSDLNLGESLPFTGYDIWTLYELSWLNSKGLPQVAIGEVRLPASSPNLIESKSFKLYLNSFNQTRYDSWQQIADTLQKDLTACAGQEVDVTIQPLEDFTDQTVINFAGNCIDDQDIEINNYDFDAQYLKDAAEGEIVTEDLHSHLLKSNCLITNQPDWGSVKISYKGKQINHEKLLRYLVSFRNHNEFHEQCVERIFTDIMKFCQPELLTVYARYTRRGGLDINPYRTNQGKTPSDNFRLARQ

SEQ ID NO: 48357 - protein, 281 aa, Photobacterium gaetbulicola
  REGION 1..281: note = tr|A0A0B9H7S5|A0A0B9H7S5_9GAMM NADPH-dependent 7-cyano-7-deazaguanine reductase OS=Photobacterium gaetbulicola OX=1295392 GN=queF PE=3 SV=1
MSKYQDAKELAGLTLGKTTEYKDHYDPSLLQPVPRSLNRDDLSLGDDLPFTGYDIWTLYELSWLNKKGLPQVAIGEVRLPANSPNLIESKSFKLYLNSFNQTKFDSWQQIADTLQKDLSECAGADVDVTVQPLSDFDDQPIANFFGECIDDQDIEITDYEFDPSHLEGAASEETVTEILHSHLLKSNCLITSQPDWGSVRISYTGKKIDREKLLRYLISFRDHNEFHEQCVERIFTDIMKYCKPELLTVYARYTRRGGLDINPYRTNMGKTPSDNFRLARQ

SEQ ID NO: 48358 - protein, 281 aa, Photobacterium gaetbulicola
  REGION 1..281: note = tr|A0A0C5WMR4|A0A0C5WMR4_9GAMM NADPH-dependent 7-cyano-7-deazaguanine reductase OS=Photobacterium gaetbulicola Gung47 OX=658445 GN=queF PE=3 SV=1
MSKYQDAKELAGLTLGKTTEYKDQYDPSLLQPVPRSLNRDDLSLGDDLPFTGYDIWTLYELSWLNKKGLPQVAIGEVRLPANSPNLIESKSFKLYLNSFNQTKFDNWQQIADTLQKDLTQCAGADVDVTVQPLSDFDNQPIANFFGECIDDQDIEITDYEFDPSHLEGAASEETVTEILHSHLLKSNCLITSQPDWGSVRISYTGKKIDREKLLRYLISFRDHNEFHEQCVERIFTDIMKYCKPELLTVYARYTRRGGLDINPYRTNMGKTPSDNFRLARQ

SEQ ID NO: 48359 - protein, 281 aa, unidentified
  source 1..281: note = Photobacterium galatheae
  REGION 1..281: note = tr|A0A066RIR5|A0A066RIR5_9GAMM NADPH-dependent 7-cyano-7-deazaguanine reductase OS=Photobacterium galatheae OX=1654360 GN=queF PE=3 SV=1
MSKYKDAKELAGLTLGQKSEYKDQYDPSLLQAVPRKLNRDDLALGDELPFTGYDIWTLYELSWLNNKGLPQVAIGEVRLPASSPNLIESKSFKLYLNSLNNTRIESWQEVADILQKDLSACAGADVDVTIQPLSDFTAQPIVDFGGTCIDEQDIEIDSFDFDPSLLENAAEGEVIEEVLHSHLLKSNCLITSQPDWGSVRISYKGKQINREKLLRYLVSFRNHNEFHEQCVERIFTDLLHFCQPELLTVYARYTRRGGLDINPYRTNQGKTPSDNDRLARQ

SEQ ID NO: 48360 - protein, 281 aa, Photobacterium ganghwense
  REGION 1..281: note = tr|A0A0J1HJI9|A0A0J1HJI9_9GAMM NADPH-dependent 7-cyano-7-deazaguanine reductase OS=Photobacterium ganghwense OX=320778 GN=queF PE=3 SV=1
MSKYQDAKELAGLTLGKTTEYKDQYDPSLLQPVPRSLNRDDLALGDSLPFTGYDIWTLYELSWLNSKGLPQVAIGEVRLPASSPNLIESKSFKLYLNSFNQTRFESWQRVADQLQQDLSNCAGADVDVTIQPLTDFDDQQIVNFSGQCIDEQDIEIDSFDFNPAYLEGAAEGEIVTEELHSHLLKSNCLITSQPDWGSVRISYKGKQINREKLLRYIVSFRNHNEFHEQCVERIFTDIMKYCQPELLTVYARYTRRGGLDINPYRTNMGKTPSDNFRMARQ

SEQ ID NO: 48361 - protein, 281 aa, Photobacterium halotolerans
  REGION 1..281: note = tr|A0A0F5V8S9|A0A0F5V8S9_9GAMM NADPH-dependent 7-cyano-7-deazaguanine reductase OS=Photobacterium halotolerans OX=265726 GN=queF PE=3 SV=1
MSKYKDAKELAGLTLGQKSEYKDQYDPTLLQAVPRKLNRDDLALTDDLPFTGYDIWTLYELSWLNSKGLPQVAIGEVRLPASSPNLIESKSFKLYLNSLNNTRFDSWQEVADILQKDLSACAGMDVDVTIQPLSDFTDQPIVDFSGDCIDDQDIEIASFDFDPDLLMNAASGEVVEETLHSHLLKSNCLITSQPDWGSVRIAYKGKQIDREKLLRYLVSFRNHNEFHEQCVERIFTDLMRFCQPERLTVYARYTRRGGLDINPYRTNQGKTPSNNDRLARQ

SEQ ID NO: 48362 - protein, 283 aa, Photobacterium iliopiscarium
  REGION 1..283: note = tr|A0A2T3MIV6|A0A2T3MIV6_9GAMM NADPH-dependent 7-cyano-7-deazaguanine reductase OS=Photobacterium iliopiscarium OX=56192 GN=queF PE=3 SV=1
MSKYKDAKELAGLTLGKKTEYKDQYDPSLLQPVPRSLNRTDINISDDALPFTGYDIWTLYELSWLNNKGLPQVAIGEVRLPVTSPNLIESKSFKLYLNSFNQTRFDSWQDIADTLQIDLSRCAGEDVDVTIQPLTDFNEQPIVNFFGECIDDQDIEINDYAFKPEYLEGAADNNDVVEEIVHSHLLKSNCLITNQPDWGSVRIAYKGNRIDREKLLRYIVSFRNHNEFHEQCVERIFNDIIRFCQPELLTVYARYTRRGGLDINPYRTNMGKTPSDNFRLARQ

SEQ ID NO: 48363 - protein, 281 aa, Photobacterium indicum
  REGION 1..281: note = tr|A0A2T3L1N2|A0A2T3L1N2_9GAMM NADPH-dependent 7-cyano-7-deazaguanine reductase OS=Photobacterium indicum; OX = 81447 GN=queF PE=3 SV=1
MSKYKDAKELAGLTLGQKTDYIDQYDASLLQPVPRSLNRSDLNLGESLPFTGYDIWTLYELSWLNSKGLPQVAIGEVRLPASSPNLIESKSFKLYINSFNQTRFDSWQQIADTLQKDLTACAGQEVDVTIQPLEDFTDQTVINFAGNCIDEQDIEINSYDFDAQYLKDAAEGEIVTEDLHSHLLKSNCLITNQPDWGSVKISYKGKQINREKLLRYLVSFRNHNEFHEQCVERIFTDIMKFCQPELLTVYARYTRRGGLDINPYRTNQGKTPSDNFRLARQ

SEQ ID NO: 48364 - protein, 281 aa, Photobacterium jeanii
  REGION 1..281: note = tr|A0A178KA75|A0A178KA75_9GAMM NADPH-dependent 7-cyano-7-deazaguanine reductase OS=Photobacterium jeanii; OX = 858640 GN=queF PE=3 SV=1
MSKYKDASELAGLTLGQKTEYASQYAPSLLQAVPRSLNRDDLALGDDLPFTGYDIWTLYELSWLNNKGLPQVAVGEVRLPANSPNLIESKSFKLYLNSFNQTRFASWQEVVETLHKDLTACAGAEVDVTIQPVTDFTGEEIVNFDGTCIDDQDIEITDYDFDANHLEGAADGEVVTEELHSHLLKSNCLITNQPDWGSVRISYKGKQLNREKLLRYLVSFRNHNEFHEQCVERIFTDIMKFCQPELLTVYARYTRRGGLDINPYRTNQGKTPSNNFRLARQ

SEQ ID NO: 48365 - protein, 283 aa, Photobacterium kishitanii
  REGION 1..283: note = tr|A0A2T3QSP9|A0A2T3QSP9_9GAMM NADPH-dependent 7-cyano-7-deazaguanine reductase OS=Photobacterium kishitanii OX=318456 GN=queF PE=3 SV=1
MSKYKDAKELAGLTLGQKTEYKDQYDPSLLQPVPRSLNRTDLNISDDALPFTGYDIWTLYELSWLNKKGLPQVAIGEVRLPASSPNLIESKSFKLYLNSFNQTRFDGWQDIADTLQIDLSRCAGADVDVTIQPLTDFNEQQIVNFFGECIDDQDIEINDYTFKPEYLEGAADNNDIVEEIVHSHLLKSNCLITNQPDWGSVRIAYKGNRIDREQLLRYIVSFRNHNEFHEQCVERIFNDIMRFCQPELLTVYARYTRRGGLDINPYRTNMGKTPSDNFRLARQ

SEQ ID NO: 48366 - protein, 283 aa, Photobacterium kishitanii
  REGION 1..283: note = tr|A0A2T3KDZ9|A0A2T3KDZ9_9GAMM NADPH-dependent 7-cyano-7-deazaguanine reductase OS=Photobacterium kishitanii OX=318456 GN=queF PE=3 SV=1
MSKYKDAKELAGLTLGQKTEYKDQYDPSLLQPVPRSLNRTDLNISDDALPFTGYDIWTLYELSWLNKKGLPQVAIGEVRLPASSPNLIESKSFKLYLNSFNQTRFDGWQDIADTLQIDLSRCAGAEVDVTIQPLTDFNEQQIVNFFGECIDDQDIEINDYTFKPEYLEGAADNNDIVEEIVHSHLLKSNCLITNQPDWGSVRIAYKGNRIDREQLLRYIVSFRNHNEFHEQCVERIFNDIMRFCQPELLTVYARYTRRGGLDINPYRTNMGKTPSDNFRLARQ

SEQ ID NO: 48367 - protein, 282 aa, Photobacterium leiognathi
  REGION 1..282: note = tr|A0A0U1P848|A0A0U1P848_PHOLE NADPH-dependent 7-cyano-7-deazaguanine reductase OS=Photobacterium leiognathi lrivu.4.1 OX=1248232 GN=queF PE=3 SV=1
MSKYKDAKELAGLTLGKTTEYKDQYDPSLLQAVPRSLNRTDLNISDDALPFTGYDIWTLYELSWLNSKGLPQVAIGEVRLPASSPNLIESKSFKLYLNSFNQTRFESWQDIADTLQIDLSRCAGANVDVTIQPLEDFSEQPIVNFFGACIDDQDIEIDDYSFNPALLEGGVEDDEVEEILHSHLLKSNCLITSQPDWGSVRIAYKGKRINREKLLRYIISFRNHNEFHEQCVERIFSDIMKYCKPELLTVYARYTRRGGLDINPYRTNMGKSPSDNFRLARQ

SEQ ID NO: 48368 - protein, 282 aa, Photobacterium leiognathi
  REGION 1..282: note = tr|A0A2G4WN65|A0A2G4WN65_PHOLE NADPH-dependent 7-cyano-7-deazaguanine reductase OS=Photobacterium leiognathi OX=553611 GN=queF PE=3 SV=1
MSKYKDAKELAGLTLGKTTEYKDQYDPSLLQAVPRSLNRTDLNISDDALPFTGYDIWTLYELSWLNSKGLPQVAIGEVRLPASSPNLIESKSFKLYLNSFNQTRFESWQDIADTLQIDLSRCAGANVDVTIQPLEDFSEQPIVNFFGACIDDQDIEIDDYSFNPALLEGGVEDEEVEEILHSHLLKSNCLITSQPDWGSVRIAYKGKRINREKLLRYIISFRNHNEFHEQCVERIFSDIMKYCKPELLTVYARYTRRGGLDINPYRTNMGKSPSDNFRLARQ

SEQ ID NO: 48369 - protein, 281 aa, Photobacterium lipolyticum
  REGION 1..281: note = tr|A0A2T3MT13|A0A2T3MT13_9GAMM NADPH-dependent 7-cyano-7-deazaguanine reductase OS=Photobacterium lipolyticum OX=266810 GN=queF PE=3 SV=1
MSKYQDAKELAGLTLGQGTEYKDQYDPSLLQPVPRSLNRDDLALGETLPFTGYDIWTLYELSWLNSKGLPQVAIGEVRLPASSPNLIESKSFKLYLNSFNQTKFASWQKVADVLQKDLTQCAGEDVDVTIQPLADFDDQPIVNFSGECIDDQDIEITDYEFDASYLEGAAEEVVVTEELNSHLLKSNCLITSQPDWGSVKISYKGKRINREKLLRYLVSFRNHNEFHEQCVERIFTDIMKFCQPELLTVYARYTRRGGLDINPYRTNQGKTPSNNFRLARQ

SEQ ID NO: 48370 - protein, 281 aa, Photobacterium lutimaris
  REGION 1..281: note = tr|A0A2T3IKJ5|A0A2T3IKJ5_9GAMM NADPH-dependent 7-cyano-7-deazaguanine reductase OS=Photobacterium lutimaris OX=388278 GN=queF PE=3 SV=1
MSKYQDAKELAGLTLGQGTEYKDQYDASLLQPVPRSLNRDDLALGETLPFTGYDIWTLYELSWLNSKGLPQVAIGEVRLPATSPNLIESKSFKLYLNSFNQTKFTSWQEVADILQKDLTQCAGEDVDVTIQPISDFNDQPIANFFGECIDDQDIEITDYEFDSSYLEGAASEENVTEILHSHLLKSNCLITSQPDWGSVRISYTGKKIDREKLLRYLISFRNHNEFHEQCVERIFTDIMKYCKPELLTVYARYTRRGGLDINPYRTNMGKTPSDNFRLARQ

SEQ ID NO: 48371 - protein, 281 aa, unidentified
  source 1..281: note = Photobacterium marinum
  REGION 1..281: note = tr|L8J6X4|L8J6X4_9GAMM NADPH-dependent 7-cyano-7-deazaguanine reductase OS=Photobacterium marinum; OX = 1056511 GN=queF PE=3 SV=1
MSKYKDAKELAGLTLGKNTEYKDQYDPSLLQPVPRSLNRDDLALGEDLPFTGYDIWTLYELSWLNSKGLPQVAIGEVRLPASSPNLIESKSFKLYLNSFNQTRFASWQEIADILQKDLSDCAGATVDVTVQPLSDFDDQPIANFAGECIDDQDIEITDYSFNPDHLEGAAEGEIVTEELNSHLLKSNCLITSQPDWGSVKISYKGKKLNREKLLRYLISFRNHNEFHEQCVERIFTDLMKYCQPELLTVYARYTRRGGLDINPYRTNQGKTPSNNDRLARQ

SEQ ID NO: 48372 - protein, 283 aa, Photobacterium phosphoreum
  REGION 1..283: note = tr|A0A2T3PLX1|A0A2T3PLX1_PHOPO NADPH-dependent 7-cyano-7-deazaguanine reductase OS=Photobacterium phosphoreum OX=659 GN=queF PE=3 SV=1
MSKYKDAKELAGLTLGKKTEYKDQYDPSLLQPVPRSLNRTDINISDDALPFTGYDIWTLYELSWLNKKGLPQVAIGEVRLPASSPNLIESKSFKLYLNSFNQTHFDSWQDIADTLQIDLSRCAGEDVDVTIQPLTDFNDQPIVNFFGECIDDQDIEISDYSFKPEYLEGAADNNDIVEEIVHSHLLKSNCLITNQPDWGSVRIAYKGNRIDREKLLRYIVSFRNHNEFHEQCVERIFNDIMRFCQPESLTVYARYTRRGGLDINPYRTNMGKTPSDNFRLARQ

SEQ ID NO: 48373 - protein, 283 aa, Photobacterium phosphoreum; identical to SEQ ID NO: 48366
  REGION 1..283: note = tr|A0A0B7J8F0|A0A0B7J8F0_PHOPO NADPH-dependent 7-cyano-7-deazaguanine reductase OS=Photobacterium phosphoreum ANT-2200 OX=1454202 GN=queF PE=3 SV=1

SEQ ID NO: 48374 - protein, 283 aa, unidentified
  source 1..283: note = Photobacterium piscicola
  REGION 1..283: note = tr|A0A1T5I552|A0A1T5I552_9GAMM NADPH-dependent 7-cyano-7-deazaguanine reductase OS=Photobacterium piscicola OX=1378299 GN=queF PE=3 SV=1
MSKYKDAKELAGLTLGKKTEYKDQYDPSLLQPVPRSLNRTDINISDDALPFTGYDIWTLYELSWLNNKGLPQVAIGEVRLPASSPNLIESKSFKLYLNSFNQTRFDSWQDIADTLQIDLSRCAGEDVDVTIQPLTDFNEQPIVNFFGECIDDQDIEINDYAFKPEYLEGAANNNDVVEEIVHSHLLKSNCLITNQPDWGSVRIAYKGNRIDREKLLRYIVSFRNHNEFHEQCVERIFNDIMRFCQPELLTVYARYTRRGGLDINPYRTNMGKTPSDNFRLARQ

SEQ ID NO: 48375 - protein, 281 aa, Photobacterium profundum
  REGION 1..281: note = sp|Q6LN10|QUEF_PHOPR NADPH-dependent 7-cyano-7-deazaguanine reductase OS=Photobacterium profundum (strain SS9) OX=298386 GN=queF PE=3 SV=1
MSKYKDAKELAGLTLGQKTDYIDQYDASLLQPVPRSLNRSDLNLGESLPFTGYDIWTLYELSWLNSKGLPQVAIGEVRLPASSPNLIESKSFKLYLNSFNQTRFDSWQQIADTLQKDLTACAGQEVDVTIQPLEDFTDQTVINFAGNCIDEQDIEINSYDFDAQYLKDAAEGEIVTEDLHSHLLKSNCLITNQPDWGSVKISYKGKQINREKLLRYLVSFRNHNEFHEQCVERIFTDIMKFCQPELLTVYARYTRRGGLDINPYRTNQGKTPSDNFRLARQ

SEQ ID NO: 48376 - protein, 281 aa, Photobacterium profundum
  REGION 1..281: note = tr|Q1Z096|Q1Z096_9GAMM NADPH-dependent 7-cyano-7-deazaguanine reductase OS=Photobacterium profundum 3TCK OX=314280 GN=queF PE=3 SV=1
MSKYKDAKELAGLTLGQKTDYIDQYDASLLQPVPRSLNRSDLNLGESLPFTGYDIWTLYELSWLNSKGLPQVAIGEVRLPASSPNLIESKSFKLYLNSFNQTRFDSWQQIADTLQKDLTACAGQEVDVTIQPLEDFTDQTVINFAGNCIDDQDIEIDNYDFDAQYLKDAAEGEIVTEDLHSHLLKSNCLITNQPDWGSVKISYKGKQINREKLLRYLVSFRNHNEFHEQCVERIFTDIMKFCKPELLTVYARYTRRGGLDINPYRTNQGKTPSDNFRLARQ

SEQ ID NO: 48377 - protein, 281 aa, unidentified
  source 1..281: note = Photobacterium proteolyticum
  REGION 1..281: note = tr|A0A1Q9GW67|A0A1Q9GW67_9GAMM NADPH-dependent 7-cyano-7-deazaguanine reductase OS=Photobacterium proteolyticum OX=1903952 GN=queF PE=3 SV=1
MSKYKDAKELAGLTLGQSTEYKDQYDPSLLQPVPRSLNRDDLALGDNLPFTGYDIWTLYELSWLNSKGLPQVAIGEVRLPASSPNLIESKSFKLYLNSFNQTRFASWQDIADTLQKDLTACAGADVDVTIQPLEDFDNQPIVNFTGECIDNQDIEIADYEFNPDYLEGAAEGDIVSEELNSHLLKSNCLITSQPDWGSVRISYKGKKINREKLLRYLISFRNHNEFHEQCVERIFTDLMKYCQPELLTVYARYTRRGGLDINPYRTNQGKTPSNNFRLARQ

SEQ ID NO: 48378 - protein, 281 aa, Photobacterium rosenbergii
  REGION 1..281: note = tr|A0A2T3MU25|A0A2T3MU25_9GAMM NADPH-dependent 7-cyano-7-deazaguanine reductase OS=Photobacterium rosenbergii OX=294936 GN=queF PE=3 SV=1
MSKYQDAKELAGLTLGKTTEYIDQYDPSLLQPVPRSLNRDDLALGDTLPFTGYDIWTLYELSWLNKKGLPQVAIGEVRLPASSPNLIESKSFKLYLNSFNQTKFDSWQQIADTLQKDLSECAGADVDVTVQPLSDFDDQPIANFFGECIDDQDIEITDYDFDPSHLEGALSDETVTEILHSHLLKSNCLVTSQPDWGSVRISYTGKKIDREKLLRYLISFRDHNEFHEQCVERIFTDIMKFCKPELLTVYARYTRRGGLDINPYRTNMGKTPSDNFRLARQ

SEQ ID NO: 48379 - protein, 281 aa, unidentified
  source 1..281: note = Photobacterium sanctipauli
  REGION 1..281: note = tr|A0A2T3NE07|A0A2T3NE07_9GAMM NADPH-dependent 7-cyano-7-deazaguanine reductase OS=Photobacterium sanctipauli OX=1342794 GN=queF PE=3 SV=1
MSKYQDAKELAGLTLGQGTEYKDQYDASLLQPVPRSLNRDDLALGDDLPFTGYDIWTLYELSWLNSKGLPQVAIGEVRLPASSPNLIESKSFKLYLNSFNQTKFDSWQQIADTLQKDLTQCAGADVDVTVQPLSDFDDQPIANFFGECIDDQDIEITDYEFDPAHLEGAATEETVTEILHSHLLKSNCLITSQPDWGSVRISYTGKKIDREKLLRYLISFRNHNEFHEQCVERIFTDIMKYCKPELLTVYARYTRRGGLDINPYRTNMGKTPSDNFRLARQ

SEQ ID NO: 48380 - protein, 281 aa, unidentified
  source 1..281: note = Photobacterium sanguinicancri
  REGION 1..281: note = tr|A0A135ZPR8|A0A135ZPR8_9GAMM NADPH-dependent 7-cyano-7-deazaguanine reductase OS=Photobacterium sanguinicancri OX=875932 GN=queF PE=3 SV=1
MSKYKDAAELADLTLGQKTEYADKYDPSLLQAVPRSLNRDDLALGDELPFTGYDIWTLYELSWLNGKGLPQVAIGEVRLPANSPNLIESKSFKLYLNSFNQTRFSDWQEIVETLHKDLSACAGLDVDVTIQPLTDFTDETIVNFTGECIDDQDIEITEYDFSADHLDGAADGDVVTEELHSHLLKSNCLITNQPDWGSVRISYKGKKINREKLLRYLVSFRNHNEFHEQCVERIFSDIMAFCQPELLTVYARYTRRGGLDINPYRTNQGKTPSNNFRLARQ

SEQ ID NO: 48381 - protein, 283 aa, Photobacterium sp.
  REGION 1..283: note = tr|A0A1Y6MPM2|A0A1Y6MPM2_9GAMM NADPH-dependent 7-cyano-7-deazaguanine reductase OS=Photobacterium sp. CECT 9192 OX=2006083 GN=queF PE=3 SV=1
MSKYKDAKELAGLTLGQKTEYKDQYDPSLLQPVPRSLNRTDINISDDALPFTGYDIWTLYELSWLNKKGLPQVAIGEVRLPASSPNLIESKSFKLYLNSFNQTRFDGWQAIADTLQIDLSRCAGEDVDVTIQPLTDFNDQPIVNFFGECIDDQDIEINDYSFKPEYLEGAADNNDIVEEIVHSHLLKSNCLITNQPDWGSVRIAYKGNRIDREQLLRYIVSFRNHNEFHEQCVERIFNDIMRFCQPELLTVYARYTRRGGLDINPYRTNMGKTPSDNFRLARQ

SEQ ID NO: 48382 - protein, 281 aa, Photobacterium sp.
  REGION 1..281: note = tr|A0A3S3REP6|A0A3S3REP6_9GAMM NADPH-dependent 7-cyano-7-deazaguanine reductase OS=Photobacterium sp. BEI 247 OX=2485123 GN=queF PE=3 SV=1
MSKYKDAKELAGLTLGQSTEYKDQYDPSLLQPVPRSLNRDDLALGDSLPFTGYDIWTLYELSWLNSKGLPQVAIGEVRLPASSPNLIESKSFKLYLNSFNQTRFASWQEIADTLQKDLSACAGADVDVTVQPLEDFDNQPIVNFTGKCIDNQDIEISDYEFNPAYLEGAAEGDIITEELNSHLLKSNCLITSQPDWGSVKISYTGKKINREKLLRYLISFRNHNEFHEQCVERIFTDLQKFCQPELLTVYARYTRRGGLDINPYRTNQGKTPSDNFRLARQ

SEQ ID NO: 48383 - protein, 281 aa, Photobacterium swingsii
  REGION 1..281: note = tr|A0A0J8VA33|A0A0J8VA33_9GAMM NADPH-dependent 7-cyano-7-deazaguanine reductase OS=Photobacterium swingsii OX=680026 GN=queF PE=3 SV=1
MSKYKDAAELADLTLGQKTEYADKYDPSLLQAVPRSLNRDDLALGDELPFTGYDIWTLYELSWLNGKGLPQVAIGEVRLPANSPNLIESKSFKLYLNSFNQTRFNDWQEIVETLHKDLTACAGQDVDVTIQPLTDFTDEAIVNFSGECIDDQDIEITEYDFNADHLEGAAEGDVVTEELHSHLLKSNCLITNQPDWGSVRISYKGKQINREKLLRYLVSFRNHNEFHEQCVERIFSDIMAFCQPELLTVYARYTRRGGLDINPYRTNQGKTPSNNFRLARQ

SEQ ID NO: 48384 - protein, 283 aa, unidentified
  source 1..283: note = Photobacterium toruni
  REGION 1..283: note = tr|A0A1T4UAN7|A0A1T4UAN7_9GAMM NADPH-dependent 7-cyano-7-deazaguanine reductase OS=Photobacterium toruni; OX = 1935446 GN=queF PE=3 SV=1
MSKYKDAKELAGLTLGKKTEYKDQYDPSLLQPVPRSLNRTDINISDDSLPFTGYDIWTLYELSWLNKKGLPQVAIGEVRLPASSPNLIESKSFKLYLNSFNQTRFDSWQDIADTLQIDLSGCAGEDVDVTIQPLTDFNDQPIVNFFGECIDDQDIEINDYVFKPEYLKGAADNNDVVEEIVHSHLLKSNCLITNQPDWGSVRIAYKGNRIDREKLLRYIVSFRNHNEFHEQCVERIFNDIMRFCQPELLTVYARYTRRGGLDINPYRTNMGKTPSDNFRLARQ

SEQ ID NO: 48385 - protein, 286 aa, Photorhabdus asymbiotica
  REGION 1..286: note = tr|C7BKL8|C7BKL8_PHOAA NADPH-dependent 7-cyano-7-deazaguanine reductase OS=Photorhabdus asymbiotica subsp. asymbiotica (strain ATCC 43949 / 3105-77) OX=553480 GN=que F PE=3 SV=1
MRNNMSLYQDHQALEPLTLGKTTSYHDQYDANLLQAVPRSMNREPLNIFPDNLPFHGADIWTLYELSWLNSRGLPQVAVGHVSLNAKSKNLIESKSFKLYLNSFNQTRFENWQAVEETLQRDLAACADGHVTVTLHHLDHFNNQPISAFTGECIDNQDIDITEYNFNRDYLQGAAQGPLVEEVLVSHLLKSNCLITHQPDWGSVQIHYKGAKINQESLLRYLVSFRHHNEFHEQCVERIFNDLQQLCSPEKLSVYARYTRRGGLDINPWRTNSTDFAPKTGRLARQ

SEQ ID NO: 48386 - protein, 282 aa, unidentified
  source 1..282: note = Photorhabdus australis
  REGION 1..282: note = tr|A0A1C0TYK3|A0A1C0TYK3_9GAMM NADPH-dependent 7-cyano-7-deazaguanine reductase OS=Photorhabdus australis; OX = 286156 GN=queF PE=3 SV=1
MSLYQDHQALEPLTLGKTTSYHDQYDANLLQAVPRSMNRDPLNIFPDNLPFHGADIWTLYELSWLNSRGLPQVAVGHVSLNAASKNLIESKSFKLYLNSFNQTRFESWQTVEETLQRDLAACADGHVEVTLHHLNHFNNQPISAFTGECIDNQDIDITEYNFNRDYLQGAAQGPLVEEVLVSHLLKSNCLITHQPDWGSVQIHYKGAKINQEALLRYLVSFRHHNEFHEQCVERIFNDLQQLCAPEKLSVYARYTRRGGLDINPWRTNNTDFAPKTGRLARQ

SEQ ID NO: 48387 - protein, 282 aa, unidentified
  source 1..282: note = Photorhabdus bodei
  REGION 1..282: note = tr|A0A329XAZ1|A0A329XAZ1_9GAMM NADPH-dependent 7-cyano-7-deazaguanine reductase OS=Photorhabdus bodei; OX = 2029681 GN=queF PE=3 SV=1
MSLYRDHQALEQLTLGKTTLYRDQYDASLLQAVPRNMNREPLEIFPDNLPFHGADIWTLYELSWLNSRGLPQVAVGHVSLNAISKNLIESKSFKLYLNSFNQTRFENWQAVEETLQRDLAACAEGKVEVALYHLDHFNNQPISAFTGECIDDQDIEVTEYDFNRHYLQDAAQGPLVEEVLVSHLLKSNCLITHQPDWGSVQIHYKGLKINREALLRYLISFRHHNEFHEQCVERIFSDLQQLCAPEKLSVYARYTRRGGLDINPWRTNSEGFVPATGRLARQ

SEQ ID NO: 48388 - protein, 282 aa, unidentified
  source 1..282: note = Photorhabdus heterorhabditis
  REGION 1..282: note = tr|A0A5B0X785|A0A5B0X785_9GAMM NADPH-dependent 7-cyano-7-deazaguanine reductase OS=Photorhabdus heterorhabditis OX=880156 GN=queF PE=3 SV=1
MSLYQDHQALKQLTLGKTTSYHDQYDANLLQAIPRSMNREPLKILCDNLPFHGADIWTLYELSWLNSRGLPQVAVGHVSLNATSKNLIESKSFKLYLNSFNQTRFENWQTVEETLQRDLAACAEGHVEVTLHHLDHFNNQPISAFTGECIDNQDIDITEYNFKRDYLQGAAQGPLVEEVLVSHLLKSNCLITHQPDWGSVQIHYKGAKINQEALLRYLVSFRHHNEFHEQCVERIFNDLQQLCAPEKLSVYARYTRRGGLDINPWRTNNADFAPVTGRLARQ

SEQ ID NO: 48389 - protein, 282 aa, unidentified
  source 1..282: note = Photorhabdus heterorhabditis
  REGION 1..282: note = tr|A0A0M9CYZ4|A0A0M9CYZ4_9GAMM NADPH-dependent 7-cyano-7-deazaguanine reductase OS=Photorhabdus heterorhabditis OX=880156 GN=queF PE=3 SV=1
MSLYQDHQALEQLTLGKTTSYHDQYDANLLQAIPRSMNREPLKILCDNLPFHGADIWTLYELSWLNSRGLPQVAVGHVSLNATSKNLIESKSFKLYLNSFNQTRFENWQTVEETLQRDLAACAEGHVEVTLHHLDHFNNQPISAFTGECIDNQDIDITEYNFKRDYLQGAAQGPLVEEVLVSHLLKSNCLITHQPDWGSVQIHYKGAKINQEALLRYLVSFRHHNEFHEQCVERIFNDLQQLCAPEKLSVYARYTRRGGLDINPWRTNNADFAPVTGRLARQ

SEQ ID NO: 48390 - protein, 282 aa, unidentified
  source 1..282: note = Photorhabdus khanii
  REGION 1..282: note = tr|W3VB68|W3VB68_9GAMM NADPH-dependent 7-cyano-7-deazaguanine reductase OS=Photorhabdus khanii NC19 OX=1004151 GN=queF PE=3 SV=1
MSLYQDHQALEQLTLGKTTFYRDQYDASLLQAVPRSMNREPLKIFSDNLPFHGADIWTLYELSWLNSRGLPQVAVGHVSLNATSKNLIESKSFKLYLNSFNQTRFENWQIVEETLQRDLAACAEGHVEVILHHLDHFSNQPISAFTGECIDDQEIEVTEYNFNRDYLQGAAQGPLVEEVLVSHLLKSNCLITHQPDWGSIQIRYKGPKINREALLRYLISFRHHNEFHEQCVERVFNDLQQLCVPEKLSVYARYTRRGGLDINPWRTNNEDFVPTTGRLARQ

SEQ ID NO: 48391 - protein, 216 aa, unidentified
  source 1..216: note = Photorhabdus khanii
  REGION 1..216: note = tr|W3VBM3|W3VBM3_9GAMM 7-cyano-7-deazaguanine reductase OS=Photorhabdus khanii NC19 OX=1004151; GN = PTE_00386 PE=4 SV=1
MVSPDLSGDHPYQLRMHLSKNLIESKSFKLYLNSLNQTNFESWDDVHNTIVNDLENCASGSVTLELYPVTDISVQQAGNFEGVCIDEQDINIADFKFSNAYLNNAVDNEYTEETLVSHLLKSNCLITNQPDWGSVQIHYQGRRINREALLRYLVSFRQHNEFHEQCVERVFNDLNYFCKPEYLAVYARYTRRGGLDINPWRSNTPFKPSHFRLARQ

SEQ ID NO: 48392 - protein, 282 aa, unidentified
  source 1..282: note = Photorhabdus laumondii
  REGION 1..282: note = sp|Q7N8Q7|QUEF_PHOLL NADPH-dependent 7-cyano-7-deazaguanine reductase OS=Photorhabdus laumondii subsp. laumondii (strain DSM 15139 / CIP 105565 / TT01); OX = 243265 GN= queF PE=3 SV=1
MSLYRDHQALEQLTLGKTTLYRDQYDASLLQAVPRNMNREPLEIFPDNLPFHGADIWTLYELSWLNNRGLPQVAVGHVSLNAASTNLIESKSFKLYLNSFNQTRFENWQAVEETLQRDLAACAEGEVEVALHHLDHFNNQPISTFTGECIDDQDIEVTEYDFNRHYLQNAAQGPQVEEVLVSHLLKSNCLITHQPDWGSVQIHYKGSKINREALLRYLISFRHHNEFHEQCVERIFSDLQQLCAPEKLSVYARYTRRGGLDINPWRTNSEGFVPATGRLARQ

SEQ ID NO: 48393 - protein, 282 aa, unidentified
  source 1..282: note = Photorhabdus laumondii
  REGION 1..282: note = tr|A0A329VJJ6|A0A329VJJ6_9GAMM NADPH-dependent 7-cyano-7-deazaguanine reductase OS=Photorhabdus laumondii subsp. clarkei OX=2029685 GN=queF PE=3 SV=1
MSLYRDHQALEQLTLGKTTLYRDQYDASLLQAVPRNMNREPLEIFPDNLPFHGADIWTLYELSWLNSRGLPQVAVGHVSLNAASKNLIESKSFKLYLNSFNQTRFENWQAVEETLQRDLAACAEGEVEVALHHLDHFNNQPISTFTGECIDDQDIEVTEYDFNRHYLQDAAQGPQVEEVLVSHLLKSNCLITHQPDWGSVQIHYKGSKINREALLRYLISFRHHNEFHEQCVERIFSDLQQLCAPEKLSVYARYTRRGGLDINPWRTNSEGFVPATGRLARQ

SEQ ID NO: 48394 - protein, 282 aa, Photorhabdus luminescens
  REGION 1..282: note = tr|A0A5C4RFV2|A0A5C4RFV2_PHOLU NADPH-dependent 7-cyano-7-deazaguanine reductase OS=Photorhabdus luminescens subsp. sonorensis OX=1173677 GN=queF PE=3 SV=1
MSLYRDHQALEQLTLGKTTLYRDQYDASLLQAVPRNMNREPMGIFPDNLPFHGADIWTLYELSWLNSRGLPQVAVGHVSLNATSKNLIESKSFKLYLNSFNQTHFESWQAVEKTLQRDLAACAEGEVEVTLHHLDHFNNQPISAFTGECIDDQDIEVTEYDFNRHYLQGAAQGPLVEEVLVSHLLKSNCLITHQPDWGSVQIRYQGSKINREALLRYLISFRHHNEFHEQCVERIFNDLQQLCAPKKLSVYARYTRRGGLDINPWRTNSASFVPETSRLARQ

SEQ ID NO: 48395 - protein, 282 aa, Photorhabdus luminescens; identical to SEQ ID NO: 48393
  REGION 1..282: note = tr|A0A2S8QUV0|A0A2S8QUV0_PHOLU NADPH-dependent 7-cyano-7-deazaguanine reductase OS=Photorhabdus luminescens OX=29488 GN=queF PE=3 SV=1

SEQ ID NO: 48396 - protein, 282 aa, unidentified
  source 1..282: note = Photorhabdus namnaonensis
  REGION 1..282: note = tr|A0A1B8YCA4|A0A1B8YCA4_9GAMM NADPH-dependent 7-cyano-7-deazaguanine reductase OS=Photorhabdus namnaonensis OX=1851568 GN=queF PE=3 SV=1
MSLYRDHQALEQLTLGKTTLYRDQYDASLLQAVPRNMNREPLEIFPDNLPFHGADIWTLYELSWLNSRGLPQVAVGHVSLNATSKNLIESKSFKLYLNSFNQTRFENWQVVEETLQRDLSACAEGKVEVTLHHLDHFNNQPISAFTGECIDDQDIEVTEYDFNRHYLQDAAQGPLVEEVLVSHLLKSNCLITHQPDWGSVQIHYKGAKINREALLRYLISFRHHNEFHEQCVERIFNDLQQLCAPEKLSVYARYTRRGGLDINPWRTNSASFIPAIGRLARQ

SEQ ID NO: 48397 - protein, 282 aa, Photorhabdus sp.
  REGION 1..282: note = tr|A0A329WBY9|A0A329WBY9_9GAMM NADPH-dependent 7-cyano-7-deazaguanine reductase OS=Photorhabdus sp. S9-53; OX = 2029683 GN=queF PE=3 SV=1
MSLYRDHQALEQLTLGKTTLYRDQYDASLLQAVPRNMNREPLEIFPDNLPFHGADIWTLYELSWLNSRGLPQVAVGHVSLNAESKNLIESKSFKLYLNSFNQTRFENWQAVEETLQRDLAACAEGEVEVTLHHLDHFNNQPIAAFTGECIDDQDIEVTEYNFNRHYLQDAAQGPQVEEVLVSHLLKSNCLITHQPDWGSVQIHYKGLKINREALLRYLISFRHHNEFHEQCVERIFSDLQQLCAPEKLSVYARYTRRGGLDINPWRTNSEGFVPATGRLARQ

SEQ ID NO: 48398 - protein, 282 aa, Photorhabdus sp.
  REGION 1..282: note = tr|A0A4R4JZM2|A0A4R4JZM2_9GAMM NADPH-dependent 7-cyano-7-deazaguanine reductase OS=Photorhabdus sp. MEX20-17 OX=2100166 GN=queF PE=3 SV=1
MSLYQDHQALEQLTLGKTTLYRDQYDASLLQAIPRSMNRKPLKIFSDNLPFHGADIWTLYELSWLNSRGLPQVAVGHVSLNATSKNLIESKSFKLYLNSFNQTRFENWQIVEETLQRDLAACAEGHVEVILHHLDHFSSQPISAFTGECIDDQEIEVTEYNFNRDYLQGAAQGPLVEEVLVSHLLKSNCLITHQPDWGSIQIRYKGPKINREALLRYLISFRHHNEFHEQCVERVFNDLQQLCVPEKLSVYARYTRRGGLDINPWRTNNEDFVPTTGRLARQ

SEQ ID NO: 48399 - protein, 106 aa, Photorhabdus temperata
  REGION 1..106: note = tr|U7R6M3|U7R6M3_PHOTE QueF_N domain-containing protein OS=Photorhabdus temperata J3 OX=1389415; GN = O185_00315 PE=4 SV=1
MSLYQDHQVLEQLTLGKTTLYHDQYDASLLQAVPRSMNREPLEIFPDNLPFHGADIWTLYELSWLNSRGLPQVAVGHATVMCSRKALSLCALYPTRRIRYQSVAHK

SEQ ID NO: 48400 - protein, 106 aa, Photorhabdus temperata; identical to SEQ ID NO: 48399
  REGION 1..106: note = tr|T0PAX5|T0PAX5_PHOTE 7-cyano-7-deazaguanine reductase OS=Photorhabdus temperata subsp. temperata M1021; OX = 1221520 GN=queF PE=4 SV=1

SEQ ID NO: 48401 - protein, 277 aa, unidentified
  source 1..277: note = Photorhabdus thracensis
  REGION 1..277: note = tr|A0A0F7LPS5|A0A0F7LPS5_9GAMM NADPH-dependent 7-cyano-7-deazaguanine reductase OS=Photorhabdus thracensis OX=230089 GN=queF PE=3 SV=1
MSNSHFTISELPLGKDTTYPEKYSPDLLHGVPRSLGRSSLSIKDTPEYGEDIWNLYELSWLNKNGLPQVATGRVAINAHSKNLIESKSFKLYLNSLNQTNFENWDDVHNTIVNDLENCASGNVALELYPVTDISVQQAGNFEGVCIDNQDINIADFRFSNAYLNNAIGDEYTEETLVSHLLKSNCLITNQPDWGSVQIHYQGRRINREALLRYLVSFRQHNEFHEQCVERIFNDLNYFCKPEYLAVYARYTRRGGLDINPWRSNTPFKPSHFRLARQ

SEQ ID NO: 48402 - protein, 282 aa, unidentified
  source 1..282: note = Photorhabdus thracensis
  REGION 1..282: note = tr|A0A0F7LL14|A0A0F7LL14_9GAMM NADPH-dependent 7-cyano-7-deazaguanine reductase OS=Photorhabdus thracensis OX=230089 GN=queF PE=3 SV=1
MSLYQNHQALEQLTLGKTTFYRDQYDASLLQTVPRNMNREPLKIFPDNLPFHGADIWTLYELSWLNSRGLPQVAVGHVSLNATSKNLIESKSFKLYLNSFNQTHFENWQTVEETLQRDLAACAEGHVEVTLHHLDHFSNQPISAFTGECIDNQDIEVTEYNFNRDYLQGAAQGPLVEEVLVSHLLKSNCLITHQPDWGSLQIRYKGPKINREALLRYLISFRHHNEFHEQCVERIFNDLRQLCVPEKLSVYARYTRRGGLDINPWRTNNEDFIPTTGRLARQ

SEQ ID NO: 48403 - protein, 148 aa, unidentified
  source 1..148: note = Phreatobacter cathodiphilus
  REGION 1..148: note = tr|A0A2S0N9Q9|A0A2S0N9Q9_9PROT NADPH-dependent 7-cyano-7-deazaguanine reductase OS=Phreatobacter cathodiphilus OX=1868589 GN=queF PE=3 SV=1
MAELMLGKTVGIPASPEAAELDRVPNPHPDTNYVARFVAPEFTSLCPVTGQPDFAHLVIDYVPGDWLVESKSLKLYLTSFRNHGAFHEDCTVAVGKRLRDLLSPRWLRIGGYWYPRGGIPIDVFWQTGAPPEGVWIPDQGVAPYRGRG

SEQ ID NO: 48404 - protein, 148 aa, unidentified
  source 1..148: note = Phreatobacter oligotrophus
  REGION 1..148: note = tr|A0A2T4Z555|A0A2T4Z555_9PROT NADPH-dependent 7-cyano-7-deazaguanine reductase OS=Phreatobacter oligotrophus OX=1122261 GN=queF PE=3 SV=1
MTDLKLGKTVDIPASPEAAELDRVPNPHPDTDYVARFVAPEFTSLCPVTGQPDFAHLVIDYVPDQWLVESKSLKLYLTSFRNHGAFHEDCTVAIGKRLRDLLGPRWLRIGGYWYPRGGIPIDVFWQTGTPPAGVWIPDQGVAPYRGRG

SEQ ID NO: 48405 - protein, 148 aa, unidentified
  source 1..148: note = Phreatobacter sp.
  REGION 1..148: note = tr|A0A4D7QPA4|A0A4D7QPA4_9PROT NADPH-dependent 7-cyano-7-deazaguanine reductase OS=Phreatobacter sp. NMCR1094 OX=2570229 GN=queF PE=3 SV=1
MADLKLGKTVGIPASPEEAELDRVPNPHPDTNYVARFAVPEFTSLCPVTGQPDFAHLVIDYVPDQWLVESKSLKLYLSSFRNHGAFHEDCTVAVGRTLVGLLAPRWLRIGGYWYPRGGIPIDVFWQTGEPLQGVWLPDQGVAAYRGRG

SEQ ID NO: 48406 - protein, 148 aa, unidentified
  source 1..148: note = Phreatobacter stygius
  REGION 1..148: note = tr|A0A4D7B384|A0A4D7B384_9PROT NADPH-dependent 7-cyano-7-deazaguanine reductase OS=Phreatobacter stygius; OX = 1940610 GN=queF PE=3 SV=1
MTDLMLGKSVAMPASPDEAVLDRVPNPHQDTNYVTRFTAPEFTSLCPVTGQPDFAHLVIDFVADAWLVESKSLKLYLSSFRNHGAFHEDCTVAIGKRLVGLLQPRWLRIGGYWYPRGGIPIDVFWQTGEVPKGVWLPDQGVAPYRGRG

SEQ ID NO: 48407 - protein, 117 aa, Phycisphaera mikurensis
  REGION 1..117: note = tr|I0IDJ3|I0IDJ3_PHYMF NADPH-dependent 7-cyano-7-deazaguanine reductase OS=Phycisphaera mikurensis (strain NBRC 102666 / KCTC 22515 / FYK2301M01); OX = 1142394 GN=queFPE=3 SV=1
MIDADLLEFFPNPAPDQPYLIEHVHEEFTSVCPKTGHPDFGEVVIRYRPGEACVELKSLKIYFQGFRDAGIFYEAVTNRVADDLHEAMKPRTLEVETRWRGRGGIRSVITATRGEAG

SEQ ID NO: 48408 - protein, 122 aa, Phycisphaera sp.
  REGION 1..122: note = tr|A0A3S5J4A8|A0A3S5J4A8_9BACT NADPH-dependent 7-cyano-7-deazaguanine reductase OS=Phycisphaera sp. TMED24 OX=1986832 GN=queF PE=3 SV=1
MPDPSLLETFANPGDAPYVIEHLHEEFTSVCPKTGHPDFGEILFRYEPADCCVELKSLKMYCQSFRQEGIYYEAVTNRLRDDMVQCMQPRWLQIVTMWKGRGGFKSTVVAEFGDVPECWKRP

SEQ ID NO: 48409 - protein, 121 aa, Phycisphaera sp.
  REGION 1..121: note = tr|A0A424KF25|A0A424KF25_9BACT NADPH-dependent 7-cyano-7-deazaguanine reductase OS=Phycisphaera sp. TMED9; OX = 1986611 GN=queF PE=3 SV=1
  VARIANT 58: note = Xaa can be any naturally occurring amino acid
  VARIANT 60..62: note = Xaa can be any naturally occurring amino acid
  VARIANT 64: note = Xaa can be any naturally occurring amino acid
  VARIANT 78: note = Xaa can be any naturally occurring amino acid
  VARIANT 81..82: note = Xaa can be any naturally occurring amino acid
  VARIANT 86..87: note = Xaa can be any naturally occurring amino acid
  VARIANT 89: note = Xaa can be any naturally occurring amino acid
  VARIANT 117: note = Xaa can be any naturally occurring amino acid
MAEEILEFFDNPGAEPYVIEHRHEEFTSVCPMTGHPDFGTIMLRYQPAAVCVELKSLXLXXXAXRNEGMFFEAVTNKXRDXXARTXXPXWMQVVSDWKGRGGVKSRVIAPWGDVPPXFRAG

SEQ ID NO: 48410 - protein, 80 aa, unidentified
  source 1..80: note = Phycisphaeraceae bacterium
  REGION 1..80: note = tr|A0A2E2B929|A0A2E2B929_9BACT NADPH-dependent 7-cyano-7-deazaguanine reductase OS=Phycisphaeraceae bacterium OX=2026777 GN=queF PE=3 SV=1
MPKNLCVELKSLKLYFQSFRNEGIFYEAVTNKICDDLAEVMDPKYMEIVTNWKGRGGIRSVITATYGEQGCCDGHCDCED

SEQ ID NO: 48411 - protein, 120 aa, unidentified
  source 1..120: note = Phycisphaeraceae bacterium
  REGION 1..120: note = tr|A0A2E5G6L5|A0A2E5G6L5_9BACT NADPH-dependent 7-cyano-7-deazaguanine reductase OS=Phycisphaeraceae bacterium OX=2026777 GN=queF PE=3 SV=1
MPDTGLLESFANPSADRDYVIEHVTEEFTSVCPKTGHPDFAVVTMRYCPDHQCVELKSLKLYYQSFRNEGIFYEAVTNTISDDLVILTQPRWLQVVTDWKGRGGIRSQITVNHGPVPIGI

SEQ ID NO: 48412 - protein, 123 aa, unidentified
  source 1..123: note = Phycisphaerae bacterium
  REGION 1..123: note = tr|A0A5C5VT77|A0A5C5VT77_9BACT NADPH-dependent 7-cyano-7-deazaguanine reductase OS=Phycisphaerae bacterium RAS1 OX=2528034 GN=queF PE=3 SV=1
MPKPTPPAIDTFENPAPQRDYVIRHVAPEFTSVCPVTGQPDFGTLIIAYVPDKSCVELKSLKLYLQSFRQQGIYYEAVTNRILDDLVLLLSPRRITVQSRWRPRGGMRSVITARYKRPPGRTR

SEQ ID NO: 48413 - protein, 116 aa, unidentified
  source 1..116: note = Phycisphaerae bacterium
  REGION 1..116: note = tr|A0A1Q2MDX0|A0A1Q2MDX0_9BACT NADPH-dependent 7-cyano-7-deazaguanine reductase OS=Phycisphaerae bacterium SM-Chi-D1 OX=1851148 GN=queF PE=3 SV=1
MSEKVKLELFENPAPQRDYTITTKVPEFTSVCPKTGQPDFGTIIIEYCPDKLCIELKSLKYYMQSFRNKGIFYEALTNEMLDDLVDACKPRWMKITSEFTPRGGISTDVTVIYTKD

SEQ ID NO: 48414 - protein, 64 aa, unidentified
  source 1..64: note = Phycisphaerales bacterium
  REGION 1..64: note = tr|A0A3D0K085|A0A3D0K085_9BACT NADPH-dependent 7-cyano-7-deazaguanine reductase QueF (Fragment); OS = Phycisphaerales bacterium OX=2052180 GN=DEO57_03745; PE = 4 SV=1
KLYFQSFRDEGIYYEAGTNRIRDDLVEAMQPSWLQVVTNWKGRGGIRSRIIASHGDVPECWARG

SEQ ID NO: 48415 - protein, 117 aa, unidentified
  source 1..117: note = Phycisphaerales bacterium
  REGION 1..117: note = tr|A0A349ULX6|A0A349ULX6_9BACT NADPH-dependent 7-cyano-7-deazaguanine reductase OS=Phycisphaerales bacterium OX=2052180 GN=queF PE=3 SV=1
MADKKLLETFDNPHPGRDYVIRHVAPEFTSVCPKTAQPDFGTLEIEYVADRLCVELKSLKFYLQGFRNVGVFYEDVVNHILDDLVSVLHPRRMTVTGRFTPRGGMHSIIVAEYPGGR

SEQ ID NO: 48416 - protein, 152 aa, Phyllobacterium bourgognense
  REGION 1..152: note = tr|A0A368YVV8|A0A368YVV8_9RHIZ NADPH-dependent 7-cyano-7-deazaguanine reductase OS=Phyllobacterium bourgognense OX=314236 GN=queF PE=3 SV=1
MSNYAEQATMLGKDVQIPQHPDEAILDAVPNPQAGTLFLARFACPEFTSLCPVTGQPDFGHLVIDYAPDQTLVESKSLKLFLGSFRNHGAFHEDCTVGIGKRIVEAVKPLWLRIGGYWYPRGGIPIDVFWQTGPVPEGLWLPDQGVPAYRGR

SEQ ID NO: 48417 - protein, 153 aa, Phyllobacterium brassicacearum
  REGION 1..153: note = tr|A0A2P7BJJ7|A0A2P7BJJ7_9RHIZ NADPH-dependent 7-cyano-7-deazaguanine reductase OS=Phyllobacterium brassicacearum OX=314235 GN=queF PE=3 SV=1
MSHYAEQATMLGKDVKIPQHPDEAMLDAVPNPQAGTLFLARFACPEFTSLCPVTGQPDFGHLVIDYAPDQSLVESKSLKLFLGSFRNHGAFHEDCTVNIGKRIVEAVKPLWLRIGGYWYPRGGIPIDVFWQTGPVPEGLWLPDQGVPPYRGRG

SEQ ID NO: 48418 - protein, 152 aa, unidentified
  source 1..152: note = Phyllobacterium endophyticum
  REGION 1..152: note = tr|A0A2P7AZ40|A0A2P7AZ40_9RHIZ NADPH-dependent 7-cyano-7-deazaguanine reductase OS=Phyllobacterium endophyticum OX=1149773 GN=queF PE=3 SV=1
MSHFAQTATMLGKDVKIPQHPDEAVLDAVPNPQAGTLFLARFACPEFTSLCPVTGQPDFGHLVIDYAPDQTLVESKSLKLFLGSFRNHGAFHEDCTVGIGKRIVEAVKPLWLRIGGYWYPRGGIPIDVFWQTGPVPEGLWLPDQGVPAYRGR

SEQ ID NO: 48419 - protein, 153 aa, Phyllobacterium leguminum
  REGION 1..153: note = tr|A0A318T7B0|A0A318T7B0_9RHIZ NADPH-dependent 7-cyano-7-deazaguanine reductase OS=Phyllobacterium leguminum OX=314237 GN=queF PE=3 SV=1
MTDVQGLTQLGTKAEIASSPEEAVLETVPYTRREGPPAIVRFTCPEFTSLCPMTGQPDFAHIVIDYAPDERLVESKSLKLFLFSFRNHGAFHEDCTLEIGRRIVEATKPLWLRIGGYWYPRGGIPIDVFWQTGTPPVGAWVPETGVPSYRGRG

SEQ ID NO: 48420 - protein, 153 aa, Phyllobacterium myrsinacearum
  REGION 1..153: note = tr|A0A2S9JJD3|A0A2S9JJD3_9RHIZ NADPH-dependent 7-cyano-7-deazaguanine reductase OS=Phyllobacterium myrsinacearum OX=28101 GN=queF PE=3 SV=1
MSHYAEQATMLGKDVPIPHDPDEALLDAVPNPQAGTLFLARFTCPEFTSLCPVTGQPDFGHLVIDYAPDQALVESKSLKLFLTSFRNHGAFHEDCTVNIGKRIVEAVKPLWLRIGGYWYPRGGIPIDVFWQTGPVPEGLWLPDQGVPAYRGRG

SEQ ID NO: 48421 - protein, 153 aa, unidentified
  source 1..153: note = Phyllobacterium salinisoli
  REGION 1..153: note = tr|A0A368K850|A0A368K850_9RHIZ NADPH-dependent 7-cyano-7-deazaguanine reductase OS=Phyllobacterium salinisoli OX=1899321 GN=queF PE=3 SV=1
MTDVQGLTQLGAKTDIAASPEEAVLETVPYTRRDGPPAIVRFTCPEFTSLCPMTGQPDFAHIVIDYAPDARLVESKSLKMFLFSFRNHGAFHEDCTIEIGRRIVEATKPLWLRIGGYWYPRGGIPIDVFWQTGTPPEGAWLPDTGVPPYRGRG

SEQ ID NO: 48422 - protein, 152 aa, unidentified
  source 1..152: note = Phyllobacterium sophorae
  REGION 1..152: note = tr|A0A2P7BKP6|A0A2P7BKP6_9RHIZ NADPH-dependent 7-cyano-7-deazaguanine reductase OS=Phyllobacterium sophorae OX=1520277 GN=queF PE=3 SV=1
MSHYAEQATMLGKDVKIPQHPDEATLDAVPNPQAGTLFLARFACPEFTSLCPVTGQPDFGHLVIDYAPDQSLVESKSLKLFLGSFRNHGAFHEDCTVGIGKRIVEAVKPLWLRIGGYWYPRGGIPIDVFWQTGPVPEGLWLPDQGVPAYRGR

SEQ ID NO: 48423 - protein, 153 aa, Phyllobacterium sp.
  REGION 1..153: note = tr|A0A1H0LB33|A0A1H0LB33_9RHIZ NADPH-dependent 7-cyano-7-deazaguanine reductase OS=Phyllobacterium sp. OV277 OX=1882772 GN=queF PE=3 SV=1
MSHYAEQATMLGKDVPIPHHPDEALLDAVPNPQAGTLFLARFACPEFTSLCPVTGQPDFGHLVIDYAPDQALLESKSLKLFLTSFRNHGAFHEDCTVSIGKRIVDAVKPLWLRIGGYWYPRGGIPIDVFWQTGPVPEGLWLPDQGVPAYRGRG

SEQ ID NO: 48424 - protein, 152 aa, Phyllobacterium sp.
  REGION 1..152: note = tr|J3HM47|J3HM47_9RHIZ NADPH-dependent 7-cyano-7-deazaguanine reductase OS=Phyllobacterium sp. YR531 OX=1144343 GN=queF PE=3 SV=1
MSHYAESSTMLGKEVKLPQHPDEAILEAVPNPQAGTLFLTRFACPEFTSLCPVTGQPDFGHLVIDYAPGETLLESKSLKLFLGSFRNHGAFHEDCTVSIGKRIVETVKPLWLRIGGYWYPRGGIPIDVFWQTGPIPEGLWLPDQGVPSYRGR

SEQ ID NO: 48425 - protein, 152 aa, unidentified
  source 1..152: note = Phyllobacterium zundukense
  REGION 1..152: note = tr|A0A2N9VWR9|A0A2N9VWR9_9RHIZ NADPH-dependent 7-cyano-7-deazaguanine reductase OS=Phyllobacterium zundukense OX=1867719 GN=queF PE=3 SV=1
MSHYAEQATMLGKDVKIPQHPDEATLDAVPNPQAGTLFLARFACPEFTSLCPVTGQPDFGHLVIDYAPDQSLVESKSLKLFLGSFRNHGAFHEDCTVSIGKRIVEAVKPLWLRIGGYWYPRGGIPIDVFWQTGPVPEGLWLPDQGVPAYRGR

SEQ ID NO: 48426 - protein, 281 aa, unidentified; identical to SEQ ID NO: 46660
  source 1..281: note = Phytobacter diazotrophicus
  REGION 1..281: note = tr|A0A4R4BD25|A0A4R4BD25_9GAMM NADPH-dependent 7-cyano-7-deazaguanine reductase OS=Phytobacter diazotrophicus OX=395631 GN=queF PE=3 SV=1

SEQ ID NO: 48427 - protein, 281 aa, unidentified
  source 1..281: note = Phytobacter ursingii
  REGION 1..281: note = tr|A0A0G3Q4C0|A0A0G3Q4C0_9GAMM NADPH-dependent 7-cyano-7-deazaguanine reductase OS=Phytobacter ursingii; OX = 1972431 GN=queF PE=3 SV=1
MSSYDNHQALSGLTLGKTTDYRDRYDASLLQGVPRSLNRDPLGLKAESLPFHGADIWTLYELSWLNARGLPQVAVGHVELNYASINLVESKSFKLYLNSFNQTRFASWDEVRDTLERDLSACAQGAVTVALYRLDEIEGQPIAHFHGSCIDDQDIVIDNYAFDANLLTDAASGKVIEETLVSHLLKSNCLITHQPDWGSVQIQYRGPKIDREKLLRYLVSFRHHNEFHEQCVERIFTDIQRFCQPESLSVYARYTRRGGLDINPWRTNTPFIPATGRLVRQ

SEQ ID NO: 48428 - protein, 281 aa, unidentified
  source 1..281: note = Phytobacter ursingii
  REGION 1..281: note = tr|A0A508UJ93|A0A508UJ93_9GAMM NADPH-dependent 7-cyano-7-deazaguanine reductase OS=Phytobacter ursingii; OX = 1972431 GN=queF PE=3 SV=1
MSSYDNHQALSGLTLGKTTDYRDRYDASLLQGVPRSLNRDPLGLKAESLPFHGADIWTLYELSWLNANGLPQVAVGHVTLNYASINLVESKSFKLYLNSFNQTRFASWEEVRATLERDLSACAQGAVTVALYRLDEIEGQPIAHFHGSCIDDQDIVIDNYAFDANLLTDAASGKVIEETLVSHLLKSNCLITHQPDWGSVQIQYRGPKIDREKLLRYLVSFRHHNEFHEQCVERIFTDIQRFCQPESLSVYARYTRRGGLDINPWRTNTPFIPATGRLVRQ

SEQ ID NO: 48429 - protein, 141 aa, unidentified
  source 1..141: note = Pigmentiphaga aceris
  REGION 1..141: note = tr|A0A5C0AVM6|A0A5C0AVM6_9BURK NADPH-dependent 7-cyano-7-deazaguanine reductase OS=Pigmentiphaga aceris; OX = 1940612 GN=queF PE=3 SV=1
MPSLPSKTLDTFPNPNAGRDYQIHIEVPEFTCLCPLTGQPDFAVLLLDYIPDERCVELKSLKMYTWSFRNEGAFHEAVTNKILDDLVAALDPRYFRLTAKWYVRGGIFTTVVAEHRKPGWTPAPAVALHQFDSLPHGNMRG

SEQ ID NO: 48430 - protein, 139 aa, Pigmentiphaga kullae
  REGION 1..139: note = tr|A0A4V2F306|A0A4V2F306_9BURK NADPH-dependent 7-cyano-7-deazaguanine reductase OS=Pigmentiphaga kullae; OX = 151784 GN=queF PE=3 SV=1
MPSQPSKSLDTFANPSPGRDFQIHIEVPEFTCLCPMTGQPDFALLVIDYIPDQLCVELKSLKLYAWSFRNEGKFHEAVTNEILDDLVRALSPRFMRITAKWYVRGGIFTNVVAEHRQAGWTPQPAVQLQEFAPGSNIRG

SEQ ID NO: 48431 - protein, 139 aa, Pigmentiphaga sp.; identical to SEQ ID NO: 44859
  REGION 1..139: note = tr|A0A208YBP5|A0A208YBP5_9BURK NADPH-dependent 7-cyano-7-deazaguanine reductase OS=Pigmentiphaga sp. NML030171 OX=2008676 GN=queF PE=3 SV=1

SEQ ID NO: 48432 - protein, 139 aa, Pigmentiphaga sp.
  REGION 1..139: note = tr|A0A3G8GLF0|A0A3G8GLF0_9BURK NADPH-dependent 7-cyano-7-deazaguanine reductase OS=Pigmentiphaga sp. H8; OX = 2488560 GN=queF PE=3 SV=1
MPSQPSKSLDTFTNPSPGRDFQIHIEVPEFTCLCPMTGQPDFALLIIDYIPDQLCVELKSLKLYAWSFRNEGKFHEAVTNEILDDLVRALSPRFMRITAKWYVRGGIFTNVVAEHRQPGWTPQPAVQLQEFAPGSNIRG

SEQ ID NO: 48433 - protein, 120 aa, Pirellula sp.
  REGION 1..120: note = tr|A0A142XVZ4|A0A142XVZ4_9PLAN NADPH-dependent 7-cyano-7-deazaguanine reductase OS=Pirellula sp. SH-Sr6A; OX = 1632865 GN=queF PE=3 SV=1
MPGTPFQDELECFDNSFPDRDYLIEIVCPEFTSMCPKTGQPDFGVLTFRYVPDQKCVELKSLKLYLQKFRNEGIFYENITNRILDDFVNVVQPRTVTLESKWGPRGGISSIITVTHNQKA

SEQ ID NO: 48434 - protein, 132 aa, Pirellula staleyi
  REGION 1..132: note = tr|D2R4S2|D2R4S2_PIRSD NADPH-dependent 7-cyano-7-deazaguanine reductase OS=Pirellula staleyi (strain ATCC 27377 / DSM 6068 / ICPB 4128) OX=530564; GN = queF PE=3 SV=1
MTQYVIHEKEKPGVSDTPRNLLETFENKFPSRDYTIEIVAPEFTSVCPLTGQPDFGTITLRYTPDAKCVELKSFKFYLQSFRNRGIFYENVTNSIFDDLVAVLEPRHLVLTARFTPRGGISSVIEVVHQKTK

SEQ ID NO: 48435 - protein, 135 aa, Piscibacillus halophilus
  REGION 1..135: note = tr|A0A1H9FU64|A0A1H9FU64_9BACI NADPH-dependent 7-cyano-7-deazaguanine reductase OS=Piscibacillus halophilus OX=571933 GN=queF PE=3 SV=1
MSENYYLPRSGPMPRPNSVEEGREILKNEAFGAPNVQEITFNALEFTAVCPKTGQPDFGRVEISYTPQDKCIESKSLKFYLWSFRDQGAFCESLAAQIADDVMYAIDPKRVEVTVYQSARGGIELTTKAVREHDK

SEQ ID NO: 48436 - protein, 142 aa, Piscinibacter aquaticus
  REGION 1..142: note = tr|A0A5C6U013|A0A5C6U013_9BURK NADPH-dependent 7-cyano-7-deazaguanine reductase OS=Piscinibacter aquaticus OX=392597 GN=queF PE=3 SV=1
MPPNPPSAPSKELHVFPNPAPERDYVIQFQVPEFTCHCPLTGQPDFAHFTIDMIADKLCVELKSLKMYFWSYRNEGAFHEKVTNTILDDIVKATAPRFVRITAKWYVRGGIYTNVVAEHRKKGWKPQPRVDLPAHAAETGLL

SEQ ID NO: 48437 - protein, 279 aa, unidentified
  source 1..279: note = Piscirickettsia litoralis
  REGION 1..279: note = tr|A0A1E3GF91|A0A1E3GF91_9GAMM NADPH-dependent 7-cyano-7-deazaguanine reductase OS=Piscirickettsia litoralis OX=1891921 GN=queF PE=3 SV=1
MSSEIELQLESAPLGQKSDYISTYSPDLLFPIPRKQKRDEINVPDALPFNGFDAWNAFELSWLNAKGKPCVALAHFEIDCASVNIVESKSFKLYLNSFNNTKFDSVTEVERILAKDIQAAAEGEVKARVILLSEVENQPILDFSAESIDDLDIECNEYMVKPDYLKADHTQIVEETLSSNLLKSNCLVTGQPDWGSVEIAYYGPKIDRESLLQYIVSFRNHNEFHEQCVERIFMDVMAHCQPERLTVHARYTRRGGLDINPVRSTEKSFKADNLRMARQ

SEQ ID NO: 48438 - protein, 279 aa, Piscirickettsia salmonis
  REGION 1..279: note = tr|A0A0K2L5I6|A0A0K2L5I6_PISSA NADPH-dependent 7-cyano-7-deazaguanine reductase OS=Piscirickettsia salmonis OX=1238 GN=queF PE=3 SV=1
MSSAVERELANAPLGQKSSYISLYSPDLLFPIARKQKRDEINVPDVLPFYGYDIWNAFELSWLNAKGKPCVALAYFEIDCASTNIIESKSFKLYLNSLNNTKFDSAAEVEGLLAKDLQRAVDGVVKVKVILLSEVINQPILDFNGESIDHLDVACHEYRVNPAYLRADQECVLEEMLSSNLLKSNCLVTGQPDWGSVEISYYGPRINREGLLQYIVSFRNHNEFHEQCVERIFMDIMKQCQPERLTVHARYTRRGGLDINPARSTEKLFKADNLRMARQ

SEQ ID NO: 48439 - protein, 280 aa, Piscirickettsia salmonis
  REGION 1..280: note = tr|A0A0K2DYJ7|A0A0K2DYJ7_PISSA NADPH-dependent 7-cyano-7-deazaguanine reductase OS=Piscirickettsia salmonis OX=1238 GN=queF PE=3 SV=1
MSSAVERELANAPLGQKSSYISLYSPDLLFPIARKQKRDEINVPDVLPFYGYDIWNAFELSWLNAKGKPCVALAYFEIDCASTNIIESKSFKLYLNSLNNTKFDSAAEVEGLLAKDLQRAVDGAVKVKVILLSEVINQPILDFNGESIDHLDVACHEYRVNPAYLRADQECVLVEETLSSNLLKSNCLVTGQPDWGSVEISYYGPRINREGLLQYIVSFRNHNEFHEQCVERIFMDITKQCQPEHLTVYARYTRRGGLDINPVRSTEKLFKADNLRMARQ

SEQ ID NO: 48440 - protein, 129 aa, unidentified
  source 1..129: note = Piscirickettsiaceae bacterium
  REGION 1..129: note = tr|A0A2A4SJQ0|A0A2A4SJQ0_9GAMM NADPH-dependent 7-cyano-7-deazaguanine reductase OS=Piscirickettsiaceae bacterium OX=2030828 GN=queF PE=3 SV=1
MSTTPSTDLETFPNPNPERDYTIKIDTPEFTCLCPKTGQPDFATMTLEYVPNRSCIELKSFKLYIWSYRDKGAFHEAVTNAILDDLVKACQPRFMRLSADFNVRGGVYTTVIVEHKDPKWTPPTPVQLA

SEQ ID NO: 48441 - protein, 279 aa, unidentified
  source 1..279: note = Piscirickettsiaceae bacterium
  REGION 1..279: note = tr|A0A177W6L9|A0A177W6L9_9GAMM NADPH-dependent 7-cyano-7-deazaguanine reductase OS=Piscirickettsiaceae bacterium NZ-RLO1 OX=1810840 GN=queF PE=3 SV=1
MPVGVELELASAPLGQKSNYISIYSPDLLFPIARKQKRDEINVPQVLPFYGCDVWNAFELSWLNAKGKPCVALAYFEIDCASTNIIESKSFKLYLNSLNNTKFDSVTEVQALLAKDIQHAVDGAAKVKVMLLTDVINQPILDFNGESIDHLDVACHEYHVNPTYLRADPGCVLEETLISNLLKSNCLVTGQPDWGSVEISYYGPRINREGLLQYIVSFRNHNEFHEQCVERIFMDIMQQCQPERLTVHARYTRRGGLDINPVRSTEKLFKADNLRMARQ

SEQ ID NO: 48442 - protein, 278 aa, unidentified
  source 1..278: note = Pistricoccus aurantiacus
  REGION 1..278: note = tr|A0A5B8ST40|A0A5B8ST40_9GAMM NADPH-dependent 7-cyano-7-deazaguanine reductase OS=Pistricoccus aurantiacus OX=1883414 GN=queF PE=3 SV=1
MATERPKILQQAPLGRESAYPEHYDAELLYAIPRAANRQPLGIDETALPFVGEDEWHAFEVSWLNARGKPLVAVTRFRLPADSPYLIESKSWKLYLNSFNQTCFASVERVEQTLVRDLSTAAGAPVAVRLFAVDDPELAVTNLPGECIDHLEVDITRYTPDPTLILVSHEIAEETLHSHLLKSNCPVTGQPDWGSVLIRYRGPKLERKGLLKYLISYRQHQDFHEHCVEHIFMDLMRQARPQSLLIMARYVRRGGLDISPWRATPGERPFESLRLARQ

SEQ ID NO: 48443 - protein, 132 aa, unidentified
  source 1..132: note = Planctomicrobium piriforme
  REGION 1..132: note = tr|A0A1I3DLU8|A0A1I3DLU8_9PLAN NADPH-dependent 7-cyano-7-deazaguanine reductase OS=Planctomicrobium piriforme OX=1576369 GN=queF PE=3 SV=1
MSANEPSRELLEVFENPFPGRNFVIDTVCPEFTSLCPKTGQPDFGTLTISYIPDQSCFELKSLKMYLQQYRNHGAFYERVTNTILDDLVAMVAPKWMKIEAAFTPRGGIRTTVIVEHPDRPLPSAQPTSTGR

SEQ ID NO: 48444 - protein, 116 aa, Planctomyces sp.
  REGION 1..116: note = tr|A0A142YL55|A0A142YL55_9PLAN NADPH-dependent 7-cyano-7-deazaguanine reductase OS=Planctomyces sp. SH-PL62 OX=1636152 GN=queF PE=3 SV=1
MAGAVETFPNQFPDREYEIEITFPEFTAVCPKTGQPDFGTIVVTYVPAETCLELKSFKLYLFDFRNRGIFYEHSINTILDDLVAACRPRRMTVVGHFNPRGGMTSKITATHQAGRA

SEQ ID NO: 48445 - protein, 127 aa, Planctomyces sp.
  REGION 1..127: note = tr|A0A2E8F1I9|A0A2E8F1I9_9PLAN NADPH-dependent 7-cyano-7-deazaguanine reductase OS=Planctomyces sp.; OX = 37635 GN=queF PE=3 SV=1
MDRRVLVRDEGAIDAECLLAFRYEYPEQDTQVEVDTDEFTAVCPWTGLPDYGTLTIYYIPGESCIELKSLKYYLLSYRDVGIVQEHAANRILLDLVALCQPRSMKITLDFKVRGGLHTAVTVEYPGN

SEQ ID NO: 48446 - protein, 124 aa, unidentified
  source 1..124: note = Planctomycetaceae bacterium
  REGION 1..124: note = tr|A0A1Z8MN39|A0A1Z8MN39_9PLAN NADPH-dependent 7-cyano-7-deazaguanine reductase OS=Planctomycetaceae bacterium TMED10 OX=1986833 GN=queF PE=3 SV=1
MSQVSTQILETFDNPFPERDYCIEIVCPEFTSLCPKTGQPDFGVLTFTYCPDARCIELKSLKMYLQQFRDQGIFYENITNSIVEDLVKKIEPRHLKCEAAFSARGGITTKVTVQYPSPDEKKED

SEQ ID NO: 48447 - protein, 133 aa, unidentified
  source 1..133: note = Planctomycetaceae bacterium
  REGION 1..133: note = tr|A0A356QTK2|A0A356QTK2_9PLAN NADPH-dependent 7-cyano-7-deazaguanine reductase OS=Planctomycetaceae bacterium OX=2026779 GN=queF PE=3 SV=1
MNTLNVNLAPKPSQDILETFDNQFPKRDYLIEIVCPEFTSVCPKTGQPDFGVLTFRYIANTRCVELKSLKLYLQAYRNAGIFYENVSNQIVEDLVSVLEPKHFTLVAQFTPRGGISSCITISQPDGHHLPAAK

SEQ ID NO: 48448 - protein, 108 aa, unidentified
  source 1..108: note = Planctomycetales bacterium
  REGION 1..108: note = tr|A0A1W9T3W9|A0A1W9T3W9_9BACT NADPH-dependent 7-cyano-7-deazaguanine reductase (Fragment); OS = Planctomycetales bacterium 4572_13 OX=1971638; GN = B6I25_07745 PE=3 SV=1
DNPRPQRDYTITIRCPEFTSVCPKTGQPDFGTILIEYIPDALCIELKSLKFYMQSFRNKGIFYESLTNDILDDLAAACKPRWMQVRSTFTPRGGISTDVCAEYTAQKG

SEQ ID NO: 48449 - protein, 116 aa, unidentified
  source 1..116: note = Planctomycetales bacterium
  REGION 1..116: note = tr|A0A1U7GJ23|A0A1U7GJ23_9BACT NADPH-dependent 7-cyano-7-deazaguanine reductase OS=Planctomycetales bacterium 71-10 OX=1895807 GN=queF PE=3 SV=1
MPGAVETFANQFPGREYEIEITCPEFTAVCPKTGQPDFGTIIITYVPAETCLELKSLKLYMFDFRNRGIFYEHSINTILDDLVASCTPRRMTVVGLFNPRGGMTSKITATHEAARA

SEQ ID NO: 48450 - protein, 114 aa, unidentified
  source 1..114: note = Planctomycetes bacterium
  REGION 1..114: note = tr|A0A1G2Y7F3|A0A1G2Y7F3_9BACT NADPH-dependent 7-cyano-7-deazaguanine reductase OS=Planctomycetes bacterium GWF2_42_9 OX=1801958 GN=queF PE=3 SV=1
MDQPKLEFFDNPRPGRDYNISINCPEFTSVCPKTGQPDFGTIIIDYCPDKTCIELKSLKYYMQSFRNKGIFYEAVTNQILDDLVAACQPKRMKITSKFTPRGGITTEVTVQYPG

SEQ ID NO: 48451 - protein, 124 aa, unidentified
  source 1..124: note = Planctomycetes bacterium
  REGION 1..124: note = tr|A0A518CP15|A0A518CP15_9BACT NADPH-dependent 7-cyano-7-deazaguanine reductase OS=Planctomycetes bacterium Pla110 OX=2528007 GN=queF PE=3 SV=1
MSDSFKEILETFPNPHPNRDYLIETVCPEFTSVCPKTGQPDFGTLTITYIANEHCFELKSLKLYLQEYRNHGAFYEDVTNLILNDLVKITQPKWMQIIADFTPRGGIRTKVTVEYPSLAIHSQG

SEQ ID NO: 48452 - protein, 119 aa, unidentified
  source 1..119: note = Planctomycetia bacterium
  REGION 1..119: note = tr|A0A257TMB7|A0A257TMB7_9BACT NADPH-dependent 7-cyano-7-deazaguanine reductase OS=Planctomycetia bacterium 21-64-5 OX=1970542 GN=queF PE=3 SV=1
MPENFRAALETFDNQFPQREYVIEIVCPEFTSVCPKTGQPDFGTLTITYSPAAKCVELKSLKLYLQQFRNEGIFYEHATNRIFDDLVAVTAPRWMRLKAAFTSRGGISTTVTAEYEVGS

SEQ ID NO: 48453 - protein, 119 aa, unidentified
  source 1..119: note = Planctomycetia bacterium
  REGION 1..119: note = tr|A0A1Z8SUE2|A0A1Z8SUE2_9BACT NADPH-dependent 7-cyano-7-deazaguanine reductase OS=Planctomycetia bacterium TMED53 OX=1986839 GN=queF PE=3 SV=1
MSTRPSRNLETFPNPQPGRDFVIHFDCPEFTCLCPMTGQPDFARFELEYIPDQKCIESKSLKLYLWSYRDEGAFHEAITNQILDDMVAACEPRWFKVTGHFYVRGGLTPTITAEHGTKP

SEQ ID NO: 48454 - protein, 118 aa, unidentified
  source 1..118: note = Planctopirus ephydatiae
  REGION 1..118: note = tr|A0A518GSH8|A0A518GSH8_9PLAN NADPH-dependent 7-cyano-7-deazaguanine reductase OS=Planctopirus ephydatiae OX=2528019 GN=queF PE=3 SV=1
MPSEFLGILETFPNPFPQRDYSIETICPEFTSLCPKTGQPDYGTLVITYVPDEKCFELKSLKLYLQAFRNHGAFYEQVTNMILDDLVATTSPRSLEVVAQFTPRGGIRSNVTVKYVRD

SEQ ID NO: 48455 - protein, 113 aa, unidentified
  source 1..113: note = Planctopirus hydrillae
  REGION 1..113: note = tr|A0A1C3ELX9|A0A1C3ELX9_9PLAN NADPH-dependent 7-cyano-7-deazaguanine reductase OS=Planctopirus hydrillae; OX = 1841610 GN=queF PE=3 SV=1
MAILETFPNPFPQRDYSIETICPEFTSLCPKTGQPDYGTLVITYVPDEKCFELKSLKLYLQAFRNHGAFYEQVTNMILDDLVAATSPRSLEVVAQFTPRGGIRSNVTVKYAKD

SEQ ID NO: 48456 - protein, 118 aa, unidentified
  source 1..118: note = Planctopirus limnophila
  REGION 1..118: note = tr|D5SQT4|D5SQT4_PLAL2 NADPH-dependent 7-cyano-7-deazaguanine reductase OS=Planctopirus limnophila (strain ATCC 43296 / DSM 3776 / IFAM 1008 / 290) OX=521674 GN=queFPE=3 SV=1
MPSEFLGILETFPNPFPQRDYSIETICPEFTSLCPKTGQPDYGTLVITYVPDEKCFELKSLKLYLQAFRNHGAFYEQVTNMILDDLVAATSPRSLEVVAQFTPRGGIRSNVTVKYAKD

SEQ ID NO: 48457 - protein, 139 aa, Planifilum fimeticola
  REGION 1..139: note = tr|A0A2T0LHA4|A0A2T0LHA4_9BACL NADPH-dependent 7-cyano-7-deazaguanine reductase OS=Planifilum fimeticola; OX = 201975 GN=queF PE=3 SV=1
MGKVTVDHSKYNNIRFDTQDESAIRTDLLETIPYEYPGKDTEVVIPTSEFTSVCPWSGLPDFADLTITFIPDKYLIEMKSLKYYLTSFRNVGIYQEHATNRILKDLVELAKPKYMKVEAIWNPRGGLGTRVVVEHGKRD

SEQ ID NO: 48458 - protein, 139 aa, Planifilum fulgidum
  REGION 1..139: note = tr|A0A1I2KJ44|A0A1I2KJ44_9BACL NADPH-dependent 7-cyano-7-deazaguanine reductase OS=Planifilum fulgidum; OX = 201973 GN=queF PE=3 SV=1
MGKVTVDHSKYANIRFDTQDESAIRTDLLETIPYEYPGKDTEVVIPTSEFTTVCPWSGLPDFADLTITFIPDKYLIEMKSLKYYLTSFRNVGIYQEHATNRILKDLVELAKPKYMKVEAVWNPRGGLGTRVVVEHGKRD

SEQ ID NO: 48459 - protein, 146 aa, unidentified
  source 1..146: note = Planktothricoides sp.
  REGION 1..146: note = tr|A0A0M1JXH4|A0A0M1JXH4_9CYAN NADPH-dependent 7-cyano-7-deazaguanine reductase OS=Planktothricoides sp. SR001 OX=1705388 GN=queF PE=3 SV=1
METELVAQSQNGESQANFFNPQMKYGEREILEGQLITFPNPRVGRRYEIQVTLPEFTCKCPFSGYPDFATIYITYIPDQKVVELKAIKLYINQYRDRYISHEESVNQILDDFVDACDPLEITIKGDFNPRGNVHTVISVKHEKKID

SEQ ID NO: 48460 - protein, 144 aa, Planktothrix agardhii
  REGION 1..144: note = tr|A0A2Z6CIW1|A0A2Z6CIW1_PLAAG NADPH-dependent 7-cyano-7-deazaguanine reductase OS=Planktothrix agardhii NIES-204 OX=282423 GN=queF PE=3 SV=1
MSHSYSEPTESATASPEASKYGEREIEEGQLITFPNPRIGRRYFVEIILPEFTCKCPFSGYPDFAKIYLTYLPNERVVELKSIKLYINSYRDRYISHEESINQILDDFVAAVDPLEVSIRGDFNPRGNVHTVVEVEHEKLNPKL

SEQ ID NO: 48461 - protein, 144 aa, Planktothrix agardhii; identical to SEQ ID NO: 48460
  REGION 1..144: note = tr|A0A073CJ59|A0A073CJ59_PLAAG NADPH-dependent 7-cyano-7-deazaguanine reductase OS=Planktothrix agardhii NIVA-CYA 126/8 OX=388467 GN=queF PE=3 SV=1

SEQ ID NO: 48462 - protein, 144 aa, unidentified; identical to SEQ ID NO: 48460
  source 1..144: note = Planktothrix rubescens
  REGION 1..144: note = tr|A0A1J1LAV2|A0A1J1LAV2_PLARU NADPH-dependent 7-cyano-7-deazaguanine reductase OS=Planktothrix rubescens; OX = 59512 GN=queF PE=3 SV=1

SEQ ID NO: 48463 - protein, 144 aa, Planktothrix sp.
  REGION 1..144: note = tr|A0A1T4ZBC1|A0A1T4ZBC1_9CYAN NADPH-dependent 7-cyano-7-deazaguanine reductase OS=Planktothrix sp. PCC 11201 OX=1729650 GN=queF PE=3 SV=1
MSHPYTEPTEVSTASPEELKYGEREIEEGQLITFPNPRIGRRYQVEITLPEFTCKCPFSGYPDFATIYLTYLPDERVVELKSIKLYINSYRDRYISHEESINQILDDFVAAADPLEVRIKGDFNPRGNVHTVVEVAHQKLNPNL

SEQ ID NO: 48464 - protein, 40 aa, Planktothrix sp.
  REGION 1..40: note = tr|A0A354WAL7|A0A354WAL7_9CYAN NADPH-dependent 7-cyano-7-deazaguanine reductase QueF (Fragment); OS = Planktothrix sp. UBA10369 OX=2055760 GN=DDZ60_04480; PE = 4 SV=1
QILDDFVAAADPLEVSIRGDFNPRGNVHTVVEVEHQKVNP

SEQ ID NO: 48465 - protein, 144 aa, unidentified
  source 1..144: note = Planktothrix tepida
  REGION 1..144: note = tr|A0A1J1LIH4|A0A1J1LIH4_9CYAN NADPH-dependent 7-cyano-7-deazaguanine reductase OS=Planktothrix tepida PCC 9214 OX=671072 GN=queF PE=3 SV=1
MSHSYTETPESPATSPEALKYGEREIAEGQLITFPNPRIGRRYEVQITLPEFTCKCPFSGYPDFATIYLTYVPNERVVELKSIKLYINSYRDRYISHEESINQILDDFVTAADPLEVRIKGDFNPRGNVHTVVEVQHLRVNPES

SEQ ID NO: 48466 - protein, 164 aa, Planococcus antarcticus
  REGION 1..164: note = tr|A0A1C7DC90|A0A1C7DC90_9BACL NADPH-dependent 7-cyano-7-deazaguanine reductase OS=Planococcus antarcticus DSM 14505 OX=1185653 GN=queF PE=3 SV=1
MAGRNEDTLDHLSLLGNQNTAYKFEYDPEILEPIDNLHSRDYFVKFNCPEFTSLCPQTGQPDFATIYLSFIPDQKLVESKSLKLYLFSFRNHGDFHEDVVNIIMNDLIKLMDPRYIEVWGKFTPRGGLSIDPYTNHGKPGTKYEEMASYRMMNHDMNPETITNR

SEQ ID NO: 48467 - protein, 164 aa, Planococcus citreus
  REGION 1..164: note = tr|A0A497YGL9|A0A497YGL9_9BACL NADPH-dependent 7-cyano-7-deazaguanine reductase OS=Planococcus citreus; OX = 1373 GN=queF PE=3 SV=1
MAGRNEETLEHLSLLGNQNTRYKFEYDPGILEAIDNLHTRDYFVKFNCPEFTSLCPQTGQPDFATIYLSFIPDKKLVESKALKLYLFSFRNHGDFHEDVVNIIMNDLIELLDPRYIEVWGKFTPRGGLSIDPYTNYGKPGTKYEEMATYRMMNHDMNPETITNR

SEQ ID NO: 48468 - protein, 164 aa, Planococcus donghaensis
  REGION 1..164: note = tr|A0A1C7EMH2|A0A1C7EMH2_9BACL NADPH-dependent 7-cyano-7-deazaguanine reductase OS=Planococcus donghaensis OX=414778 GN=queF PE=3 SV=1
MAGRNEDTLDHLSLLGNQNTKYKFEYDPDVLEPIDNLHTRDYFVKFNCPEFTSLCPQTGQPDFATIYLSFIPDKTLVESKSLKLYLFSFRNHGDFHEDVVNIIMNDLIKLMDPRYIEVWGKFTPRGGLSIDPYTNYGKPGTKYEEMASYRMMNHDLNPETITNR

SEQ ID NO: 48469 - protein, 164 aa, Planococcus donghaensis; identical to SEQ ID NO: 48468
  REGION 1..164: note = tr|E7RDL1|E7RDL1_9BACL NADPH-dependent 7-cyano-7-deazaguanine reductase OS=Planococcus donghaensis MPA1U2 OX=933115 GN=queF PE=3 SV=1

SEQ ID NO: 48470 - protein, 164 aa, unidentified
  source 1..164: note = Planococcus halocryophilus
  REGION 1..164: note = tr|A0A1C7DTZ5|A0A1C7DTZ5_9BACL NADPH-dependent 7-cyano-7-deazaguanine reductase OS=Planococcus halocryophilus OX=1215089 GN=queF PE=3 SV=1
MAGRNEDTLDHLSLLGNQNTKYKFEYAPEILEPIDNLHTRDYFVKFNCPEFTSLCPQTGQPDFATIYLSFIPDKTLVESKSLKLYLFSFRNHGDFHEDVVNIIMNDLIKLMDPRYIEVWGKFTPRGGLSIDPYTNYGKPGTKYEEMASYRMMNHDLNPETITNR

SEQ ID NO: 48471 - protein, 164 aa, unidentified
  source 1..164: note = Planococcus halotolerans
  REGION 1..164: note = tr|A0A365KQL8|A0A365KQL8_9BACL NADPH-dependent 7-cyano-7-deazaguanine reductase OS=Planococcus halotolerans OX=2233542 GN=queF PE=3 SV=1
MAGRNEDTLDHLTLLGNQDTKYKYEYAPEVLEAIDNMHTRDYFVKFNNPEFTSLCPQTGQPDFATIYLSFIPDKKLVESKSLKLYFFSFRNHGDFHEDVVNIIMNDLIDLLDPRYIEVWGKFTPRGGLSIDPYTNYGKPGTKYEEMASYRMMNHDMNPETITNR

SEQ ID NO: 48472 - protein, 164 aa, Planococcus kocurii
  REGION 1..164: note = tr|A0A0U2Y4W4|A0A0U2Y4W4_9BACL NADPH-dependent 7-cyano-7-deazaguanine reductase OS=Planococcus kocurii; OX = 1374 GN=queF PE=3 SV=1
MAGRNEDTLEHLELLGNQNTKYKFEYDPDILEPIDNLHSRDYFVKFNCPEFTSLCPQTGQPDFATIYLSFIPDKTLVESKSLKLYLFSFRNHGDFHEDVVNIIMNDLIKLMDPRYIEVWGKFTPRGGLSIDPYTNYGQPGTKYEEMASYRMMNHDMNPETITNR

SEQ ID NO: 48473 - protein, 164 aa, Planococcus maitriensis; identical to SEQ ID NO: 48467
  REGION 1..164: note = tr|A0A365K4Y4|A0A365K4Y4_9BACL NADPH-dependent 7-cyano-7-deazaguanine reductase OS=Planococcus maitriensis OX=221799 GN=queF PE=3 SV=1

SEQ ID NO: 48474 - protein, 164 aa, Planococcus maritimus
  REGION 1..164: note = tr|A0A1C7DWR7|A0A1C7DWR7_PLAMR NADPH-dependent 7-cyano-7-deazaguanine reductase OS=Planococcus maritimus; OX = 192421 GN=queF PE=3 SV=1
MAGRNEDTLEHLALLGNQNTRYKFEYDPGILEAIDNLHTRDYFVKFNCPEFTSLCPQTGQPDFATIYLSFIPDKKLVESKALKLYLFSFRNHGDFHEDVVNIIMNDLIELLDPRYIEVWGKFTPRGGLSIDPYTNHGKPGTKYEEMATYRMMNHDMNPETITNR

SEQ ID NO: 48475 - protein, 164 aa, Planococcus maritimus
  REGION 1..164: note = tr|A0A150W4C8|A0A150W4C8_PLAMR NADPH-dependent 7-cyano-7-deazaguanine reductase OS=Planococcus maritimus; OX = 192421 GN=queF PE=3 SV=1
MAGRNEETLEHLSLLGNQNTRYKFEYDPGILEAIDNLHPRDYFVKFNCPEFTSLCPQTGQPDFATIYLSFIPDKKLVESKALKLYLFSFRNHGDFHEDVVNIIMNDLIELLDPRYIEVWGKFTPRGGLSIDPYTNYGKPGTKYEEMATYRMMNHDMNPETITNR

SEQ ID NO: 48476 - protein, 164 aa, unidentified
  source 1..164: note = Planococcus massiliensis
  REGION 1..164: note = tr|A0A098ESH3|A0A098ESH3_9BACL NADPH-dependent 7-cyano-7-deazaguanine reductase OS=Planococcus massiliensis OX=1499687 GN=queF PE=3 SV=1
MTGRNEDTLDHLSLLGNQNTKYKFEYDPDILEPIDNLHTRDYFVKFNCPEFTSLCPQTGQPDFATMYISFIPDKKLVESKSLKLYLFSFRNHGDFHEDVVNIIMNDLIKLMEPRYIEVWGKFTPRGGLSIDPYTNYGKPGTKYEEMASYRIMNHDMYPETITNR

SEQ ID NO: 48477 - protein, 164 aa, Planococcus plakortidis; identical to SEQ ID NO: 48467
  REGION 1..164: note = tr|A0A1C7EBJ5|A0A1C7EBJ5_9BACL NADPH-dependent 7-cyano-7-deazaguanine reductase OS=Planococcus plakortidis OX=1038856 GN=queF PE=3 SV=1

SEQ ID NO: 48478 - protein, 164 aa, Planococcus rifietoensis; identical to SEQ ID NO: 48467
  REGION 1..164: note = tr|A0A0U2XGT7|A0A0U2XGT7_9BACL NADPH-dependent 7-cyano-7-deazaguanine reductase OS=Planococcus rifietoensis OX=200991 GN=queF PE=3 SV=1

SEQ ID NO: 48479 - protein, 164 aa, unidentified
  source 1..164: note = Planococcus salinus
  REGION 1..164: note = tr|A0A3M8P518|A0A3M8P518_9BACL NADPH-dependent 7-cyano-7-deazaguanine reductase OS=Planococcus salinus; OX = 1848460 GN=queF PE=3 SV=1
MAGRNEDTLDHLTLLGNQDTKYKYAYAPEVLEAIDNMHTRDYFVKFNNPEFTSLCPQTGQPDFATIYLSFIPDKKLVESKSLKLYFFSFRNHGDFHEDVVNIIMNDLIDLLDPRYIEVWGKFTPRGGLSIDPYTNYGKPGTKYEEMASYRMMNHDMNPETITNR

SEQ ID NO: 48480 - protein, 164 aa, Planococcus sp.
  REGION 1..164: note = tr|A0A5C5SRV5|A0A5C5SRV5_9BACL NADPH-dependent 7-cyano-7-deazaguanine reductase OS=Planococcus sp. CPCC 101016 OX=2599617 GN=queF PE=3 SV=1
MAGRNEETLDHLSLLGNQNTKYKFEYDPEILEPIDNLHSRDYFVKFNCPEFTSLCPQTGQPDFATIYLSFIPEKKLVESKSLKLYLFSFRNHGDFHEDVVNIIMNDLINLMDPRYIEVWGKFTPRGGLSIDPYTNYGKPGTKYEEMASYRMMNHDMNPETITNR

SEQ ID NO: 48481 - protein, 164 aa, Planococcus sp.; identical to SEQ ID NO: 48472
  REGION 1..164: note = tr|A0A5B0CT55|A0A5B0CT55_9BACL NADPH-dependent 7-cyano-7-deazaguanine reductase OS=Planococcus sp. ANT_H30 OX=2597347 GN=queF PE=3 SV=1

SEQ ID NO: 48482 - protein, 164 aa, Planomicrobium glaciei
  REGION 1..164: note = tr|A0A1G7Y8H1|A0A1G7Y8H1_9BACL NADPH-dependent 7-cyano-7-deazaguanine reductase OS=Planomicrobium glaciei; OX = 459472 GN=queF PE=3 SV=1
MAGRNEDTLDHLSLLGNQNTKYQFEYDPDILEAIDNLHTRDYFVKFNCPEFTSLCPQTGQPDFATIYLSFIPDKKLVESKSLKLYLFSFRNHGDFHEDVVNIIMNDLIKLLEPRYIEVWGKFTPRGGLSIDPYTNYGKPGTKYEEMASYRMMNHDMYPETITNR

SEQ ID NO: 48483 - protein, 164 aa, unidentified
  source 1..164: note = Planomicrobium soli
  REGION 1..164: note = tr|A0A2P8H244|A0A2P8H244_9BACL NADPH-dependent 7-cyano-7-deazaguanine reductase OS=Planomicrobium soli; OX = 1176648 GN=queF PE=3 SV=1
MAGRNEDTLDHLSLLGNQNTKYKFEYDPDILEPIDNLHTRDYFVKFNCPEFTSLCPQTGQPDFATIYLSFIPDKKLVESKSLKLYLFSFRNHGDFHEDVVNIIMNDLIKLMDPRYIEVWGKFTPRGGLSIDPYTNYGKPGTKYEEMASYRMMNHDMNPETITNR

SEQ ID NO: 48484 - protein, 164 aa, Planomicrobium sp.
  REGION 1..164: note = tr|A0A2I0FJJ2|A0A2I0FJJ2_9BACL NADPH-dependent 7-cyano-7-deazaguanine reductase OS=Planomicrobium sp. MB-3u-38 OX=2058318 GN=queF PE=3 SV=1
MAGRNEDTLDHLTLLGNQDTKYKYEYAPEVLEAIDNMHSRDYFVKFNNPEFTSLCPQTGQPDFATIYLSFIPDKKLVESKSLKLYFFSFRNHGDFHEDVVNIIMNDLINLLDPRYIEVWGKFTPRGGLSIDPYTNYGKPGTKYEEMASYRMMNHDMNPETITNR

SEQ ID NO: 48485 - protein, 164 aa, Planomicrobium sp.; identical to SEQ ID NO: 48471
  REGION 1..164: note = tr|A0A3L7JJI5|A0A3L7JJI5_9BACL NADPH-dependent 7-cyano-7-deazaguanine reductase OS=Planomicrobium sp. Y74; OX = 2478977 GN=queF PE=3 SV=1

SEQ ID NO: 48486 - protein, 277 aa, Plasticicumulans acidivorans
  REGION 1..277: note = tr|A0A317MUM1|A0A317MUM1_9GAMM NADPH-dependent 7-cyano-7-deazaguanine reductase OS=Plasticicumulans acidivorans OX=886464 GN=queF PE=3 SV=1
MSDLDRAPLGKPVRYASHYDPTLLCPIPRQLKRDEIGLPAGTPLPFHGLDLWNAYELSWLLPSGKPQVALAEFRVPASSPNIIESKSLKLYLNSFNQTRLAARAALLARLQTDLSAAAGAAVGVELIGPERFAALDFGELDGECIDDLDVTIEHYQPAPQLLRADFSAAPVAETLCSNLLKSNCLVTGQPDWASVQIRYRGAPIDRAGLLGYLVSFREHNEFHEQCVERIYMDLLRQCRPQELRVYARYTRRGGLDINPLRSSDAAVTAVNPRGARQ

SEQ ID NO: 48487 - protein, 275 aa, unidentified
  source 1..275: note = Plasticicumulans lactativorans
  REGION 1..275: note = tr|A0A4R2L405|A0A4R2L405_9GAMM NADPH-dependent 7-cyano-7-deazaguanine reductase OS=Plasticicumulans lactativorans OX=1133106 GN=queF PE=3 SV=1
MHELEHAPLGRPVAYVSEYDPGLLFPIARAPQREALGIGTPLPFHGVDLWTAYELSWLAPSGKPQVALARIAVPAGSPCIVESKSLKLYLNSFNQTRLDGPAELRARLERDLGAGFGAPVAVELVGPERFADERLAELDGDCLDGLDIVTDTYTPEPGFLGAAAGAAPVREVLVSHLLKSNCRVTGQPDWASVQIAYAGPPIDHAGLLRYLISFRNHNEFHEPCVERIFIDVLRRCAPTQLSVYARYTRRGGLDINPFRSTDAGAQPPRVRCARQ

SEQ ID NO: 48488 - protein, 281 aa, Plautia stali
  REGION 1..281: note = tr|U3U7C4|U3U7C4_9ENTR NADPH-dependent 7-cyano-7-deazaguanine reductase OS=Plautia stali symbiont; OX = 891974 GN=queF PE=3 SV=1
MSSENRDTALSSLTLGKPTAYVDRYDNTLLQAVPRSLNREPLGLYPDNLPFHGADIWTLYELSWLNSKGVPQVAVGEVVLSADSVNLIESKSFKLYLNSFNQTIFADWGAVRQTLERDLSACANGQVSVALFRLSEVEGQPIGHFAGDVIDEQDITISNYGFNADYLASATGSEVVEETLVSHLLKSNCLITNQPDWGSVMIRYQGPRIDREALLRYLISFRQHNEFHEQCIERIFNDIQRFCQPAALTVYARYTRRGGLDINPWRSNVPFTPGYSRLVRQ

SEQ ID NO: 48489 - protein, 145 aa, unidentified
  source 1..145: note = Pleionea mediterranea
  REGION 1..145: note = tr|A0A316GHQ7|A0A316GHQ7_9GAMM 7-cyano-7-deazaguanine reductase OS=Pleionea mediterranea; OX = 523701 GN=C8D97_101155 PE=4 SV=1
MNNRVMTWESIDREQLKALPNPSNGAYEIKVKIPEFTFLGVHEQPDFATVYLTFYPTNKIIELKALKQYVYQLRNIVVSYERLINVMYDHLVSVYEPDRLRLVMICNPRGGISSRLTIDSDWGARGGPEKYRDWMSHDDVWDVVL

SEQ ID NO: 48490 - protein, 272 aa, unidentified
  source 1..272: note = Pleionea mediterranea
  REGION 1..272: note = tr|A0A316FVW5|A0A316FVW5_9GAMM NADPH-dependent 7-cyano-7-deazaguanine reductase OS=Pleionea mediterranea; OX = 523701 GN=queF PE=3 SV=1
MTKQIPLGQSTAYPERYDRELLFPVARQDKRTELGITQSLPFVGKDIWTAYEVSWLNSKGKPQVAIAEFYFPCESPFIVESKSFKLYLNSFNQERLDSMAELKARLITDLSEAVKSDVNVLMFALSEYQSKGLGKLTGACLDDLDIDCEIYDYQPELLTLKSDGALADEVVYSHLLKSNCLITSQPDWATLQIRYQGNAIDHASLLRYIVSFRNHNEFHEQCVERIYTDIMQQCQPKQLTVIARYTRRGGLDINPWRSSHETNIEFMRLARQ

SEQ ID NO: 48491 - protein, 153 aa, unidentified
  source 1..153: note = Pleomorphomonas diazotrophica
  REGION 1..153: note = tr|A0A2N3LZ23|A0A2N3LZ23_9RHIZ NADPH-dependent 7-cyano-7-deazaguanine reductase OS=Pleomorphomonas diazotrophica OX=1166257 GN=queF PE=3 SV=1
MTSDATGAHQLGKATATPASPDEAVLDRVPNPHPDIDYLARFTAPEFTSLCPVTGQPDFAHLVIDYVPDQWLVESKSLKLFLTSFRNHGSFHEDCTIMIARRLVKRLEPRWLRIGGYWYPRGGIPIDVFWQTGAPPKDLWLPDQGVATYRGRG

SEQ ID NO: 48492 - protein, 153 aa, Pleomorphomonas sp.
  REGION 1..153: note = tr|A0A4R8FE54|A0A4R8FE54_9RHIZ NADPH-dependent 7-cyano-7-deazaguanine reductase OS=Pleomorphomonas sp. CF100 OX=2135722 GN=queF PE=3 SV=1
MTSDATGAHQLGKVAATPLSPEEAVLDRVPNPHQDIDYLARFTAPEFTSLCPVTGQPDFAHLVIDYVPDQWLVESKSLKLFLTSFRNHGSFHEDCTIMIARRLVERLDPRWLRIGGYWYPRGGIPIDVFWQTGAPPKDLWLPDQGVATYRGRG

SEQ ID NO: 48493 - protein, 118 aa, Plesiocystis pacifica
  REGION 1..118: note = tr|A6FWQ9|A6FWQ9_9DELT NADPH-dependent 7-cyano-7-deazaguanine reductase OS=Plesiocystis pacifica SIR-1 OX=391625 GN=queF PE=3 SV=1
MPSQPTRELETFPNPRPERSYEIRFECPEFTCVCPKTGQPDFATIRIRYSPAQTCVELKSLKLYLWSYRDLGAFHEAVTNQILDDLVAATQPRWMVVEGDFYVRGGIKTVVEARHDAE

SEQ ID NO: 48494 - protein, 287 aa, Plesiomonas shigelloides
  REGION 1..287: note = tr|A0A2P1VT36|A0A2P1VT36_PLESH NADPH-dependent 7-cyano-7-deazaguanine reductase OS=Plesiomonas shigelloides OX=703 GN=queF PE=3 SV=1
MTKYHNDPALQGLTLGKSTDYCDQYNPQLLQPVPRALNRDDLQLTGSLPFSGADLWTLYELSWLNNNGVPQVAIGDVYIPATSRNLVESKSFKLYLNSFNQTRFADWESVAATLQRDLSQCAEGDVKVLLHRVDAYPGQAIADFPGACIDEQDIVIDDYHFNADYLQGAASQANGEPMPIAEETLVSHLLKSNCLITHQPDWGSVSIHYRGPQINREALLRYLISFRSHNEFHEQCVERIFTDLKRFCAPEKLTVFARYTRRGGLDINPFRSDWEAMPAQNRRLARQ

SEQ ID NO: 48495 - protein, 287 aa, Plesiomonas shigelloides
  REGION 1..287: note = tr|R8AN74|R8AN74_PLESH NADPH-dependent 7-cyano-7-deazaguanine reductase OS=Plesiomonas shigelloides 302-73 OX=1315976 GN=queF PE=3 SV=1
MTKYHNDPALQGLTLGKSTDYCDQYNPQLLQPVPRALNRDDLQLTGSLPFSGADLWTLYELSWLNNNGVPQVAIGDVYIPATSRNLVESKSFKLYLNSFNQTRFADWESVAATLQRDLSQCAEGDVKVLLHRVDAYPGQAIADFPGECIDEQEIVIDDYHFNADYLQGAASQANGEPMPMVEETLVSHLLKSNCLITRQPDWGSVSIHYRGPQINREALLRYLISFRSHNEFHEQCVERIFTDLKRFCAPEKLTVFARYTRRGGLDINPFRSDWEAMPAQNRRLARQ

SEQ ID NO: 48496 - protein, 136 aa, Pleurocapsa sp.
  REGION 1..136: note = tr|A0A2T1CLU7|A0A2T1CLU7_9CYAN NADPH-dependent 7-cyano-7-deazaguanine reductase OS=Pleurocapsa sp. CCALA 161 OX=2107688 GN=queF PE=3 SV=1
MTTTPQSPTTGDELKYGERAIAEGELITFPNPRIGRKYDIRITLPEFTCKCPFSGYPDFATIYLTYSPDQTVVELKGLKLYINSYRDRYIPHEEVVNQILDDFVAACDPLTASVKGDFTPRGNVHTVIEVHHTKEL

SEQ ID NO: 48497 - protein, 134 aa, Pleurocapsa sp.
  REGION 1..134: note = tr|K9SZE8|K9SZE8_9CYAN NADPH-dependent 7-cyano-7-deazaguanine reductase OS=Pleurocapsa sp. PCC 7327 OX=118163 GN=queF PE=3 SV=1
MQAPEREKPEMKYGERAIAQGELITFPNPRIGRRYDIHITLPEFTCKCPFSGYPDFATIYITYCPDEKVVELKALKLYINSYRDRYISHEEAVNQILDDFVAACDPLEAKVKGDFNPRGNVHTVIEVCHHKQSP

SEQ ID NO: 48498 - protein, 281 aa, unidentified
  source 1..281: note = Pluralibacter gergoviae
  REGION 1..281: note = tr|A0A2C5WH50|A0A2C5WH50_PLUGE NADPH-dependent 7-cyano-7-deazaguanine reductase OS=Pluralibacter gergoviae OX=61647 GN=queF PE=3 SV=1
MSSYENDRALSGLTLGKSTEYRDIYDASLLQPVPRSLNRDPLGIRADRLPFHGGDIWTLYELSWLNAKGLPQVAVGHVELSDTSVNLVESKSFKLYLNSFNQTRFASWDDVRSTLERDLRACAQGDVSVALYRLDEIEGQPVARFRGTCIDDQDIAIDSYAFSTDHLAGAAGGDVVEETLVSHLLKSNCLITHQPDWGSVQIQYRGPRIDREKLLRYLVSFRHHNEFHEQCVERIFCDIQRFCRPDTLSVYARYTRRGGLDINPWRSNAEFTPATGRLVRQ

SEQ ID NO: 48499 - protein, 281 aa, unidentified
  source 1..281: note = Pluralibacter gergoviae
  REGION 1..281: note = tr|A0A0J5LF39|A0A0J5LF39_PLUGE NADPH-dependent 7-cyano-7-deazaguanine reductase OS=Pluralibacter gergoviae OX=61647 GN=queF PE=3 SV=1
MSSYENDRALSGLTLGKSTEYRDIYDASLLQPVPRSLNRDPLGIRADHLPFHGGDIWTLYELSWLNAKGLPQVAVGHVELSDTSVNLVESKSFKLYLNSFNQTRFASWDDVRSTLERDLRACAQGDVSVALYRLDEIEGQPVARFRGTCIDDQDIAIDSYAFSADHLAGAAGGDVVEETLVSHLLKSNCLITHQPDWGSVQIQYRGPRIDREKLLRYLVSFRHHNEFHEQCVERIFCDIQRFCRPEALSVYARYTRRGGLDINPWRSNAEFTPATGRLVRQ

SEQ ID NO: 48500 - protein, 272 aa, unidentified
  source 1..272: note = Pokkaliibacter plantistimulans
  REGION 1..272: note = tr|A0A318CAG2|A0A318CAG2_9GAMM NADPH-dependent 7-cyano-7-deazaguanine reductase OS=Pokkaliibacter plantistimulans OX=1635171 GN=queF PE=3 SV=1
MSKTESLLKQAQAPLGEKSAYVDQYDPAQLCPIPRQQIWTGSCYRTDVWTGYEISWLNEKGKPVAAMATFDIPGDSPSIIESKSFKLYLNSFNGYRVASWDRVAEMMARDLSAAAGAQVSVTLQPLHQLLVPSLPEGLCLDDLDVTIDHYLPEASLLSHAKGAGSVVEEVVHSNLLKSNCPVTGQPDWGTVVVRYVGKAIDHESLLRYIVSYRNHGDFHEQCVEQIFTDIMMRCQPEQLTVYARYVRRGGLDINPWRSTSQALPTFYRLPRQ

SEQ ID NO: 48501 - protein, 281 aa, Polaromonas naphthalenivorans
  REGION 1..281: note = sp|A1VS34|QUEF_POLNA NADPH-dependent 7-cyano-7-deazaguanine reductase OS=Polaromonas naphthalenivorans (strain CJ2) OX=365044 GN=queF PE=3 SV=1
MNTPEHSELGKSSAYVDQYDASLLFPIPRLAKRLEMGVGATPIFFGADLWTAFELSWLNLRGKPQVALAQFIVPCETPNIIESKSFKLYLNSFNNTRFPDAAEVQARLRADISEAAWRGAPQASTVGVKLLLPEMFDREDVAELDGLSLDRLDVECSRYTPAPDLLSAVFDEPPVSEVLTSNLLKSNCLVTGQPDWGSVRIAYSGPQINQEGLLQYIVSFRNHNEFHEQCVERIFMDLWTRCKPVKLTVYARYTRRGGLDINPFRTSHPQAIPPNIRMARQ

SEQ ID NO: 48502 - protein, 275 aa, Polaromonas sp.
  REGION 1..275: note = sp|Q126D2|QUEF_POLSJ NADPH-dependent 7-cyano-7-deazaguanine reductase OS=Polaromonas sp. (strain JS666 / ATCC BAA-500) OX=296591 GN=queF PE=3 SV=1
MNTPEHSQLGKSSAYVDQYDASLLFPIPRAEKRAEIGVTGTPPFFGADMWTAFELSWLNMRGKPQVALAHITVPCESPNIVESKSFKLYLNSFNNTRFSDARDVRERIRADINAAVGAGVGVKTLGPELFDREPVHELDGLSLDRLDVECIHFTPAPELLFAEFDEPPVDETLTSNLLKSNCLVTGQPDWGSVQISYSGPQINQEGLLQYLVSFRNHNEFHEQCVERIFMDVWTRCRPLKLSVYARYTRRGGLDINPFRTSHPQALPANIRMARQ

SEQ ID NO: 48503 - protein, 281 aa, Polaromonas sp.
  REGION 1..281: note = tr|A0A068YJZ0|A0A068YJZ0_9BURK NADPH-dependent 7-cyano-7-deazaguanine reductase OS=Polaromonas sp. CG9_12; OX = 1504672 GN=queF PE=3 SV=1
MNLPEHSELGKPSAYVDQYDASLLFPIPRLAKREELGVGAAPPFFGADLWTAFELSWLNLRGKPQLALAHFTVPCETPNIVESKSFKLYLNSFNNTRFADAAAVQARLRADISEAAWHGAPNASSVGVKLLLPEMFDREPVHELDGLSLDRLDVECSRYTPAPDLLTAVFDEPPVTEVLTSSLLKSNCLVTGQPDWGSVRISYSGPQINQEGLLQYLVSYRNHNEFHEQCVERIFMDVWTRCKPVKLTVYARYTRRGGLDINPFRTSHPQAMPPNVRTARQ

SEQ ID NO: 48504 - protein, 163 aa, unidentified
  source 1..163: note = [Polyangium] brachysporum
  REGION 1..163: note = tr|A0A0G3BIT6|A0A0G3BIT6_9BURK NADPH-dependent 7-cyano-7-deazaguanine reductase OS=[Polyangium] brachysporum OX=413882 GN=queF PE=3 SV=1
MAKNVNKAAAKPAAAPKQRPMPANPPSAPSKELHVFDNPAPERDYVIQFQIPEFTCHCPLTGQPDFAHFTIDYIADQLCIELKSLKMYMWSFRNEGAFHEKVTNDILTDIVKAVQPRYARIVAKWYVRGGIYTNVVAEHRQKGWKPVEPVQLPQHAAESGLLR

SEQ ID NO: 48505 - protein, 142 aa, unidentified
  source 1..142: note = Polycyclovorans sp.
  REGION 1..142: note = tr|A0A2E2JA23|A0A2E2JA23_9GAMM NADPH-dependent 7-cyano-7-deazaguanine reductase OS=Polycyclovorans sp.; OX = 2024852 GN=queF PE=3 SV=1
MTPHASQSLETFPNPAPTRDYVIRMRLPEFTCLCPKTGQPDFATLYLEYIADQQCVELKSLKLYIWSFRNEGCFHEAVTNRMLDDLVAATRPRFMRLTAVFNVRGGVYTHVTAEHCTPGYVPSLPPPAWHVDPTGAGLTPGV

SEQ ID NO: 48506 - protein, 154 aa, unidentified
  source 1..154: note = Polymorphobacter sp.
  REGION 1..154: note = tr|A0A4Y9EQE0|A0A4Y9EQE0_9SPHN NADPH-dependent 7-cyano-7-deazaguanine reductase OS=Polymorphobacter sp. DJ1R-1 OX=2511025 GN=queF PE=3 SV=1
MNDENPSGLQHLGQNSRLPASPEAARLDYPANPRAGTDYLVRFVAPEFTSLCPVTGQPDFAHIVIDYVPAATIVESKSLKLFLGAFRNHAAFHEDCTVGIGQRLFAEMAPKWLRIGGYWYPRGGIPIDVFWQSGPPPANVWIPDQGVPGYRGRG

SEQ ID NO: 48507 - protein, 150 aa, unidentified
  source 1..150: note = Polymorphum gilvum
  REGION 1..150: note = tr|F2J2N8|F2J2N8_POLGS NADPH-dependent 7-cyano-7-deazaguanine reductase OS=Polymorphum gilvum (strain LMG 25793 / CGMCC 1.9160 / SL003B-26A1) OX=991905; GN = queF PE=3SV=1
MTHDAPALGRAVALPADPDSATLDRVPNPHADTDYVTRFVCPEFTSICPVTGQPDFAHLVIDYIPDRWLVESKSLKLYLGSFRNHGAFHEDCTVAIGKRLATTLEPRWLRIGGYWYPRGGIPIDVFWQTGKAPDSVWIPDQGVPPYRGRG

SEQ ID NO: 48508 - protein, 275 aa, unidentified
  source 1..275: note = Polynucleobacter aenigmaticus
  REGION 1..275: note = tr|A0A254Q6D4|A0A254Q6D4_9BURK NADPH-dependent 7-cyano-7-deazaguanine reductase OS=Polynucleobacter aenigmaticus OX=1743164 GN=queF PE=3 SV=1
MSKLSLGQATQYPDQYDPSLLFPITRAENRLKLNIKPNQTLPFVGVDIWNAFELSWLNKKGKPQIALAEFQVPADSPNMIESKSFKLYLNSLNNARFEDESEVREKLIGDLSAVAGSKISTRIHPTEAVAKKGMQEMSGVLMDRLDIEIDPSLSADPALLEVNESFGPIEQCLVSHLLKSNCPVTGQPDWASVQIRYQGRPILEEGLLRYLIGFRQLGEFHEHCVETIFCDIKRQCKPEKLSVYARYTRRGGLDINPFRTDHNAPWPDNMRHARQ

SEQ ID NO: 48509 - protein, 275 aa, unidentified
  source 1..275: note = Polynucleobacter asymbioticus
  REGION 1..275: note = tr|A0A1J0D814|A0A1J0D814_9BURK NADPH-dependent 7-cyano-7-deazaguanine reductase OS=Polynucleobacter asymbioticus OX=576611 GN=queF PE=3 SV=1
MATLPLGQSTQYPDQYDPSLLFPIPRTENRAKLGLKEGQALPFVGIDIWNAFELSWLNQKGKPQIALAEFQIPADSPNMIESKSFKLYLNSLNSARFEDEGQVKDRLITDLSAVAGSKVATRIHSTEAVSKKGMQEMSGILMDRLDIEIDPHLPADPSLLGVNESFGPIEQCLVSHLLKSNCPVTGQPDWASVQIRYQGRPILEEGLLRYLIGFRQLGEFHEHCVETIFTDIKRQCKPEKLSVYARYTRRGGLDINPFRTDHNSPWPENTRHARQ

SEQ ID NO: 48510 - protein, 275 aa, unidentified; identical to SEQ ID NO: 48509
  source 1..275: note = Polynucleobacter asymbioticus
  REGION 1..275: note = tr|A4T050|A4T050_POLAQ NADPH-dependent 7-cyano-7-deazaguanine reductase OS=Polynucleobacter asymbioticus (strain DSM 18221 / CIP 109841 / QLW-P1DMWA-1) OX=312153 GN= queF PE=3 SV=1

SEQ ID NO: 48511 - protein, 275 aa, unidentified
  source 1..275: note = Polynucleobacter campilacus
  REGION 1..275: note = tr|A0A254PTC4|A0A254PTC4_9BURK NADPH-dependent 7-cyano-7-deazaguanine reductase OS=Polynucleobacter campilacus OX=1743163 GN=queF PE=3 SV=1
MATISLGQATQYPDQYDPSLLFPIPRIENRKKLGLQEGRVLPFVGVDIWNAFELSWLNKKGKPQIALAEFQIPTGSPNMVESKSFKLYLNSLNSTRFEDENEVKERLTTDLSAIAGSKITTRINPTELIAKKGMQEMGGILMDRLDIEIDPNLPADPSLLGVNESFGPIEQCLVSHLLKSNCPVTGQPDWASVQIRYQGRPILEEGLLRYLIGFRQLGEFHEHCVETIFTDIKRQCKPEKLSVYARYTRRGGLDINPFRTDHNSPWPENIRHARQ

SEQ ID NO: 48512 - protein, 277 aa, Polynucleobacter cosmopolitanus
  REGION 1..277: note = tr|A0A229FVU2|A0A229FVU2_9BURK NADPH-dependent 7-cyano-7-deazaguanine reductase OS=Polynucleobacter cosmopolitanus OX=351345 GN=queF PE=3 SV=1
MSTLDQAPLGKNSDNPSQYSPELLFPIARTENRLKIGIKNAEPPFFGIDIWNAYELSWLNAKGKPQLAIATFFVPANSPNIIESKSWKLYLNSLNNHCFQSNEELIQTLKNDLSKAAGASVSVQLNSPEQQCTKGMKEMAGKLLDRLDLEIDPKQLPDAALLTSDTSLGIVEESLVSHLLRSNCPVTAQPDWASIQINYVGPTIDEEGLLRYLISFREHHEFHEHCVEKIFMDIKEKCRPSKLSVYARYTRRGGIDINPFRADYNAEWPDNVRHSRQ

SEQ ID NO: 48513 - protein, 275 aa, unidentified
  source 1..275: note = Polynucleobacter duraquae
  REGION 1..275: note = tr|A0A0E3ZN93|A0A0E3ZN93_9BURK NADPH-dependent 7-cyano-7-deazaguanine reductase OS=Polynucleobacter duraquae OX=1835254 GN=queF PE=3 SV=1
MSTLSLGQATPYPDQYDPSLLFPIPRSENRLKLNIKPNQALPFVGVDIWNAFELSWLNKKGKPQIALAEFQVPADSPNMIESKSFKLYLNSFNSARFEDEAEVRERLITDLSAFAGSKITTRIHSTEAVTKKGMQEMSGVLMDRLDIEIDPSLSADATLLEVNESFGPIEQCLVSHLLKSNCPVTGQPDWASVQIRYQGRPILEEGLLRYLIGFRQLGEFHEHCVETIFTDIKRQCKPEKLSVYARYTRRGGLDINPFRTDHNSPWPENIRHARQ

SEQ ID NO: 48514 - protein, 275 aa, unidentified
  source 1..275: note = Polynucleobacter hirudinilacicola
  REGION 1..275: note = tr|A0A210RZZ5|A0A210RZZ5_9BURK NADPH-dependent 7-cyano-7-deazaguanine reductase OS=Polynucleobacter hirudinilacicola OX=1743166 GN=queF PE=3 SV=1
MATIPLGQSSQYPDRYDPSLLFPIPRMENRKKLGLKEDQALPFVGVDIWNAFELSWLNKKGKPQIALAEFQIPADSPNMIESKSFKLYLNSLNSARFEDENEVKERLITDLSAVAGSKITTRINPTEAISKKGMQEMGGILMDRLDIEIDPHLPADPSLLGVNESFGPIEQCLVSHLLKSNCPVTGQPDWASVQIRYQGRPILEEGLLRYLIGFRQLGEFHEHCVETIFTDIKRQCKPEKLSVYARYTRRGGLDINPFRTDHNSPWPDNIRHARQ

SEQ ID NO: 48515 - protein, 275 aa, unidentified
  source 1..275: note = Polynucleobacter meluiroseus
  REGION 1..275: note = tr|A0A240DY50|A0A240DY50_9BURK NADPH-dependent 7-cyano-7-deazaguanine reductase OS=Polynucleobacter meluiroseus OX=1938814 GN=queF PE=3 SV=1
MSTLVLGQQSAYPDQYDPSLLFPIPRIVNRQKLGITPTQQLPFLGVDLWNAFELSWLNPKGKPQIALAEFQVPADSPNMIESKSFKLYLNSLNSARFVDADELRERITADLSQVAGSRIHVQINTPEQVAKKGMQEMSGILLDRLDITIDPALSADASLLTVNSAFGPTEQCLVSHLLKSNCPVTGQPDWASVQIRYQGRPIDQEGLLRYLIGFRQLGEFHEHCVETIFCDIKRQCKPEHLSVYARYTRRGGLDINPFRTDHNAVWPENVRHARQ

SEQ ID NO: 48516 - protein, 275 aa, unidentified
  source 1..275: note = Polynucleobacter paneuropaeus
  REGION 1..275: note = tr|A0A2Z4JUM1|A0A2Z4JUM1_9BURK NADPH-dependent 7-cyano-7-deazaguanine reductase OS=Polynucleobacter paneuropaeus OX=2527775 GN=queF PE=3 SV=1
MNSLQLGKSTPYPDQYDPNLLFPIQRSVNRAKLGIKEHAPLPFMGIDIWNAYELSWLNAKGKPQIALAEFQIPADSPNMIESKSFKLYLNSLNNSRFENEDELRQRLIADLSKVAGSQITTRINPTDAIAKQGMEEMGGVLLDRLDIEVDCAAGADPSLLGVNESFSPVEQCLVSHLLKSNCPVTGQPDWASVQIRYQGRPILEEGLLRYLIGFRQLGEFHEHCVETIFCDIKQQCKPEKLSVYARYTRRGGLDINPFRTDYNAVWPDNTRHARQ

SEQ ID NO: 48517 - protein, 275 aa, Polynucleobacter sp.
  REGION 1..275: note = tr|A0A258XEN2|A0A258XEN2_9BURK NADPH-dependent 7-cyano-7-deazaguanine reductase OS=Polynucleobacter sp. 16-46-70 OX=1970421 GN=queF PE=3 SV=1
MSTLPLGQATQYPDQYDPSLLFPIPRSENRLKLGIQPNQALPFVGVDIWNAFELSWLNQKGKPQIALAEFQVPADSPNMIESKSFKLYLNSLNSARFEDENAVRERLITDLSEVAGSKVATRMSPSDAIAKKGMQEMSGVLMDRLDIEIDPSLRADPSLLQVNESFGPIEQCLVSHLLKSNCPVTGQPDWASVQIRYQGRPILEEGLLRYLIGFRHLGEFHEHCVETIFCDIKRQCKPEKLSVYARYTRRGGLDINPFRTDHNAPWPDNMRHARQ

SEQ ID NO: 48518 - protein, 275 aa, Polynucleobacter sp.
  REGION 1..275: note = tr|A0A1G3CTF5|A0A1G3CTF5_9BURK NADPH-dependent 7-cyano-7-deazaguanine reductase OS=Polynucleobacter sp. GWA2_45_21 OX=1801989 GN=queF PE=3 SV=1
MSTIPLGQATQYPDQYDPSLLFPIPRSENRLKLDIKPNQALPFVGVDIWNAFELGWLNKKGKPQIALAEFQIPADSPNMIESKSFKLYLNSLNSARFEDEAEVRERLITDLSAVAGSKIATRINPTEMVAKNGMQEMSGVLMDRLDIEIDPNLSADPALLEVNESFGPIEQCLVSHLLKSNCPVTGQPDWASVQIRYQGRPILEEGLLRYLIGFRQKGEFHEHCVETIFTDIKRQCKPEKLSVYARYTRRGGLDINPFRTDHNAPWPDNTRHARQ

SEQ ID NO: 48519 - protein, 275 aa, unidentified
  source 1..275: note = Polynucleobacter sphagniphilus
  REGION 1..275: note = tr|A0A1R0HDD3|A0A1R0HDD3_9BURK NADPH-dependent 7-cyano-7-deazaguanine reductase OS=Polynucleobacter sphagniphilus OX=1743169 GN=queF PE=3 SV=1
MATLPLGQASQYPDQYDPSLLFPIPRSENRAKLGIEANQVLPFVGVDIWNAYELSWLNQRGKPQIALAEFQVPADSPNMIESKSFKLYLNSLNSARFENEDAVRERIITDLSAVAGSKVSTRIYPTDVVAKKGMQEMTGVLIDRLDIEVDPNLSADPGLLGVNDSFGPIEQCLVSHLLKSNCPVTGQPDWASVQIRYQGRPILEEGLLRYLIGFRQLGEFHEHCVETIFSDIKRQCKPEKLSVYARYTRRGGLDINPFRTDHNAPWPDNTRHARQ

SEQ ID NO: 48520 - protein, 277 aa, unidentified
  source 1..277: note = Polynucleobacter victoriensis
  REGION 1..277: note = tr|A0A212TEC7|A0A212TEC7_9BURK NADPH-dependent 7-cyano-7-deazaguanine reductase OS=Polynucleobacter victoriensis OX=2049319 GN=queF PE=3 SV=1
MSHLEHAPLGKNSENPNQYSPDLLFPISRDENRAKLGIQSQSLPFFGVDIWNAYELSWLNAKGKPQLAIATFMVPANSPNIIESKSWKLYLNSLNNHRFHSNDELIDTLRKDLSKAAGATVTVQLHSPESQSAGGMKELPGKLLDRLDLEINPSQKPTSDLLSSDPSLGLVEETLVTHLLRSNCPVTGQPDWASVQINYVGPTINEEGLLRYLLAFREHQEFHEHCVEKIFIDIKNKCRPNKLSVYARYTRRGGIDINPFRADYNAEWPDNKRHSRQ

SEQ ID NO: 48521 - protein, 275 aa, unidentified
  source 1..275: note = Polynucleobacter wuianus
  REGION 1..275: note = tr|A0A191UHJ7|A0A191UHJ7_9BURK NADPH-dependent 7-cyano-7-deazaguanine reductase OS=Polynucleobacter wuianus OX=1743168 GN=queF PE=3 SV=1
MATLPLGQSSKYPDQYNPSLLFPIPRVENRKKLGIKEDQVLPFVGVDIWNAFELSWLNKKGKPQIALAEFQIPADSPNMIESKSFKLYLNSLNSARFEDENEVKEQLITDLSAVAGSKVTTRIIPTEAISKKGMQEMGGVLMDRLDIEVDPTLPADPSLLGVNESFGPIEQCLVSHLLKSNCPVTGQPDWASVQIRYQGRPILEEGLLRYLIGFRQLGEFHEHCVETIFTDIKRQCKPEKLSVYARYTRRGGLDINPFRTDHNSPWPENTRHARQ

SEQ ID NO: 48522 - protein, 165 aa, Pontibacillus chungwhensis
  REGION 1..165: note = tr|A0A0A2V0Z1|A0A0A2V0Z1_9BACI NADPH-dependent 7-cyano-7-deazaguanine reductase OS=Pontibacillus chungwhensis BH030062 OX=1385513 GN=queF PE=3 SV=1
MAGRKDEELEGVTLLGNQGTSYSFDYDPEVLESFDNKHPKRDYFVKFNCPEFTTLCPKTGQPDFATIYISYIPGEKMVESKSLKLYLFSFRNHGDFHEDSMNIIMNDLIELMDPRYIEVWGKFTPRGGISIDPYCNYGKPNTKYEKMAEHRLMNHDMYPETIDNR

SEQ ID NO: 48523 - protein, 165 aa, Pontibacillus halophilus
  REGION 1..165: note = tr|A0A0A5GK48|A0A0A5GK48_9BACI NADPH-dependent 7-cyano-7-deazaguanine reductase OS=Pontibacillus halophilus JSM 076056 = DSM 19796 OX=1385510 GN=queF PE=3; SV = 1
MSGRKDEELTGVTLLGNQGTPYSFEYNPGILETFDNQHPYRDYFVKFNCPEFTTLCPKTGQPDFATIYISYIPGEKMVESKSLKLYLFSFRNHGDFHEDSVNTIMNDLIELMDPRYIEVWGKFTPRGGISIDPYCNYGQPGTKYERMAENRLMNHDLYPEKIDNR

SEQ ID NO: 48524 - protein, 165 aa, Pontibacillus marinus
  REGION 1..165: note = tr|A0A0A5G4H4|A0A0A5G4H4_9BACI NADPH-dependent 7-cyano-7-deazaguanine reductase OS=Pontibacillus marinus BH030004 = DSM 16465 OX=1385511 GN=queF PE=3 SV=1
MAGRKDEELTDVTLLGNQGTPYSFEYNPEILESFDNQHPYRDYFVKFNCPEFTTLCPKTGQPDFATIYISYIPDEKMVESKSLKLYLFSFRNHGDFHEDSVNIIMNDLIELMDPRYIEVWGKFTPRGGISIDPYCNYGKSDTKYEKMAEHRMMNHDMYPETIDNR

SEQ ID NO: 48525 - protein, 165 aa, Pontibacillus yanchengensis
  REGION 1..165: note = tr|A0A0A2T7E3|A0A0A2T7E3_9BACI NADPH-dependent 7-cyano-7-deazaguanine reductase OS=Pontibacillus yanchengensis Y32 OX=1385514 GN=queF PE=3 SV=1
MAGRKDEDLTDVTLLGNQGTTYSFDYNPDVLETFENQHPNRDYFVKFNCPEFTTLCPKTGQPDFATLYISYIPDIKMVESKSLKLYLFSFRNHGGFHEDAVNVIMNDLIELMDPRYIEVWGKFTPRGGISIDPYCNYGKPNTKFERMAENRLMNHDMYPETIDNR

SEQ ID NO: 48526 - protein, 166 aa, Pontibacter sp.
  REGION 1..166: note = tr|A0A4P8RI78|A0A4P8RI78_9BACT NADPH-dependent 7-cyano-7-deazaguanine reductase OS=Pontibacter sp. SGAir0037 OX=2571030 GN=queF PE=3 SV=1
MNSTEQIDIKEQLKDSYRQALEHTSSALDYMAEYGIKPDGKFGLFFAPSTRQQEIHIMPYKHTAKQVVVYETETGEFSALCPFSGLPDFGTLRVEYIPGSHILELKSLKYYILSWRNIGSAQEDITAYIYEDLKKALKDPAYLIVTTVYNVRGGINTTCSVDSRAQ

SEQ ID NO: 48527 - protein, 155 aa, Ponticaulis sp.
  REGION 1..155: note = tr|A0A2D7XYQ5|A0A2D7XYQ5_9RHOB NADPH-dependent 7-cyano-7-deazaguanine reductase OS=Ponticaulis sp.; OX = 2020902 GN=queF PE=3 SV=1
MTDKSDLTGLGQLGEKVDAASSPEEAVLERVPNPHPDTLYCARFVAPEFTSLCPVTGQPDFAHIVIDYAPGEWLVESKSLKLFLQSFRNHGAFHEDCTIYIAKRLNELLAPKWFRIAGYWYPRGGIPIDVFWQSDEPPKGLWVPETGVAPYRGRG

SEQ ID NO: 48528 - protein, 156 aa, Ponticaulis sp.
  REGION 1..156: note = tr|A0A2D7IVP1|A0A2D7IVP1_9RHOB NADPH-dependent 7-cyano-7-deazaguanine reductase OS=Ponticaulis sp.; OX = 2020902 GN=queF PE=3 SV=1
MTDSNEIYTGLEQLGAQTHAAASPEAAELERVPNPHPDMLYCARFIAPEFTSLCPVTGQPDFAHIVIDYAPGEWLVESKSLKLFLQSFRNHGAFHEDCTLYIAKRLSELLDPKWFRIAGYWYPRGGIPIDVFWQSATPPEGLWVPDTGVPAYRGRG

SEQ ID NO: 48529 - protein, 157 aa, Porphyrobacter dokdonensis
  REGION 1..157: note = tr|A0A1A7BFV2|A0A1A7BFV2_9SPHN NADPH-dependent 7-cyano-7-deazaguanine reductase OS=Porphyrobacter dokdonensis DSW-74 OX=1300349 GN=queF PE=3 SV=1
MNSTPEKPDVRPQFLGKDTPLPSSPEEAVLDYVPNPRPGLTYLVRFVSPEFTSLCPVTNQPDFAHLVIDYVPGETIVESKSLKLFLGSFRNHNGFHEDVTVGIGARLFEEMRPQWLRIGGYWYPRGGIPIDVFWQSGTPPEGLWLPDQGVPPYRGRG

SEQ ID NO: 48530 - protein, 159 aa, unidentified
  source 1..159: note = Porphyrobacter mercurialis
  REGION 1..159: note = tr|A0A0B2C357|A0A0B2C357_9SPHN NADPH-dependent 7-cyano-7-deazaguanine reductase OS=Porphyrobacter mercurialis OX=1572751 GN=queF PE=3 SV=1
MPGQRRQGRGMSEPLFLGQTTPLPTSPEEARLDYVPNPRKAELFCVRFAAPEFTSLCPVTGQPDFAHLVIDYAPGETIVESKSLKLFLGAFRNHCGFHEDVTVGIGRRLFDEMQPQWLRIGGYWYPRGGIPIDVFWQSGSPPAGLWLPDQGVAPYRGRG

SEQ ID NO: 48531 - protein, 156 aa, Porphyrobacter neustonensis
  REGION 1..156: note = tr|A0A192D4R2|A0A192D4R2_9SPHN NADPH-dependent 7-cyano-7-deazaguanine reductase OS=Porphyrobacter neustonensis OX=1112 GN=queF PE=3 SV=1
MDTTPAAKPAPQFLGKDTPLPTSPEEAVLDYVPNPRVGLTYMVRFVSPEFTSLCPVTNQPDFAHLVIDYVPGETIVESKSLKLFLGSFRNHNGFHEDVTVGIGVRLFEEMRPQWLRIGGYWYPRGGIPIDVFWQSGQPPEGLWLPDQGVPGYRGRG

SEQ ID NO: 48532 - protein, 157 aa, Porphyrobacter sanguineus
  REGION 1..157: note = tr|A0A1M7RQI9|A0A1M7RQI9_9SPHN NADPH-dependent 7-cyano-7-deazaguanine reductase OS=Porphyrobacter sanguineus OX=198312 GN=queF PE=3 SV=1
MNTTPDTPSVAPQFLGKDTPLPVSPEEARLDYVPNPRPGLTYLVRFVAPEFTSLCPVTSQPDFAHLVIDYVPGDTIVESKSLKLFLGSFRNHNGFHEDVTVGIGVRLFEEMRPHWLRIGGYWYPRGGIPIDVFWQSGAPPADLWLPDQGVAPYRGRG

SEQ ID NO: 48533 - protein, 156 aa, Porphyrobacter sp.
  REGION 1..156: note = tr|A0A4Y6VYW9|A0A4Y6VYW9_9SPHN NADPH-dependent 7-cyano-7-deazaguanine reductase OS=Porphyrobacter sp. YT40 OX=2547601 GN=queF PE=3 SV=1
METTPPSKPQPQFLGRDTPLPASPEEAVLDYVPNPRVGLTYLVRFVSPEFTSLCPVTNQPDFAHLVIDYVPGETIVESKSLKLFLGSFRNHNGFHEDVTVGIGVRLFQEMRPQWLRIGGYWYPRGGIPIDVFWQSGAPPADLWLPDQGVPSYRGRG

SEQ ID NO: 48534 - protein, 157 aa, Porphyrobacter sp.
  REGION 1..157: note = tr|A0A2N4WXU8|A0A2N4WXU8_9SPHN NADPH-dependent 7-cyano-7-deazaguanine reductase OS=Porphyrobacter sp. TH134 OX=2067450 GN=queF PE=3 SV=1
MQSTPETPNRAPQFLGRDTPLPASPEEAVLDYVPNPRPGLTFLVRFVSPEFTSLCPVTSQPDFAHLVIDYVPGETIVESKSLKLFLGSFRNHNGFHEDVTVGIGVRLFEEMRPQWLRIGGYWYPRGGIPIDVFWQSGQPPEGLWLPDQGVPGYRGRG

SEQ ID NO: 48535 - protein, 155 aa, unidentified; identical to SEQ ID NO: 48310
  source 1..155: note = Porphyromonadaceae bacterium
  REGION 1..155: note = tr|A0A352J3C6|A0A352J3C6_9PORP NADPH-dependent 7-cyano-7-deazaguanine reductase OS=Porphyromonadaceae bacterium OX=2049046 GN=queF PE=3 SV=1

SEQ ID NO: 48536 - protein, 156 aa, unidentified; identical to SEQ ID NO: 48309
  source 1..156: note = Porphyromonadaceae bacterium
  REGION 1..156: note = tr|A0A1I7GUI8|A0A1I7GUI8_9PORP NADPH-dependent 7-cyano-7-deazaguanine reductase OS=Porphyromonadaceae bacterium KHP3R9 OX=1855398 GN=queF PE=3 SV=1

SEQ ID NO: 48537 - protein, 163 aa, Porphyromonas asaccharolytica
  REGION 1..163: note = tr|F4KMG8|F4KMG8_PORAD NADPH-dependent 7-cyano-7-deazaguanine reductase OS=Porphyromonas asaccharolytica (strain ATCC 25260 / DSM 20707 / BCRC 10618 / JCM 6326 / LMG13178 / VPI 4198) OX=879243 GN=queF; PE = 3 SV=1
MKETISSSGARDKAVEGLSLLGNKRTVYAQDYDPSVLEAFENRHQDRDYHVRFECPEFTALCPITGQPDFATIYIEYVPDVRMVESKSLKLYLFSFRSHGAFHEDCVNIIMDDLIRLMDPKYIEVTGDFSPRGGISIVPFCNYGRPGTPYESYARERMLAFHH

SEQ ID NO: 48538 - protein, 151 aa, Porphyromonas cangingivalis
  REGION 1..151: note = tr|A0A1T4NQI7|A0A1T4NQI7_PORCN NADPH-dependent 7-cyano-7-deazaguanine reductase OS=Porphyromonas cangingivalis OX=36874 GN=queF PE=3 SV=1
MSELKDQLSLLGQTTEYKQDYAPEVLEAFDNKHPDNDYWVRFNCPEFTSLCPITGQPDFAEIRISYIPDIKMVESKSLKLYMFSFRNHGAFHEDCVNIIMKDLIALMDPKYIEVTGLFTPRGGISIYPYANYGRPGTKYERMAEQRLMSHE

SEQ ID NO: 48539 - protein, 151 aa, Porphyromonas cangingivalis
  REGION 1..151: note = tr|A0A099X228|A0A099X228_PORCN NADPH-dependent 7-cyano-7-deazaguanine reductase OS=Porphyromonas cangingivalis OX=36874 GN=queF PE=3 SV=1
MTELKDQLSLLGQTTEYKQDYAPEVLEAFDNKHPDNDYWVRFNCPEFTSLCPITGQPDFAEIRISYIPDIKMVESKSLKLYMFSFRNHGAFHEDCVNIIMKDLIALMDPKYIEVTGLFTPRGGISIYPYANYGRPGTKYERMAEQRLMSHE

SEQ ID NO: 48540 - protein, 156 aa, Porphyromonas catoniae
  REGION 1..156: note = tr|L1NFA6|L1NFA6_9PORP NADPH-dependent 7-cyano-7-deazaguanine reductase OS=Porphyromonas catoniae F0037 OX=1127696 GN=queF PE=3 SV=1
MASIRDGENELSILGRKTEYRQDYAPEVLEAFTNKHQGNDYWVRFHCPEFTSLCPITGQPDYATIHISYIPDVKMVESKSLKLYLFSFRNHGAFHEDCVNIIMKDLIELMNPRYIEVLGDFTPRGGISILPFCNYGRLGTKYEELASQRLASYPVR

SEQ ID NO: 48541 - protein, 156 aa, Porphyromonas catoniae
  REGION 1..156: note = tr|Z4WX62|Z4WX62_9PORP NADPH-dependent 7-cyano-7-deazaguanine reductase OS=Porphyromonas catoniae ATCC 51270 OX=887901 GN=queF PE=3 SV=1
MASIRDGENELSILGRKTEYRQDYAPEVLEAFTNKHQGNDYWVRFHCPEFTSLCPITGQPDYATIHISYIPDVKMVESKSLKLYLFSFRNHGAFHEDCVNIIMKDLIELMNPRYIEVLGDFTPRGGISILPFCNYGRPGTKYEELASQRLASYPVR

SEQ ID NO: 48542 - protein, 153 aa, Porphyromonas circumdentaria
  REGION 1..153: note = tr|A0A1T4MNJ1|A0A1T4MNJ1_9PORP NADPH-dependent 7-cyano-7-deazaguanine reductase OS=Porphyromonas circumdentaria OX=29524 GN=queF PE=3 SV=1
MQDRGEELTLLGGKTTYKQDYAPEVLESFVNKHPERDYWVRFVCPEFTALCPITSQPDFATLYIDYIPDIQMVESKSLKLYLFSFRSHGAFHEDCVNIIMNDLIALMNPKYIEVTGDFLPRGGISIHPYCNYGRPGTRYEALAAERLAQHNRG

SEQ ID NO: 48543 - protein, 157 aa, Porphyromonas crevioricanis
  REGION 1..157: note = tr|T1CP57|T1CP57_9PORP NADPH-dependent 7-cyano-7-deazaguanine reductase OS=Porphyromonas crevioricanis JCM 15906 OX=1305617 GN=queF PE=3 SV=1
MYSTKDRDQELSALGSKVDYKQDYAPEVLEAFTNRHPDNDYWVRFHCPEFTSLCPITSQPDFATIYIDYIPGERMVESKSLKLYLFSFRQHGAFHEDCVNIIMKDLIALMDPKYIEVLGDFTPRGGISILPYCNYGRPGTKYAELAEQRLFLHQSPR

SEQ ID NO: 48544 - protein, 157 aa, Porphyromonas crevioricanis; identical to SEQ ID NO: 48543
  REGION 1..157: note = tr|A0A0A2FJP5|A0A0A2FJP5_9PORP NADPH-dependent 7-cyano-7-deazaguanine reductase OS=Porphyromonas crevioricanis OX=393921 GN=queF PE=3 SV=1

SEQ ID NO: 48545 - protein, 153 aa, Porphyromonas endodontalis
  REGION 1..153: note = tr|C3JBP3|C3JBP3_POREA NADPH-dependent 7-cyano-7-deazaguanine reductase OS=Porphyromonas endodontalis (strain ATCC 35406 / BCRC 14492 / JCM 8526 / NCTC 13058 / HG 37 0) OX=553175 GN=queF PE=3 SV=1
MDRSEEGLELLGKKTEYKGDYAPEVLEAFSNKHPQRDYWVRFVCPEFTALCPITGQPDFATIYIDYIPDERMVESKSLKLYLFSFRSHGAFHEDCVNIIMDDLIKLMNPKYIEVTGDFSPRGGISIVPFCNYGRPGTQYEAIARERLLRHDRH

SEQ ID NO: 48546 - protein, 154 aa, Porphyromonas gingivalis
  REGION 1..154: note = tr|A0A0K2J3X9|A0A0K2J3X9_PORGN NADPH-dependent 7-cyano-7-deazaguanine reductase OS=Porphyromonas gingivalis AJW4 OX=1403336 GN=queF PE=3 SV=1
MTGIREGEKELSLLGSKTEYRNDYAPEVLEAFTNKHQENDYWVRFNCPEFTSLCPITGQPDFATIYINYIPDVKMVESKSLKLYLFSFRNHGAFHEDCVNIIMKDLIALMQPRYIEVWGDFTPRGGISIVPFCNYGKPGSRYELLAEKRMETHH

SEQ ID NO: 48547 - protein, 154 aa, Porphyromonas gingivalis; identical to SEQ ID NO: 48546
  REGION 1..154: note = sp|B2RJW0|QUEF_PORG3 NADPH-dependent 7-cyano-7-deazaguanine reductase OS=Porphyromonas gingivalis (strain ATCC 33277 / DSM 20709 / CIP 103683 / JCM 12257 / NCTC 1183 4 / 2561) OX=431947 GN=queF PE=3 SV=1

SEQ ID NO: 48548 - protein, 153 aa, Porphyromonas gingivicanis
  REGION 1..153: note = tr|A0A0A2G760|A0A0A2G760_9PORP NADPH-dependent 7-cyano-7-deazaguanine reductase OS=Porphyromonas gingivicanis OX=266762 GN=queF PE=3 SV=1
MQDRGEELTLLGGKTVYKQDYAPEVLESFVNKHPERDYWVRFVCPEFTALCPITSQPDFATLYIDYIPDVQMVESKSLKLYLFSFRSHGAFHEDCVNIIMNDLIALMNPKYIEVTGDFLPRGGISIHPYCNYGRPGTKYETLAEERLAQHNRR

SEQ ID NO: 48549 - protein, 154 aa, Porphyromonas gulae
  REGION 1..154: note = tr|A0A099WQP0|A0A099WQP0_9PORP NADPH-dependent 7-cyano-7-deazaguanine reductase OS=Porphyromonas gulae; OX = 111105 GN=queF PE=3 SV=1
MTGIREGEKELSLLGSKTEYRNDYAPEVLEAFTNKHQENDYWVRFNCPEFTSLCPITGQPDFATIYINYIPDVKMVESKSLKLYLFSFRNHGAFHEDCVNIIMKDLIALMQPRYIEVWGDFTPRGGISIVPFCNYGEPGSRYELLAEKRMETHR

SEQ ID NO: 48550 - protein, 154 aa, Porphyromonas gulae
  REGION 1..154: note = tr|A0A0A2FCV7|A0A0A2FCV7_9PORP NADPH-dependent 7-cyano-7-deazaguanine reductase OS=Porphyromonas gulae; OX = 111105 GN=queF PE=3 SV=1
MTGIREGEKELSLLGSKTEYRNDYAPEVLEAFTNKHQENDYWVRFNCPEFTSLCPITGQPDFATIYINYIPDIKMVESKSLKLYLFSFRNHGAFHEDCVNIIMKDLIALMQPRYIEVWGDFTPRGGISIVPFCNYGKPGSRYELLAEKRMETHR

SEQ ID NO: 48551 - protein, 159 aa, Porphyromonas levii
  REGION 1..159: note = tr|A0A4Y8WPW4|A0A4Y8WPW4_9PORP NADPH-dependent 7-cyano-7-deazaguanine reductase OS=Porphyromonas levii; OX = 28114 GN=queF PE=3 SV=1
MDKHTDSKLRETLTLLGAGQATNYPTEYDPSVLETFNNSHEGRDYWVQFNCPEFTSLCPITSQPDFAEIIISYIPDIRMVESKSLKLYLFSFRNHGAFHESCVNLILDDLIKLMDPKYIEVTGLFTARGGISIHPYTNYGRPGTKYEQLAEQRLFNRKG

SEQ ID NO: 48552 - protein, 154 aa, unidentified
  source 1..154: note = Porphyromonas loveana
  REGION 1..154: note = tr|A0A2U1FPJ5|A0A2U1FPJ5_9PORP NADPH-dependent 7-cyano-7-deazaguanine reductase OS=Porphyromonas loveana; OX = 1884669 GN=queF PE=3 SV=1
MNSIREGENELSLLGTKTEYRQDYAPEVLEAFTNKHQENDYWVRFDCPEFTGLCPITGQPDFATIHINYIPDVKMVESKSLKLYLFSFRNHGAFHEDCVNIIMKDLIHLMQPRYIEVWGDFSPRGGISIVPFCNYGRPGTRYEQLAERRLESYR

SEQ ID NO: 48553 - protein, 156 aa, Porphyromonas macacae
  REGION 1..156: note = tr|A0A0A2GA02|A0A0A2GA02_9PORP NADPH-dependent 7-cyano-7-deazaguanine reductase OS=Porphyromonas macacae; OX = 28115 GN=queF PE=3 SV=1
MSSIREGENELSILGSQTRYSQDYAPEVLEAFTNKHQENDYWVRFHSPEFTSLCPITGQPDFATVYINYIPDVKMVESKSLKLYLFSFRSHGAFHEDCVNIIMKDLIKLMDPKYIEVQGDFTPRGGISILPYCNYGRPGTCYEELAKQRLFNQSTR

SEQ ID NO: 48554 - protein, 157 aa, Porphyromonas somerae
  REGION 1..157: note = tr|A0A134B7X7|A0A134B7X7_9PORP NADPH-dependent 7-cyano-7-deazaguanine reductase OS=Porphyromonas somerae; OX = 322095 GN=queF PE=3 SV=1
MASIRDGENELSLLGSKTTQYSQDYAPEVLEAFTNKHQGNDYWVRFHCPEFTSLCPITAQPDYATIYINYIPDVRMVESKSLKLYLFSFRNHGAFHEDCVNIIMKDLIELMDPRYIEVVGDFTPRGGISILPFANYGRPGTKYEELAFQRLANHPVR

SEQ ID NO: 48555 - protein, 156 aa, Porphyromonas sp.
  REGION 1..156: note = tr|A0A0A2DTL5|A0A0A2DTL5_9PORP NADPH-dependent 7-cyano-7-deazaguanine reductase OS=Porphyromonas sp. COT-239 OH1446 OX=1515613 GN=queF PE=3 SV=1
MSSIREAEQELTLLGGSTVYRQDYAPECLEVFTNKHQESDYWVRFHCPEFTSLCPITAQPDFATIYINYIPDVKMVESKSLKLYLFSFRSHGAFHEDCVNIIMKDLIRIMDPRYIEVLGDFTPRGGISILPYCVYGRPGTKYEALAEQRLANYPVR

SEQ ID NO: 48556 - protein, 154 aa, Porphyromonas sp.; identical to SEQ ID NO: 48107
  REGION 1..154: note = tr|A0A073I7D6|A0A073I7D6_9PORP NADPH-dependent 7-cyano-7-deazaguanine reductase OS=Porphyromonas sp. 31_2; OX = 658663 GN=queF PE=3 SV=1

SEQ ID NO: 48557 - protein, 163 aa, Porphyromonas uenonis
  REGION 1..163: note = tr|C2MC49|C2MC49_9PORP NADPH-dependent 7-cyano-7-deazaguanine reductase OS=Porphyromonas uenonis 60-3 OX=596327 GN=queF PE=3 SV=1
MKETTSPSTARDGAVEGLSLLGNKRTVYAQDYDPSVLEAFENRHQDRDYHVRFECPEFTALCPITGQPDFATIYIEYVPDVRMVESKSLKLYLFSFRSHGAFHEDCVNIIMDDLIRLMDPKYIEVTGDFSPRGGISIVPFCNYGRPGTPYEAYARERMLAFHH

SEQ ID NO: 48558 - protein, 274 aa, unidentified
  source 1..274: note = Porticoccaceae bacterium
  REGION 1..274: note = tr|A0A2E8UFP4|A0A2E8UFP4_9GAMM NADPH-dependent 7-cyano-7-deazaguanine reductase OS=Porticoccaceae bacterium OX=2026782 GN=queF PE=3 SV=1
MGEYHNTQLGKETQYQNQYDPKLLFPIERASARSGEVPKAFEFFGNDAWTAYELSWLNLSGKPVVAVARFNFPCNSKYVIESKSFKLYLNSLIQSKFASKFDVIDRLASDLSRCCGEAITIDIYDLKEYKEAFKIREPAGTCIDSLDIEVTQYEPSKSLIEFDSTTQISELLYSHLLKTNCPVTNQPDWASVYIDYSGPKISMDSLLKYIISYRLHQDFHEVCVEKIFYDLYTVVNPSKLTVFAKYTRRGGLDISPCRSTEPELELRKMRQVRQ

SEQ ID NO: 48559 - protein, 271 aa, unidentified
  source 1..271: note = Porticoccaceae bacterium
  REGION 1..271: note = tr|A0A2D7R8K5|A0A2D7R8K5_9GAMM NADPH-dependent 7-cyano-7-deazaguanine reductase OS=Porticoccaceae bacterium OX=2026782 GN=CMK30_00650 PE=3 SV=1
MYEVTQLGKQIDPDNDVGASILNPIARAEARRSLSMNDVPFSGTDFWTAYELAWLDRDGMPKLAIADISVACESKNIIESKSMKLYLNSFYNKKLENGHAVAGKIRSELSKATGGAVNVKLFTLDKFRREYPIKTQKGYCLDDHRVKPINHGPTPQILRIKGRRTISEILFSHLLRTKCPVTSQPDWASVYVMYRGRSIDRDTLFRYIISFREHSDFHEQCVERIFCDILNYCSPTELTVWARFLRRGGLDINPYRTNSGKYPPRIRETRQ

SEQ ID NO: 48560 - protein, 273 aa, Porticoccus sp.
  REGION 1..273: note = tr|A0A2E5C6F4|A0A2E5C6F4_9GAMM NADPH-dependent 7-cyano-7-deazaguanine reductase OS=Porticoccus sp.; OX = 2024853 GN=queF PE=3 SV=1
MTEKKLLLGADTDYPASYSPQLLHSIPRKEGRQTLGILGAEPFFGVDLWTAYEVSWLDMRGKPVVAVAELSIPGSTVNLVESKSLKLYLNSLNQERYRSVEEVTRIIERDVSACVVGPILVGIHPGDSYRHMGLGSLPGICLDDLPVEVDAYAPDPSLLGLADGHTIVSESLYSHLLKTNCPVTGQPDWASILIRYSGPAIDREGLLRYLVSFRNHQDFHEQCVERIFTEIRELCQPDTLEVYARYTRRGGLEINPYRSSVQSDPPRLRLSRQ

SEQ ID NO: 48561 - protein, 273 aa, Porticoccus sp.
  REGION 1..273: note = tr|A0A2E2W2K8|A0A2E2W2K8_9GAMM NADPH-dependent 7-cyano-7-deazaguanine reductase OS=Porticoccus sp.; OX = 2024853 GN=queF PE=3 SV=1
MTEKKLLLGADTDYPASYSPQLLHSIPRKEGRQTLGILGAEPFFGVDLWTAYEVSWLDMRGKPVVAVAELSIPGSTVNLVESKSLKLYLNSLNQERYRSVEEVTRIIERDVSACVVGPILVGIHPGDSYRHMGLGSLPGICLDDLPVEVDTYAPDPSLLGLADGHTIVSESLYSHLLKTNCPVTGQPDWASILIRYSGPAIDREGLLRYLVSFRNHQDFHEQCVERIFTEIRELCQPDTLEVYARYTRRGGLEINPYRSSVQSDPPRLRLSRQ

SEQ ID NO: 48562 - protein, 167 aa, unidentified
  source 1..167: note = Pradoshia eiseniae
  REGION 1..167: note = tr|A0A2S7N039|A0A2S7N039_9BACI NADPH-dependent 7-cyano-7-deazaguanine reductase OS=Pradoshia eiseniae; OX = 2064768 GN=queF PE=3 SV=1
MNNEGRKPSELEGVTLLGNQGTTYQYTYDPSILESFDNKHPDNDYWVKFNCPEFTSLCPITGQPDFAAIYISYIPGLKMVESKSLKLYLFSFRNQGDFHEDCMNIIMKDLIALMEPKYIEVWGKFTPRGGISIDPYCNYGKPGTKFEDMALHRLMNHDMYPEKVDNR

SEQ ID NO: 48563 - protein, 166 aa, unidentified
  source 1..166: note = Pradoshia sp.
  REGION 1..166: note = tr|A0A5J6XR74|A0A5J6XR74_9BACI NADPH-dependent 7-cyano-7-deazaguanine reductase QueF OS=Pradoshia sp. D12; OX = 2651284 GN=queF PE=4 SV=1
MSGRQQTEGLEDLTLLGNQNVKYAFNYAPEVLESVDNLHSDRDYFVKFNCPEFTSLCPITQQPDFATMYISYIPNKKIVESKSLKLYLFSFRNHGDFHEDCVNIIMNDLIKLLDPRYIEVWGKFTPRGGISIDPWCNYGRAGTKYEEIANHRLMNHDLYPEKIDNR

SEQ ID NO: 48564 - protein, 285 aa, Pragia fontium
  REGION 1..285: note = tr|A0A379DTP6|A0A379DTP6_9GAMM NADPH-dependent 7-cyano-7-deazaguanine reductase OS=Pragia fontium; OX = 82985 GN=queF PE=3 SV=1
MTSHYDNHQALSNLTLGKETAYVDRYDASLLQPVPRSLNRDPLGLKADNLPFHGADIWTLYELSWLNSRGLPQVAIGEVAIPASSSNLIESKSFKLYLNSFNQTCFADWQTVQQTLARDLSQCAQGDVSVKLFHLSQPEIGTITDFAGECIDDQPITIDSYHFDDKLLEQAITEQNTAPVEEVLVSHLLKSNCLITHQPDWGSVQIHYRGPKIDREALLRYIVSFRHHNEFHEQCVERIFSDIQRYCHPTALTVYARYTRRGGLDINPYRTNTTFVPTTQRLSRQ

SEQ ID NO: 48565 - protein, 285 aa, Pragia fontium
  REGION 1..285: note = tr|A0A0G3CQU0|A0A0G3CQU0_9GAMM NADPH-dependent 7-cyano-7-deazaguanine reductase OS=Pragia fontium; OX = 82985 GN=queF PE=3 SV=1
MTSHYDNHQALSNLTLGKETAYVDRYDASLLQPVPRSLNRDPLGLKADNLPFHGADIWTLYELSWLNSRGLPQVAIGEVAIPASSSNLIESKSFKLYLNSFNQTCFADWQTVQQTLARDLSQCAQGDVSVKLFHLNQPEIGTITDFAGECIDDQPITIDSYHFDDKLLEQAITEQNTAPVEEILVSHLLKSNCLITHQPDWGSVQIHYRGPKIDREALLRYIVSFRHHNEFHEQCVERIFSDIQRYCHPTALTVYARYTRRGGLDINPYRTNTTFVPTTQRLSRQ

SEQ ID NO: 48566 - protein, 284 aa, Pragia sp.
  REGION 1..284: note = tr|A0A411WH53|A0A411WH53_9GAMM NADPH-dependent 7-cyano-7-deazaguanine reductase OS=Pragia sp. CF-458; OX = 2498113 GN=queF PE=3 SV=1
MTSHYQDNQALSALTLGKETAYIDHYDASLLQPVPRSLNRDPLGLSATALPFHGADIWTLYELSWLNSRGLPQVAVGEVHIDANSINLVESKSFKLYLNSFNQTSLDSWEDVQQVLTRDLSLCAQGNVSVKLFRLEQLTGESIGAFDGECIDDQPIEITHYDFDDKLLERATEKDTPLVEETLVSHLLKSNCLITHQPDWGSVEIRYRGPQINREALLRYIVSFRHHNEFHEQCVERIFNDIQRYCHPESLSVYARYTRRGGLDINPYRTNTQFEPQTKRLARQ

SEQ ID NO: 48567 - protein, 151 aa, unidentified
  source 1..151: note = Prevotella aff.
  REGION 1..151: note = tr|A0A1I0PMR8|A0A1I0PMR8_9BACT NADPH-dependent 7-cyano-7-deazaguanine reductase OS=Prevotella aff. ruminicola Tc2-24 OX=81582 GN=queF PE=3 SV=1
MREDKLQALGKNTAYRMDYAPEVLETFVNKHPDNDYWVQFNCPEFTSLCPITGQPDFAEIKIMYIPGERMVESKSLKLYLFSFRNHGDFHEDCVNIIMKDLVRLMDPKYIEVIGLFTPRGGISIYPYANYGRPGTKYEQMAEQRLLNYQAR

SEQ ID NO: 48568 - protein, 152 aa, Prevotella amnii
  REGION 1..152: note = tr|A0A096AZQ1|A0A096AZQ1_9BACT NADPH-dependent 7-cyano-7-deazaguanine reductase OS=Prevotella amnii DNF00058 OX=1401066 GN=queF PE=3 SV=1
MDREEDKLQLLGKKTEYKSDYAPEVLESFENKHQGNDYWVQFNCPEFTSLCPITGQPDFAEIRISYVPDVRMVESKSLKLYLFSFRNHGDFHEDCVNIIMKDLIKLMSPKYIEVTGIFTPRGGISIYPYANYGKPGTKYEKLAEYRFMNHKM

SEQ ID NO: 48569 - protein, 152 aa, Prevotella amnii; identical to SEQ ID NO: 48568
  REGION 1..152: note = tr|A0A134B2Q6|A0A134B2Q6_9BACT NADPH-dependent 7-cyano-7-deazaguanine reductase OS=Prevotella amnii; OX = 419005 GN=queF PE=3 SV=1

SEQ ID NO: 48570 - protein, 156 aa, Prevotella baroniae
  REGION 1..156: note = tr|U2QB64|U2QB64_9BACT NADPH-dependent 7-cyano-7-deazaguanine reductase OS=Prevotella baroniae F0067 OX=1115809 GN=queF PE=3 SV=1
MSENRKADGLQALGAKTRYRMDYAPEVLETFENKHPENDYWVQFNCPEFTSLCPITGQPDFAEIRISYVPAEKMVESKSLKLYLFSFRNHGDFHEDCVNVIMKDLVKLMAPKYIEVTGYFTPRGGISIYPYANYGRPGTEFEQLARHRFMNHGMNR

SEQ ID NO: 48571 - protein, 155 aa, Prevotella bergensis
  REGION 1..155: note = tr|D1PXG8|D1PXG8_9BACT NADPH-dependent 7-cyano-7-deazaguanine reductase OS=Prevotella bergensis DSM 17361 OX=585502 GN=queF PE=3 SV=1
MASNREQEGLKSLGAKTRYSMDYAPEVLETFNNKHPENDYWVQFNCPEFTSLCPITGQPDFAEIRISYVPAERMVESKSLKLYLFSFRNHGDFHEDCVNIIMKDLIKLMAPKYIEVTGLFTPRGGISIYPYANYGQPGTPYEKMAEARFLNHGQR

SEQ ID NO: 48572 - protein, 152 aa, Prevotella bivia
  REGION 1..152: note = tr|A0A096CJL4|A0A096CJL4_9BACT NADPH-dependent 7-cyano-7-deazaguanine reductase OS=Prevotella bivia DNF00320 OX=1401068 GN=queF PE=3 SV=1
MQREQEGLQLLGKNTEYKSDYAPEVLESFENKHQGNDYWVQFNCPEFTSLCPITGQPDFAEIKISYVPDVRMVESKSLKLYMFSFRNHGDFHEDCVNIIMKDLIKLMEPKYIEVTGIFTPRGGISIYPYANYGKPGTKYEQLAEHRFMNHGL

SEQ ID NO: 48573 - protein, 152 aa, Prevotella bivia
  REGION 1..152: note = tr|A0A137SUH3|A0A137SUH3_9BACT NADPH-dependent 7-cyano-7-deazaguanine reductase OS=Prevotella bivia; OX = 28125 GN=queF PE=3 SV=1
MQREQEGLQLLGKNTEYKSDYAPEVLESFENKHQGNDYWVQFNCPEFTSLCPITGQPDFAEIKISYVPDVRMVESKSLKLYMFSFRNHGDFHEDCVNIIMKDLIKLMKPKYIEVTGIFTPRGGISIYPYANYGKPGTKYEQLAEHRFMNHGL

SEQ ID NO: 48574 - protein, 159 aa, Prevotella bryantii
  REGION 1..159: note = tr|D8DUR5|D8DUR5_PREBR NADPH-dependent 7-cyano-7-deazaguanine reductase OS=Prevotella bryantii B14 OX=752555 GN=queF PE=3 SV=1
MSNNPQNRKDEGLKSLGAKTQYSLDYAPEVLETFQNKHPMNDYWVQFNCPEFTSLCPITGQPDFAEIRISYIPAEKMVESKSLKLYLFSFRNHGDFHEDCVNIIMKDLIKLMEPKYIEVTGYFTPRGGISIYPFANYGLPGTKYEKMAEFRFMNHNMSK

SEQ ID NO: 48575 - protein, 159 aa, Prevotella bryantii; identical to SEQ ID NO: 48574
  REGION 1..159: note = tr|A0A255SUD8|A0A255SUD8_PREBR NADPH-dependent 7-cyano-7-deazaguanine reductase OS=Prevotella bryantii; OX = 77095 GN=queF PE=3 SV=1

SEQ ID NO: 48576 - protein, 152 aa, Prevotella buccae
  REGION 1..152: note = tr|D3I139|D3I139_9BACT NADPH-dependent 7-cyano-7-deazaguanine reductase OS=Prevotella buccae D17; OX = 575611 GN=queF PE=3 SV=1
MSRNEEGLQALGKKTEYRSDYAPEVLETFVNKHPDNDYWVRFNCPEFTSLCPITGQPDFAEIRISYIPDVKMVESKSLKLYLFSFRNHGDFHEDCVNKIMKDLIALMDPKYIEVTGLFTPRGGISIYPFANYGRPGTRYEQMAHERFLRHDM

SEQ ID NO: 48577 - protein, 152 aa, Prevotella buccae
  REGION 1..152: note = tr|E6K979|E6K979_9BACT NADPH-dependent 7-cyano-7-deazaguanine reductase OS=Prevotella buccae ATCC 33574 OX=873513 GN=queF PE=3 SV=1
MSRNEEGLQALGKKTEYRSDYAPEVLETFVNKHPGNDYWVRFNCPEFTSLCPITGQPDFAEIRISYIPDVKMVESKSLKLYLFSFRNHGDFHEDCVNKIMKDLIALMDPKYIEVTGLFTPRGGISIYPFANYGRPGTRYEQMAHERFLRHDM

SEQ ID NO: 48578 - protein, 152 aa, Prevotella buccalis
  REGION 1..152: note = tr|A0A095ZEJ1|A0A095ZEJ1_9BACT NADPH-dependent 7-cyano-7-deazaguanine reductase OS=Prevotella buccalis DNF00853 OX=1401074 GN=queF PE=3 SV=1
MESTRKEDGLKALGAKTKYQMDYAPEVLETFQNKHPMNDYWVQFNCPEFTSLCPITGQPDFAEIRIAYIPGERMVESKSLKLYLFSFRNHGDFHEDCVNIIMKDLIKLMQPKYIEVTGLFTPRGGISIYPYANYGQPGTKYEALAEQRFANH

SEQ ID NO: 48579 - protein, 152 aa, Prevotella buccalis
  REGION 1..152: note = tr|A0A2N6QQQ4|A0A2N6QQQ4_9BACT NADPH-dependent 7-cyano-7-deazaguanine reductase OS=Prevotella buccalis; OX = 28127 GN=queF PE=3 SV=1
MESTRTEDGLKALGAKTKYQMDYAPEVLETFQNKHPMNDYWVQFNCPEFTSLCPITGQPDFAEIRIAYIPGERMVESKSLKLYLFSFRNHGDFHEDCVNIIMKDLIKLMQPKYIEVTGLFTPRGGISIYPYANYGQPGTKYEVLAEQRFANH

SEQ ID NO: 48580 - protein, 155 aa, unidentified
  source 1..155: note = Prevotella colorans
  REGION 1..155: note = tr|A0A2U0ULW1|A0A2U0ULW1_9BACT NADPH-dependent 7-cyano-7-deazaguanine reductase OS=Prevotella colorans; OX = 1703337 GN=queF PE=3 SV=1
MASNREQEGLKSLGAQTRYSMDYAPEVLETFNNKHPENDYWVQFNCPEFTSLCPITGQPDFAEIRISYVPAERMVESKSLKLYLFSFRNHGDFHEDCVNIIMKDLVKLMSPKYIEVVGLFTPRGGISIYPYANYGRPGTKYERMAEMRFANHGMR

SEQ ID NO: 48581 - protein, 151 aa, Prevotella copri
  REGION 1..151: note = tr|D1PBC6|D1PBC6_9BACT NADPH-dependent 7-cyano-7-deazaguanine reductase OS=Prevotella copri DSM 18205 OX=537011 GN=queF PE=3 SV=1
MDRKEDGLQALGAKTTYRMDYAPEVLETFVNKHPGNDYWVRFNCPEFTSLCPITGQPDFAEIRISYIPDVKMVESKSLKLYLFSFRNHGDFHEDCVNIIMKDLIKLMDPKYIEVTGIFTPRGGISIWPYANYGKPGTKYEKLAEQRFATHE

SEQ ID NO: 48582 - protein, 151 aa, Prevotella copri; identical to SEQ ID NO: 48581
  REGION 1..151: note = tr|A0A3E5DXA4|A0A3E5DXA4_9BACT NADPH-dependent 7-cyano-7-deazaguanine reductase OS=Prevotella copri; OX = 165179 GN=queF PE=3 SV=1

SEQ ID NO: 48583 - protein, 198 aa, Prevotella corporis
  REGION 1..198: note = tr|A0A133Q6Z8|A0A133Q6Z8_9BACT NADPH-dependent 7-cyano-7-deazaguanine reductase OS=Prevotella corporis; OX = 28128 GN=queF PE=3 SV=1
MKGTIRLCHANGADTTVKEWLTINRQQIIEGITRPERHSITLRLITYFMERKDEGLQQLGAKTHYSMDYAPEVLESFENKHQENDYWVQFNCPEFTSLCPITGQPDFAEIRISYVPNVRMVESKSLKLYLFSFRNHGDFHEDCVNIIMKDLIKLMDPKYIEVTGIFTPRGGISIYPFANYGQPGSKYEKMAETRFINH

SEQ ID NO: 48584 - protein, 154 aa, Prevotella dentalis
  REGION 1..154: note = tr|F9D4K5|F9D4K5_PREDD NADPH-dependent 7-cyano-7-deazaguanine reductase OS=Prevotella dentalis (strain ATCC 49559 / DSM 3688 / JCM 13448 / NCTC 12043 / ES 2772) OX=9 08937 GN=queF PE=3 SV=1
MEDNRKADGLQALGAKTQYRMDYAPEVLETFVNKHPDNDYWVQFNCPEFTSLCPITGQPDFAEIRISYVPGERMVESKSLKLYLFSFRNHGDFHEDCVNIIMKDLVKLMNPKYIEVTGIFTPRGGISIYPYANYGRPGTRYEQLADTRFARHGL

SEQ ID NO: 48585 - protein, 151 aa, Prevotella denticola
  REGION 1..151: note = tr|F2KUY2|F2KUY2_PREDF NADPH-dependent 7-cyano-7-deazaguanine reductase OS=Prevotella denticola (strain F0289) OX=767031 GN=queF PE=3 SV=1
MERNEEGLKSLGAKTRYKTDYAPEVLETFVNKHPGNDYWVRFNCPEFTSLCPITGQPDFAEIRISYIPDIRMVESKSLKLYLFSFRNHGDFHEDCVNIIMKDLIRLMDPKYIEVTGIFTPRGGISIYPYANYGKKGTKYEQLAEHRFMNHE

SEQ ID NO: 48586 - protein, 151 aa, Prevotella denticola; identical to SEQ ID NO: 48585
  REGION 1..151: note = tr|F0H9E4|F0H9E4_9BACT NADPH-dependent 7-cyano-7-deazaguanine reductase OS=Prevotella denticola CRIS 18C-A OX=944557 GN=queF PE=3 SV=1

SEQ ID NO: 48587 - protein, 151 aa, Prevotella disiens
  REGION 1..151: note = tr|A0A3E4QLG2|A0A3E4QLG2_9BACT NADPH-dependent 7-cyano-7-deazaguanine reductase OS=Prevotella disiens; OX = 28130 GN=queF PE=3 SV=1
MKRSNEGLTQLGAKTQYSMDYAPEVLETFENKHQENDYWVRFNCPEFTSLCPITGQPDFAEIRISYVPDVRMVESKSLKLYLFSFRNHGDFHEDCVNIIMKDLIKLMEPKYIEVIGLFTPRGGISIYPFANYGKPGTKYEKMAETRFANHQ

SEQ ID NO: 48588 - protein, 151 aa, Prevotella disiens; identical to SEQ ID NO: 48587
  REGION 1..151: note = tr|A0A096AU30|A0A096AU30_9BACT NADPH-dependent 7-cyano-7-deazaguanine reductase OS=Prevotella disiens DNF00882 OX=1401075 GN=queF PE=3 SV=1

SEQ ID NO: 48589 - protein, 151 aa, Prevotella fusca
  REGION 1..151: note = tr|A0A0K1NIQ7|A0A0K1NIQ7_9BACT NADPH-dependent 7-cyano-7-deazaguanine reductase OS=Prevotella fusca JCM 17724 OX=1236517 GN=queF PE=3 SV=1
MERNEEGLQSLGSQTQYKMDYAPEVLESFVNKHPDNDYWVRFNCPEFTSLCPITGQPDFAEIRISYIPDVRMVESKSLKLYLFSFRNHGDFHEDCVNTIMKDLIKLMDPKYIEVTGLFTPRGGISIYPYANYGRKGTKYEQLAEQRFINHE

SEQ ID NO: 48590 - protein, 151 aa, Prevotella histicola
  REGION 1..151: note = tr|G6AFM2|G6AFM2_9BACT NADPH-dependent 7-cyano-7-deazaguanine reductase OS=Prevotella histicola F0411 OX=857291 GN=queF PE=3 SV=1
MERNEEGLQSLGSATKYRMDYAPEVLETFVNKHPGNDYWVRFNCPEFTSLCPITGQPDFAEIRISYIPDERMVESKSLKLYLFSFRNHGDFHEDCVNIIMKDLIKLMDPKYIEVTGIFTPRGGISIYPYANYGRKGTKYEKLADHRFMNHE

SEQ ID NO: 48591 - protein, 151 aa, Prevotella histicola; identical to SEQ ID NO: 48590
  REGION 1..151: note = tr|A0A096AAP1|A0A096AAP1_9BACT NADPH-dependent 7-cyano-7-deazaguanine reductase OS=Prevotella histicola JCM 15637 = DNF00424 OX=1236504 GN=queF PE=3 SV=1

SEQ ID NO: 48592 - protein, 151 aa, Prevotella intermedia
  REGION 1..151: note = tr|A0A1P8JFH0|A0A1P8JFH0_PREIN NADPH-dependent 7-cyano-7-deazaguanine reductase OS=Prevotella intermedia ATCC 25611 = DSM 20706 OX=1122984 GN=queF PE=3 SV=1
MERNNEGLTQLGAKTTYSMDYAPEVLESFENKHQGNDYWVRFNCPEFTSLCPITGQPDFAEIRISYVPDVRMVESKSLKLYLFSFRNHGDFHEDCVNTIMKDLIKLMDPKYIEITGIFTPRGGISIYPYANYGRPGTKYEQMAETRFANHQ

SEQ ID NO: 48593 - protein, 151 aa, Prevotella intermedia
  REGION 1..151: note = tr|A0A0D9NFV8|A0A0D9NFV8_PREIN NADPH-dependent 7-cyano-7-deazaguanine reductase OS=Prevotella intermedia ZT OX=1347790 GN=queF PE=3 SV=1
MERNNEGLTQLGAKTTYSMDYAPEVLESFENKHQGNDYWVRFNCPEFTSLCPITGQPDFAEIRISYVPDVRMVESKSLKLYLFSFRNHGDFHEDCVNTIMKDLIKLMDPKYIEVTGIFTPRGGISIYPYANYGRPGTKYEQMAETRFANHQ

SEQ ID NO: 48594 - protein, 151 aa, unidentified
  source 1..151: note = Prevotella jejuni
  REGION 1..151: note = tr|A0A2K9H8B9|A0A2K9H8B9_9BACT NADPH-dependent 7-cyano-7-deazaguanine reductase OS=Prevotella jejuni; OX = 1177574 GN=queF PE=3 SV=1
MERNEEGLQSLGSATQYRMDYAPEVLETFMNKHPENDYWVRFNCPEFTSLCPITGQPDFAEIRISYVPDERMVESKSLKLYLFSFRNHGDFHEDCVNTIMKDLIKLMDPKYIEVTGIFTPRGGISIYPYANYGRKGTKYEQLAEQRFITHE

SEQ ID NO: 48595 - protein, 154 aa, Prevotella loescheii
  REGION 1..154: note = tr|A0A069QGL2|A0A069QGL2_PRELO NADPH-dependent 7-cyano-7-deazaguanine reductase OS=Prevotella loescheii DSM 19665 = JCM 12249 = ATCC 15930 OX=1122985 GN=queF PE=3; SV = 1
MDKKRETEGLKLLGNNTKYSMDYAPEVLETFENKHPENDYWVRFNCPEFTSLCPITGQPDFAEIRISYVPNVRMVESKSLKLYLFSFRNHGDFHEDCVNIIMKDLIKLMNPKYIEVVGLFTPRGGISIHPFANYGMPNTKYAEMAEKRFAEYGG

SEQ ID NO: 48596 - protein, 151 aa, Prevotella maculosa
  REGION 1..151: note = tr|H1HK28|H1HK28_9BACT NADPH-dependent 7-cyano-7-deazaguanine reductase OS=Prevotella maculosa OT 289 OX=999422 GN=queF PE=3 SV=1
MERKNEGLKALGTKTVYRSDYSPEILETFDNKHPENDYWVRFNCPEFTSLCPITGQPDFAEIRIGYIPAEKMVESKSLKLYLFSFRNHGDFHEDCVNIIMKDLVRLMQPKYIEVTGLFTPRGGISIHPYANYGKPGTKYAAMAERRLMERE

SEQ ID NO: 48597 - protein, 156 aa, Prevotella marshii
  REGION 1..156: note = tr|E0NS98|E0NS98_9BACT NADPH-dependent 7-cyano-7-deazaguanine reductase OS=Prevotella marshii DSM 16973 = JCM 13450 OX=862515 GN=queF PE=3 SV=1
MERKRKTEGLHALGTQTKYCTDYAPEVLETFENRHKDNDYWVEFNCPEFTSLCPITGQPDFAEIKIAYIPAERMVESKSLKLYLFSFRNHGDFHEDCVNTIMKDLIRLMAPKYIEVVGLFTPRGGISIYPYANYGKPGTRYEQMAEHRFMNHKINC

SEQ ID NO: 48598 - protein, 151 aa, Prevotella melaninogenica
  REGION 1..151: note = tr|A0A096DDR9|A0A096DDR9_9BACT NADPH-dependent 7-cyano-7-deazaguanine reductase OS=Prevotella melaninogenica DNF00666 OX=1401073 GN=queF PE=3 SV=1
MEREKEGLKSLGSKTQYRMDYAPEVLESFVNKHPDNDYWVRFNCPEFTSLCPITGQPDFAEIRISYIPDVRMVESKSLKLYLFSFRNHGDFHEDCVNTIMKDLIKLMDPKYIEVTGIFTPRGGISIYPYANYGRKGTKYEQLAEQRFITHE

SEQ ID NO: 48599 - protein, 153 aa, Prevotella melaninogenica
  REGION 1..153: note = tr|D3I586|D3I586_9BACT NADPH-dependent 7-cyano-7-deazaguanine reductase OS=Prevotella melaninogenica D18 OX=575612 GN=queF PE=3 SV=1
MIMEREKEGLKSLGSKTQYKMDYAPEVLESFVNKHPDNDYWVRFNCPEFTSLCPITGQPDFAEIRISYIPDVRMVESKSLKLYLFSFRNHGDFHEDCVNTIMKDLIKLMDPKYIEVTGIFTPRGGISIYPYANYGRKGTKYEQLAEQRFITHE

SEQ ID NO: 48600 - protein, 151 aa, Prevotella micans
  REGION 1..151: note = tr|H1PZC6|H1PZC6_9BACT NADPH-dependent 7-cyano-7-deazaguanine reductase OS=Prevotella micans F0438 OX=883158 GN=queF PE=3 SV=1
MERENENLHSLGAPTNYKMNYAPEVLETFENKHKENDYWVRFNCPEFTSLCPITGQPDFAEIRISYIPGERMVESKSLKLYLFSFRNHGDFHEDCINIIMKDLVKLMAPKYIEVTGFFTPRGGISIYPFANYGQPGTKFERLAEERFARHE

SEQ ID NO: 48601 - protein, 151 aa, Prevotella multiformis
  REGION 1..151: note = tr|F0F9R0|F0F9R0_9BACT NADPH-dependent 7-cyano-7-deazaguanine reductase OS=Prevotella multiformis DSM 16608 OX=888743 GN=queF PE=3 SV=1
MERNEEGLKSLGTKTAYKTDYAPEVLETFANRHPGNDYWVRFNCPEFTSLCPITGQPDFAEIRISYVPDVRMVESKSLKLYLFSFRNHGDFHEDCVNIIMKDLIRLMDPKYIEVTGLFTPRGGISIYPYANYGRKGTKYEKLAEQRFVDHV

SEQ ID NO: 48602 - protein, 152 aa, Prevotella multisaccharivorax
  REGION 1..152: note = tr|F8N5Y7|F8N5Y7_9BACT NADPH-dependent 7-cyano-7-deazaguanine reductase OS=Prevotella multisaccharivorax DSM 17128 OX=688246 GN=queF PE=3 SV=1
MIERKEEGLKALGTKTRYKMDYAPEVLETFTNKHPDNDYWVRFNCPEFTSLCPITGQPDFAEIRISYIPDVRMVESKSLKLYLFSFRNHGDFHEDCVNIIMKDLIRLMDPKYIEVTGLFTPRGGISIYPYANYGRPGTKYAELAEKRFATHE

SEQ ID NO: 48603 - protein, 151 aa, Prevotella nigrescens
  REGION 1..151: note = tr|A0A246EPH2|A0A246EPH2_9BACT NADPH-dependent 7-cyano-7-deazaguanine reductase OS=Prevotella nigrescens; OX = 28133 GN=queF PE=3 SV=1
MERNNDGLTQLGKKTTYRMDYAPEVLETFENKHQENDYWVRFNCPEFTSLCPITGQPDFAEIRISYVPDVRMVESKSLKLYLFSFRNHGDFHEDCVNTIMKDLIKLMEPKYIEVTGIFTPRGGISIYPYANYGKPGTKYEQLAEHRFANHE

SEQ ID NO: 48604 - protein, 151 aa, Prevotella nigrescens
  REGION 1..151: note = tr|V8CMF7|V8CMF7_9BACT NADPH-dependent 7-cyano-7-deazaguanine reductase OS=Prevotella nigrescens CC14M OX=1073366 GN=queF PE=3 SV=1
MERNNDGLTQLGKKTTYRMDYAPEVLETFENKHQENDYWVRFNCPEFTSLCPITGQPDFAEIRISYVPDVRMVESKSLKLYLFSFRNHGDFHEDCVNTIMKDLIKLMDPKYIEVTGIFTPRGGISIYPYANYGKPGTKYEQLAEHRFANHE

SEQ ID NO: 48605 - protein, 156 aa, Prevotella oralis
  REGION 1..156: note = tr|E7RRB4|E7RRB4_9BACT NADPH-dependent 7-cyano-7-deazaguanine reductase OS=Prevotella oralis ATCC 33269 OX=873533 GN=queF PE=3 SV=1
MDEARKDEGLQALGAETTYRTDYAPEVLETFLNKHPDNDYWVQFNCPEFTSLCPITGQPDFAEIRISYIPGERMVESKSLKLYLFSFRNHGDFHEDCVNIIMKDLIRLMQPKYIEVTGYFTPRGGISIYPYANFGRTGTKYEELAKHRLMNHSIEK

SEQ ID NO: 48606 - protein, 156 aa, Prevotella oralis
  REGION 1..156: note = tr|V8BYX1|V8BYX1_9BACT NADPH-dependent 7-cyano-7-deazaguanine reductase OS=Prevotella oralis CC98A OX=1073367 GN=queF PE=3 SV=1
MDEIRKDEGLQALGAETTYRTDYAPEVLETFLNKHPDNDYWVQFNCPEFTSLCPITGQPDFAEIRISYIPGERMVESKSLKLYLFSFRNHGDFHEDCVNIIMKDLIRLMQPKYIEVTGYFTPRGGISIYPYANFGRTGTKYEELAKHRLTNHSIEK

SEQ ID NO: 48607 - protein, 155 aa, Prevotella oris
  REGION 1..155: note = tr|D7NC23|D7NC23_9BACT NADPH-dependent 7-cyano-7-deazaguanine reductase OS=Prevotella oris C735; OX = 563008 GN=queF PE=3 SV=1
MERKDEGLQALGAKTKYRMDYAPEVLETFNNKHPENDYWVRFNCPEFTSLCPITGQPDFAEIRISYIPDEKMVESKSLKLYLFSFRNHGDFHEDCVNIIMKDLIKLMQPKYIEVIGLFTPRGGISIYPYANYGKPGTKYEKLAEEKLMQGLPQSL

SEQ ID NO: 48608 - protein, 155 aa, Prevotella oris
  REGION 1..155: note = tr|A0A3S4X0G8|A0A3S4X0G8_9BACT NADPH-dependent 7-cyano-7-deazaguanine reductase OS=Prevotella oris; OX = 28135 GN=queF PE=3 SV=1
MERKDEGLQALGAKTKYRMDYAPEVLETFNNKHPENDYWVRFNCPEFTSLCPITGQPDFAEIRISYIPGEKMVESKSLKLYLFSFRNHGDFHEDCVNIIMKDLIKLMQPKYIEVIGLFTPRGGISIYPYANYGKPGTKYEKLAEEKLMQGLPQSL

SEQ ID NO: 48609 - protein, 155 aa, unidentified
  source 1..155: note = Prevotella oryzae
  REGION 1..155: note = tr|A0A010ZGN4|A0A010ZGN4_9BACT NADPH-dependent 7-cyano-7-deazaguanine reductase OS=Prevotella oryzae DSM 17970 OX=915438 GN=queF PE=3 SV=1
MADTRKEEGLKSLGAKTKYCMDYAPEVLETFNNKHPDNDYWVQFNCPEFTSLCPITGQPDFAEIKIMYIPAEKMVESKSLKLYLFSFRNHGDFHEDCVNIIMKDLVRLMHPKYIEVVGLFTPRGGISIFPYANYGMPGTKYDHMAEARFSQHQIL

SEQ ID NO: 48610 - protein, 160 aa, Prevotella oulorum
  REGION 1..160: note = tr|G1WB73|G1WB73_9BACT NADPH-dependent 7-cyano-7-deazaguanine reductase OS=Prevotella oulorum F0390 OX=702438 GN=queF PE=3 SV=1
MDRKDEGLHALGRTTRYATDYAPEVLETFDNKHPGNDYWVQFNCPEFTSLCPITGQPDFAEICIRYIPGAKMVESKSLKLYLFSFRNHGDFHEDCINIIMKDLVRLMQPKYIEVVGYFTPRGGISIYPFANFGQPGTKYAQLAEHRLMNYQMDGAPLRAK

SEQ ID NO: 48611 - protein, 160 aa, Prevotella oulorum
  REGION 1..160: note = tr|A0A1T4M2E7|A0A1T4M2E7_9BACT NADPH-dependent 7-cyano-7-deazaguanine reductase OS=Prevotella oulorum; OX = 28136 GN=queF PE=3 SV=1
MDRKDEGLQALGRTTRYAADYAPEVLETFDNKHPGNDYWVQFNCPEFTSLCPITGQPDFAEICIRYIPGAKMVESKSLKLYLFSFRNHGDFHEDCINIIMKDLVRLMQPKYIEVVGYFTPRGGISIYPFANFGQPGTKYAQLAEHRLMNYQMDGAPLRAK

SEQ ID NO: 48612 - protein, 151 aa, Prevotella pallens
  REGION 1..151: note = tr|A0A379EZH8|A0A379EZH8_9BACT NADPH-dependent 7-cyano-7-deazaguanine reductase OS=Prevotella pallens; OX = 60133 GN=queF PE=3 SV=1
MERNEEGLQLLGSATKYRMDYAPEVLETFENKHQDNDYWVRFNCPEFTSLCPITGQPDFAEIRISYVPDVRMVESKSLKLYLFSFRNHGDFHEDCVNIIMKDLIKLMQPKYIEVTGIFTPRGGISIYPYANYGKPNTKYEELAAVRFANHQ

SEQ ID NO: 48613 - protein, 151 aa, Prevotella pallens; identical to SEQ ID NO: 48612
  REGION 1..151: note = tr|F9DJ81|F9DJ81_9BACT NADPH-dependent 7-cyano-7-deazaguanine reductase OS=Prevotella pallens ATCC 700821 OX=997353 GN=queF PE=3 SV=1

SEQ ID NO: 48614 - protein, 170 aa, Prevotella pleuritidis
  REGION 1..170: note = tr|U2MUD3|U2MUD3_9BACT NADPH-dependent 7-cyano-7-deazaguanine reductase OS=Prevotella pleuritidis F0068 OX=1081904 GN=queF PE=3 SV=1
MKQMTIDDKEKSLSSGEDRSEISLQALGSPTRYRMDYAPDVLETFLNKHPDNDYWVQFNCPEFTSLCPITGQPDFAEIRISYIPAERMVESKSLKLYLFSFRNHGDFHEDCVNIIMKDLIDLMQPKYIEVTGFFTPRGGISIYPFANYGKPGTEYEQLAKHRFLNHQMDK

SEQ ID NO: 48615 - protein, 153 aa, Prevotella ruminicola
  REGION 1..153: note = tr|A0A1M7K0U4|A0A1M7K0U4_PRERU NADPH-dependent 7-cyano-7-deazaguanine reductase OS=Prevotella ruminicola; OX = 839 GN=queF PE=3 SV=1
MMREQEGLQALGKKTEYKSDYAPEVLETFMNKHPENDYWVQFNCPEFTSLCPITGQPDFAEIKIMYIPGEKMVESKSLKLYLFSFRNHGDFHEDCVNVIMKDLVRLMDPKYIEVIGLFTPRGGISIYPYANYGRPGTKFEALAEQRLLNHTFK

SEQ ID NO: 48616 - protein, 153 aa, Prevotella ruminicola
  REGION 1..153: note = tr|A0A1H6MFI9|A0A1H6MFI9_PRERU NADPH-dependent 7-cyano-7-deazaguanine reductase OS=Prevotella ruminicola; OX = 839 GN=queF PE=3 SV=1
MNREVEGLQALGKKTEYKSDYAPEVLETFMNKHPENDYWVQFNCPEFTSLCPITGQPDFAEIKIMYIPGEKMVESKSLKLYLFSFRNHGDFHEDCVNVIMKDLVRLMDPKYIEVIGLFTPRGGISIYPYANYGRPGTKFEALAEQRLMNHTFK

SEQ ID NO: 48617 - protein, 156 aa, Prevotella saccharolytica
  REGION 1..156: note = tr|L1N6D0|L1N6D0_9BACT NADPH-dependent 7-cyano-7-deazaguanine reductase OS=Prevotella saccharolytica F0055 OX=1127699 GN=queF PE=3 SV=1
MTTEREEEGLKSLGSNTRYRMDYDPEVLETFVNKHPDNDYWVRFNCPEFTSLCPITGQPDFAEIRIAYVPNVTMVESKSLKLYLFSFRNHGDFHEDCINIIMKDLVRLMDPKYIEVVGLFTPRGGISIYPYANYGKPGTRYEKMAEQRFEAYDING

SEQ ID NO: 48618 - protein, 151 aa, Prevotella salivae
  REGION 1..151: note = tr|U2LBP5|U2LBP5_9BACT NADPH-dependent 7-cyano-7-deazaguanine reductase OS=Prevotella salivae F0493 OX=1395125 GN=queF PE=3 SV=1
MERTNEGLQALGAKTKYRMDYAPEVLETFNNKHTDNDYWVRFNCPEFTSLCPITGQPDFAEIRISYIPAEKMVESKSLKLYLFSFRNHGDFHEDCVNIIMKDLIRLMQPKFIEVTGLFTPRGGISIYPYANYGKPGTKYEKLAEKRLETHE

SEQ ID NO: 48619 - protein, 151 aa, Prevotella salivae; identical to SEQ ID NO: 48618
  REGION 1..151: note = tr|E6MRW6|E6MRW6_9BACT NADPH-dependent 7-cyano-7-deazaguanine reductase OS=Prevotella salivae DSM 15606 OX=888832 GN=queF PE=3 SV=1

SEQ ID NO: 48620 - protein, 151 aa, Prevotella scopos; identical to SEQ ID NO: 48598
  REGION 1..151: note = tr|A0A1B1I7B4|A0A1B1I7B4_9BACT NADPH-dependent 7-cyano-7-deazaguanine reductase OS=Prevotella scopos JCM 17725 OX=1236518 GN=queF PE=3 SV=1

SEQ ID NO: 48621 - protein, 154 aa, Prevotella shahii
  REGION 1..154: note = tr|A0A318HZW0|A0A318HZW0_9BACT NADPH-dependent 7-cyano-7-deazaguanine reductase OS=Prevotella shahii DSM 15611 = JCM 12083 OX=1122991 GN=queF PE=3 SV=1
MEKNRETEGLKSLGSSTKYSMDYAPEVLETFENKHPENDYWVRFNCPEFTSLCPITGQPDFAEIRISYVPNVRMVESKSLKLYLFSFRNHGDFHEDCVNIIMKDLIKLMNPKYIEVVGLFTPRGGISIYPYANYGMPNTKYAEMAEKRFAEYGG

SEQ ID NO: 48622 - protein, 153 aa, Prevotella sp.
  REGION 1..153: note = tr|A0A1H3WVC2|A0A1H3WVC2_9BACT NADPH-dependent 7-cyano-7-deazaguanine reductase OS=Prevotella sp. tc2-28; OX = 1761888 GN=queF PE=3 SV=1
MNREQDNLQSLGRKTEYKMDYAPEVLETFENRHKDNDYWVQFNCPEFTSLCPITGQPDFAEIKILYIPGERMVESKSLKLYLFSFRNHGDFHEDCVNTIMKDLVKLMQPKYIEVVGLFTPRGGISIYPYANYGQPGTKYAALAEQRMMNRQMV

SEQ ID NO: 48623 - protein, 151 aa, Prevotella sp.
  REGION 1..151: note = tr|R6AU95|R6AU95_9BACT NADPH-dependent 7-cyano-7-deazaguanine reductase OS=Prevotella sp. CAG:604; OX = 1262932 GN=queF PE=3 SV=1
MDRKQDGLQALGAKTEYRMDYAPEVLETFVNKHPGNDYWVRFNCPEFTSLCPITGQPDFAEIRISYIPDVKMVESKSLKLYLFSFRNHGDFHEDCVNIIMKDLIRLMDPKYIEVTGIFTPRGGISIWPYANYGKPGTKYEKLAEQRFATHE

SEQ ID NO: 48624 - protein, 159 aa, Prevotella stercorea
  REGION 1..159: note = tr|A0A3C0CEH8|A0A3C0CEH8_9BACT NADPH-dependent 7-cyano-7-deazaguanine reductase OS=Prevotella stercorea; OX = 363265 GN=queF PE=3 SV=1
MATNSDNRRDEGLQALGAKTKYRDDYAPEVLETFVNKHQGNDYWVRFNCPEFTSLCPITGQPDFAEIRISYVPDVKMVESKSLKLYLFSFRNHGDFHEDCVNIIMKDLVKLMDPKYIEVTGLFTPRGGISIWPYANYGKPGTKYEKLAERRFEEHDLRG

SEQ ID NO: 48625 - protein, 159 aa, Prevotella stercorea; identical to SEQ ID NO: 48624
  REGION 1..159: note = tr|R7H8B0|R7H8B0_9BACT NADPH-dependent 7-cyano-7-deazaguanine reductase OS=Prevotella stercorea CAG:629 OX=1263103 GN=queF PE=3 SV=1

SEQ ID NO: 48626 - protein, 156 aa, Prevotella timonensis
  REGION 1..156: note = tr|A0A2N6Q6I4|A0A2N6Q6I4_9BACT NADPH-dependent 7-cyano-7-deazaguanine reductase OS=Prevotella timonensis; OX = 386414 GN=queF PE=3 SV=1
MEDTRKNEGLKALGSKTKYKMDYAPEVLETFENKHPTNDYWVQFNCPEFTSLCPITGQPDFAEIKIAYIPQKLMVESKSLKLYLFSFRNHGDFHEDCVNIIMKDLIQLMQPKYIEVIGLFTPRGGISIYPYANYGQPGTRYETLAEQRFFNHSIQP

SEQ ID NO: 48627 - protein, 156 aa, Prevotella timonensis
  REGION 1..156: note = tr|A0A098YND1|A0A098YND1_9BACT NADPH-dependent 7-cyano-7-deazaguanine reductase OS=Prevotella timonensis S9-PR14 OX=1401062 GN=queF PE=3 SV=1
MEDTRKNEGLKALGSKTKYKMDYAPEVLETFENKHPTNDYWVQFNCPEFTSLCPITGQPDFAEIKIAYIPQKLMVESKSLKLYLFSFRNHGDFHEDCVNIIMKDLIRLMQPKYIEVIGLFTPRGGISIYPYANYGQPGTRYETLAEQRFFNHSIQP

SEQ ID NO: 48628 - protein, 151 aa, Prevotella veroralis
  REGION 1..151: note = tr|C9MMM6|C9MMM6_9BACT NADPH-dependent 7-cyano-7-deazaguanine reductase OS=Prevotella veroralis F0319 OX=649761 GN=queF PE=3 SV=1
MERNEEGLQSLGSATQYRMDYAPEVLETFMNKHPENDYWVRFNCPEFTSLCPITGQPDFAEIRISYVPGERMVESKSLKLYLFSFRNHGDFHEDCVNIIMKDLIKLMDPKYIEVTGIFTPRGGISIYPYANYGRKGTKYEQLAEQRFITHE

SEQ ID NO: 48629 - protein, 153 aa, unidentified
  source 1..153: note = Prevotellaceae bacterium
  REGION 1..153: note = tr|A0A239QX32|A0A239QX32_9BACT NADPH-dependent 7-cyano-7-deazaguanine reductase OS=Prevotellaceae bacterium MN60 OX=1945887 GN=queF PE=3 SV=1
MNREQEGLQLLGKKTEYKMTYAPEVLETFENKHKDNDYWVQFNCPEFTSLCPITGQPDFAEIKIMYIPGERMVESKSLKLYLFSFRNHGDFHEDCVNIIMKDLVKLMQPKYIEVVGLFTPRGGISIYPYANYGQPGTKYAALAEQRMMNYGLR

SEQ ID NO: 48630 - protein, 153 aa, unidentified
  source 1..153: note = Prevotellaceae bacterium
  REGION 1..153: note = tr|A0A1K1M687|A0A1K1M687_9BACT NADPH-dependent 7-cyano-7-deazaguanine reductase OS=Prevotellaceae bacterium HUN156 OX=1520830 GN=queF PE=3 SV=1
MNREQEGLQQLGKKTEYKMTYAPEVLETFENKHKDNDYWVQFNCPEFTSLCPITGQPDFAEIKIMYIPGERMVESKSLKLYLFSFRNHGDFHEDCVNIIMKDLVKLMQPKYIEVTGLFTPRGGISIYPYANYGQPGTKYAALAEQRMANYGLR

SEQ ID NO: 48631 - protein, 136 aa, Prochlorococcus marinus
  REGION 1..136: note = tr|A0A0A1ZBN3|A0A0A1ZBN3_PROMR NADPH-dependent 7-cyano-7-deazaguanine reductase OS=Prochlorococcus marinus str. GP2 OX=59925 GN=queF PE=3 SV=1
MSTAKLDDSTQRPLYGERIIEESKIICFENPNKKRIYEISIQLPEFTCKCPFSGYPDFAKLNIIYQPNLKVYELKSLKLYINNFRDIKISHEEVVNRIMDDLVHAGSPHWIHLNAEFNPRGNVSMQLDIFSGQKKN

SEQ ID NO: 48632 - protein, 135 aa, Prochlorococcus marinus
  REGION 1..135: note = sp|Q7V5R6|QUEF_PROMM NADPH-dependent 7-cyano-7-deazaguanine reductase OS=Prochlorococcus marinus (strain MIT 9313) OX=74547 GN=queF PE=3 SV=1
MSSTQAQASKTLYGERVIAEGELICFDNPRPERPYEISIELPEFTCQCPFSGYPDFAVLRLLYQPGSRVIELKAIKLYVNSYRNCTISHEEAANKILDDLVVACNPVWMQLEADFNPRGNVHTVVRVSHGSRQPC

SEQ ID NO: 48633 - protein, 52 aa, Prochlorococcus sp.
  REGION 1..52: note = tr|A0A1Y3K3H9|A0A1Y3K3H9_9PROC NADPH-dependent 7-cyano-7-deazaguanine reductase QueF (Fragment); OS = Prochlorococcus sp. HOT_208_60 OX=1945637; GN = B0W81_05350 PE=4 SV=1
RDIKISHEEVVNRIMDDLENEGSPYWIHLNAKFNPRGNVSMQLDIFSGQKRN

SEQ ID NO: 48634 - protein, 140 aa, Prochlorococcus sp.
  REGION 1..140: note = tr|A0A089PGN5|A0A089PGN5_9PROC NADPH-dependent 7-cyano-7-deazaguanine reductase OS=Prochlorococcus sp. MIT 0801 OX=1501269 GN=queF PE=3 SV=1
MIRQEKDINEKVMYGEREIENGRLNCFPNPNSNRDYEISIDFPEFTCKCPFSGYPDFATLRIKYQPNTMVIELKAIKLYLNGFREKKISHEEVTNKIIDDFVEVSDPKWMQLEADFNPRGNVHTIIRVCHGKRNNLELTL

SEQ ID NO: 48635 - protein, 138 aa, unidentified
  source 1..138: note = Prochlorothrix hollandica
  REGION 1..138: note = tr|A0A0M2PZ90|A0A0M2PZ90_PROHO NADPH-dependent 7-cyano-7-deazaguanine reductase OS=Prochlorothrix hollandica PCC 9006 = CALU 1027 OX=317619 GN=queF PE=3 SV=1
MSSPSNSTHLSATPTVKYGERLIEDGQLITFPNPRPGRSYSVQITLPEFTCKCPFSGYPDFATLHITYRPHEKTLELKALKLYINQYRDRYISHEEAVNQVLDDLVAACDPLDMTVTGDFNPRGNVHMVVEASHRRPS

SEQ ID NO: 48636 - protein, 271 aa, Prolinoborus fasciculus; identical to SEQ ID NO: 43658
  REGION 1..271: note = tr|A0A2U3ME94|A0A2U3ME94_9NEIS NADPH-dependent 7-cyano-7-deazaguanine reductase OS=Prolinoborus fasciculus OX=1056810 GN=queF PE=3 SV=1

SEQ ID NO: 48637 - protein, 295 aa, unidentified
  source 1..295: note = Prolixibacter denitrificans
  REGION 1..295: note = tr|A0A2P8CG72|A0A2P8CG72_9BACT 7-cyano-7-deazaguanine reductase OS=Prolixibacter denitrificans OX=1541063 GN=CLV93_103409 PE=4 SV=1
MKNTISTEDKLLGKKVDYPKQYAPEVLVAVPRKVNREQYGISEPPTEFIGLDTWHAYEVGFLTENGLPVTGLLKLVYPFDSPFLVESKSLKLYLNSFNMSSYGNDPKSGIEQVTDIIKKDLEALLKCEVKLAFFDKEPEVAAHDFQDFMVMEEELELGNIQFNDFTENPELLKSAKSNEKQLKLATHLLRSNCKVTHQPDWGSAFVHIKGETLPEPTGLLEYIVSFRNENHFHEEICEMLYKRLWDKFQPEKLMVTCIYTRRGGIDICPSRVSHPELLPSNLTSPEKLSSKLLRQ

SEQ ID NO: 48638 - protein, 156 aa, unidentified
  source 1..156: note = Prolixibacteraceae bacterium
  REGION 1..156: note = tr|A0A399T884|A0A399T884_9BACT NADPH-dependent 7-cyano-7-deazaguanine reductase OS=Prolixibacteraceae bacterium XSD2 OX=2305463 GN=queF PE=3 SV=1
MSDLKHLGNETNYLFDYTPGVLETFDNKHPENDYWVKFNAPEFTSLCPITGQPDFATIYISYIPGEKMVESKSLKLYLFSFRNHGAFHEDCINIIMKDLIGLMEPKYIEVWGKFLPRGGLSIDPYSNYGKPGTRYEELAWHRMQNHDLNPEKIDNR

SEQ ID NO: 48639 - protein, 292 aa, unidentified
  source 1..292: note = Prolixibacteraceae bacterium
  REGION 1..292: note = tr|A0A4U2LAH9|A0A4U2LAH9_9BACT NADPH-dependent 7-cyano-7-deazaguanine reductase QueF; OS = Prolixibacteraceae bacterium JC036 OX=2528631; GN = EYV94_15765 PE=4 SV=1
MSKVPVEATVLGKKVPFPQQYDPSILVAVPRYENRKIYGIKEQPDIFVGFDAWHAWEVGFMTNNGLPVAGVMKIVYPSDNLFLVESKSLKLYLNSLNMARMGESVHEGIDLFCEVVRKDLTNLLKTEVQVAFFKGTQECEDALCNYEVLEELPEVEQHSFISFQENPELLSKFDDSKTIKVVSHLLRSNCKITHQPDWGSVFIYMSADNTPDKMALLEYLVSFRNENHFHEEVCEMIYKRLWDQYNPEELMVTCIYTRRGGIDICPARANKESLLSSYLGQVDFLTTKLLRQ

SEQ ID NO: 48640 - protein, 136 aa, unidentified
  source 1..136: note = Propionibacteriaceae bacterium
  REGION 1..136: note = tr|A0A2E0E9Q9|A0A2E0E9Q9_9ACTN NADPH-dependent 7-cyano-7-deazaguanine reductase OS=Propionibacteriaceae bacterium OX=2021380 GN=queF PE=3 SV=1
MSISGTESTKTPLYGERAVAEAELICFDNPRPGRPYEVSIELPEFTCLCPFSGYPDFAVLRLIYQPGPRVVELKAIKLYINHFRNCSISHEEVSNKILDDLITACDPVWIQMEADFNPRGNVHTVVRVSHGTRQPC

SEQ ID NO: 48641 - protein, 166 aa, Propionispira arboris
  REGION 1..166: note = tr|A0A1H6U6H1|A0A1H6U6H1_9FIRM NADPH-dependent 7-cyano-7-deazaguanine reductase OS=Propionispira arboris; OX = 84035 GN=queF PE=3 SV=1
MVERKKEEMSDITLLGQKNVQYGYDYVPGILETFDNKHPMNDYWVKFNCPEFTSLCPITGQPDFATIYISYIPERKMVESKSLKLYLVSFRNHGDFHEDVVNIIMKDLIKLMDPRYIEVWGKFLPRGGISIDPYANYGKMGTKYEALAWDRFKQHDLMGMDRVDNR

SEQ ID NO: 48642 - protein, 165 aa, Propionispora sp.
  REGION 1..165: note = tr|A0A0K8JJP0|A0A0K8JJP0_9FIRM NADPH-dependent 7-cyano-7-deazaguanine reductase OS=Propionispora sp. 2/2-37 OX=1677858 GN=queF PE=3 SV=1
MNGRSKQELAGVTLLGKQKVSYSYSYNPDILESFANKHPENDYFVKFNCPEFTSLCPMTGQPDFATIYIAYVPDKLLVESKSLKLYLFSFRNHGDFHEDCVNIIMKDLIKLLSPKYIEVWGKFTPRGGISIDPYANYGKQGTHWEKAATERLLWHDMYPEKIDNR

SEQ ID NO: 48643 - protein, 139 aa, Propionivibrio dicarboxylicus
  REGION 1..139: note = tr|A0A1G8DCU4|A0A1G8DCU4_9RHOO NADPH-dependent 7-cyano-7-deazaguanine reductase OS=Propionivibrio dicarboxylicus OX=83767 GN=queF PE=3 SV=1
MTTQPSKTLETFPNPAPHRDFHIHMEIPEFTCLCPKTGQPDFATLILDYIPEKTCVELKALKLYIWSFRNEGCFHEAVTNQILDDLVKALKPRYMRLTAKFFVRGGIFTNVVAEHRKKGWKPEPKVELTDFETSSNTRG

SEQ ID NO: 48644 - protein, 151 aa, Prosthecobacter debontii
  REGION 1..151: note = tr|A0A1T4Y4E9|A0A1T4Y4E9_9BACT NADPH-dependent 7-cyano-7-deazaguanine reductase OS=Prosthecobacter debontii OX=48467 GN=queF PE=3 SV=1
MSDPLTADITLLGRSEHKLPASPDEAALETFPNRTPGRNYTIHLSAPDFSSLCPVTGQPDAAHLEILYIPNERCVETKSLKFYLASYRNHASFNEVIVNRVLDDLVQACAPRQVIVRGRFVSRGGIQLTCEARYPNPETTLEWPVASLSTH

SEQ ID NO: 48645 - protein, 167 aa, Prosthecobacter fusiformis
  REGION 1..167: note = tr|A0A4R7RL77|A0A4R7RL77_9BACT NADPH-dependent 7-cyano-7-deazaguanine reductase OS=Prosthecobacter fusiformis OX=48464 GN=queF PE=3 SV=1
MGACDKAALRHIVEIMSDSLTADITLLGRSEHRLPASPDEAALETFPNRTPGRNYTIHLSAPDFGSLCPVTGQPDAAHVEILYIPDERCVETKSLKFYLASYRNHASFNEAIVNRILDDLVAACAPKQAIVRGRFVPRGGIQLTCEARHPSREIPLEWPAASLSTPH

SEQ ID NO: 48646 - protein, 118 aa, Prosthecochloris aestuarii
  REGION 1..118: note = sp|B4S5H3|QUEF_PROA2 NADPH-dependent 7-cyano-7-deazaguanine reductase OS=Prosthecochloris aestuarii (strain DSM 271 / SK 413) OX=290512 GN=queF PE=3; SV = 1
MKKELLEVFDNQFPDRDYTIEIVNPEFTSVCPKTGLPDFGTITLRYVPDKVCIELKSLKYYYLEFRNAGIFYENITNTILDHMISALHPRTLTVTTEWKARGGITETVTASYSSADKA

SEQ ID NO: 48647 - protein, 117 aa, unidentified
  source 1..117: note = Prosthecochloris marina
  REGION 1..117: note = tr|A0A317T4H7|A0A317T4H7_9CHLB NADPH-dependent 7-cyano-7-deazaguanine reductase OS=Prosthecochloris marina OX=2017681 GN=queF PE=3 SV=1
MKKELLEVFDNQFPDRNYTIEIVNPEFTSVCPKTGLPDFGTITIRYIPDKSCVELKSLKYYYLEFRNAGIFYENITNTILDHMIEVLEPRELTVKTEWKARGGITETVTASYSSQQQ

SEQ ID NO: 48648 - protein, 115 aa, Prosthecochloris sp.
  REGION 1..115: note = tr|A0A1B1Q0I8|A0A1B1Q0I8_9CHLB NADPH-dependent 7-cyano-7-deazaguanine reductase OS=Prosthecochloris sp. CIB 2401 OX=1868325 GN=queF PE=3 SV=1
MKKELLEVFENRFPDRDYTIEICNPEFTSVCPKTGLPDFGTITIDYIPDKLCIELKSLKYYYLEFRNAGIFYENITNTILDHMVEVLKPRQITIKTEWKARGGITETVTVSYSAS

SEQ ID NO: 48649 - protein, 116 aa, Prosthecochloris sp.
  REGION 1..116: note = tr|A0A1W6HQB5|A0A1W6HQB5_9CHLB NADPH-dependent 7-cyano-7-deazaguanine reductase OS=Prosthecochloris sp. HL-130-GSB OX=1974213 GN=queF PE=3 SV=1
MKKELLEVFENCFPDRDYTIEIVNPEFTSVCPKTGLPDFGTITISYVPDKLCLELKSLKYYYLEFRNAGIFYENITNTILDHMVELLEPRSITVTTEWKARGGITETVSVSHTATS

SEQ ID NO: 48650 - protein, 115 aa, Prosthecochloris vibrioformis; identical to SEQ ID NO: 48648
  REGION 1..115: note = tr|A0A5C4S144|A0A5C4S144_PROVB NADPH-dependent 7-cyano-7-deazaguanine reductase OS=Prosthecochloris vibrioformis OX=1098 GN=queF PE=3 SV=1

SEQ ID NO: 48651 - protein, 153 aa, Prosthecomicrobium hirschii
  REGION 1..153: note = tr|A0A0P6WFB9|A0A0P6WFB9_9RHIZ NADPH-dependent 7-cyano-7-deazaguanine reductase OS=Prosthecomicrobium hirschii OX=665126 GN=queF PE=3 SV=1
MTAFDASSLQLGHETIYPKSPDEARLDRVPNPQADTLYLARFTVPEFTSLCPVTGQPDFAHLVIDYVPKDWLVESKSLKLYMTSFRNHGAFHEDCTVAIGRRLADLLDPHWLRIGGYWYPRGGIPIDVFWQSGEPPKAVWIPDQGVASYRGRG

SEQ ID NO: 48652 - protein, 153 aa, Proteiniphilum acetatigenes
  REGION 1..153: note = tr|A0A117M046|A0A117M046_9BACT NADPH-dependent 7-cyano-7-deazaguanine reductase OS=Proteiniphilum acetatigenes OX=294710 GN=queF PE=3 SV=1
MEKDQLSLLGNQTDYRQDYAPEVLEAFTNKHPGNDYWVTFDCPEFTSLCPITGQPDFATIRIDYIPDMKMVESKSLKLYLFSFRNHGAFHEDCVNIIMKDLIQLMNPKYIEVTGIFTPRGGISIYPYANHGRPGTKYEKLAEERLFTHSFPLK

SEQ ID NO: 48653 - protein, 159 aa, unidentified
  source 1..159: note = Proteiniphilum saccharofermentans
  REGION 1..159: note = tr|A0A1R3T8V8|A0A1R3T8V8_9BACT NADPH-dependent 7-cyano-7-deazaguanine reductase OS=Proteiniphilum saccharofermentans OX=1642647 GN=queF PE=3 SV=1
MQHKGLSHLGGKTEYKQDYAPEMLEAFDNKHPGNDYWVTFDCPEFTSLCPITGQPDFATIRIDYIPDIKMVESKSLKLYLFSFRNHGAFHEDCVNIIMKDLIRLMDPKYIEVTGIFTPRGGISIYPYANYGRKGTKYEKLAEERLFNYSFPVRNSVPSR

SEQ ID NO: 48654 - protein, 153 aa, Proteiniphilum sp.; identical to SEQ ID NO: 48652
  REGION 1..153: note = tr|A0A124G6M6|A0A124G6M6_9BACT NADPH-dependent 7-cyano-7-deazaguanine reductase OS=Proteiniphilum sp. 51_7 OX=1641377 GN=queF PE=3 SV=1

SEQ ID NO: 48655 - protein, 159 aa, Proteiniphilum sp.
  REGION 1..159: note = tr|A0A3M8EIW2|A0A3M8EIW2_9BACT NADPH-dependent 7-cyano-7-deazaguanine reductase OS=Proteiniphilum sp. X52; OX = 2382159 GN=queF PE=3 SV=1
MQHKGLSHLGGKTEYKQDYAPEMLEAFDNKHPENDYWVTFDCPEFTSLCPITGQPDFAIIRIDYIPDIKMVESKSLKLYLFSFRNHGAFHEDCVNIIMKDLIRLMDPKYIEVRGIFTPRGGISIYPYANYGRKGTKYEKLAEERLFNYSFPVRNSVPSR

SEQ ID NO: 48656 - protein, 139 aa, unidentified
  source 1..139: note = Proteobacteria bacterium
  REGION 1..139: note = tr|R6A4D7|R6A4D7_9PROT NADPH-dependent 7-cyano-7-deazaguanine reductase OS=Proteobacteria bacterium CAG:139 OX=1262986 GN=queF PE=3 SV=1
MSTAPSKNLETFPNPQPNRDYLIHIEIPEFTSLCPLTGQPDFATLLLDYIPDQKNVELKALKLYMWSYRQEGAFHEAITNKILDDLVAATSPRFMRLKAKWWVRGGIYTTVVAEYRKEGWTPVKPVELPEFESNDPTRG

SEQ ID NO: 48657 - protein, 149 aa, unidentified
  source 1..149: note = Proteobacteria bacterium
  REGION 1..149: note = tr|A0A1W9I8C8|A0A1W9I8C8_9PROT NADPH-dependent 7-cyano-7-deazaguanine reductase OS=Proteobacteria bacterium HN_bin10 OX=1827386 GN=queF PE=3 SV=1
MTKLTQLGQATPIPENPDQATLERAPNPHPATLYLVRFTAPEFTSICPVTGQPDFGTLVIDYAPKDWIVESKSLKLFLQSFRNHGAFHEDCTLAVAKRVIDAIAPNWLRIGGYWNPRGGMPIDVFWQTGAPPEGLWLPDQGVATYRSRG

SEQ ID NO: 48658 - protein, 281 aa, Proteus hauseri
  REGION 1..281: note = tr|A0A410X744|A0A410X744_PROHU NADPH-dependent 7-cyano-7-deazaguanine reductase OS=Proteus hauseri; OX = 183417 GN=queF PE=3 SV=1
MPLYQGDKTLASLSLGKETQYHEQYNAELLQGVPRSLNRDALSLNTENLPFHGGDIWTLYELSWLNNKGLPQVAIGYVELDATSENLIESKSFKLYLNSFNQTRFDNWEAVEKILRQDLTSCAKGSVNLSLYPLSHFTSQPIIDFAGECIDNQDIEINNYQFDTQWLNQSTTDIFVEETLVSHLLKSNCLITNQPDWGSVMIQYKGKKIDREKLLRYLVSFRQHNEFHEQCVERIFNDIMQLCSPETLTVYARYTRRGGLDINPWRSNCEFVPENGRLARQ

SEQ ID NO: 48659 - protein, 281 aa, Proteus hauseri
  REGION 1..281: note = tr|V6MH65|V6MH65_PROHU NADPH-dependent 7-cyano-7-deazaguanine reductase OS=Proteus hauseri ZMd44; OX = 1312367 GN=queF PE=3 SV=1
MSLYQGDQSLEALSLGKETQYHDQYDAGLLQGVPRSLNRDSLSLTAENLPFHGGDIWTMYELSWLNSKGLPQVAIGHVELDATTENLIESKSFKLYLNSFNQTRFESWDIVEKTLLKDLTACAKGKVNLTIYPLSHFTSQPIVDFAGECIDEQDIEIDNYQFDMQWLNESTTDTLVEETLVSHLLKSNCLITHQPDWGSIAIQYKGKKIDREKLLRYLVSFRQHNEFHEQCVERIFHDIMQLCKPETLTVYARYTRRGGLDINPWRSNCEFVPEISRLARQ

SEQ ID NO: 48660 - protein, 281 aa, Proteus mirabilis
  REGION 1..281: note = sp|B4F2E4|QUEF_PROMH NADPH-dependent 7-cyano-7-deazaguanine reductase OS=Proteus mirabilis (strain HI4320) OX=529507 GN=queF PE=3 SV=1
MSLYQGDKALEALSLGKETQYHTHYDASLLQGVPRRLNRDSLSLTADNLPFHGGDIWTMYELSWLNSQGLPQVAIGHVELDATTENLIESKSFKLYLNSFNQTRFENWHIVEETLLKDLTACAKGRVHLTLYPLSHFTSQPIVDFVGECIDNQPIEIDNYQFDSQWLNGSTTDTLVEETLVSHLLKSNCLITHQPDWGSVMIQYKGKKIDREKLLRYLVSFRQHNEFHEQCVERIFHDIMTFCSPDTLTVYARYTRRGGLDINPWRSNCEFVPETGRLARQ

SEQ ID NO: 48661 - protein, 281 aa, Proteus mirabilis; identical to SEQ ID NO: 48660
  REGION 1..281: note = tr|A0A1Z1SRY5|A0A1Z1SRY5_PROMI NADPH-dependent 7-cyano-7-deazaguanine reductase OS=Proteus mirabilis; OX = 584 GN=queF PE=3 SV=1

SEQ ID NO: 48662 - protein, 281 aa, Proteus penneri
  REGION 1..281: note = tr|A0A379EPL9|A0A379EPL9_9GAMM NADPH-dependent 7-cyano-7-deazaguanine reductase OS=Proteus penneri; OX = 102862 GN=queF PE=3 SV=1
MSLYQGDKSLEALSLGKETQYHDQYDAGLLQGVPRSLNRDSLSLTAENLPFHGGDIWTMYELSWLNSKGLPQVAIGHVELDATTENLIESKSFKLYLNSFNQTRFESWDIVEKTLLNDLTTCAKGKVNLTIYPLSHFTSQPIVDFAGECIDEQDIEIDNYQFDVQWLNESTTDTLVEETLVSHLLKSNCLITNQPDWGSVAIQYKGKKINREKLLRYLVSFRQHNEFHEQCVERIFHDIMQLCTPETLTVYARYTRRGGLDINPWRSNCEFVPKISRLARQ

SEQ ID NO: 48663 - protein, 281 aa, Proteus penneri; identical to SEQ ID NO: 48662
  REGION 1..281: note = tr|C0AT01|C0AT01_9GAMM NADPH-dependent 7-cyano-7-deazaguanine reductase OS=Proteus penneri ATCC 35198 OX=471881 GN=queF PE=3 SV=1

SEQ ID NO: 48664 - protein, 281 aa, Proteus sp.
  REGION 1..281: note = tr|A0A3D2BMW3|A0A3D2BMW3_9GAMM NADPH-dependent 7-cyano-7-deazaguanine reductase OS=Proteus sp. OX=229037; GN = queF PE=3 SV=1
MPLYQGDKTLASLSLGKETQYHEQYNAELLQGVPRSLNRDALSLNAENVPFHGGDIWTLYELSWLNNKGLPQVAIGHVELDATSENLIESKSFKLYLNSFNQTRFDNWEAVEKILRQDLTSCAKGSVNLSLYPLSHFTSQPIIDFAGECIDNQDIEINNYQFDTQWLNQSTTDIFVEETLVSHLLKSNCLITNQPDWGSVMIQYKGKKIDREKLLRYLVSFRQHNEFHEQCVERIFNDIMQLCSPETLTVYARYTRRGGLDINPWRSNCEFVPENGRLARQ

SEQ ID NO: 48665 - protein, 281 aa, Proteus sp.
  REGION 1..281: note = tr|A0A5J6RRL9|A0A5J6RRL9_9GAMM NADPH-dependent 7-cyano-7-deazaguanine reductase QueF OS=Proteus sp. CD3; OX = 1921565 GN=BTA34_13325 PE=4 SV=1
MSLYQGDKSLEALSLGKETQYHDQYDAGLLQGVPRSLNRDSLSLTAENLPFHGGDIWTMYELSWLNSKGLPQVAIGHVELDATTENLIESKSFKLYLNSFNQTRFESWDLVEKTLLKDLTTCAKGKVNLTIYPLSHFTSQPIVNFAGECIDEQDIEIDNYQFDMQWLNESTTDTLVEETLVSHLLKSNCLITNQPDWGSVAIQYKGKKIDREKLLRYLVSFRQHNEFHEQCVERIFHDIMQLCKPETLTVYARYTRRGGLDINPWRSNCEFVPEISRLARQ

SEQ ID NO: 48666 - protein, 281 aa, Proteus vulgaris
  REGION 1..281: note = tr|A0A292C7B1|A0A292C7B1_PROVU NADPH-dependent 7-cyano-7-deazaguanine reductase OS=Proteus vulgaris; OX = 585 GN=queF PE=3 SV=1
MSLYQGDKSLEALSLGKETRYHDQYDAGLLQGVPRSLNRDSLSLTAENLPFHGGDIWTMYELSWLNSKGLPQVAIGHVELDATTENLIESKSFKLYLNSFNQTRFESWDIVEKTLLKDLTTCAKGKVNLTIYPLSHFTSQPIVDFAGECIDEQNIEINNYQFDAQWLNESTTDTLVEETLVSHLLKSNCLITNQPDWGSVAIQYKGKKIDREKLLRYLVSFRQHNEFHEQCVERIFHDIMQLCAPETLTVYARYTRRGGLDINPWRSNCEFVPEISRLARQ

SEQ ID NO: 48667 - protein, 281 aa, Proteus vulgaris; identical to SEQ ID NO: 48662
  REGION 1..281: note = tr|A0A0G4QBY2|A0A0G4QBY2_PROVU NADPH-dependent 7-cyano-7-deazaguanine reductase OS=Proteus vulgaris; OX = 585 GN=queF PE=3 SV=1

SEQ ID NO: 48668 - protein, 281 aa, Providencia alcalifaciens
  REGION 1..281: note = tr|B6XDP5|B6XDP5_9GAMM NADPH-dependent 7-cyano-7-deazaguanine reductase OS=Providencia alcalifaciens DSM 30120 OX=520999 GN=queF PE=3 SV=1
MSHYQNNPALDNLTLGKKTAYHDQYDAALLQAVPRSLNRDPLDIHADSLPFHGADIWTLYELSWLNARGVPQVAIGSVSIDATSENLVESKSFKLYLNSFNQTRFETWENVRTVLQKDLSRCANGEVKVTLYKLDDFTQQAIHQFQGVCIDEQEIDIDNYEFNRQYLVDCTQSEVVEEILVSHLLKSNCLITNQPDWGSVQIHYRGPKINHEALLRYLVSFRHHNEFHEQCVERIFNDITILCKPEKLSVYARYTRRGGLDINPWRSNEQFEPETGRLARQ

SEQ ID NO: 48669 - protein, 281 aa, Providencia alcalifaciens; identical to SEQ ID NO: 48668
  REGION 1..281: note = tr|X6Q5S7|X6Q5S7_9GAMM NADPH-dependent 7-cyano-7-deazaguanine reductase OS=Providencia alcalifaciens F90-2004 OX=1256987 GN=queF PE=3 SV=1

SEQ ID NO: 48670 - protein, 281 aa, Providencia burhodogranariea
  REGION 1..281: note = tr|K8WCD6|K8WCD6_9GAMM NADPH-dependent 7-cyano-7-deazaguanine reductase OS=Providencia burhodogranariea DSM 19968 OX=1141662 GN=queF PE=3 SV=1
MSHYQNNSALDNLTLGKETAYHYQYDPNLLQAVPRSLNREPLDIHADNLPFHGADIWTLYELSWLNKKGVPQVAIGLVSVDAQSENLIESKSFKLYLNSFNQTRFETWENVRSVLQNDLCHCANGKVSVTLHKLDEISQQAISQFQGICIDEQDIEINQYEFSRDYLVESTESEVVEEILVSHLLKSNCLITNQPDWGSVQIRYRGPKINQEALLRYLVSFRHHNEFHEQCVERIFNDITQLCKPEQLSVYARYTRRGGLDINPWRSNTQFMPEIGRLARQ

SEQ ID NO: 48671 - protein, 281 aa, Providencia heimbachae
  REGION 1..281: note = tr|A0A4D7J812|A0A4D7J812_9GAMM NADPH-dependent 7-cyano-7-deazaguanine reductase OS=Providencia heimbachae; OX = 333962 GN=queF PE=3 SV=1
MSDYHNNPALDNLTLGKKTAYHDQYDPALLQPVPRSLNRDPLDIHADSLPFHGADIWTLYELSWLNHRGVPQVAIGSISVDANSQNLIESKSFKLYLNSFNQTQFETWENVRSVLQSDLSHCANGDVSVTLHKLDYFSQQTIHQFHGICIDEQEIDIDNYEFSRHYLADCTTREIVEETLISHLLKSNCLITNQPDWGSVQIHYRGAKIDHEALLRYLVSFRHHNEFHEQCVERIFNDIAQLCKPEKLTVYARYTRRGGLDINPWRSNEQFRPEMGRLARQ

SEQ ID NO: 48672 - protein, 281 aa, Providencia heimbachae; identical to SEQ ID NO: 48671
  REGION 1..281: note = tr|A0A1B7JYV7|A0A1B7JYV7_9GAMM NADPH-dependent 7-cyano-7-deazaguanine reductase OS=Providencia heimbachae ATCC 35613 OX=1354272 GN=queF PE=3 SV=1

SEQ ID NO: 48673 - protein, 281 aa, Providencia rettgeri
  REGION 1..281: note = tr|A0A1J0EB63|A0A1J0EB63_PRORE NADPH-dependent 7-cyano-7-deazaguanine reductase OS=Providencia rettgeri; OX = 587 GN=queF PE=3 SV=1
MSHYQNNPALDNLTLGKKTAYHDQYDATLLQAVPRSLNRSPLAIYADALPFHGADIWTMYELSWLNQRGVPQVAIGSISVDAHSENLIESKSFKLYLNSFNQTCFETWENVRSVLQNDLSRCANGKVSVTLYKLDDFSHQPIQPLQGICIDDQEIDINNYEFNRDYLANSTQEDIVEETLVSHLLKSNCLITNQPDWGSVQIHYCGAKINREALLRYLISFRHHNEFHEQCVERIFNDITQLCKPDKLSVYARYTRRGGLDINPWRSNEDFTPELGRLARQ

SEQ ID NO: 48674 - protein, 281 aa, Providencia rettgeri
  REGION 1..281: note = tr|A0A264VW11|A0A264VW11_PRORE NADPH-dependent 7-cyano-7-deazaguanine reductase OS=Providencia rettgeri; OX = 587 GN=queF PE=3 SV=1
MSHYQNNPALNNLTLGKKTDYHDQYDATLLQAVPRSLNRDPLAIHAKALPFHGADIWTMYELSWLNQRGVPQVAIGSISVDANSENLIESKSFKLYLNSFNQTRFETWENVRSALQNDLSRCANGQVSVTLHKLEHFAHQPIQPLLGECIDEQEIDIDNYEFNRDYLANSTQQQVVDETLVSHLLKSNCLITNQPDWGSVQIHYCGPKIDREALLRYLVSFRHHNEFHEQCVERIFTDIMQLCKPEKLSVYARYTRRGGLDINPWRSNEEFTPELGRLSRQ

SEQ ID NO: 48675 - protein, 281 aa, Providencia rustigianii
  REGION 1..281: note = tr|D1P1D8|D1P1D8_9GAMM NADPH-dependent 7-cyano-7-deazaguanine reductase OS=Providencia rustigianii DSM 4541 OX=500637 GN=queF PE=3 SV=1
MPHYQNNPALDNLTLGKKTAYHDQYDASLLQAVPRSLNRDPLDIHANALPFHGADIWTLYELSWLNHRGVPQVAIGSVSIDATSENLVESKSFKLYLNSFNQTRFETWENVRSVLQNDLSYCANGGVKVTLYKLDDFTQQSIHQFHGECIDDQDIDIDNYEFNRQYLVDSTQPLLVEETLVSHLLKSNCLITNQPDWGSVQIHYRGSKINREALLRYLVSFRHHNEFHEQCVERIFNDITALCNPEKLSVYARYTRRGGLDINPWRSNEQFTPDMGRLARQ

SEQ ID NO: 48676 - protein, 281 aa, Providencia rustigianii; identical to SEQ ID NO: 48675
  REGION 1..281: note = tr|A0A379G6W6|A0A379G6W6_9GAMM NADPH-dependent 7-cyano-7-deazaguanine reductase OS=Providencia rustigianii OX=158850 GN=queF PE=3 SV=1

SEQ ID NO: 48677 - protein, 281 aa, Providencia sneebia
  REGION 1..281: note = tr|K8WJK1|K8WJK1_9GAMM NADPH-dependent 7-cyano-7-deazaguanine reductase OS=Providencia sneebia DSM 19967 OX=1141660 GN=queF PE=3 SV=1
MSHYQNNPALDNLTLGKKTAYHDQYDPNLLQAVPRSLNRTPLNIDAQDLPFHGADIWTLYEISWLNKKGVPQVAIGSVSIDAQSENLVESKSFKLYLNSFNQTRYETWENVRSTLENDLARCANGKVSVKLHKLNEFSQQMIQPFDGICLDDQDIEIDNYEFSRDYLVNSTEADIVEETLVSHLLKSNCLITNQPDWGSVQIHYSGPKINREALLRYLVSFRHHNEFHEQCVERIFNDITQLCQPEKLTVYARYTRRGGLDINPWRSNTHFIPEIGRLARQ

SEQ ID NO: 48678 - protein, 281 aa, Providencia sp.
  REGION 1..281: note = tr|A0A345M1L4|A0A345M1L4_9GAMM NADPH-dependent 7-cyano-7-deazaguanine reductase OS=Providencia sp. WCHPHu000369 OX=2027290 GN=queF PE=3 SV=1
MSHYQNNPALNNLTLGKKTAYHDQYDATLLQAVPRSLNRDPLAIHAKALPFHGADIWTMYELSWLNQRGVPQVAIGSVSVDANSENLIESKSFKLYLNSFNQTRFETWENVRSALQNDLSHCANGQVSVTLHKLAHFSHQPIQPLLGECIDEQEIDIDNYEFNRDYLANCTQQQVVDETLVSHLLKSNCLITNQPDWGSVQIHYRGPKIDREALLRYLVSFRHHNEFHEQCVERIFTDIMQLCKPEKLSVYARYTRRGGLDINPWRSNEEFKPELGRLSRQ

SEQ ID NO: 48679 - protein, 281 aa, Providencia sp.
  REGION 1..281: note = tr|A0A356D6L1|A0A356D6L1_PROSP NADPH-dependent 7-cyano-7-deazaguanine reductase OS=Providencia sp. OX=589; GN = queF PE=3 SV=1
MSHYQNNPALDNLTLGKKTAYIDQYDPTLLQAVPRSLNREPLAIRNDALPFQGADIWTLYELSWLNPKGLPQVAIGSISVNANSDNLIESKSFKLYLNSFNQTKFETWENVRSVLQSDLSYCANGEVSVTLHKLDDFSQQTIHQFNGICIDEQDIDIDNYEFSRHYLADCTQSEIVEETLVSHLLKSNCLITNQPDWGSVQIHYRGPKINHEALLRYLISFRHHNEFHEQCVERIFNDITQLCKPEKLSVYARYTRRGGLDINPWRSNEQFKPQTGRLARQ

SEQ ID NO: 48680 - protein, 195 aa, Providencia stuartii
  REGION 1..195: note = tr|A0A140NMX7|A0A140NMX7_PROSM NADPH-dependent 7-cyano-7-deazaguanine reductase OS=Providencia stuartii (strain MRSN 2154) OX=1157951 GN=queF PE=3 SV=1
MIESKSFKLYLNSFNQTRYDSWENVRSVLQNDLSNCANGKVSVTLHKLDEFSQQAICQFEGICIDEQDIEINQYEFSRDYLANSTENENVEETLVSHLLKSNCLITNQPDWGSVQIRYRGPKINREALLRYLVSFRHHNEFHEQCVERIFNDITQLCKPEQLSVYARYTRRGGLDINPWRSNTQFTPEIGRLARQ

SEQ ID NO: 48681 - protein, 281 aa, Providencia stuartii
  REGION 1..281: note = tr|A0A379GQP8|A0A379GQP8_PROST NADPH-dependent 7-cyano-7-deazaguanine reductase OS=Providencia stuartii; OX = 588 GN=queF PE=3 SV=1
MSHYQNNPALDNLTLGKKTAYYDQYDPSLLQAVPRSLNRDPLDIHADSLPFHGADIWTLYELSWLNKKGVPQVAIGSVHVDAQSENLIESKSFKLYLNSFNQTRYDSWENVRSVLQNDLSNCANGKVGVTLHKLDEFSQQAICQFEGICIDEQDIEINQYEFSRDYLANSTENENVEETLVSHLLKSNCLITNQPDWGSVQIRYRGPKINREALLRYLVSFRHHNEFHEQCVERIFNDITQLCKPEQLSVYARYTRRGGLDINPWRSNTQFTPEIGRLARQ

SEQ ID NO: 48682 - protein, 143 aa, unidentified
  source 1..143: note = Unknown
  REGION 1..143: note = tr|A0A368DXU8|A0A368DXU8_9PROT NADPH-dependent 7-cyano-7-deazaguanine reductase OS=PS1 clade bacterium; OX = 2175152 GN=queF PE=3 SV=1
MLGQQTPMPNSPDEAVLERVPNPHPDTIYVARFAVPEFTSICPKTGQPDFARLIIDYVPEKYLVESKSFKLFMGSFRNHGAFHEDCTIEIAKRLITCMEPRWLRIGGYWYPRGGIPIDVFYQTGDPPADLYIPAQDVAPYTGR

SEQ ID NO: 48683 - protein, 285 aa, Pseudacidovorax intermedius
  REGION 1..285: note = tr|A0A370FCH6|A0A370FCH6_9BURK NADPH-dependent 7-cyano-7-deazaguanine reductase OS=Pseudacidovorax intermedius OX=433924 GN=queF PE=3 SV=1
MSLDNTPEQSQLGRASAYVDRYDPSLLFPLPRALQREEMGIDTQRLPFFGADLWTAFELSWLNPRGKPQLAIAHFTVPCETPNIIESKSFKLYLNSFNSSTFTDAEAVRERLRTDLGEAVWRGSERSGSVGVRLLPPAQFEAERVEELQGLDLDRLDVDCSDYAPNPALLRTVPGEPSVNETLTSRLLKSNCRVTGQPDWGSVQISYSGPPIDQEGLLRYIVSFRNHNEFHEPCAERIFTDIWRRCAPTRLAVYCRYTRRGGLDINPFRTSWPQALPPNIRTARQ

SEQ ID NO: 48684 - protein, 285 aa, Pseudacidovorax intermedius
  REGION 1..285: note = tr|A0A147GY27|A0A147GY27_9BURK NADPH-dependent 7-cyano-7-deazaguanine reductase OS=Pseudacidovorax intermedius OX=433924 GN=queF PE=3 SV=1
MSLDTTPEQSQLGRASAYADRYDPALLFPLPRAPQRIEMGIDGPRLPFFGADLWTAFELSWLNPRGKPQLAIVHFTVPCETPNIIESKSFKLYLNSFNSSTFADAEAVRERLRADLAEALWRGSERAGSVGVKLLAPAQFAAERVAELEGLDLDRLDVDCTDYQPRPELLRTVPGEPAVNETLASRLLKSNCRVTGQPDWGSVQISYSGAPIDQEGLLRYIVSFRNHNEFHEPCAERIFTDIWQRCAPTRLAVYCRYTRRGGLDINPFRTSWPQALPPNLRTARQ

SEQ ID NO: 48685 - protein, 285 aa, Pseudacidovorax sp.
  REGION 1..285: note = tr|A0A1N7BCU6|A0A1N7BCU6_9BURK NADPH-dependent 7-cyano-7-deazaguanine reductase OS=Pseudacidovorax sp. RU35E OX=1907403 GN=queF PE=3 SV=1
MSLDNTPEQSQLGRASAYVDRYDPSLLFPLPRALQREEMGIDTQRLPFFGADLWTAFELSWLNPRGKPQLAIAHFTVPCETPNIIESKSFKLYLNSFNSSTFADAEAVRERLRADLGEAVWRGSERSGSVGVKLLAPAQFEAERVEELAGLDLDRLDVDCTDYEPRPELLRTVPGEPAVNETLTSRLLKSNCRVTGQPDWGSVQISYSGPPIDQEGLLRYIVSFRNHNEFHEPCAERIFTDIWRRCGPTRLAVYCRYTRRGGLDINPFRTSWPQALPPNLRTARQ

SEQ ID NO: 48686 - protein, 153 aa, unidentified
  source 1..153: note = Pseudaminobacter manganicus
  REGION 1..153: note = tr|A0A1V8RUS1|A0A1V8RUS1_9RHIZ NADPH-dependent 7-cyano-7-deazaguanine reductase OS=Pseudaminobacter manganicus OX=1873176 GN=queF PE=3 SV=1
MTETSELTQLGAKVETPDSPDRAVLETVPYTHGDGPPAIVRFTCPEFTSLCPVTGQPDFAHIVIDYAPDSLLVESKSLKLFLTTFRNHGAFHEDCTVMIARRIVSVTKPLWLRIAGYWYPRGGMPIDVFWQTGTPPKDAWLPDTGVAPYRGRG

SEQ ID NO: 48687 - protein, 153 aa, Pseudaminobacter sp.
  REGION 1..153: note = tr|A0A432V1S6|A0A432V1S6_9RHIZ NADPH-dependent 7-cyano-7-deazaguanine reductase OS=Pseudaminobacter sp. CB3 OX=1851146 GN=queF PE=3 SV=1
MTITDSLTQLGTHVATPTSPETAVLETVPYSRPGGPPAIVRFTCPEFTSLCPVTGQPDFAHIVIDYAPKAALVESKSLKLFLTSFRNHGAFHEDCTIMIGKRVVEATKPLWLRIAGYWFPRGGIPIDVFWQTGTPPEGAWLPDTGVPPYRGRG

SEQ ID NO: 48688 - protein, 128 aa, unidentified
  source 1..128: note = Pseudanabaena biceps
  REGION 1..128: note = tr|L8N695|L8N695_9CYAN NADPH-dependent 7-cyano-7-deazaguanine reductase OS=Pseudanabaena biceps PCC 7429 OX=927668 GN=queF PE=3 SV=1
MTVKYGEQAIAEATLTTFPNPRIGRDYNIQLTLPEYTCKCPFSGYPDFATIHITYTPNLLLVELKAIKLYINSYRDRFISHEEAVNQILDDFVKASDPLRINVKGDFSPRGNVHTLVEVNYTKPQETI

SEQ ID NO: 48689 - protein, 127 aa, unidentified
  source 1..127: note = Pseudanabaena frigida
  REGION 1..127: note = tr|A0A2W4W0B1|A0A2W4W0B1_9CYAN NADPH-dependent 7-cyano-7-deazaguanine reductase OS=Pseudanabaena frigida; OX = 945775 GN=queF PE=3 SV=1
MTVKYGEQAIAEATLTTFPNPRIGRDYSVQITLPEYTCKCPFSGYPDFATIYITYTPNQVLVELKAIKLYINSYRDRFISHEESVNQILDDFVKAGDPLRINVKGDFSPRGNVHTVVEVNYTKPVSN

SEQ ID NO: 48690 - protein, 128 aa, Pseudanabaena sp.
  REGION 1..128: note = tr|A0A256BM85|A0A256BM85_9CYAN NADPH-dependent 7-cyano-7-deazaguanine reductase OS=Pseudanabaena sp. SR411 OX=1980935 GN=queF PE=3 SV=1
MTVKYGEQAIAEANLTTFPNPRIGRDYTIQITLPEFTSKCPFSGYPDFATIYITYTPNLVLVELKAIKLYINSYRDRFISHEEAVNQILDDFVKAGDPLRINVKGDFTPRGNVHTVVEVNYSKPQETI

SEQ ID NO: 48691 - protein, 124 aa, Pseudanabaena sp.
  REGION 1..124: note = tr|A0A2W7AWB3|A0A2W7AWB3_9CYAN NADPH-dependent 7-cyano-7-deazaguanine reductase OS=Pseudanabaena sp.; OX = 1153 GN=queF PE=3 SV=1
MTVKYGEQAIAEANLTTFPNPRIGRDYNIQITLPEFTSKCPFSGYPDFATIYISYTPNLLLVELKAIKLYINSYRDRFISHEESVNQILDDFVKAGDPLRINVKGDFTPRGNVHTVVEVNYTKP

SEQ ID NO: 48692 - protein, 282 aa, unidentified
  source 1..282: note = Pseudescherichia vulneris
  REGION 1..282: note = tr|A0A090UXK3|A0A090UXK3_PSEVU NADPH-dependent 7-cyano-7-deazaguanine reductase OS=Pseudescherichia vulneris NBRC 102420 OX=1115515 GN=queF PE=3 SV=1
MSSSYDNHQALAGLTLGKTTRYRDTYDATLLQGVPRSLNRDPLGLHADSLPFHGGDIWTLYELSWLNANGLPQVAVGHVELDYASVNLVESKSFKLYLNSFNQTRFSSWEEVRTTLERDLSACAQGKVSVMLYALDELEGQPIAHFNGKCIDNQDIVIDDYQFNADYLQNAAGGSVVEETLVSHLLKSNCLITHQPDWGSVQIQYRGPQIDREKLLRYLVSFRHHNEFHEQCVERIFNDLLRFCQPETLSVYARYTRRGGLDINPWRSNTDFQPATGRLVRQ

SEQ ID NO: 48693 - protein, 276 aa, unidentified
  source 1..276: note = Pseudidiomarina sp.
  REGION 1..276: note = tr|A0A443Z6C7|A0A443Z6C7_9GAMM NADPH-dependent 7-cyano-7-deazaguanine reductase OS=Pseudidiomarina sp. R04H25 OX=2487740 GN=queF PE=3 SV=1
MKQPLAHLNLGQPTQYPTQYDASLLQAVPRQLNRTPIGLAESISLPFHGDDIWHGYELSWLNTLGVPQVAVAEFRVPATSTNLVESKSFKLYLNSFNDSRWDSWHAVQQQLAEDLSACAGGQVSVRLDTVQQAQQAPFSDLPGLCIDAQDIRIDSYEYNPELLSLRDNQVIDETLHSHLLKSNCLITNQPDWGSVLIRYRGPAIDHAALLRYIVSFRHHNEFHEQCVERLYMDIKTRLKPEQLTVYARYTRRGGLDINPFRSDFEQTPQSVRLSRQ

SEQ ID NO: 48694 - protein, 281 aa, unidentified
  source 1..281: note = Pseudoalteromonadaceae bacterium
  REGION 1..281: note = tr|A0A2D7N2H3|A0A2D7N2H3_9GAMM NADPH-dependent 7-cyano-7-deazaguanine reductase OS=Pseudoalteromonadaceae bacterium OX=2026783 GN=queF PE=3 SV=1
MTDYSNSPDLKGSVLGQSTEYVDVYSPSLLFPIARKLNRDALNIDEAELPFKGQDIWTGYELSWLNAKGKPQVAVALFTFACQSSHIIESKSFKLYLNSFNQTRFESIEVVKQHLIEDLSNAVNSDVAVTLYAPDDYNCLPCTPLPGQCIDDLDIEIDNYDIDAYSLKSKSDTLVTETLHSHLLKSNCLITSQPDWASIIIRYTGEQICHEALLRYLISFRTHNEFHEQCVERIYSDLTTQLNIKELEVYARYTRRGGLDINPYRSTHYNDTPFAVKINRQ

SEQ ID NO: 48695 - protein, 281 aa, Pseudoalteromonas agarivorans
  REGION 1..281: note = tr|A0A290RPN9|A0A290RPN9_9GAMM NADPH-dependent 7-cyano-7-deazaguanine reductase OS=Pseudoalteromonas agarivorans DSM 14585 OX=1312369 GN=queF PE=3 SV=1
MTDYSNSPDLKGSVLGQSTEYVDVYSPSLLFPIARKLNRDALNIDEAELPFKGQDIWTGYELSWLNAKGKPQVAVALFTFACQSSHIIESKSFKLYLNSFNQTRFESIEVVKQHLIKDLSNAVNSDVAVTLYAPDDYNCLPCTPLPGQCIDDLDIEIDNYDIDAYSLKSKSDTLVTETLHSHLLKSNCLITSQPDWASIIIRYTGEQICHEALLRYLISFRTHNEFHEQCVERIYSDLTTQLNIKELEVYARYTRRGGLDINPYRSTHYNDTPFAVKINRQ

SEQ ID NO: 48696 - protein, 281 aa, Pseudoalteromonas agarivorans
  REGION 1..281: note = tr|N6WBA7|N6WBA7_9GAMM NADPH-dependent 7-cyano-7-deazaguanine reductase OS=Pseudoalteromonas agarivorans S816 OX=1307437 GN=queF PE=3 SV=1
MTDYSNSPDLKGSVLGQSTEYVDVYSPSLLFPIARKLNRDALNIDEAELPFKGQDIWTGYELSWLNAKGKPQVAVALFTFACQSSHIIESKSFKLYLNSFNQTRFESTEVVRQHLIKDLSNAVNSDVAVTLYAPDDYNCLPCTPLPGQCIDDLDIEIDNYDIDAYSLKSKSDTLVTETLHSHLLKSNCLITSQPDWASIIIRYTGEQICHEALLRYLISFRTHNEFHEQCVERIYSDLTTQLNIKELEVYARYTRRGGLDINPYRSTHYNDTPFAVKINRQ

SEQ ID NO: 48697 - protein, 281 aa, Pseudoalteromonas aliena
  REGION 1..281: note = tr|A0A1Q2H0M0|A0A1Q2H0M0_9GAMM NADPH-dependent 7-cyano-7-deazaguanine reductase OS=Pseudoalteromonas aliena OX=247523 GN=queF PE=3 SV=1
MTDYSNSPDLKGSVLGQSTEYVDVYTPSLLFPIARKLNRDALNIDEAALPFKGQDIWTGYELSWLNAKGKPQVAVALFIFECQSSHIIESKSFKLYLNSFNQTRFESIEVVKQHLIDDLSSAVNSPVKVTLYKADEFNCLPCTPLPGECIDDLDIEIDNYHIDAHSLKSQRDELVTETLHSHLLKSNCLITSQPDWASIIIRYTGEKVCRESLLRYLISFRTHNEFHEQCVERIYSDLTTQLNIKELEVYARYTRRGGLDINPYRSTHYNDTPFAVKINRQ

SEQ ID NO: 48698 - protein, 281 aa, unidentified
  source 1..281: note = Pseudoalteromonas amylolytica
  REGION 1..281: note = tr|A0A1S1MUW7|A0A1S1MUW7_9GAMM NADPH-dependent 7-cyano-7-deazaguanine reductase OS=Pseudoalteromonas amylolytica OX=1859457 GN=queF PE=3 SV=1
MTDYTNAPELKASVLGKTTEYASQYDASLLHPIARKLNRDQIGVEESALPFKGEDTWTGYELSWLNLKGKPQVAVASFVFPCQSSHIIESKSFKLYLNSFNQSRFESAEAVQNILTKDLSKAANTQVKVTLYKASDYACLPFTQMPGECIDDLDIDVDIYSPQAGILKAASTNIVTQTLHSHLLKSNCLITSQPDWASIVISYTGTQVCRESLLRYLISFRSHNEFHEQCVERIYCELMNTFDFEKLDVYARYTRRGGLDINPYRSSDQDSTAYQIRTNRQ

SEQ ID NO: 48699 - protein, 281 aa, Pseudoalteromonas arctica
  REGION 1..281: note = tr|A0A290S224|A0A290S224_9GAMM NADPH-dependent 7-cyano-7-deazaguanine reductase OS=Pseudoalteromonas arctica A 37-1-2 OX=1117313 GN=queF PE=3 SV=1
MTDYSNSPDLKGSVLGQSTEYVDVYTPSLLFPIARKLNRDALNIDEAELPFKGQDIWTGYELSWLNNKGKPQVAVALFTFECQSSHIIESKSFKLYLNSFNQTRFESIDIVKQHLIDDLSNAVNSTVKVTLYNPDDYNCLPCTALPGECIDDLDIEINNYDIDANSLKAKSDNVVTETLYSHLLKSNCLITSQPDWASVIIRYTGEQICRESLLRYLISFRTHNEFHEQCVERIYSDLTTQLNIKELEVYARYTRRGGLDINPYRSTHYNDTPFAVKINRQ

SEQ ID NO: 48700 - protein, 279 aa, Pseudoalteromonas atlantica
  REGION 1..279: note = tr|Q15QY9|Q15QY9_PSEA6 NADPH-dependent 7-cyano-7-deazaguanine reductase OS=Pseudoalteromonas atlantica (strain T6c / ATCC BAA-1087) OX=342610 GN=queF; PE = 3 SV=1
MQDKSLPSDILSSLTLGKATQYKEHYSPELLQGVPRSLNRDELNLGDTLPFKGVDRWNGYELSWLNLKGKPEVAILRCEIPCESVNLIESKSFKLYLNSFNQSKIESILHVQKMISKDLSACAGLPVNVQLFARETFPGLQLGTLEAQCIDDLDISVDNYDLAPSILQVEEEQVQETLCSHLLKSNCLITNQPDWGSVLIRYHGRKIDQESVLRYLISFRQHNEFHEQCVERIFSDIMRYCEPQKLTVYARYTRRGGLDINPFRSNFESIYPELRLARQ

SEQ ID NO: 48701 - protein, 281 aa, Pseudoalteromonas atlantica
  REGION 1..281: note = tr|A0A510ZK23|A0A510ZK23_PSEAF NADPH-dependent 7-cyano-7-deazaguanine reductase OS=Pseudoalteromonas atlantica OX=288 GN=queF PE=3 SV=1
MTDYSNSPDLKGSVLGQSTEYVDVYSPSLLFPIARKLNRDALNIDEAELPFKGQDIWTGYELSWLNAKGKPQVAVALFTFACQSSHIIESKSFKLYLNSFNQTRFESIEVVRQHLIEDLSNAVNSDVAVTLYAPDDYNCLPCTPLPGQCIDDLDIEIDNYDIDAYSLKSKSDTLVTETLHSHLLKSNCLITSQPDWASIIIRYTGEQICHEALLRYLISFRTHNEFHEQCVERIYSDLTTQLNIKELEVYARYTRRGGLDINPYRSTHYNDTPFAVKINRQ

SEQ ID NO: 48702 - protein, 281 aa, Pseudoalteromonas byunsanensis
  REGION 1..281: note = tr|A0A1S1N6H6|A0A1S1N6H6_9GAMM NADPH-dependent 7-cyano-7-deazaguanine reductase OS=Pseudoalteromonas byunsanensis OX=327939 GN=queF PE=3 SV=1
MTDYTNAPELKASVLGKTTEYASHYDATLLHPIARKLNRDQIGVDESALPFKGEDSWTGYELSWLNLKGKPQVAVASFVFPCQSSHIIESKSFKLYLNSFNQSQFESAAKVQAILTQDLSNAANTQVEVTLYKADDYACLPFTKMPGECIDDLDIEVDIYSPQAGILKGTGENKVSETLHSHLLKSNCLITSQPDWASIVISYTGTQVCRESLLRYLISFRSHNEFHEQCVERIYCELMNTFTFEKLDVYARYTRRGGLDINPYRSSDQDKTPFQIRINRQ

SEQ ID NO: 48703 - protein, 281 aa, Pseudoalteromonas carrageenovora
  REGION 1..281: note = tr|A0A2K4XAK5|A0A2K4XAK5_PSEVC NADPH-dependent 7-cyano-7-deazaguanine reductase OS=Pseudoalteromonas carrageenovora IAM 12662 OX=1314868 GN=queF PE=3 SV=1
MTDYSNSPDLKGSVLGQSTEYVDDYTPSLLFPIARKLNRDALNIDEAELPFKGQDIWTGYELSWLNAKGKPQVAVALFTFECQSSHIIESKSFKLYLNSFNQTRFESNKVVKQHLIDDLSNAVNSPVKVTLYSPDDYNCLPCTALPGECIDDLDIEIDNYDIDAYSLKAQSDTVVTETLHSHLLKSNCLITSQPDWASIIIRYTGEKICRESLLRYLISFRTHNEFHEQCVERIYSDLTTQLNIKELEVYARYTRRGGLDINPYRSTHYNDTPFAVKINRQ

SEQ ID NO: 48704 - protein, 281 aa, Pseudoalteromonas citrea
  REGION 1..281: note = tr|U1JJ08|U1JJ08_9GAMM NADPH-dependent 7-cyano-7-deazaguanine reductase OS=Pseudoalteromonas citrea DSM 8771 OX=1117314 GN=queF PE=3 SV=1
MTDYTNAPELKASILGKTTDYAQQYDASLLYPIPRKLNRDQISVDEADLPFLGEDTWTGYELSWLNAKGKPQVAVATFIFPCQSSHIVESKSFKLYLNSFNQTRFTDQKTVLDTLTKDLSAVTHSEVEVVLYKANDHDCIAFTSMPGQCIDDLDIEVEHYSPIENMLKQKSSDIVSETLHSHLLKSNCLITSQPDWATIIIEYTGVAVCHESLLRYLISFRSHNEFHEQCVERIYCELQRTFAFEKLAVYARYTRRGGLDINPYRSNEHNKTPYAIRTNRQ

SEQ ID NO: 48705 - protein, 282 aa, Pseudoalteromonas denitrificans
  REGION 1..282: note = tr|A0A1I1MSQ9|A0A1I1MSQ9_9GAMM NADPH-dependent 7-cyano-7-deazaguanine reductase OS=Pseudoalteromonas denitrificans DSM 6059 OX=1123010 GN=queF PE=3 SV=1
MTAYDNSEELKGTLLGQQTEYKDQYAPELLFPIARKLNRDELNVIDSDLPFKGQDLWTGYELSWLNTKGKPQVAVAEFIFPCQSSHLVESKSFKLYLNSFNQTRFNDLNTVQKHLIDDLSKTVNNQVEVKLYTASDFSAIKTTPLPGICIDDLDIEIDQYQLNSTLLKLEDDHSQVTETLHSHLLKSNCLITSQPDWASIVIRYTGMKICHESLLRYLISFRSHNEFHEQCVERIYCDIQNKLGIKELEVYARYTRRGGLDINPYRSSMQNKIPFVIKTNRQ

SEQ ID NO: 48706 - protein, 281 aa, Pseudoalteromonas distincta
  REGION 1..281: note = tr|F3BF33|F3BF33_9GAMM NADPH-dependent 7-cyano-7-deazaguanine reductase OS=Pseudoalteromonas distincta OX=77608 GN=queF PE=3 SV=1
MTDYSNSPDLKGSVLGQSTEYVDVYTPSLLFPIARKLNRDALNIDEAELPFKGQDIWTGYELSWLNTKGKPQVAVALFTFECQSSHIIESKSFKLYLNSFNQTRFESIDVVKQHLIDDLSNAVNSPVKVTLYNPDDYNCLPCTALPGECIDDLDIEINNYDIDANSLKAKSDEVVTETLYSHLLKSNCLITSQPDWASVIIRYTGEQICRESLLRYLISFRTHNEFHEQCVERIYSDLTTQLNIKELEVYARYTRRGGLDINPYRSTHYNDTPFAVKINRQ

SEQ ID NO: 48707 - protein, 281 aa, Pseudoalteromonas distincta
  REGION 1..281: note = tr|A0A5B0UL38|A0A5B0UL38_9GAMM NADPH-dependent 7-cyano-7-deazaguanine reductase OS=Pseudoalteromonas distincta OX=77608 GN=queF PE=3 SV=1
MTDYSNSPDLKGSVLGQSTEYVDVYTPSLLFPIARKLNRDALNIDEAELPFKGQDIWTGYELSWLNNKGKPQVAVALFTFECQSSHIIESKSFKLYLNSFNQTRFESIDVVKQHLIDDLSNAVNSPVKVTLYNPDDYNCLPCTALPGECIDDLDIEINNYDIDANSLKAKSDNVVTETLYSHLLKSNCLITSQPDWASVIIRYTGEQICRESLLRYLISFRTHNEFHEQCVERIYSDLTTQLNIKELEVYARYTRRGGLDINPYRSTHYNDTPFAVKINRQ

SEQ ID NO: 48708 - protein, 281 aa, Pseudoalteromonas elyakovii
  REGION 1..281: note = tr|A0A558I2E2|A0A558I2E2_9GAMM NADPH-dependent 7-cyano-7-deazaguanine reductase OS=Pseudoalteromonas elyakovii OX=81037 GN=queF PE=3 SV=1
MTDYSNSPDLKGSVLGQSTEYVDVYTPSLLFPIARKLNRDALNIDEAELPFKGQDIWTGYELSWLNTKGKPQVAVALFTFECQSSHIIESKSFKLYLNSFNQTRFESIDVVKQHLIDDLSNAVNSPVKVTLYNPDDYNCLPCTALPGECIDDLDIEINNYDIDANSLKAKNDNVVTETLYSHLLKSNCLITSQPDWASVIIRYTGEQICRESLLRYLISFRTHNEFHEQCVERIYSDLTTQLNIKELEVYARYTRRGGLDINPYRSTHYNDTPFAVKINRQ

SEQ ID NO: 48709 - protein, 281 aa, Pseudoalteromonas espejiana
  REGION 1..281: note = tr|A0A510Y1A8|A0A510Y1A8_9GAMM NADPH-dependent 7-cyano-7-deazaguanine reductase OS=Pseudoalteromonas espejiana OX=28107 GN=queF PE=3 SV=1
MTDYSNSPDLKGSVLGQSTEYVDVYSPSLLFPIARKLNRDALNIDEAELPFKGQDIWTGYELSWLNAKGKPQVAVALFTFACQSSHIIESKSFKLYLNSFNQTRFESVEVVKQHLIEDLSKAVNGDVNVTLYAPDDYNCLPCTALPGECIDDLDIEIDNYDIDAYSLKSQSESVVSETLYSHLLKSNCLITSQPDWASIIIRYTGEKICRESLLRYLISFRTHNEFHEQCVERIYSDLTTQLNIKELEVYARYTRRGGLDINPYRSTHYNDTPFAVKINRQ

SEQ ID NO: 48710 - protein, 281 aa, unidentified
  source 1..281: note = Pseudoalteromonas fuliginea
  REGION 1..281: note = tr|A0A063L0M0|A0A063L0M0_9GAMM NADPH-dependent 7-cyano-7-deazaguanine reductase OS=Pseudoalteromonas fuliginea OX=1872678 GN=queF PE=3 SV=1
MTDYSNSPDLKGSVLGQSTEYVDVYTPSLLFPIARKLNRDALNIDEAELPFKGQDIWTGYELSWLNNKGKPQVAVALFTFECQSSHIIESKSFKLYLNSFNQTRFESIDIVKQHLIDDLSNAVNSPVKVTLYNPDDYNCLPCTALPGECIDDLDIEINNYDIDANSLKAKNDNVVTETLYSHLLKSNCLITSQPDWASVIIRYTGEQICRESLLRYLISFRTHNEFHEQCVERIYSDLTTQLNIKELEVYARYTRRGGLDINPYRSTHYNDTPFAVKINRQ

SEQ ID NO: 48711 - protein, 281 aa, unidentified; identical to SEQ ID NO: 48707
  source 1..281: note = Pseudoalteromonas fuliginea
  REGION 1..281: note = tr|A0A5B0UYQ8|A0A5B0UYQ8_9GAMM NADPH-dependent 7-cyano-7-deazaguanine reductase OS=Pseudoalteromonas fuliginea OX=1872678 GN=queF PE=3 SV=1

SEQ ID NO: 48712 - protein, 281 aa, Pseudoalteromonas haloplanktis
  REGION 1..281: note = sp|Q3IIT0|QUEF_PSEHT NADPH-dependent 7-cyano-7-deazaguanine reductase OS=Pseudoalteromonas haloplanktis (strain TAC 125) OX=326442 GN=queF PE=3 SV=1
MTDYSNSPDLKGSVLGQSTEYIDQYTPSLLFPIARKLNRDALNIDEAALPFKGQDIWTGYELSWLNAKGKPQVAIAVFTFACQSSHLVESKSFKLYLNSFNQTRFNSRDEVKQHLVKDLTAVVNSLVQVTLYNADEYNCLPYTPLPGECIDDLDIEIDNYDIDAHSLKSQSNKTVTETLHSHLLKSNCLITSQPDWASVIIRYTGEQICRESLLRYLISFRTHNEFHEQCVERIYSDLSTQLSIKNLEVYARYTRRGGLDINPYRSTHNNDTPFAVKINRQ

SEQ ID NO: 48713 - protein, 281 aa, Pseudoalteromonas issachenkonii
  REGION 1..281: note = tr|A0A290SHT2|A0A290SHT2_9GAMM NADPH-dependent 7-cyano-7-deazaguanine reductase OS=Pseudoalteromonas issachenkonii OX=152297 GN=queF PE=3 SV=1
MTDYSNSPDLKGSVLGQSTEYVDQYTPSLLFPIARKLNRDSLSIDETALPFKGQDIWTGYELSWLNTKGKPQVAVALFTFECQSSHIIESKSFKLYLNSFNQSRFGSIEIVKQHLIDDLSNAVNSPVKVTLYSADDYNCIPCTPLPGECIDELDIEIDNYHIDAHSLKSQSNKIVTETLHSHLLKSNCLITSQPDWASIIIRYTGEQVCRESLLRYLISFRTHNEFHEQCVERIYSDLTTQLHIKELEVYARYTRRGGLDINPYRSTHYNETPFSVKINRQ

SEQ ID NO: 48714 - protein, 281 aa, Pseudoalteromonas lipolytica
  REGION 1..281: note = tr|A0A0P7DUH3|A0A0P7DUH3_9GAMM NADPH-dependent 7-cyano-7-deazaguanine reductase OS=Pseudoalteromonas lipolytica OX=570156 GN=queF PE=3 SV=1
MTDYSNSPELKNSVLGKSTEYVDTYTPSLLFPIARKLNRDALGVSEDNLPFKGQDIWTGYELSWLNSKGKPMVAVATFVFPCQSSHIIESKSFKLYLNSFNQTRFETPDDVHQALSKDLSDAVNAPVIVTLYQADDFNCLPFSALPGECIDDLDIEITSYDIDASSLRHNGDEIVSETLHSHLLKSNCLITSQPDWASVIIRYKGQAICHEALLKYLISFRTHNEFHEQCVERIYCDLMQQLNLEELEVYARYTRRGGLDINPYRSTNQDETPFKVKINRQ

SEQ ID NO: 48715 - protein, 281 aa, Pseudoalteromonas lipolytica
  REGION 1..281: note = tr|Z5XRV9|Z5XRV9_9GAMM NADPH-dependent 7-cyano-7-deazaguanine reductase OS=Pseudoalteromonas lipolytica SCSIO 04301 OX=1452721 GN=queF PE=3 SV=1
MTDYSNSPELKNSVLGKSTDYVDTYTPSLLFPIARKLNRDALGVSEDNLPFKGQDIWTGYELSWLNSKGKPMVAVATFVFPCQSSHIIESKSFKLYLNSFNQTRFASTEEVHQALTRDLSAAVNANVNVTLYRADDHNCLPFSALPGECIDDLDIEISSYDIDATSLCHSHDEKVSETLHSHLLKSNCLITSQPDWASVIIRYTGQAISHEALLKYLISFRTHNEFHEQCVERIYCDLMQHLNIDELEVYARYTRRGGLDINPYRSTNQDATPFNVKINRQ

SEQ ID NO: 48716 - protein, 281 aa, Pseudoalteromonas luteoviolacea
  REGION 1..281: note = tr|A0A161YT11|A0A161YT11_9GAMM NADPH-dependent 7-cyano-7-deazaguanine reductase OS=Pseudoalteromonas luteoviolacea CPMOR-1 OX=1365248 GN=queF PE=3 SV=1
MTDYNNAPELQASLLGKTTEYASAYDASLLHPIARKLNRDQIAVDEQALPFKGEDTWTGYELSWLNNKGKPQVAVATFVFPCQSSHIIESKSFKLYLNSFNQTRFESADDVHKHLTDDLSRAANCNVTVTLFGPDEYNCLPFTQLPGECIDDLDVNIDTYSPAEGMLMHANESEVSETLYSHLLKSNCLITSQPDWASIVIRYEGKQVCRASLLKYLISFRDHNEFHEQCVERIYCDLQRALQPSKLEVYARYTRRGGLDINPYRSSEQNTTGFNVRVNRQ

SEQ ID NO: 48717 - protein, 281 aa, Pseudoalteromonas luteoviolacea
  REGION 1..281: note = tr|A0A1C0TJJ8|A0A1C0TJJ8_9GAMM NADPH-dependent 7-cyano-7-deazaguanine reductase OS=Pseudoalteromonas luteoviolacea OX=43657 GN=queF PE=3 SV=1
MTDYNNAPELKASVLGKTTEYASQYDATLLHPIARKLNRDQISVDEKKLPFFGEDTWTGYELSWLNSKGKPQVAVATFTFPCQSSHIIESKSFKLYLNSFNQTRFDSQQTVQQHLSEDLSAAAQCQVIVKLYGPDEYNCLPFTSLPGTCIDDLDIEVDTYSPSEGMLSTASDECVNETLYSHLLKSNCLITSQPDWASIVISYEGNKVCRESLLKYLISFRDHNEFHEQCVERIFCDIKRALNPSKLEVYARYTRRGGLDINPFRSTEQDTTSFNIRVNRQ

SEQ ID NO: 48718 - protein, 281 aa, Pseudoalteromonas marina; identical to SEQ ID NO: 43946
  REGION 1..281: note = tr|U1KWM9|U1KWM9_9GAMM NADPH-dependent 7-cyano-7-deazaguanine reductase OS=Pseudoalteromonas marina DSM 17587 OX=1117316 GN=queF PE=3 SV=1

SEQ ID NO: 48719 - protein, 281 aa, unidentified
  source 1..281: note = Pseudoalteromonas neustonica
  REGION 1..281: note = tr|A0A558IGS1|A0A558IGS1_9GAMM NADPH-dependent 7-cyano-7-deazaguanine reductase OS=Pseudoalteromonas neustonica OX=1840331 GN=queF PE=3 SV=1
MTDYSNSPELKGSVLGQSTEYVDTYTPSLLFPIARKLNRDDLNIDESALPFKGQDLWTGYELSWLNAKGKPVVAVATFEFPCQSSHIIESKSFKLYLNSFNQSRFDSIDDVQAILTADLSTAVAKPVNVTLYSPSDYNCLPCTPLPGECIDDLDIEINNYHLHANSLQAVATNTVTETLHSHLLKSNCLITSQPDWASIIIRYTGEQVCKESLLRYLISFRTHNEFHEQCVERIYCDLITQLKITKLEVYARYTRRGGLDINPYRSTDHDTIPFNVKINRQ

SEQ ID NO: 48720 - protein, 281 aa, Pseudoalteromonas nigrifaciens; identical to SEQ ID NO: 48712
  REGION 1..281: note = tr|A0A379H8Z4|A0A379H8Z4_9GAMM NADPH-dependent 7-cyano-7-deazaguanine reductase OS=Pseudoalteromonas nigrifaciens OX=28109 GN=queF PE=3 SV=1

SEQ ID NO: 48721 - protein, 281 aa, Pseudoalteromonas peptidolytica
  REGION 1..281: note = tr|A0A510U3W0|A0A510U3W0_9GAMM NADPH-dependent 7-cyano-7-deazaguanine reductase OS=Pseudoalteromonas peptidolytica OX=61150 GN=queF PE=3 SV=1
MTDYNNSPELQSSVLGKTTEYASIYTPSLLHPIARKLNRDQIHVDETELPFKGEDTWTGYELSWLNTKGKPQVAVATFVFPCQSSHIIESKSFKLYLNSFNQSRFDSMEVVRQTLAEDLSAASNSEVNVTLFGAGDFDCIPFSSLPGECIDSLDIEVDTYTPDHNLLKLASDKVVQETLHSHLLKSNCLITSQPDWASIVISYQGKQIDKAALLKYLISFRDHNEFHEQCVERIYCELWRTFNPEKLSVYARYTRRGGLDINPYRSNEQNKTPYAVRTNRQ

SEQ ID NO: 48722 - protein, 281 aa, Pseudoalteromonas phenolica
  REGION 1..281: note = tr|A0A0S2K359|A0A0S2K359_9GAMM NADPH-dependent 7-cyano-7-deazaguanine reductase OS=Pseudoalteromonas phenolica OX=161398 GN=queF PE=3 SV=1
MTDYNNAPELKESVLGKTTEYASQYDASLLFPIARKLNRDQIAVDEQNLPFKGEDTWTGYELSWLNSKGKPQVAVAAFVFPCQSSHIIESKSFKLYLNSFNQTKFASFDEVQTILTNDLSKAAQTDVEVTLFKAEDYACIPFTAMPGECIDELDIEVDTYSPQEGLIVVKDGNEVTETLHSHLLKSNCLITSQPDWASIVISYTGKPVCKESLLKYLISFRDHNEFHEQCVERIYCDLMRELNPSKLEVYARYTRRGGLDINPYRSSESDKTAYHIRTNRQ

SEQ ID NO: 48723 - protein, 281 aa, Pseudoalteromonas phenolica
  REGION 1..281: note = tr|A0A4Q7IPI2|A0A4Q7IPI2_9GAMM NADPH-dependent 7-cyano-7-deazaguanine reductase OS=Pseudoalteromonas phenolica OX=161398 GN=queF PE=3 SV=1
MTDYNNAPELKVSVLGKTTEYASQYDASLLFPIARKLNRDQISVDEQNLPFKGEDTWTGYELSWLNAKGKPQVAVATFVFPCQSSHIIESKSFKLYLNSFNQTKFASFDEVQTILTNDLSKAAQTDVAVTLFKAEDYACIPFTAMPGECIDELDIEVDTYSPQEGLIEVKDGNEVTEILHSHLLKSNCLITSQPDWASIVVSYTGKPVCKESLLKYLISFRDHNEFHEQCVERIYCDLMRELKPSKLEVYARYTRRGGLDINPYRSSENDKTAYHIRTNRQ

SEQ ID NO: 48724 - protein, 282 aa, unidentified
  source 1..282: note = Pseudoalteromonas piratica
  REGION 1..282: note = tr|A0A0A7EGG8|A0A0A7EGG8_9GAMM NADPH-dependent 7-cyano-7-deazaguanine reductase OS=Pseudoalteromonas piratica OX=1348114 GN=queF PE=3 SV=1
MSHYQDAPELKGALLGQQTEYKDSYDASLLFPIARKLNRDDLNIDENALPFKGEDTWTGYELSWLNQKGKPVVAVAEFIFPATSSHIIESKSFKLYLNSFNQTKFDSMAEVEAVLTQDLSNAANCNVIVKLFNADHFDCLMPTPFNGICLDELDIEVSQYDLNTELLTADDNDEVVTETLYSHLLKSNCLITSQPDWASVVIRYTGKKINHESLLKYLISFRNHNEFHEQCVERLFCDLQCKFALSKLEVYARYTRRGGLDINPYRSTDYDTTQFTLKSNRQ

SEQ ID NO: 48725 - protein, 281 aa, Pseudoalteromonas piscicida
  REGION 1..281: note = tr|A0A290TSI8|A0A290TSI8_PSEO7 NADPH-dependent 7-cyano-7-deazaguanine reductase OS=Pseudoalteromonas piscicida OX=43662 GN=queF PE=3 SV=1
MTDYSNSPELQSSVLGKTTEYASVYTPSLLHPIARKLNRDQINVDESALPFKGEDTWTGYELSWLNNKGKPQVAVATFVFPCQSSHIIESKSFKLYLNSFNQSRFDTMETVRQTLAADLSTASNSQVSVTLFGADEFDCIPFSRLPGECIDELDIEVDSYTPNSDLLQLASEDVVDETLHSHLLKSNCLITSQPDWASVVISYHGKQIDREALLKYLISFRDHNEFHEQCVERIYCELWRTFNPEKLSVYARYTRRGGLDINPYRSSEQDQTPYAVRTNRQ

SEQ ID NO: 48726 - protein, 281 aa, Pseudoalteromonas piscicida
  REGION 1..281: note = tr|A0A2A5JNM6|A0A2A5JNM6_PSEO7 NADPH-dependent 7-cyano-7-deazaguanine reductase OS=Pseudoalteromonas piscicida OX=43662 GN=queF PE=3 SV=1
MTDYNNSPELQSSVLGKTTEYASVYTPSLLHPIARKLNRDQINVDGAALPFKGEDTWTGYELSWLNNKGKPQVAVATFVFPCQSAHIIESKSFKLYLNSFNQSRFESMETVRQTLAADLSAASNSEVKVTLFGADDFDCIPFSRLPGECIDELDIEVDTYTPNSDLLKLASDDIVEETLHSHLLKSNCLITSQPDWASVVISYRGKQIDRAALLRYLISFRDHNEFHEQCVERIYCELWRTFNPEKLSVYARYTRRGGLDINPYRSSEQDQTPYTVRTNRQ

SEQ ID NO: 48727 - protein, 281 aa, unidentified
  source 1..281: note = Pseudoalteromonas porphyrae
  REGION 1..281: note = tr|A0A0N1EKX1|A0A0N1EKX1_9GAMM NADPH-dependent 7-cyano-7-deazaguanine reductase OS=Pseudoalteromonas porphyrae OX=187330 GN=queF PE=3 SV=1
MTDYSNSPELKDSVLGQSTEYVDTYTPSLLFPIARKLNRDALDINEAALPFKGQDIWTGYELSWLNTKGKPVVAVASFIFPCQSSHIIESKSFKLYLNSFNQTRFDSIEDVKAILIADLSAGVSMPIDVVLYSPNDYNCLPCTPLPGECIDELDIQIDSYHLDAYSLKPASTNTVSETLHSHLLKSNCLITSQPDWASIIIRYTGEQVCKESLLRYLISFRTHNEFHEQCVERIYCDLMAQLNITELEVYARYTRRGGLDINPYRSTSHDNVPFAVKINRQ

SEQ ID NO: 48728 - protein, 281 aa, unidentified
  source 1..281: note = Pseudoalteromonas profundi
  REGION 1..281: note = tr|A0A3A3EGE5|A0A3A3EGE5_9GAMM NADPH-dependent 7-cyano-7-deazaguanine reductase OS=Pseudoalteromonas profundi OX=1774956 GN=queF PE=3 SV=1
MTDYSNSPELKNSVLGKSTEYVDTYTPSLLFPIARKLNRDALGVSEDNLPFKGQDIWTGYELSWLNSKGKPMVAVATFVFPCQSSHIIESKSFKLYLNSFNQTRFETQGDVHQALSKDLSAAVNAPVIVTLYQADDFNCLPFTALPGECIDDLDIEITSYDIDASSLRHNGDEVVSETLHSHLLKSNCLITSQPDWASVIIRYKGQAICHEALLKYLISFRTHNEFHEQCVERIYCDLMQQLNLEELEVYARYTRRGGLDINPYRSTNQDETPFKVKINRQ

SEQ ID NO: 48729 - protein, 281 aa, Pseudoalteromonas rubra
  REGION 1..281: note = tr|A0A0F4QFD6|A0A0F4QFD6_9GAMM NADPH-dependent 7-cyano-7-deazaguanine reductase OS=Pseudoalteromonas rubra OX=43658 GN=queF PE=3 SV=1
MTDYNNAPELKASVLGKTTEYASQYDPSLLHPIARKLNRDQIAVDEQALPFFGEDIWHGYELSWLNSKGKPQVAIARFVFPCQSSHIIESKSFKLYLNSFNQSKFDSFDAVRDALQQDLSAAAQCDVAVTLYGPDDHDCLPFSALPGDCIDELDITVDDYSPRDGLLALQSDEPVSETLHSHLLKSNCLITSQPDWASIVIRYEGAKICRESLLRYLISFRDHNEFHEQCVERIYCDLLRALNPSKLEVYARYTRRGGLDINPFRSSEQNQTAFNVRINRQ

SEQ ID NO: 48730 - protein, 281 aa, Pseudoalteromonas rubra
  REGION 1..281: note = tr|U1LP60|U1LP60_9GAMM NADPH-dependent 7-cyano-7-deazaguanine reductase OS=Pseudoalteromonas rubra DSM 6842 OX=1117318 GN=queF PE=3 SV=1
MTDYNNAPELKASVLGKTTEYASQYEPSLLHPIARKLNRDQIAVDEQALPFFGEDIWHGYELSWLNTKGKPQVVIARFVFPCQSSHIIESKSFKLYLNSFNQSQFASFDAVRDTLQQDLSKAAQCDVTVTLYGPDDHNCLPFSALPGECIDELDIAVDDYSPRDGLLTQESDQHVSETLHSHLLKSNCLITSQPDWASIVIRYEGAKICRESLLRYLISFRDHNEFHEQCVERIYCDLLRALNPTKLEVYARYTRRGGLDINPFRSSEQDKTTFNVRINRQ

SEQ ID NO: 48731 - protein, 282 aa, Pseudoalteromonas ruthenica
  REGION 1..282: note = tr|A0A0F4PM92|A0A0F4PM92_9GAMM NADPH-dependent 7-cyano-7-deazaguanine reductase OS=Pseudoalteromonas ruthenica OX=151081 GN=queF PE=3 SV=1
MTDYSNAPELKASLLGKATEYKGSYDPSLLYPIARKLNRDDLQIDERALPFKGEDIWTGYELSWLNPKGKPQVAVATFTFPCQSPDIIESKSFKLYLNSFNQSRFESMQAVQQTMAKDLSAATQSDVQVTLYGPEDYQHFAATALPGQCIDELDITVDTYELTPSLLRLADDAQQVEQTLHSHLLKSNCLITSQPDWASVVIRYQGPALCHESLLRYLISFRSHNEFHEQCVERIFTDIMACAPMQSLEVYARYTRRGGLDINPYRATHSDKTLFDVRINRQ

SEQ ID NO: 48732 - protein, 281 aa, Pseudoalteromonas sp.
  REGION 1..281: note = tr|A0A2K9JZ54|A0A2K9JZ54_9GAMM NADPH-dependent 7-cyano-7-deazaguanine reductase OS=Pseudoalteromonas sp. NC201 OX=1514074 GN=queF PE=3 SV=1
MTDYSNSPELQSSVLGKTTEYASVYTPSLLHPIARKLNRDQINVDESALPFKGEDTWTGYELSWLNNKGKPQVAVATFVFPCQSSHIIESKSFKLYLNSFNQSRFDTMETVRQTLAADLSTASNSQVSVTLFGADEFDCIPFSRLPGECIDELDIEVDSYTPNSNLLQLASEDVVDETLHSHLLKSNCLITSQPDWASVVISYRGKQIDREALLKYLISFRDHNEFHEQCVERIYCELWRTFNPEKLSVYARYTRRGGLDINPYRSSEQDQTPYTVRTNRQ

SEQ ID NO: 48733 - protein, 281 aa, Pseudoalteromonas sp.
  REGION 1..281: note = tr|A0A4Z0SLM9|A0A4Z0SLM9_9GAMM NADPH-dependent 7-cyano-7-deazaguanine reductase OS=Pseudoalteromonas sp. KS88 OX=2109918 GN=queF PE=3 SV=1
MTDYSNSPELKGSVLGQSTEYVDTYTPSLLFPIARKLNRDDLNIDEAQLPFKGQDIWTGYEVSWLNNKGKPMVGVALFEFPCQTSHIIESKSFKLYLNSFNQTRFDSVDKVKSTLSNDLSVAVAMPVKVTLYSPDEYNCLPCTPLPGVCIDDLDIEIDSYDLDAQSLKSASDECVTETLHSHLLKSNCLITSQPDWASIIIRYSGEKICKESLLRYLISFRTHNEFHEQCVERIFCDLNTQLKLSNLEVYARYTRRGGLDINPYRSTSNNTVPFNVKINRQ

SEQ ID NO: 48734 - protein, 282 aa, Pseudoalteromonas spongiae
  REGION 1..282: note = tr|A0A290T4A0|A0A290T4A0_9GAMM NADPH-dependent 7-cyano-7-deazaguanine reductase OS=Pseudoalteromonas spongiae UST010723-006 OX=1117319 GN=queF PE=3 SV=1
MSHYQDAPELKGALLGQQTEYKDSYDASLLFPIARKLNRDDLNIDESALPFKGEDTWTGYELSWLNQKGKPVVAVAEFIFPATSSHIIESKSFKLYLNSFNQTKFDSMAQVQQILTSDLSKSANCDVVVKLFNADDFDCLMPTPFTGTCLDDLDIEVSEYDLNTELLKADASNEIVTETLYSHLLKSNCLITSQPDWASVVIRYTGKKICHESLLKYLISFRNHNEFHEQCVERLFCDIQNKFSMTQLEVFARYTRRGGLDINPYRSTDFATTQFKLKSNRQ

SEQ ID NO: 48735 - protein, 281 aa, Pseudoalteromonas tetraodonis
  REGION 1..281: note = tr|A0A1E3WUY0|A0A1E3WUY0_9GAMM NADPH-dependent 7-cyano-7-deazaguanine reductase OS=Pseudoalteromonas tetraodonis OX=43659 GN=queF PE=3 SV=1
MTDYSNSPDLKGSVLGQSTEYVDQYTPSLLFPIARKLNRDSLSIDETALPFKGQDIWTGYELSWLNTKGKPQVAVALFTFECQSSHIIESKSFKLYLNSFNQSRFGSIEIVKQHLIDDLSNAVNSPVKVTLYSADDYNCIPCTPLPGECIDELDIEIDNYHIDAHSLKSQSNKIVTETLHSHLLKSNCLITSQPDWASIIIRYTGEQVCRESLLRYLISFRTHNEFHEQCVERIYSDLTTQLNIKELEVYARYTRRGGLDINPYRSTHYNETPFSVKINRQ

SEQ ID NO: 48736 - protein, 281 aa, Pseudoalteromonas tetraodonis; identical to SEQ ID NO: 48713
  REGION 1..281: note = tr|A0A290TGK0|A0A290TGK0_9GAMM NADPH-dependent 7-cyano-7-deazaguanine reductase OS=Pseudoalteromonas tetraodonis OX=43659 GN=queF PE=3 SV=1

SEQ ID NO: 48737 - protein, 281 aa, Pseudoalteromonas translucida
  REGION 1..281: note = tr|A0A0U2X0J2|A0A0U2X0J2_9GAMM NADPH-dependent 7-cyano-7-deazaguanine reductase OS=Pseudoalteromonas translucida KMM 520 OX=1315283 GN=queF PE=3 SV=1
MTDYSNSPDLKGSVLGQSTEYIDQYTPSLLFPIARKLNRDALNIDEAALPFKGQDIWTGYELSWLNAKGKPQVAIAVFTFACQSSHLVESKSFKLYLNSFNQTRFNSRDEVKKHLVKDLTAVVNSLVQVTLYNADEYNCLPYTPLPGECIDDLDIEINNYDIDAHSLKSQSNKTVTETLHSHLLKSNCLITSQPDWASVIIRYTGEQICRESLLRYLISFRTHNEFHEQCVERIYSDLSTQLSIKNLEVYARYTRRGGLDINPYRSTHNNDTPFAVKINRQ

SEQ ID NO: 48738 - protein, 285 aa, Pseudoalteromonas tunicata
  REGION 1..285: note = tr|A4C5J9|A4C5J9_9GAMM NADPH-dependent 7-cyano-7-deazaguanine reductase OS=Pseudoalteromonas tunicata D2 OX=87626 GN=queF PE=3 SV=1
MINMTDYENSPELKGTLLGQQTEYKDQYDASLLFPIARKLNRDELAIDEAALPFVGEDTWTGYELSWLNAKGKPQVAVAEFIFPCQSSHIIESKSFKLYLNSFNQTRFDTLEQVKQHLVEDLSKGCNAAVEVRIFGPEAFNCINNTPLPGLCIDDLDVEIDCYSLDKQLLKLAANAVQVSETLHSHLLKSNCLITSQPDWASVVIRYSGPQICHESLLRYLISFRSHNEFHEQCVERIYCDIQELLGIKELEVYARYTRRGGLDINPYRSSHQQQTPFKLKINRQ

SEQ ID NO: 48739 - protein, 282 aa, Pseudoalteromonas ulvae
  REGION 1..282: note = tr|A0A244CS42|A0A244CS42_9GAMM NADPH-dependent 7-cyano-7-deazaguanine reductase OS=Pseudoalteromonas ulvae OX=107327 GN=queF PE=3 SV=1
MTDYENSPELKGTLLGQETQYKDQYDASLLFPIARKLNRDELNIDEAALPFYGEDTWTGYELSWLNNKGKPQVAVAEFVFPCQSSHIIESKSFKLYLNSFNQTRFASQEIVQDLLVKDLSAGCNAPVEVRIYGPEVFNCIANTPMPGVCIDDLDIEVDCYDLNKQLLQLAPNQDTVTETLHSHLLKSNCLITSQPDWASIVIRYTGKQICHESLLRYLISFRSHNEFHEQCVERIYCDIQQQLGISELEVYARYTRRGGLDINPFRSNRQNKTSFSLKINRQ

SEQ ID NO: 48740 - protein, 125 aa, unidentified
  source 1..125: note = Pseudoarcobacter caeni
  REGION 1..125: note = tr|A0A363D3R7|A0A363D3R7_9PROT NADPH-dependent 7-cyano-7-deazaguanine reductase OS=Pseudoarcobacter caeni; OX = 1912877 GN=queF PE=3 SV=1
MKYGEKEIREFDINKDENFWPNEHDKNYIIDIELPEFMAKCPRSGYPDFATIKLQYTPNKRVIELKALKIYINTFMFREVSHENSINEIFDTLFSKLEPKWMKVIGDFKPRGNVHTVIEIDSSKF

SEQ ID NO: 48741 - protein, 146 aa, unidentified
  source 1..146: note = Pseudobacter ginsenosidimutans
  REGION 1..146: note = tr|A0A4Q7MKZ8|A0A4Q7MKZ8_9BACT NADPH-dependent 7-cyano-7-deazaguanine reductase OS=Pseudobacter ginsenosidimutans OX=661488 GN=EV199_4788 PE=3 SV=1
MSQEIIKTYKDIDRTILKGIPNPTDQAYEIKIKIPEFTFLGVKEQPDFAVIYLTFYPGKKVIELKSLKQYIFQLRNIVASYERLINIIYDDLQAAYEPARMRLVMICNPRGGISSKLTIDSDWKIRGGKEAFNDWKLIEDEWEVTM

SEQ ID NO: 48742 - protein, 164 aa, Pseudobutyrivibrio ruminis
  REGION 1..164: note = tr|A0A285RIU5|A0A285RIU5_9FIRM NADPH-dependent 7-cyano-7-deazaguanine reductase OS=Pseudobutyrivibrio ruminis DSM 9787 OX=1123011 GN=queF PE=3 SV=1
MTDSRKEEGTLTLLGNKNNVYPDNYAPEMLQTFLNKHPENDYFVKFNCPEFTSLCPITGQPDFANIIISYVPGEKMVESKSLKLYLFSFRNHGDFHEDCVNIIMKDLIKLMDPKYIEVWGKFTPRGGISIDPYCNYGKPGTKWEKVAEDRLFNHDMYPEKVDNR

SEQ ID NO: 48743 - protein, 163 aa, Pseudobutyrivibrio ruminis
  REGION 1..163: note = tr|A0A2G3DYF6|A0A2G3DYF6_9FIRM NADPH-dependent 7-cyano-7-deazaguanine reductase OS=Pseudobutyrivibrio ruminis OX=46206 GN=queF PE=3 SV=1
MADRAAEGTLTLLGNKNNVYPDNYAPEMLQTFLNKHPENDYFVKFNCPEFTSLCPITGQPDFANIIISYVPGEKMVESKSLKLYLFSFRNHGDFHEDCVNIIMKDLIKLMDPKYIEVWGKFTPRGGISIDPYCNYGKPGTKWEEVAFNRMANHDMYPEKVDNR

SEQ ID NO: 48744 - protein, 164 aa, Pseudobutyrivibrio sp.; identical to SEQ ID NO: 48742
  REGION 1..164: note = tr|A0A1I5D5J3|A0A1I5D5J3_9FIRM NADPH-dependent 7-cyano-7-deazaguanine reductase OS=Pseudobutyrivibrio sp. JW11 OX=1855302 GN=queF PE=3 SV=1

SEQ ID NO: 48745 - protein, 163 aa, Pseudobutyrivibrio sp.
  REGION 1..163: note = tr|A0A1H3ZX54|A0A1H3ZX54_9FIRM NADPH-dependent 7-cyano-7-deazaguanine reductase OS=Pseudobutyrivibrio sp. ACV-2 OX=1520801 GN=queF PE=3 SV=1
MSDRKDEGTLTLLGNKNNKYPDNYAPEMLQTFINKHPENDYFVKFNCPEFTSLCPITGQPDFANIIISYVPGEKMVESKSLKLYLFSFRNHGDFHEDCVNIIMKDLIKLMDPKYIEVWGKFTPRGGISIDPYCNYGKPGTKWEEVAFNRLANHDMYPEKVDNR

SEQ ID NO: 48746 - protein, 163 aa, Pseudobutyrivibrio xylanivorans
  REGION 1..163: note = tr|A0A1G5S2Y9|A0A1G5S2Y9_PSEXY NADPH-dependent 7-cyano-7-deazaguanine reductase OS=Pseudobutyrivibrio xylanivorans OX=185007 GN=queF PE=3 SV=1
MADRAAEGTLTLLGNKNNTYPDNYAPEMLQTFLNKHPENDYFVKFNCPEFTSLCPITGQPDFANIIISYVPGEKMVESKSLKLYLFSFRNHGDFHEDCVNIIMKDLIKLMDPKYIEVWGKFTPRGGISIDPYCNYGKPGTKWEEVAFNRMANHDMYPEKVDNR

SEQ ID NO: 48747 - protein, 163 aa, Pseudobutyrivibrio xylanivorans; identical to SEQ ID NO: 48746
  REGION 1..163: note = tr|A0A1M6FMT8|A0A1M6FMT8_PSEXY NADPH-dependent 7-cyano-7-deazaguanine reductase OS=Pseudobutyrivibrio xylanivorans DSM 14809 OX=1123012 GN=queF PE=3 SV=1

SEQ ID NO: 48748 - protein, 281 aa, unidentified
  source 1..281: note = Pseudocitrobacter faecalis
  REGION 1..281: note = tr|A0A366FD75|A0A366FD75_9ENTR NADPH-dependent 7-cyano-7-deazaguanine reductase OS=Pseudocitrobacter faecalis OX=1398493 GN=queF PE=3 SV=1
MSSYDNHQALTGLTLGKSTDYRDTYDAGLLQGVPRSLNRDPLGLRADALPFHGADIWTLYELSWLNAKGLPQVAVGHVELRHTTVNLVESKSFKLYLNSFNQTRFGSWDDVRQTLERDLSACAQGDVTVSLYRLDEIEGQPIAHFHGTCIDNQDIEIDNYQFNADYLLNSTGSKNVEETLVSHLLKSNCLITHQPDWGSVQIQYRGPQIDREKLLRYLVSFRHHNEFHEQCVERIFSDILRFCQPESLSVYARYTRRGGLDINPWRSNTDFVPAIGRLVRQ

SEQ ID NO: 48749 - protein, 281 aa, unidentified
  source 1..281: note = Pseudocitrobacter sp.
  REGION 1..281: note = tr|A0A5B0K9H2|A0A5B0K9H2_9ENTR NADPH-dependent 7-cyano-7-deazaguanine reductase OS=Pseudocitrobacter sp. 73 OX=2605731 GN=queF PE=3 SV=1
MSSYENHQALTGLTLGKSTDYRDTYDAGLLQGVPRSLNRDPLGLHANALPFHGADIWTLYELSWLNAKGLPQVAVGHVELSHTTVNLVESKSFKLYLNSFNQTRFGSWEDVRHTLERDLSACAQGDVTVSLYRLDEIEGQPIAHFHGTCIDNQDIEIDNYQFSADYLLNSTGSKKVEETLVSHLLKSNCLITHQPDWGSVQIQYRGPQIDREKLLRYLVSFRHHNEFHEQCVERIFSDILRFCKPESLSVYARYTRRGGLDINPWRSNTEFVPAIGRLVRQ

SEQ ID NO: 48750 - protein, 278 aa, Pseudofulvimonas gallinarii
  REGION 1..278: note = tr|A0A4R3LM41|A0A4R3LM41_9GAMM NADPH-dependent 7-cyano-7-deazaguanine reductase OS=Pseudofulvimonas gallinarii OX=634155 GN=queF PE=3 SV=1
MTTPDHSPLGRETTYPRQYDARLLFPIPRSAQREILGFSDGLPFHGEDIWTAYELSWLDARGRPQVAIATFRLPADSPCIIESKSLKLYLNGFAFEKFPTVDDLRAIIARDLSHASGATVEVVIDAAAAMSRMTAFAELEGECIDGLEVSLAPVADIDPSSLAAATTEAAHEELLVSRLFRSNCPVTGQPDWADVQVRARGVAIDRAGLLRYLVSFRQHQGFHEHCVERIFSDVLRYCAPAALTVYARFTRRGGLDINPWRSNDAHFPAPANIRTPRQ

SEQ ID NO: 48751 - protein, 277 aa, unidentified
  source 1..277: note = Pseudogulbenkiania ferrooxidans
  REGION 1..277: note = tr|U1AAH0|U1AAH0_9NEIS NADPH-dependent 7-cyano-7-deazaguanine reductase OS=Pseudogulbenkiania ferrooxidans EGD-HP2 OX=1388764 GN=queF PE=3 SV=1
MSHLTPEHSPLGKTVSYQDHYDPSLLFPIARQAKRDEIGVDEAALPFAGVDIWTGFELSWLNPRGKPQVGIATFRIPAASPRLIESKSFKLYLNSYNQTRMDGVDALSAQLARDLSAAAGAEVSVSIALPQAFATEQVRELAGEYIDELDIEVDNYAPCPEVLKADTADIVSETLCSNLLKSNCLVTGQPDWGSVSIRYTGPKINREALLRYLIGFRQHNEFHEQCVERIFVDVLRACAPQKLTVYARYTRRGGLDINPWRSNADVPPTDNVRAARQ

SEQ ID NO: 48752 - protein, 279 aa, unidentified
  source 1..279: note = Pseudogulbenkiania ferrooxidans
  REGION 1..279: note = tr|B9Z1V6|B9Z1V6_9NEIS NADPH-dependent 7-cyano-7-deazaguanine reductase OS=Pseudogulbenkiania ferrooxidans 2002 OX=279714 GN=queF PE=3 SV=1
MASNTKTPEQSPLGKTVQYQDQYAPELLFPIPRQQKRDEIGVDGSALPFAGVDIWTGYELSWLNARGKPQVAIATFRIPANTPNLIESKSFKLYLNSYNQTRLDSMARLQAQLALDLSRAAGGPVAVSLTSPQDFARERIDELAGEYIDDLDIEVSDYHPDPARLSADLSHIVSETLCSNLLKSNCLVTGQPDWGSVQIHYIGPRIERESLLRYLIGFRQHNEFHEQCVERIFTDVLRACQPQQLTVYARYTRRGGLDINPFRSNGGEPAPANVRTARQ

SEQ ID NO: 48753 - protein, 279 aa, Pseudogulbenkiania sp.
  REGION 1..279: note = tr|G2IXZ2|G2IXZ2_PSEUL NADPH-dependent 7-cyano-7-deazaguanine reductase OS=Pseudogulbenkiania sp. (strain NH8B) OX=748280 GN=queF PE=3 SV=1
MASNTKTPEQSPLGKTVQYQDQYAPELLFPIPRQQKRDEIGVDGSALPFAGVDIWTGYELSWLNARGKPQVAIATFRIPADTPNLIESKSFKLYLNSYNQTRLDSMAQLQAQLALDLSRAAGGPVVVSLTSPQDFARERIDELAGEYIDDLDIEVSDYHPDPARLSADRSHIVSETLCSNLLKSNCLVTGQPDWGSVQIHYIGPRIERESLLRYLIGFRQHNEFHEQCVERIFTDVLRACQPQQLTVYARYTRRGGLDINPFRSNGGEPAPANVRTARQ

SEQ ID NO: 48754 - protein, 279 aa, Pseudogulbenkiania subflava
  REGION 1..279: note = tr|A0A1Y6BC99|A0A1Y6BC99_9NEIS NADPH-dependent 7-cyano-7-deazaguanine reductase OS=Pseudogulbenkiania subflava DSM 22618 OX=1123014 GN=queF PE=3 SV=1
MANNTKTPEQSPLGKTVQYQDQYAPELLFPIPRQQKRDEIGVDGSALPFAGVDIWTGYELSWLNARGKPQVAIATFRIPADTPNLIESKSFKLYLNSFNQTRLDSMEQLQAQLALDLSRAAGGAVAVSLASPQDFARERIDELAGEYIDDIDIDVCDYHPDPARLSADLSHIVSETLCSNLLKSNCLVTGQPDWGSVQIHYIGPRIERESLLRYLIGFRQHNEFHEQCVERIFTDVLRACQPQQLTVYARYTRRGGLDINPFRSNSGEPAPANVRTARQ

SEQ ID NO: 48755 - protein, 271 aa, unidentified
  source 1..271: note = Pseudohaliea rubra
  REGION 1..271: note = tr|A0A095XUT5|A0A095XUT5_9GAMM NADPH-dependent 7-cyano-7-deazaguanine reductase OS=Pseudohaliea rubra DSM 19751 OX=1265313 GN=HRUBRA_01835 PE=3 SV=1
MDRELPLGRQVSGSASYDPSLLFPLARSEGRARLGLGEGAPPFHGVDVWHGYELSWLEPDGRPRVALGRIEVPADSPWMVESKSLKLYLNAINGSTFASAGAVRDTIARDLTEATGGAVAVSLAHLDDPAFHGVAAPGECIDDAPFAGPVDAPARDLLRVESDERVEETLHSHLLRSLCPVTAQPDWATVIVSYRGSRLDRGALLAYLVAFREHQDFHEQCVERIFLDLAAVLSPETLAVQALYTRRGGLDISPWRSSGPGKAPQYRLHRQ

SEQ ID NO: 48756 - protein, 274 aa, unidentified
  source 1..274: note = Pseudohongiella acticola
  REGION 1..274: note = tr|A0A1E8CHE3|A0A1E8CHE3_9GAMM NADPH-dependent 7-cyano-7-deazaguanine reductase OS=Pseudohongiella acticola OX=1524254 GN=queF PE=3 SV=1
MADNPLGKQTAYPTAYDPGLLFPVARANNRSQLGVKEGSELPFGGFDHWRAYELSWLLPTGQPVVALADILVPCDSPCLIESKSMKLYFNSLNQAVFSEPEVARVQIEQDLSQAAGAPVQVALHNHESAVMHSVDVSNGLLLDNLLVTTTSYQPAPDFLVSHTGAQVTETLYSHLFRSNCPITAQPDWGSVVIQYQGEQIDHEGLLSYLISYRSHEGFHEHCVEQIFHDLSVKCKPQKLQVSINFLRRGGLEINPLRSSDLTIAAYPLPRLLRQ

SEQ ID NO: 48757 - protein, 287 aa, unidentified
  source 1..287: note = Pseudohongiella sp.
  REGION 1..287: note = tr|A0A2D9DR95|A0A2D9DR95_9GAMM NADPH-dependent 7-cyano-7-deazaguanine reductase OS=Pseudohongiella sp.; OX = 1979412 GN=queF PE=3 SV=1
MEHSGIPLGKQTSYPQQYDPAQLYRVARSDNRALLPFADAGTGSADLSDKDLPFFGFDHWRAYELSWLQPSGKPVVATADIIVPCDSPNLIESKSMKLYFNSLNQHKLADMQEASELIARDLSLAAGKPVQVRLHPLTAGEHHTSIDTSAVLLDELQIATEAFSPDAALLAIREDSSGPVSERLRSELFRSNCPITSQPDWGSITIEYTGQPINHESLLRYIISYRQHEGFHEHCVEMIFCDLMKICRPQSLTVSINFLRRGGLEINPLRTTRAGLAPQSLPRELRQ

SEQ ID NO: 48758 - protein, 285 aa, unidentified
  source 1..285: note = Pseudohongiella spirulinae
  REGION 1..285: note = tr|A0A0S2KCU0|A0A0S2KCU0_9GAMM NADPH-dependent 7-cyano-7-deazaguanine reductase OS=Pseudohongiella spirulinae OX=1249552 GN=PS2015_1468 PE=3 SV=1
MTTIKTNPLGQATTYPETYDPALLYSVPRSMNRTSLGIIESALPFRGFDHWRAYELSWLRPNGMPVVATGDVLVSCDSTNIVESKSMKLYFNSLNQHTFASAEEARKCIQKDLATAAGGDVIVTIQLPGEGQTSTQRLQAIPENAVLLDRLNVSARIFKPDRRLLQLAGPVSEGAVSVTEVLASNLFRSNCPVTAQPDWGTVIISYTGDAIDHEGLLRYVISYRQHEGFHEHCAEQIYRDIMAVCAPEYLTVQINFLRRGGLEINPVRTSLPVMRMQPLPRLLRQ

SEQ ID NO: 48759 - protein, 155 aa, Pseudolabrys sp.
  REGION 1..155: note = tr|A0A371B101|A0A371B101_9RHIZ NADPH-dependent 7-cyano-7-deazaguanine reductase OS=Pseudolabrys sp. GY_H; OX = 2292256 GN=queF PE=3 SV=1
MAKAKRSTKSLQLGHPVALPASPEAARLDRVPNPHADTNYLARFTMPEFTSICPVTGQPDFAILVIDYVPNKWLVESKSLKLYLNSFRNVGSFHEDCTVSIGKRLKTLLAPRWLRIGGYFYPRGGMPIDVFWQTGKLPSGVWVPDQGVAPYRGRG

SEQ ID NO: 48760 - protein, 155 aa, Pseudolabrys sp.
  REGION 1..155: note = tr|A0A0Q7TYN7|A0A0Q7TYN7_9RHIZ NADPH-dependent 7-cyano-7-deazaguanine reductase OS=Pseudolabrys sp. Root1462 OX=1736466 GN=queF PE=3 SV=1
MAKRRTSSASLQLGHSVAQPASPEAARLDRVPNPHADANYVARFTMPEFTSICPVTGQPDFAILVIDYVPNKWLVESKSLKLYLNSFRNVGSFHEDCTVGIGKRLKTLLAPRWLRIGGYFYPRGGMPIDVFWQTGKLPTGVWIPDQGVAPYRGRG

SEQ ID NO: 48761 - protein, 152 aa, Pseudolabrys taiwanensis
  REGION 1..152: note = tr|A0A345ZSH3|A0A345ZSH3_9RHIZ NADPH-dependent 7-cyano-7-deazaguanine reductase OS=Pseudolabrys taiwanensis OX=331696 GN=queF PE=3 SV=1
MAKKTTPLQLGRPAVIPASPDEAVLDRVPNPHRDTNYLARFTAPEFTTLCPVTGQPDFAHLVIDYVPNKYLVESKSLKLYLVSFRNHGDFHEGCTVAIGKRLFKLLEPKWLRIGGYWYPRGGIPIDVFWQAGKLPKDMWVPDQGVAPYRGRG

SEQ ID NO: 48762 - protein, 276 aa, unidentified
  source 1..276: note = Pseudomonadaceae bacterium
  REGION 1..276: note = tr|A0A2D5CHM3|A0A2D5CHM3_9GAMM NADPH-dependent 7-cyano-7-deazaguanine reductase OS=Pseudomonadaceae bacterium OX=1914538 GN=queF PE=3 SV=1
MHHSAENSPLGKSSEYIATYSPQLLFPIPRAPKWAELGLTAETLPYQGVDFWNCFELSWLLPSGKPVVAMAEFAIPADSPNIIESKSFKLYLNSLNQSVFADAEAVAAVMVKDLSAAAGKPVAVRVRSLNEVAAEGVAQLPGTCIDELDVAISNYAQPRPELLACDAQRVVSETVYSNLLKSNCPVTSQPDWGTVVIEYRGPAIDQASLLAYLVSFRQHADFHEQCVERIFLDLQRLLKPESLTVYARYVRRGGLDINPYRSTSPIAPDNRRLVRQ

SEQ ID NO: 48763 - protein, 276 aa, unidentified
  source 1..276: note = Pseudomonadaceae bacterium
  REGION 1..276: note = tr|A0A4Q9R6P5|A0A4Q9R6P5_9GAMM NADPH-dependent 7-cyano-7-deazaguanine reductase OS=Pseudomonadaceae bacterium P17C OX=2211397 GN=queF PE=3 SV=1
MQHPAELSPLGKSSAYVSSYAPQLLFPISRETKWHELGLTAATLPYRGVDIWNCYELSWLLPSGKPVVAIGEFVIPADSPNIIESKSFKLYLNSLNQTVFASHEALGETLVRDLSAVAGAPVRVRVSSIQEATAQGLAELPGLCIDDLDIAISDYAAPRAELLRCEPARQVSASLHSHLLKSNCPVTGQPDWGSVLVEYQGPFLRPESLLAYLVSFRQHADFHEQCVERIYLDLLRVLRPQRLAVSARYVRRGGLDINPYRSSEPFIQVNPRLARQ

SEQ ID NO: 48764 - protein, 276 aa, unidentified
  source 1..276: note = Pseudomonadales bacterium
  REGION 1..276: note = tr|A0A1G3DNP9|A0A1G3DNP9_9GAMM NADPH-dependent 7-cyano-7-deazaguanine reductase OS=Pseudomonadales bacterium RIFCSPHIGHO2_01_FULL_64_12 OX=1802004 GN=queF; PE = 3 SV=1
MQHPAEHSPLGKSSDYVATYSPGLLFPIPRAPKWAELGLTAETLPYQGVDLWNCYELSWLLPSGKPVVAIGEFEIPADSPNIIESKSFKLYLNSLNQSVFESRDALLEVMTGDLSAAAGKPVRVRLRTLDEVTADGVATLPGRCIDELDVAIQDYDHPRPELLTCDAGRVVEESLHSHLLKSNCPVTGQPDWGSVVVEYRGAALLPESLLAYLVSFRQHADFHEQCVERIFLDLQRLLRPEKLTVYARYVRRGGLDINPYRSTEALVVDNRRLVRQ

SEQ ID NO: 48765 - protein, 278 aa, unidentified
  source 1..278: note = Pseudomonadales bacterium
  REGION 1..278: note = tr|A0A2D5MWJ9|A0A2D5MWJ9_9GAMM NADPH-dependent 7-cyano-7-deazaguanine reductase OS=Pseudomonadales bacterium OX=1891229 GN=queF PE=3 SV=1
MSDHPATESPLGKSSTYISVYTPSLLYPISRLPKWQELGLDPQQLPFHGADIWNCFELSWLTPSGKPVVAAAEFVFPIKAARIVESKSFKLYLNSLNQTVFRDRHDLLKTLETDLSVAAQGPVMVRLLSMQQLHQAGLLVLPGTCVDDLEVEVSEYSYDPSLLTLAPNAGPVTEVLHSHLLKSNCPVTGQPDWGSVQISYSGPQLDHTSLLRYLVSFRQHSDFHEQCVERIFLDILKQLGEGASLTVYARYVRRGGLDINPWRSTQPGMPENLRLARQ

SEQ ID NO: 48766 - protein, 276 aa, Pseudomonas abietaniphila
  REGION 1..276: note = tr|A0A1G7R6P5|A0A1G7R6P5_9PSED NADPH-dependent 7-cyano-7-deazaguanine reductase OS=Pseudomonas abietaniphila OX=89065 GN=queF PE=3 SV=1
MHPAAEHSPLGKSSEYIATYTPSLLFPIPRAAKWAELGLTAETLPYQGFDFWNCYELSWLLPSGKPVVAIGEFCIPADSPNIIESKSFKLYLNSLNQTPFASQDDLVATLEKDLSSAAGKPVGVRIRSLKDIEAEGIVPVPGVCVDELDVTIHSYDRPQPELLRCDEARVVEESLHSHLLKSNCPVTSQPDWGSVAVQYRGAALDHASFLAYIVSFRQHSDFHEQCVERIFMDLQRLLKPEKLTVSARYVRRGGLDINPYRSTETLTLENGRLARQ

SEQ ID NO: 48767 - protein, 278 aa, unidentified
  source 1..278: note = Pseudomonas abyssi
  REGION 1..278: note = tr|A0A2A3MCD1|A0A2A3MCD1_9PSED NADPH-dependent 7-cyano-7-deazaguanine reductase OS=Pseudomonas abyssi; OX = 170540 GN=queF PE=3 SV=1
MSDHPATDSPLGKSSAYVSVYTPSLLYPIARQAKWQELGLDPQNLPFHGADIWNCFELSWLTPSGKPEVAAAEFAFPIKAARIVESKSFKLYLNSLNQTVFRDRRELLETLESDLSVAAQGPVAVRLFSMQQLHQLGMFTLPGRCIDDEEVAVSRYHYDASLLALDSGRVQVSEVLHSHLLKSNCPVTGQPDWGSVLISYSGPRIDSAALVRYLVSFREHSDFHEQCVERIFLDLLALLGEGAQLTVYARYVRRGGLDINPWRSTEAGMPENLRLARQ

SEQ ID NO: 48768 - protein, 276 aa, unidentified
  source 1..276: note = Pseudomonas acidophila
  REGION 1..276: note = tr|A0A2A4F7K9|A0A2A4F7K9_9PSED NADPH-dependent 7-cyano-7-deazaguanine reductase OS=Pseudomonas acidophila; OX = 1912599 GN=queF PE=3 SV=1
MNTTPEHSPLGKATAYTEQYDASLLFPIARNLAREQIGIGAQLPFFGTDIWNAYELSWLNARGKPQIAIATVYVPADSANIVESKSFKLYLGSFAQTVFDSADAVRDTIRRDVSAACGATVSVHFASPFEFGKLQLEEFDGLSLDRLDLDTDVYHPDPSLLKAALAESPVEETLVSDLLKSNCPVTGQPDWGSVQIHYVGPQIDHAGLLRYLISYRNHTGFHEQCVERIFIDIMRECQPLKLAVYARYTRRGGLDINPFRTNFNQPMPDNLRTARQ

SEQ ID NO: 48769 - protein, 276 aa, Pseudomonas aeruginosa
  REGION 1..276: note = sp|Q9I037|QUEF_PSEAE NADPH-dependent 7-cyano-7-deazaguanine reductase OS=Pseudomonas aeruginosa (strain ATCC 15692 / DSM 22644 / CIP 104116 / JCM 14847 / LMG 12228 /1C / PRS 101 / PAO1) OX=208964 GN=queF PE=3 SV=
MQHPAEHSPLGKTSEYVSSYTPSLLFPISRTAKWAELGLSAETLPYRGVDIWNCYELSWLTPAGKPVVAIGEFSIPADSPNIIESKSFKLYLNSLNQSAFDSREALRAVLQKDLSAAVGAPVGVRLRSLDEVAEEGIGRLPGRCIDELDIAVDGYEQPRPELLRCDAGRIVEEQLYSHLLKSNCPVTGQPDWGTLVVDYRGPALDPASLLAYLVSFRQHQDFHEQCVERIFLDLQRLLQPQALSVYARYVRRGGLDINPYRSLAEVAPDNRRLVRQ

SEQ ID NO: 48770 - protein, 276 aa, Pseudomonas aeruginosa
  REGION 1..276: note = tr|A0A3E1MXD0|A0A3E1MXD0_PSEAI NADPH-dependent 7-cyano-7-deazaguanine reductase OS=Pseudomonas aeruginosa; OX = 287 GN=queF PE=3 SV=1
MQHPAEHSPLGKTSEYVSSYTPSLLFPISRTAKWAELGLSAETLPYRGVDIWNCYELSWLTPAGKPVVAIGEFSIPADSPNIIESKSFKLYLNSLNQSAFDSREALRAVLQKDLSAAAGAPVGVRLRSLDEVAEEGIGRLPGRCIDELDIAVDGYEQPRPELLRCDAGRIVEEQLYSHLLKSNCPVTGQPDWGTLVVDYQGPALDPASLLAYLVSFRQHQDFHEQCVERIFLDLQRLLQPQALSVYARYVRRGGLDINPYRSLAEVAPDNRRLVRQ

SEQ ID NO: 48771 - protein, 278 aa, unidentified
  source 1..278: note = Pseudomonas aestusnigri
  REGION 1..278: note = tr|A0A218VLG9|A0A218VLG9_9PSED NADPH-dependent 7-cyano-7-deazaguanine reductase OS=Pseudomonas aestusnigri OX=857252 GN=queF PE=3 SV=1
MSDHPATESPLGKSSTYISVYTPSLLYPISRLPKWQELGLDPQQLPFHGADIWNCFELSWLTPSGKPVVAAAEFVFPIKAARIVESKSFKLYLNSLNQTVFRDRHDLLKTLETDLSVAAQGPVMVRLLSMQQLHQAGLLALPGTCIDDLEVEVSEYSYDPSLLTLAPNAGPVTEVLHSHLLKSNCPVTGQPDWGSVQISYSGPQLDHASLLRYLVSFRQHSDFHEQCVERIFLDILKLLGEGATLTVYARYVRRGGLDINPWRSTQPGMPENLRLARQ

SEQ ID NO: 48772 - protein, 276 aa, Pseudomonas agarici
  REGION 1..276: note = tr|A0A0X1T6W4|A0A0X1T6W4_PSEAA NADPH-dependent 7-cyano-7-deazaguanine reductase OS=Pseudomonas agarici; OX = 46677 GN=queF PE=3 SV=1
MHPAAEHSPLGKSSEYIATYTPSLLFSIPRAAKWAELGLSAATLPYRGVDFWNCFELSWLLPSGKPVVAIGEFSIPADSPNIIESKSFKLYLNSLNQTPFADTASLEAVLRADLSAAAGKAVGVRVRSLNEVQAEGVVALPGVCIDDLEVTVNDYAHPRPELLRCDKSRVIEESVYSHLLKSNCPVTSQPDWGSVVVEYRGAALDHASLLAYLVSFRQHSDFHEQCVERIFLDLQRLLKPEKLTVYARYVRRGGLDINPYRSTEAAEFQNLRLVRQ

SEQ ID NO: 48773 - protein, 275 aa, Pseudomonas alcaligenes
  REGION 1..275: note = tr|A0A142IST7|A0A142IST7_PSEAC NADPH-dependent 7-cyano-7-deazaguanine reductase OS=Pseudomonas alcaligenes OX=43263 GN=queF PE=3 SV=1
MQHPAEHSPLGKSSEYVSQYAPELLFPISRTTKWAELGLEAGKLPYQGVDYWNCYELSWLTPSGKPVVAIGEFAIPADSPNIIESKSFKLYLNSLNQSAYADATEVERLLARDLSACAGAPVAVRVRGLDEVAAEGVAALPGRCIDDLEIAVSDYAHPRPELLRCADQVVEEVLYSHLLKSNCPVTGQPDWGTLVVDYRGPRLEAASLLAYVVSFRQHQDFHEQCVERVFLDLQRLLQPERLTVYARYVRRGGLDINPYRSTEAITPDNRRLVRQ

SEQ ID NO: 48774 - protein, 275 aa, Pseudomonas alcaligenes
  REGION 1..275: note = tr|U3B9J3|U3B9J3_PSEA4 NADPH-dependent 7-cyano-7-deazaguanine reductase OS=Pseudomonas alcaligenes (strain ATCC 14909 / DSM 50342 / JCM 20561 / NBRC 14159 / NCIMB 99 45 / NCTC 10367 / 1577) OX=1215092; GN = queF PE=3
MQHPAEHSPLGKSSEYVSQYAPELLFPISRTTKWAELGLEAGKLPYQGVDYWNCYELSWLTPSGKPVVAIGEFAIPADSPNIIESKSFKLYLNSLNQSAYADAAEVERLLARDLSACAGAPVRVRVRSLDEVAAEGVANLPGRCIDDLEIAVSDYAHPRPELLRCADQVVEEVLYSHLLKSNCPVTGQPDWGTLVVDYRGPRLEAASLLAYVVSFRQHQDFHEQCVERVFLDLQRLLQPERLTVYARYVRRGGLDINPYRSTEAITPDNRRLVRQ

SEQ ID NO: 48775 - protein, 276 aa, Pseudomonas alcaliphila
  REGION 1..276: note = tr|A0A1G7J328|A0A1G7J328_9PSED NADPH-dependent 7-cyano-7-deazaguanine reductase OS=Pseudomonas alcaliphila OX=101564 GN=queF PE=3 SV=1
MQHPAEHSPLGKSSQYIAEYSPELLFPISRATKWVELGLDGASLPYQGVDYWNCYELSWLLPSGKPVVAIGEFAIPADSPNIIESKSFKLYLNSLNQTAFASWDEVQATLVRDLSAVAGKPVAVRLRSLAEVSAEGVATLPGQCIDELDVNVSQYDHPQPELLRCDADRVVEESLHSHLLKSNCPVTGQPDWGSLVVQYRGAALDHASLLAYLVSFRQHADFHEQCVERIFLDLQRLLQPQSLTVYARYVRRGGLDINPYRSSEAVTPENGRLARQ

SEQ ID NO: 48776 - protein, 276 aa, Pseudomonas alcaliphila
  REGION 1..276: note = tr|A0A1L7G170|A0A1L7G170_9PSED NADPH-dependent 7-cyano-7-deazaguanine reductase OS=Pseudomonas alcaliphila JAB1 OX=741155 GN=queF PE=3 SV=1
MQHPAEHSPLGKSSQYIAEYSPELLFPISRATKWAELGLDGGNLPYQGVDYWNCYELSWLLPSGKPVVAIGEFAIPADSPNIIESKSFKLYLNSLNQSAFASWDEVQATLVRDLSAVAGKSVAVRLRSLAEVSAEGMATLPGQCIDELDINVSQYDHPQPELLRCDASRVVEESLHSHLLKSNCPVTGQPDWGSLVVQYRGAALDHASLLAYLVSFRQHADFHEQCVERIFLDLQRLLQPQSLTVYARYVRRGGLDINPYRNSEAVTPENGRLARQ

SEQ ID NO: 48777 - protein, 276 aa, unidentified
  source 1..276: note = Pseudomonas alkylphenolica
  REGION 1..276: note = tr|A0A077FC33|A0A077FC33_9PSED NADPH-dependent 7-cyano-7-deazaguanine reductase OS=Pseudomonas alkylphenolica OX=237609 GN=queF PE=3 SV=1
MHPAAEHSPLGKSSEYIATYTPSLLFPIPRAAKWAELGVSAETLPWQGVDFWNCFELSWLLPSGKPVVAIGEFAIPADSPNIIESKSFKLYLNSLNQTVFETPAALQACLAKDLSAAAGKPVVVQIRSLAEVEGQGVVALPGVCIDDLDVSISNYEQPQPELLSCDATRVVEETLHSHLLKSNCPVTGQPDWGSVTVHYRGAALDHASLLTYLISFRQHADFHEQCVERIYLDLKRLLNPEFLTVYARYVRRGGLDINPYRSTETVTLPNLRLVRQ

SEQ ID NO: 48778 - protein, 276 aa, unidentified
  source 1..276: note = Pseudomonas alkylphenolica
  REGION 1..276: note = tr|A0A443ZGU3|A0A443ZGU3_9PSED NADPH-dependent 7-cyano-7-deazaguanine reductase OS=Pseudomonas alkylphenolica OX=237609 GN=queF PE=3 SV=1
MHPAAEHSPLGKSSEYIATYTPSLLFPIPRAAKWAELGVSAQTLPWQGVDFWNCFELSWLLPTGKPVVAIGEFAIPADSPNIIESKSFKLYLNSLNQTAFESPAALQACLEKDLSAAAGKPVAVQIRSLADVEGQGVVALPGVCIDDLDVSISNYEQPQPELLRCDSSRLVEETLHSHLLKSNCPVTGQPDWGSVTVHYRGAALDHASLLTYLISFRQHADFHEQCVERIYLDLKRLLNPEFLTVYARYVRRGGLDINPYRSTETVTLPNLRLVRQ

SEQ ID NO: 48779 - protein, 276 aa, Pseudomonas amygdali
  REGION 1..276: note = tr|A0A0N1JJ76|A0A0N1JJ76_PSEAV NADPH-dependent 7-cyano-7-deazaguanine reductase OS=Pseudomonas amygdali pv. lachrymans OX=53707 GN=queF PE=3 SV=1
MHPAAEHSPLGKSSEYIATYTPSLLFPIPRAAKWAELGLTAQTLPYQGVDFWNCYELSWLLPSGKPVVAIAEFSIPADSPNIIESKSFKLYLNSLNQTAFATVEQVQTTLEQDLSTAAGKPVGVRIRSLSDIEGEGVATMPGVCIDDLDITVSSYDRPQPELLRCDESQIIEESVHSHLLKSNCPVTSQPDWGSVVVEYRGAALDHSSLLAYIVSFRQHSDFHEQCVERIFLDLQRLLKPEKLTVYARYVRRGGLDINPYRSTETLDVNNRRLARQ

SEQ ID NO: 48780 - protein, 276 aa, Pseudomonas amygdali
  REGION 1..276: note = tr|A0A2S4I9V4|A0A2S4I9V4_PSEA0 NADPH-dependent 7-cyano-7-deazaguanine reductase OS=Pseudomonas amygdali pv. morsprunorum OX=129138 GN=queF PE=3 SV=1
MHPAAEHSPLGKSSEYIATYTPSLLFPIPRAAKWAELGLTAQTLPYKGVDFWNCYELSWLLPSGKPVVAIAEFSIPADSPNIIESKSFKLYLNSLNQTAFDDAVQVQATLEKDLSAAAGKPVGVRIRSLAEIEGEGVAALPGVCIDELDITVSSYDRPQPELLRCNDSRVIEESVHSHLLKSNCPVTSQPDWGSVVIEYCGAALDHASLLAYIVSFRQHSDFHEQCVERIFLDLQRLLKPEKLTVYARYVRRGGLDINPYRSTEVLNVDNRRLARQ

SEQ ID NO: 48781 - protein, 276 aa, Pseudomonas anguilliseptica
  REGION 1..276: note = tr|A0A1H5EXU1|A0A1H5EXU1_PSEAG NADPH-dependent 7-cyano-7-deazaguanine reductase OS=Pseudomonas anguilliseptica OX=53406 GN=queF PE=3 SV=1
MHPAAEDSPLGKSSEYIASYTPSLLFPIPRAAKWAELGLSAETLPYQGVDFWNCFELSWLLPSGKPVVAMGEFAIPADSPNIIESKSFKLYLNSLNQSVFNSADELVAVLVQDLSAAAGKPVGVRVRSLAEVMAEGVQAAPGVCIDELDVAISNYEQPQPELLHCDAARVVEESLHSHLLKSNCPVTGQPDWGTLVVQYRGLALDHASLLAYLVSFRQHADFHEQCVERIFLDLQRLLKPEHLTVYARYVRRGGLDINPYRSSGPISPDNQRLARQ

SEQ ID NO: 48782 - protein, 276 aa, Pseudomonas antarctica
  REGION 1..276: note = tr|A0A1H0CWH5|A0A1H0CWH5_9PSED NADPH-dependent 7-cyano-7-deazaguanine reductase OS=Pseudomonas antarctica; OX = 219572 GN=queF PE=3 SV=1
MHPAAEHSPLGKSSEYISTYTPSLLFPIPRAAKWAELGLSAETLPYKGVDFWNCFELSWLLPSGKPVVAIGEFSIPADSPNIIESKSFKLYLNSLNQTAFADTASLEATLRTDLSAAAGKPVNVRIRRLAEVEAEGVQALPGVCIDALDISVSNYEHPRPELLRCDDSRIVEESVHSHLLKSNCPVTSQPDWGSVAVEYRGSALDHASLLEYLVSFRQHSDFHEQCVERIFLDLQRLLKPEKLTVYARYVRRGGLDINPYRSTEDVQFQNLRLARQ

SEQ ID NO: 48783 - protein, 276 aa, Pseudomonas antarctica
  REGION 1..276: note = tr|A0A172YYU0|A0A172YYU0_9PSED NADPH-dependent 7-cyano-7-deazaguanine reductase OS=Pseudomonas antarctica; OX = 219572 GN=queF PE=3 SV=1
MHPAAEHSPLGKSSEYISTYTPSLLFPIPRAAKWAELGLSAETLPYKGVDFWNCFELSWLLPSGKPVVAIGEFSIPADSPNIIESKSFKLYLNSLNQTAFADTASLEATLRTDLSAAAGKPVSVRIRRLAEVEAEGVQALPGVCIDDLDISVSNYEHPRPELLRCDDSRIVEESVHSHLLKSNCPVTSQPDWGSVAVQYRGSALDHASLLEYIVSFRQHSDFHEQCVERIFLDLQRLLKPEKLTVYARYVRRGGLDINPYRSTEDMPFQNVRLARQ

SEQ ID NO: 48784 - protein, 275 aa, Pseudomonas argentinensis
  REGION 1..275: note = tr|A0A1I3N4M3|A0A1I3N4M3_9PSED NADPH-dependent 7-cyano-7-deazaguanine reductase OS=Pseudomonas argentinensis OX=289370 GN=queF PE=3 SV=1
MQSVEHSPLGKSSEYIATYSPELLFPIPRATKWAELGLSAETLPYRGMDYWNCFELSWLLPSGKPVVAIGEFAIPADSPNIIESKSFKLYLNSLNQSVFASEAELLSVLEKDLSATAGKPVGVRVRRLDEVAREGLAVLPGTCIDDLDVSISNYSAPQPDLLVCDAARVVEQSLHSHLLKSNCPVTGQPDWGSVLVEYRGPALEPASLLAYLVSFRQHADFHEQCVERIFLDLQKHLQPEYLTVYARYVRRGGLDINPYRTTLAEVPRNRRLVRQ

SEQ ID NO: 48785 - protein, 276 aa, Pseudomonas arsenicoxydans
  REGION 1..276: note = tr|A0A4P6G1A5|A0A4P6G1A5_9PSED NADPH-dependent 7-cyano-7-deazaguanine reductase OS=Pseudomonas arsenicoxydans OX=702115 GN=queF PE=3 SV=1
MHPAAEHSPLGKSSEYIATYTPSLLFPIPRTSKWAELGLTAETLPYKGVDFWNCFELSWLLPSGKPVVAIGEFSIPADSANIIESKSFKLYLNSLNQTPFADTATLEATLVKDLSAAAGKPVGVRIRSLKEVEAEGVVALPGVCIDDLEISVSNYEHPRPELLRCDQSRIVEESVHSHLLKSNCPVTSQPDWGSVAVEYRGAALDHASLLEYIVSFRQHSDFHEQCVERIFLDLQRLLKPEKLTVYARYVRRGGLDINPYRSTEEVQLPNHRLVRQ

SEQ ID NO: 48786 - protein, 276 aa, Pseudomonas arsenicoxydans
  REGION 1..276: note = tr|A0A1H0K761|A0A1H0K761_9PSED NADPH-dependent 7-cyano-7-deazaguanine reductase OS=Pseudomonas arsenicoxydans OX=702115 GN=queF PE=3 SV=1
MHPAAEHSPLGKSSEYIATYTPSLLFPIPRTAKWAELGLTAETLPYKGVDFWNCFELSWLLPSGKPVVAIGEFSIPADSPNIIESKSFKLYLNSLNQTPFADTATLETTLVKDLSAAAGKPVGVRIRSLKEVEAEGVVALPGVCIDDLEISVSNYEHPRPELLRCDQSRIVEESVHSHLLKSNCPVTSQPDWGSVAVEYRGAALDHASLLEYIVSFRQHSDFHEQCVERIFLDLQRLLKPEKLTVYARYVRRGGLDINPYRSTEDVQLPNHRLVRQ

SEQ ID NO: 48787 - protein, 276 aa, Pseudomonas asplenii
  REGION 1..276: note = tr|A0A438KVD5|A0A438KVD5_9PSED NADPH-dependent 7-cyano-7-deazaguanine reductase OS=Pseudomonas asplenii; OX = 53407 GN=queF PE=3 SV=1
MHPAAEHSPLGKSSEYIATYTPSLLFPIPRAAKWAELGLSAETLPYVGVDFWNCFELSWLLPSGKPVVAIGEFSIPADSPNIIESKSFKLYLNSLNQTPFVDTASLEAVLRADLSAAAGKPVGVRVRRLGDVQAEGVVALPGVCIDDLEISVSDYAHPRPELLRCDASRVVEEAVHSHLLKSNCPVTSQPDWGSVVVEYRGAALDHASLLAYLVSFRQHSDFHEQCVERVFLDLQRLLKPEKLTVYARYVRRGGLDINPYRSTEKVEFQNLRLVRQ

SEQ ID NO: 48788 - protein, 276 aa, Pseudomonas asplenii
  REGION 1..276: note = tr|A0A1H1WK97|A0A1H1WK97_9PSED NADPH-dependent 7-cyano-7-deazaguanine reductase OS=Pseudomonas asplenii; OX = 53407 GN=queF PE=3 SV=1
MHPAAEHSPLGKSSEYIATYTPSLLFPIPRAAKWAELGLSADTLPYQGVDFWNCFELSWLLPSGKPVVAIGEFSIPADSPNIIESKSFKLYLNSLNQTPFADIPSLEAVLRADLSAAAGKPVGVRIRPLSEVQAEGVVALPGVCIDELDISVSDYAHPRPELLRCDSSRVVEESVHSHLLKSNCPVTSQPDWGSVVVEYRGAALDHASLLAYLVSFRQHSDFHEQCVERIFLDLQRLLKPEKLTVYARYVRRGGLDINPYRSTESVAFQNQRLVRQ

SEQ ID NO: 48789 - protein, 276 aa, unidentified
  source 1..276: note = Pseudomonas asturiensis
  REGION 1..276: note = tr|A0A1M7Q5D5|A0A1M7Q5D5_9PSED NADPH-dependent 7-cyano-7-deazaguanine reductase OS=Pseudomonas asturiensis OX=1190415 GN=queF PE=3 SV=1
MHPAAEHSPLGKSSEYIATYTPSLLFPIPRTAKWAELGLTAETLPYQGVDFWNCYELSWLLPSGKPVVAIAEFSIPADSPNIIESKSFKLYLNSLNQTAFDTREQVQVTLEKDLSAAAGKPVGVRIRSLDEVEREGVAALPGVCIDDLDISVSSYDRPQPELLCCDPSRVVEESVYSHLLKSNCPVTSQPDWGSVVVEYRGAALDPASLLAYIVSFRQHSDFHEQCVERIFLDLQRLLKPEKLTVYARYVRRGGLDINPYRSTVALVVENGRLARQ

SEQ ID NO: 48790 - protein, 276 aa, Pseudomonas avellanae
  REGION 1..276: note = tr|A0A261WJF0|A0A261WJF0_9PSED NADPH-dependent 7-cyano-7-deazaguanine reductase OS=Pseudomonas avellanae; OX = 46257 GN=queF PE=3 SV=1
MHPAAEHSPLGKSSEYIATYTPSLLFPIPRAAKWAELGLTAQTLPYKGVDFWNCYELSWLLPSGKPVVAIAEFSIPADSPNIIESKSFKLYLNSLNQTAFDDAVQVQATLEKDLSAAAGKPVGVRIRSLAEIEGEGVAALPGVCIDELDITVSSYDRPQPELLRCNDSRVIEESVHSHLLKSNCPVTSQPDWGSVVFEYRGAALDHASLLAYIVSFRQHSDFHEQCVERIFLDLQRLLKPEKLTVYARYVRRGGLDINPYRSTEVLNVDNRRLARQ

SEQ ID NO: 48791 - protein, 276 aa, Pseudomonas avellanae; identical to SEQ ID NO: 48780
  REGION 1..276: note = tr|A0A2S3T5S0|A0A2S3T5S0_9PSED NADPH-dependent 7-cyano-7-deazaguanine reductase OS=Pseudomonas avellanae; OX = 46257 GN=queF PE=3 SV=1

SEQ ID NO: 48792 - protein, 276 aa, Pseudomonas azotoformans
  REGION 1..276: note = tr|A0A1U9PUM6|A0A1U9PUM6_PSEAZ NADPH-dependent 7-cyano-7-deazaguanine reductase OS=Pseudomonas azotoformans OX=47878 GN=queF PE=3 SV=1
MHPAAEHSPLGKSSEYISTYTPSLLFPIPRAAKWAELGLSAETLPYKGVDFWNCFELSWLLPSGKPVVAIGEFSIPADSPNIIESKSFKLYLNSLNQTAFADTASLEATLRTDLSAAAGAPVSVRIRSLAEIEAEGVMALPGVCIDDLDISVSNYEHPRPELLRCDASRVVEESVHSHLLKSNCPVTSQPDWGSVVVEYRGSALDHASLLEYIVSFRQHSDFHEQCVERIFLDLQRLLKPEKLTVYARYVRRGGLDINPYRSTEDVAFQNVRLARQ

SEQ ID NO: 48793 - protein, 276 aa, Pseudomonas azotoformans
  REGION 1..276: note = tr|A0A1V2JCQ7|A0A1V2JCQ7_PSEAZ NADPH-dependent 7-cyano-7-deazaguanine reductase OS=Pseudomonas azotoformans OX=47878 GN=queF PE=3 SV=1
MHPAAEHSPLGKSSEYISTYTPSLLFPIPRAAKWAELGLSAETLPYKGVDFWNCFELSWLLPSGKPVVAIGEFSIPAESPNIIESKSFKLYLNSLNQTAFADTASLEATLRTDLSAAAGKPVSVRIRSLAEIEAEGVMALPGVCIDDLDIRVSNYEHPRPELLRCDDSRIVEESVHSHLLKSNCPVTSQPDWGSVVVEYRGHALEHASLLEYIVSFRQHSDFHEQCVERIFLDLQRLLKPEKLTVYARYVRRGGLDINPYRSTEDVAFQNVRLARQ

SEQ ID NO: 48794 - protein, 276 aa, Pseudomonas baetica
  REGION 1..276: note = tr|A0A2N0DWY4|A0A2N0DWY4_9PSED NADPH-dependent 7-cyano-7-deazaguanine reductase OS=Pseudomonas baetica; OX = 674054 GN=queF PE=3 SV=1
MHPAAEHSPLGKSSEYIATYTPSLLFPIPRTAKWAELGLTADTLPYKGVDFWNCFELSWLLPSGKPVVAIGEFSIPADSPNIIESKSFKLYLNSLNQTAFADISTLEATLVKDLSAAAGKPVGVRVRSLKDVEAEGVVALPGVCIDDLDISVSNYEHPRPELLRCDDSRVVEESVHSHLLKSNCPVTSQPDWGSVVVEYRGAALDHASLLEYIVSFRQHSDFHEQCVERIFLDLQRLLKPEKLTVFARYVRRGGLDINPYRSTESVVLPNHRLVRQ

SEQ ID NO: 48795 - protein, 276 aa, Pseudomonas balearica
  REGION 1..276: note = tr|A0A1G9TE76|A0A1G9TE76_9PSED NADPH-dependent 7-cyano-7-deazaguanine reductase OS=Pseudomonas balearica DSM 6083 OX=1123016 GN=queF PE=3 SV=1
MQHPAELSPLGKSSAYIAHYSPELLFPIARAPKWAELGLTAESLPYSGVDIWNCYELSWLLPSGKPVVAIGEFRIPADSPNIIESKSFKLYLNSLNQSVFDSADAVAETLTRDLSAAVGKSVEVALRSLDEVTAEGVAGLPGRCIDELNVAIEHYDEPRPALLSCDASRQVDEALHSHLLKSNCPVTGQPDWGSVVVEYRGPALSAEGLLAYLVSFRQHADFHEQCVERIFLDLQRLLQPERLTVYARYVRRGGLDINPYRSTGPLAIDNRRLVRQ

SEQ ID NO: 48796 - protein, 276 aa, unidentified
  source 1..276: note = Pseudomonas batumici
  REGION 1..276: note = tr|A0A0C2I993|A0A0C2I993_9PSED NADPH-dependent 7-cyano-7-deazaguanine reductase OS=Pseudomonas batumici; OX = 226910 GN=queF PE=3 SV=1
MHPAAEHSPLGKSSEYIATYTPSLLFPIPRATKWAELGLSAETLPYVGVDFWNCFELSWLLPSGKPVVAIGEFSIPADSPNIIESKSFKLYLNSLNQTPFVDTASLEAVLRADLSAAAGKPVGVRVRRLSEVQAEGVVALPGVCIDDLEINVSDYAHPRPELLRCDESRVVEESVHSHLLKSNCPVTSQPDWGSVVVEYRGAALDHVSLLAYLVSFRQHSDFHEQCVERIFLDLQRLLKPEKLTVYARYVRRGGLDINPYRSTEKVEFQNLRLVRQ

SEQ ID NO: 48797 - protein, 277 aa, Pseudomonas bauzanensis
  REGION 1..277: note = tr|A0A4V5NK35|A0A4V5NK35_9PSED NADPH-dependent 7-cyano-7-deazaguanine reductase QueF OS=Pseudomonas bauzanensis OX=653930 GN=queF PE=4 SV=1
MHPAEQSPLGKSSGYNGIYTPSLLYPISRQPIWQDLGVDPQQLPFHGVDVWNSYEVSWLTPSGKPEVAAVEFTFPVTANARIVESKSFKLYLNSFNQTVFSDRADVLRTLESDLSVTAQAPVMVRVLNVGQLQQEGIGRLPGECLDDLDVTIDTYEYTPELLQCVSGGGWARETLYSHLLKSNCPVTGQPDWGSVMINYAGPALDKAGLLRYLISFRQHGDFHEQCVERIFLDVQRVLGDDCELTVYARYLRRGGLDINPWRSTRAGMPDNMRLARQ

SEQ ID NO: 48798 - protein, 277 aa, Pseudomonas bauzanensis
  REGION 1..277: note = tr|A0A1H9UWT7|A0A1H9UWT7_9PSED NADPH-dependent 7-cyano-7-deazaguanine reductase OS=Pseudomonas bauzanensis OX=653930 GN=queF PE=3 SV=1
MHPAEQSPLGKSSGYNGIYTPSLLYPISRQPIWQDLGVDPQQLPFHGVDVWNSYEVSWLTPSGKPEVAAVEFTFPVTANARIVESKSFKLYLNSFNQTVFSDRADVLRTLESDLSVTAQAPVMVRVLNVGQLQQEGIGRLPGECLDDLDVTIDTYEYMPELLQCVSGGGWARETLYSHLLKSNCPVTGQPDWGSVMINYAGPALDKAGLLRYLISFRQHGDFHEQCVERIFLDVQRVLGDDCELTVYARYLRRGGLDINPWRSTRAGMPDNMRLARQ

SEQ ID NO: 48799 - protein, 276 aa, Pseudomonas benzenivorans
  REGION 1..276: note = tr|A0A1G8DJC4|A0A1G8DJC4_9PSED NADPH-dependent 7-cyano-7-deazaguanine reductase OS=Pseudomonas benzenivorans OX=556533 GN=queF PE=3 SV=1
MHPAAEDSPLGKSSEYIAIYTPSLLFPIPRAPKWAELGLTAETLPYQGVDFWNCFELSWLLPSGKPVVAIGEFAIPADSPNIIESKSFKLYLNSLNQTVFADGAELLAVLQRDLSAAAGKPVGVRLRSLAEVAAEGVAMLPGVCIDELDVAIHSYARPQPELLRCEPGRIVEESLHSHLLKSNCPVTGQPDWGSVVVQYRGAALDHAGLLAYLVSFRQHADFHEQCVERIFLDLLRLLEPEHLTVYARYVRRGGLDINPYRSTSAIRPDNRRLVRQ

SEQ ID NO: 48800 - protein, 276 aa, Pseudomonas borbori
  REGION 1..276: note = tr|A0A1I5WLA0|A0A1I5WLA0_9PSED NADPH-dependent 7-cyano-7-deazaguanine reductase OS=Pseudomonas borbori; OX = 289003 GN=queF PE=3 SV=1
MHSAAEDSPLGKSSEYIATYTPSLLFPIARAAKWAELGLTAETLPYRGVDFWNCFELSWLLPSGKPVVAIGEFAIPADSPNIIESKSFKLYLNSLNQTAFADVAELQEVLRRDLSAATGKPVGVRVRSLAEVTAEGVATLPGQCIDDLDVVIGNYARPQPELLRCEPQRLVEESLHSHLLKSNCPVTGQPDWGSVVVRYRGAALDHASLLAYLVSFRQHADFHEQCVERIFLDLQHLLQPEYLTVYARYVRRGGLDINPYRSTAPIAPDNRRLVRQ

SEQ ID NO: 48801 - protein, 276 aa, Pseudomonas brassicacearum
  REGION 1..276: note = tr|A0A423H5H4|A0A423H5H4_9PSED NADPH-dependent 7-cyano-7-deazaguanine reductase OS=Pseudomonas brassicacearum OX=930166 GN=queF PE=3 SV=1
MHPAAEHSPLGKSSEYIATYTPSLLFPIPRTAKWAELGLTAETLPYKGVDFWNCFELSWLLPSGKPVVAIGEFSIPADSPNIIESKSFKLYLNSLNQTPFADTQSLEATLVTDLSAAAGKPVGVRIRSLNEVQAEGVVALPGVCIDDLDISVSNYEHPRPELLRCDDSRIVEESVHSHLLKSNCPVTSQPDWGSVAVEYRGAALDHASLLAYLVSFRQHSDFHEQCVERIFLDLQRLLKPEKLTVYARYVRRGGLDINPYRSTEAVQLPNHRLVRQ

SEQ ID NO: 48802 - protein, 276 aa, Pseudomonas brassicacearum
  REGION 1..276: note = tr|A0A423FWJ6|A0A423FWJ6_9PSED NADPH-dependent 7-cyano-7-deazaguanine reductase OS=Pseudomonas brassicacearum OX=930166 GN=queF PE=3 SV=1
MHPAAEHSPLGKSSEYIATYTPSLLFPIPRTAKWAELGLTAETLPYKGVDFWNCFELSWLLPSGKPVVAIGEFAIPADSPNIIESKSFKLYLNSLNQTPFDTTQSLEATLRQDLSAAAGKPVGVRIRSLKDVEDEGVVALPGVCIDDLDIRVDSYEHPRPELLRCDDSRMVEESLHSHLLKSNCPVTSQPDWGSVAVEYRGAALDHASLLAYLVSFRQHSDFHEQCVERIFLDLQRLLKPQKLTVYARYVRRGGLDINPYRSTEAVQLPNQRLVRQ

SEQ ID NO: 48803 - protein, 276 aa, Pseudomonas brenneri
  REGION 1..276: note = tr|A0A4R6YMT6|A0A4R6YMT6_9PSED NADPH-dependent 7-cyano-7-deazaguanine reductase OS=Pseudomonas brenneri; OX = 129817 GN=queF PE=3 SV=1
MHPAAEHSPLGKSSEYISTYTPSLLFPIPRAAKWAELGLTAETLPYNGVDFWNCFELSWLLPSGKPVVAIGEFSIPADSPNIIESKSFKLYLNSLNQTPFAQVSNLEATLRADLSAAAGKPVGVRIRSLAEVEDEGLVRLPGVCIDDLDISVSNYEHPRPELLRCDDSRVVEESVHSHLLKSNCPVTSQPDWGSVAVEYRGAALDHASLLEYLVSFRQHSDFHEQCVERIFLDLQRLLKPEKLTVYARYVRRGGLDINPYRSTEDVPFQNLRLARQ

SEQ ID NO: 48804 - protein, 276 aa, Pseudomonas brenneri
  REGION 1..276: note = tr|A0A5B2UVK0|A0A5B2UVK0_9PSED NADPH-dependent 7-cyano-7-deazaguanine reductase OS=Pseudomonas brenneri; OX = 129817 GN=queF PE=3 SV=1
MHPAAEHSPLGKSSEYISTYTPSLLFPIPRAAKWAELGLSAETLPYKGVDFWNCFELSWLLPSGKPVVAIGEFSIPADSPNIIESKSFKLYLNSLNQTPFADMPSLEATLRTDLSAAAGKPVGVRIRSLAEVEGEGVGSLPGVCIDELDISVSNYEHPRPELLRCDDSRVVEESVHSHLLKSNCPVTSQPDWGSVAVEYRGAALDHASLLAYLVSFRQHSDFHEQCVERIFLDLQRLLKPEKLTVYARYVRRGGLDINPYRSTEDVSFQNLRLARQ

SEQ ID NO: 48805 - protein, 276 aa, unidentified
  source 1..276: note = Pseudomonas canadensis
  REGION 1..276: note = tr|A0A423F5Y3|A0A423F5Y3_9PSED NADPH-dependent 7-cyano-7-deazaguanine reductase OS=Pseudomonas canadensis; OX = 915099 GN=queF PE=3 SV=1
MHPAAEHSPLGKSSEYISTYTPSLLFPIPRAAKWAELGLSAETLPYKGVDFWNCFELSWLLPSGKPVVAIGEFSIPADSPNIIESKSFKLYLNSLNQTAFADAASLEATLRADLSAAAGAPVSVRIRSLAEIEAEGVMALPGVCIDDLDISVSNYEHPRPELLRCDNSRVVEESVHSHLLKSNCPVTSQPDWGSVVVQYRGHALDHASLLEYIVSFRQHSDFHEQCVERIFLDLQRLLKPETLTVYARYVRRGGLDINPYRSTEDMAFQNVRLARQ

SEQ ID NO: 48806 - protein, 304 aa, Pseudomonas cannabina
  REGION 1..304: note = tr|A0A0P9L2N3|A0A0P9L2N3_PSECA NADPH-dependent 7-cyano-7-deazaguanine reductase OS=Pseudomonas cannabina; OX = 86840 GN=queF PE=3 SV=1
MRAEVDFSLKARSKPYRLAALILDPGIAMHPAAEHSPLGKSSEYIATYTPSLLFPIPRAAKWAELGLTAQTLPYKGVDFWNCYELSWLLPSGKPVVAIAEFSIPADSPNIIESKSFKLYLNSLNQTAFDGVALVQATLEKDLSAAAGKPVGVRIRSLADIEGEGVAALPGVCIDDLEITVSSYDRPQPELLRCDGSRVVEESVHTHLLKSNCPVTSQPDWGSVVVDYRGAALDHASLLAYIVSFRQHSDFHEQCVERIFLDLQRLLKPEKLTVYARYVRRGGLDINPYRSTEVLSVDNRRLARQ

SEQ ID NO: 48807 - protein, 304 aa, Pseudomonas cannabina
  REGION 1..304: note = tr|A0A3M3PV26|A0A3M3PV26_PSECA NADPH-dependent 7-cyano-7-deazaguanine reductase OS=Pseudomonas cannabina; OX = 86840 GN=queF PE=3 SV=1
MRAEADFSLKARGKPYRLAALILDPGIAMHPAAEHSPLGKSSEYIATYTPSLLFPIPRAAKWAELGLTAQTLPYKGVDFWNCYELSWLLPSGKPMVAIAEFSIPADSPNIIESKSFKLYLNSLNQTAFDGVALVQATLEKDLSAAAGKPVGVRIRSLADIEGEGVAALPGVCIDDLDITVSSYDRPQPELLRCDGSRVVEESVHTHLLKSNCPVTSQPDWGSVVVDYRGAALDHASLLAYIVSFRQHSDFHEQCVERIFLDLQRLLKPEKLTVYARYVRRGGLDINPYRSTEVLSVDNRRLARQ

SEQ ID NO: 48808 - protein, 276 aa, unidentified
  source 1..276: note = Pseudomonas capeferrum
  REGION 1..276: note = tr|A0A084C9X1|A0A084C9X1_9PSED NADPH-dependent 7-cyano-7-deazaguanine reductase OS=Pseudomonas capeferrum; OX = 1495066 GN=queF PE=3 SV=1
MHPAAEHSPLGKSSEYIATYSPELLFPIPRTAKWAELGVTAQTLPWQGVDYWNCFELSWLLPSGKPVVAIGEFAIPADSPNIIESKSFKLYLNSLNQTVFAAIGELQACLEKDLSAAAGKPVSVKVRTLAEVEAQGVVALPGQCIDALDVAISNYEQPQPELLRCNPERVVEETVHSHLLKSNCPVTGQPDWGSVVVEYKGRALDHASLLTYLISFRQHADFHEQCVERIYLDLKNLLQPEHLTVYARYVRRGGLDINPYRSTGAISPNNVRLVRQ

SEQ ID NO: 48809 - protein, 276 aa, Pseudomonas caricapapayae
  REGION 1..276: note = tr|A0A3M6F1C0|A0A3M6F1C0_9PSED NADPH-dependent 7-cyano-7-deazaguanine reductase OS=Pseudomonas caricapapayae OX=46678 GN=queF PE=3 SV=1
MHPAAEHSPLGKSSEYIATYTPSLLFPIPRAAKWAELGLTAQTLPYQGVDFWNCYELSWLLPSGKPVVAIGEFSIPAESPNIIESKSFKLYLNSLNQTAFASVEQLKTTLEQDLSAAAGKPVGVRIRSLAAIEEEGVAALPGMCIDDLDISVSSYDRPQPELLRCDESRVVEESVHSHLLKSNCPVTSQPDWGSVVVEYRGAALDHSSLLAYIVSFRQHSDFHEQCVERIFLDLQRLLKPEKLTVYARYVRRGGLDINPYRSTETLAVNNRRLARQ

SEQ ID NO: 48810 - protein, 276 aa, Pseudomonas caricapapayae
  REGION 1..276: note = tr|A0A0N8QS00|A0A0N8QS00_9PSED NADPH-dependent 7-cyano-7-deazaguanine reductase OS=Pseudomonas caricapapayae OX=46678 GN=queF PE=3 SV=1
MHPAAEHSPLGKSSEYIATYTPSLLFPIPRAAKWAELGLTAQTLPYQGVDFWNCYELSWLLPSGKPVVAIGEFSIPAESPNIIESKSFKLYLNSLNQTAFASVEQLKTTLEQDLSAAAGKPVGVRIRSLAAIEEEGVAALPGMCIDDLDISVSSYDRPQPELLRCDESRVVEESVHSHLLKSNCPVTSQPDWGSVVVEYRGAALDHSSLLAYIVSFRQHSDFHEQCVERIFLDLQRLLKPEKLTVYARYVRRGGLDINPYRSTETLAVDNRRLARQ

SEQ ID NO: 48811 - protein, 276 aa, unidentified
  source 1..276: note = Pseudomonas caspiana
  REGION 1..276: note = tr|A0A502JFD8|A0A502JFD8_9PSED NADPH-dependent 7-cyano-7-deazaguanine reductase OS=Pseudomonas caspiana; OX = 1451454 GN=queF PE=3 SV=1
MHPAAEHSPLGKSSEYIATYTPSLLFPIPRTAKWAELGLTAETLPYKGVDFWNCFELSWLLPSGKPVVAIGEFTIPADSPNIIESKSFKLYLNSLNQTPFADTAILEATLAKDLSAAAGKPVGVRVRNLKDVEAEGVVALPGVCIDDLDISVSNYEHPRPELLRCDQSRIVEESVHSHLLKSNCPVTSQPDWGSVAVEYRGAALDHASLLEYIVSFRQHSDFHEQCVERIFLDLQRLLKPEKLTVYARYVRRGGLDINPYRSTEDVQLPNHRLVRQ

SEQ ID NO: 48812 - protein, 276 aa, unidentified
  source 1..276: note = Pseudomonas caspiana
  REGION 1..276: note = tr|A0A1Y3P4S4|A0A1Y3P4S4_9PSED NADPH-dependent 7-cyano-7-deazaguanine reductase OS=Pseudomonas caspiana; OX = 1451454 GN=queF PE=3 SV=1
MHPAAEHSPLGKSSEYIATYTPSLLFPIPRAAKWAELGLTAETLPYQGVDFWNCYELSWLLPSGKPVVAIAEFSVAADSPNIIESKSFKLYLNSLNQTVFADRAELTATLVKDLSAAAGKPVGVRIRTLADIEGEGVASMPGLCIDDLDVSIDSYDRPQPELLRCDDSRIVEQSLHSHLLKSNCPVTSQPDWGSVAVEYRGAELDAASLLAYIVSFRQHSDFHEQCVERIFLDLQRLLKPEKLTVYARYVRRGGLDINPYRSTESLSPDNRRLARQ

SEQ ID NO: 48813 - protein, 276 aa, Pseudomonas cedrina
  REGION 1..276: note = tr|A0A2S9D6K3|A0A2S9D6K3_PSECE NADPH-dependent 7-cyano-7-deazaguanine reductase OS=Pseudomonas cedrina; OX = 651740 GN=queF PE=3 SV=1
MHPAAEHSPLGKSSEYISTYTPSLLFPIPRAAKWAELGLSAETLPYKGVDFWNCFELSWLLPSGKPVVAIGEFSIPADSPNIIESKSFKLYLNSLNQSAFADTQSLEATLRTDLSSAAGKPVSVRIRSLADIEAEGVMALPGVCIDGLDINVSSYEHPRPELLRCDDSRVVEESVHSHLLKSNCPVTSQPDWGSVVVEYRGAALDHASLLEYIVSFRQHSDFHEQCVERIFLDLQRLLKPEKLTVYARYVRRGGLDINPYRSTENTQFLNVRLARQ

SEQ ID NO: 48814 - protein, 276 aa, Pseudomonas cedrina
  REGION 1..276: note = tr|A0A1V2KGX8|A0A1V2KGX8_PSECE NADPH-dependent 7-cyano-7-deazaguanine reductase OS=Pseudomonas cedrina subsp. cedrina OX=76762 GN=queF PE=3 SV=1
MHPAAEHSPLGKSSEYISTYTPSLLFPIPRAAKWAELGLSAETLPYKGVDFWNCFELSWLLPSGKPVVAIGEFCIPADSPNIIESKSFKLYLNSLNQTAFAATASLEATLRTDLSAAAGKPVSVRIRSLAEIEAEGVLALPGVCIDDLDISVSNYEHPRPELLRCDDSRIVEESVHSHLLKSNCPVTSQPDWGSVVVEYRGSALDHASLLEYIVSFRQHSDFHEQCVERIFLDLQRLLKPEKLTVYARYVRRGGLDINPYRSTEEVAFQNVRLARQ

SEQ ID NO: 48815 - protein, 276 aa, unidentified
  source 1..276: note = Pseudomonas cerasi
  REGION 1..276: note = tr|A0A193SRH8|A0A193SRH8_9PSED NADPH-dependent 7-cyano-7-deazaguanine reductase OS=Pseudomonas cerasi; OX = 1583341 GN=queF PE=3 SV=1
MHPAAEHSPLGKSSEYIATYTPSLLFPIPRAAKWAELGLTAQTLPYQGVDFWNCYELSWLLPSGKPVVAIGEFSIPAESPNIIESKSFKLYLNSLNQTAFASVEQLQTTLEQDLSAAAGKPVGVRIRSLAAIEEEGVAALPGVCIDDLDISVSSYDRPQPELLHCDDSRVVEESVHSHLLKSNCPVTSQPDWGSVVVEYRGAALDHASLLAYIVSFRQHSDFHEQCVERIFLDLQRLLKPEKLTVYARYVRRGGLDINPYRSTETLDVSNRRLARQ

SEQ ID NO: 48816 - protein, 276 aa, unidentified
  source 1..276: note = Pseudomonas chengduensis
  REGION 1..276: note = tr|A0A1G6V2E2|A0A1G6V2E2_9PSED NADPH-dependent 7-cyano-7-deazaguanine reductase OS=Pseudomonas chengduensis OX=489632 GN=queF PE=3 SV=1
MQHPAEHSPLGKSSQYIAEYSPELLFPISRTTKWAELGLDGASLPYQGVDYWNCYELSWLLPSGKPVVAIGEFAIPADSPNIIESKSFKLYLNSLNQSAFAGWDELQATLVRDLSAVAGKPVAVRLRSLAEVSEEGVATLPGQCIDELDISVSQYDHPQPELLRCDAGRVLEESLHSHLLKSNCPVTGQPDWGSLVVEYRGAALDHASLLAYLVSFRQHADFHEQCVERIFLDLQRLLQPQSLTVYARYVRRGGLDINPYRSTEALKPENGRLARQ

SEQ ID NO: 48817 - protein, 276 aa, unidentified
  source 1..276: note = Pseudomonas chloritidismutans
  REGION 1..276: note = tr|V4QAL9|V4QAL9_PSECO NADPH-dependent 7-cyano-7-deazaguanine reductase OS=Pseudomonas chloritidismutans AW-1 OX=1263865 GN=queF PE=3 SV=1
MQHPAEHSPLGKSSDYVATYSPHLLFPIPRAPKWAELGLTAETLPYQGVDLWNCYELSWLLPSGKPVVAIGEFEIPADSPSIIESKSFKLYLNSLNQSVFESREALAEVMSSDLSAAAGKPVKVRLRTLDEVAAEGVATLPGRCVDDLDVTIEHYDHPQPGLLACDAGHMVEESLHSHLLKSNCPVTGQPDWGSVVVEYRGAALQAESLLAYLVSFRQHADFHEQCVERIFLDLQRLLQPEKLTVYARYVRRGGLDINPYRSTEAMVVDNRRLVRQ

SEQ ID NO: 48818 - protein, 276 aa, Pseudomonas chlororaphis
  REGION 1..276: note = tr|A0A3G7JDU4|A0A3G7JDU4_9PSED NADPH-dependent 7-cyano-7-deazaguanine reductase OS=Pseudomonas chlororaphis subsp. aurantiaca OX=86192 GN=queF PE=3 SV=1
MHPAAEHSPLGKSSEYVSTYTPSLLFPIPRAAKWAELGLSADTLPYKGVDFWNCFELSWLLPSGKPVVAIAEFSIPADSPNIIESKSFKLYLNSLNQTPFADRQSLEETLRADLSAAAGKPVGVRIRSLGEVEAEGVVALPGTCIDELDISVSSYEHPRPELLQCDRSRTVKESVHSHLLKSNCPVTSQPDWGSVVVEYRGPALDHASLLAYLVSFRQHSDFHEQCVERIFLDLQRLLQPEKLTVYARYVRRGGLDINPYRSTETASFANFRLVRQ

SEQ ID NO: 48819 - protein, 276 aa, Pseudomonas chlororaphis
  REGION 1..276: note = tr|A0A3G7BGA4|A0A3G7BGA4_9PSED NADPH-dependent 7-cyano-7-deazaguanine reductase OS=Pseudomonas chlororaphis subsp. piscium OX=1513890 GN=queF PE=3 SV=1
MHPAAEHSPLGKSSEYVSTYTPSLLFPIPRAAKWAELGLSADTLPYKGVDFWNCFELSWLLPSGKPVVAIAEFSIPADSPNIIESKSFKLYLNSLNQTPFADRQSLEETLRADLSAAAGKPVGVRIRSLGEVEAEGVVALPGTCIDELDISVSSYEHPRPELLQCDRSWTVEESVHSHLLKSNCPVTSQPDWGSVVVEYRGPALDHASLLAYLVSFRQHSDFHEQCVERIFLDLQRLLQPEKLTVYARYVRRGGLDINPYRSTETANFANFRLVRQ

SEQ ID NO: 48820 - protein, 339 aa, Pseudomonas cichorii
  REGION 1..339: note = tr|A0A3M4M8T5|A0A3M4M8T5_PSECI NADPH-dependent 7-cyano-7-deazaguanine reductase OS=Pseudomonas cichorii; OX = 36746 GN=queF PE=3 SV=1
MSNFMELSYALQSGLYSSPASASVEADSLVIQGQLSLRPILSLKARCKPYKLAGLIHEIPGIAMHPAAEHSPLGKSSEYIATYTPSLLFPIPRAAKWAELGLTAQTLPYQGVDFWNCYELSWLLPSGKPVVAIAEFAIPADSPNIIESKSFKLYLNSLNQTSFESSDQLQATLEKDLSAAAGKPVGVRISSLAEIESEGVAGLPGQCIDELDVSIASYDHPQPELLRCDDSRIVEESLHSHLLKSNCPVTSQPDWGSVVVEYRGAALDPASLLAYIVSFRQHSDFHEQCVERIFLDLQRLLKPERLTVYARYVRRGGLDINPYRSTEALQVDNRRLARQ

SEQ ID NO: 48821 - protein, 317 aa, Pseudomonas cichorii
  REGION 1..317: note = tr|A0A3M3T8M8|A0A3M3T8M8_PSECI NADPH-dependent 7-cyano-7-deazaguanine reductase OS=Pseudomonas cichorii; OX = 36746 GN=queF PE=3 SV=1
MPCSNEFVAARASQYEQALKLKARCKPYKLAGLIHEIPGIAMHPAAEHSPLGKSSEYIATYTPSLLFPIPRAAKWAELGLTAQTLPYRGVDFWNCYELSWLLPSGKPVVAIAEFSIPADSPNIIESKSFKLYLNSLNQTSFESTEQLQATLEKDLSAAAGKPVGVRISRLADIESEGVASLPGTCIDDLDVSIDSYDHPQPELLHCDDSRVIEESLHSHLLKSNCPVTSQPDWGSVVVEYRGAALDHASLLAYIVSFRQHSDFHEQCVERIFLDLQRLLKPEKLTVYARYVRRGGLDINPYRSTEALQVDNRRLARQ

SEQ ID NO: 48822 - protein, 276 aa, Pseudomonas citronellolis
  REGION 1..276: note = tr|A0A1A9KEY0|A0A1A9KEY0_9PSED NADPH-dependent 7-cyano-7-deazaguanine reductase OS=Pseudomonas citronellolis OX=53408 GN=queF PE=3 SV=1
MQHPAEHSPLGKSSEYVSTYAPELLFPIGRATKWAELGLDGANLPYRGVDIWNCYELSWLTPGGKPVVAIGEFAIPAQSPNIIESKSFKLYLNSLNQSPFDSREALRAVLERDLSAAAGAPVSVRLRSLDEVAEEGVAKLPGRCIDDLDIAVDSYDHPRPELLRCDDARRVDEVLYSHLLKSNCPVTGQPDWGTLVVDYAGPALDPASLLAYVVSFRQHQDFHEQCVERIFLDLQRLLQPSRLTVYARYVRRGGLDINPYRSSGEIAPDNRRLVRQ

SEQ ID NO: 48823 - protein, 276 aa, Pseudomonas citronellolis
  REGION 1..276: note = tr|A0A4Z0ISA2|A0A4Z0ISA2_9PSED NADPH-dependent 7-cyano-7-deazaguanine reductase OS=Pseudomonas citronellolis OX=53408 GN=queF PE=3 SV=1
MQHPAEHSPLGKSSEYVSTYAPELLFPISRATKWAELGLDGANLPYRGVDIWNCYELSWLTPGGKPVVAIGEFAIPAQSPNIIESKSFKLYLNSLNQSPFDSREALRAVLERDLSAAAGAPVGVRLRSLDEVAEEGVAKLPGRCIDDLDIAVDSYDHPRPELLRCDDARRVDEVLYSHLLKSNCPVTGQPDWGTLVVDYAGPALDPASLLAYVVSFRQHQDFHEQCVERIYLDLQRLLQPSRLTVYARYVRRGGLDINPYRSSMDIAPDNRRLVRQ

SEQ ID NO: 48824 - protein, 276 aa, unidentified
  source 1..276: note = Pseudomonas coleopterorum
  REGION 1..276: note = tr|A0A1H5IK00|A0A1H5IK00_9PSED NADPH-dependent 7-cyano-7-deazaguanine reductase OS=Pseudomonas coleopterorum OX=1605838 GN=queF PE=3 SV=1
MHPAAEHSPLGKSSEYVSTYTPSLLFPIPRAAKWAELGLSADTLPYTGVDVWNCFELSWLLPSGKPVVAIGEFSIPADSPNIIESKSFKLYLNSLNQTPFASVDALEKVLVQDLSGAAGKPVGVKVRRLEEVEAEGVVSLPGVCIDDLDITVSSYDHPQPELLRCDPARIVEESLHSHLLRSNCPVTSQPDWGSVCITYTGAALDPASVLAYLVSFRQHSDFHEQCVERIFTDLQRLLQPQKLTVFARYVRRGGLDINPYRSTEALDFTNGRLVRQ

SEQ ID NO: 48825 - protein, 276 aa, Pseudomonas composti
  REGION 1..276: note = tr|A0A1I5R4F4|A0A1I5R4F4_9PSED NADPH-dependent 7-cyano-7-deazaguanine reductase OS=Pseudomonas composti; OX = 658457 GN=queF PE=3 SV=1
MQHPAEHSPLGKSSRYIAEYSPELLFPISRTTKWAELGLDGANLPYQGVDYWNCYELSWLLPSGKPVVAIGEFAIPADSPNIIESKSFKLYLNSLNQSAFANWDEVQATLVHDLSKVAGKPVAVRLRSLGEVSEEGVATLPGQCIDELDISVSQYDHPQPELLRCDAGRVVEESLHSHLLKSNCPVTGQPDWGSLVVQYRGAALDHASLLAYLVSFRQHADFHEQCVERIFLDLQRLLQPQSLTVYARYVRRGGLDINPYRSSEAITPENGRLARQ

SEQ ID NO: 48826 - protein, 309 aa, Pseudomonas congelans
  REGION 1..309: note = tr|A0A0N8R1K4|A0A0N8R1K4_9PSED NADPH-dependent 7-cyano-7-deazaguanine reductase OS=Pseudomonas congelans; OX = 200452 GN=queF PE=3 SV=1
MWSARVAGQSGFSLKAPRKRYKLAALIHDPGIAMHPAAEHSPLGKSSEYIATYTPSLLFPIPRAAKWAELGLTAETLPYQGVDFWNCYELSWLLPSGKPVVAIGEFSIPAESPNIIESKSFKLYLNSLNQTAFASVEQLQATLEQDLSAAAGKPVGVRIRSLAEIEEEGVAALPGMCIDDLDISVSSYDRPQPELLRCDDSRVVEESVHSHLLKSNCPVTSQPDWGSVVVEYRGAALDHASLLAYIVSFRQHSDFHEQCVERIFLDLQRLLKPEKLTVYARYVRRGGLDINPYRSTETLDVDNRRLARQ

SEQ ID NO: 48827 - protein, 276 aa, unidentified
  source 1..276: note = Pseudomonas coronafaciens
  REGION 1..276: note = tr|A0A0M0V1M1|A0A0M0V1M1_9PSED NADPH-dependent 7-cyano-7-deazaguanine reductase OS=Pseudomonas coronafaciens pv. porri OX=83964 GN=queF PE=3 SV=1
MHPAAEHSPLGKSSEYIATYTPSLLFPIPRAAKWAELGLTAQTLPYQGVDFWNCYELSWLLPSGKPVVAIAEFSIPADSPNIIESKSFKLYLNSLNQTAFDSVANVQTTLEQDLSAAAGKPVGVRIRSLSEIESEGVAALPGVCIDDLDIVVSSYDRPQPELLRCDDSRIVEESVYSHLLKSNCPVTSQPDWGSVVVEYRGAALDHSSLLAYIVSFRQHSDFHEQCVERIFLDLQRLLKPEKLTVYARYVRRGGLDINPYRSTEVLDVDNRRLARQ

SEQ ID NO: 48828 - protein, 276 aa, unidentified
  source 1..276: note = Pseudomonas coronafaciens
  REGION 1..276: note = tr|A0A3M3LLN5|A0A3M3LLN5_9PSED NADPH-dependent 7-cyano-7-deazaguanine reductase OS=Pseudomonas coronafaciens pv. zizaniae OX=251700 GN=queF PE=3 SV=1
MHPAAEHSPLGKSSEYIATYTPSLLFPIPRAAKWAELGLTAQTLPYQGVDFWNCYELSWLLPSGKPVVAIAEFSIPADSPNIIESKSFKLYLNSLNQTAFDSVANVQTTLEQDLSAAAGKPVGVRIRSLSEIKSEGVAALPGVCIDDLDIVVSSYDRPQPELLRCDDSRIVEESVYSHLLKSNCPVTSQPDWGSVVVEYRGAALDHSSLLAYIVSFRQHSDFHEQCVERIFLDLQRLLKPEKLTVYARYVRRGGLDINPYRSTEVLDVDNRRLARQ

SEQ ID NO: 48829 - protein, 276 aa, Pseudomonas corrugata
  REGION 1..276: note = tr|A0A3M3EPH2|A0A3M3EPH2_9PSED NADPH-dependent 7-cyano-7-deazaguanine reductase OS=Pseudomonas corrugata; OX = 47879 GN=queF PE=3 SV=1
MHPAAEHSPLGKSSEYIATYTPSLLFPIPRTAKWAELGLTADTLPYKGVDFWNCFELSWLLPSGKPVVAIGEFAIPADSPNIIESKSFKLYLNSLNQTPFADTASLEATLRQDLSAAAGKPVQVRVRSLKDVEREGVVALPGVCIDDLDISVDSYAHPRPELLQCDESRIVEESLHSHLLKSNCPVTSQPDWGSVVVEYRGAALDPASLLAYIVSFRQHSDFHEQCVERIFLDLQRLLKPEKLTVYARYVRRGGLDINPYRSTESVQLPNLRLVRQ

SEQ ID NO: 48830 - protein, 276 aa, Pseudomonas costantinii
  REGION 1..276: note = tr|A0A1S2V6I0|A0A1S2V6I0_9PSED NADPH-dependent 7-cyano-7-deazaguanine reductase OS=Pseudomonas costantinii OX=168469 GN=queF PE=3 SV=1
MHPAAEHSPLGKSSEYISTYTPSLLFPIPRAAKWAELGLSAETLPYKGVDFWNCFELSWLLPSGKPVVAIGEFSIPADSPNIIESKSFKLYLNSLNQTAFADTQSLEATLRTDLSAAAGKPVTVRIRSLAEIEAEGVMALPGACIDDLDISVSNYEHPRPELLRCDDSRIVEESVHSHLLKSNCPVTSQPDWGSVVVQYRGHALDHASLLEYIVSFRQHSDFHEQCVERIFLDLQRLLKPEKLTVYARYVRRGGLDINPYRSTEDVAFQNVRLARQ

SEQ ID NO: 48831 - protein, 276 aa, Pseudomonas cremoricolorata
  REGION 1..276: note = tr|A0A089WUQ4|A0A089WUQ4_9PSED NADPH-dependent 7-cyano-7-deazaguanine reductase OS=Pseudomonas cremoricolorata OX=157783 GN=queF PE=3 SV=1
MHPAAEHSPLGKSSEYISTYTPSLLFAIPRQAKWAELGVAAGNLPWQGVDFWNCFELSWLLPSGKPVVAMGEFAIPADSPNIIESKSFKLYLNSLNQTPFASISELRECLARDLSAVAGKPVGVRVRTLAEVEAEGLAALPGQCIDALDVTISGYDQPQPELLRCNPERVVEETVHSHLLKSNCPVTGQPDWGSVVVDYHGAALDHASLLAYLVSFRQHADFHEQCVERIYLDLLTLLKPERLTVYARYVRRGGLDINPYRSSALISPRNLRLARQ

SEQ ID NO: 48832 - protein, 276 aa, Pseudomonas cuatrocienegasensis
  REGION 1..276: note = tr|A0A1H9L175|A0A1H9L175_9PSED NADPH-dependent 7-cyano-7-deazaguanine reductase OS=Pseudomonas cuatrocienegasensis OX=543360 GN=queF PE=3 SV=1
MHPAAEDSPLGKASEYIATYSPSLLFPIPRAAKWAELGLTAETLPYTGVDLWNCFELSWLLPSGKPVVAIGEFAIPADSPAIIESKSFKLYLNSLNQTPFASTESLVQVLVTDLSAAAGKPVGVRVRTLAEVAAEGVATLPGRCIDELDVSISNYDQPQPQVLRCTAGTRVEEQLHSHLLKSNCPVTGQPDWGSVVVDYCGPALDPASLLAYLVSFRQHADFHEQCVERIFLDLQRLLQPERLTVYARYVRRGGLDINPYRSTHALQPDNRRLVRQ

SEQ ID NO: 48833 - protein, 275 aa, unidentified
  source 1..275: note = Pseudomonas daroniae
  REGION 1..275: note = tr|A0A4Q9QHM6|A0A4Q9QHM6_9PSED NADPH-dependent 7-cyano-7-deazaguanine reductase OS=Pseudomonas daroniae; OX = 2487519 GN=queF PE=3 SV=1
MHSVEHSPLGKSSEYIATYSPELLFPIPRVAKWAELGLSAETLPYRGVDFWNCFELSWLLPSGKPVVAIGEFTIAADSPNIIESKSFKLYLNSLNQSVFATEAELVAVLEKDLSATAGKPVGVRVRRLDEVEQEGLATLPGTCIDDLDVSISNYTAPRPELLHCDTSRVVEESLHSHLLKSNCPVTGQPDWGSVVVEYRGAALESASLLAYLVSFRQHADFHEQCVERIFLDLQRLLRPEYLTVYARYVRRGGLDINPYRTTLTQLPENRRLVRQ

SEQ ID NO: 48834 - protein, 276 aa, Pseudomonas deceptionensis
  REGION 1..276: note = tr|A0A0J6GG26|A0A0J6GG26_PSEDM NADPH-dependent 7-cyano-7-deazaguanine reductase OS=Pseudomonas deceptionensis OX=882211 GN=queF PE=3 SV=1
MHPAAEHSPLGKSSEYISTYTPSLLFPIPRAAKWAELGLSAETLPYVGVDYWNCFELSWLLPSGKPVVAIGEFCFAADSPNIVESKSFKLYLNSLNQTVFVDTQSLEATLQADLSAASGKPVSVRVRSLDDVQADGVGVLPGVCIDDLDISVSDYEQPRPELLKCDESQLIEESVYSHLLKSNCPVTSQPDWGTVVVEYRGAALDHASLLAYLVSFRQHSDFHEQCVERIFLDLQRLLKPEKLTVYARYVRRGGLDINPYRSTETVEFQNVRLVRQ

SEQ ID NO: 48835 - protein, 276 aa, Pseudomonas delhiensis
  REGION 1..276: note = tr|A0A239JUW0|A0A239JUW0_9PSED NADPH-dependent 7-cyano-7-deazaguanine reductase OS=Pseudomonas delhiensis; OX = 366289 GN=queF PE=3 SV=1
MQHPAEHSPLGKSSEYVSTYAPELLFPISRATKWAELGLDGARLPYRGVDIWNCYELSWLTPAGKPVVAIGEFAIPAQSPNIIESKSFKLYLNSLNQSAFDSREALRAVLERDLSAAAGAPVGVRLRSLDEVAEEGVAILPGQCIDDLDIAVDGYDHPRPELLRCDDARRVDEVLYSHLLKSNCPVTGQPDWGTLVVDYAGPALDPASLLAYVVSFRQHQDFHEQCVERIYLDLQRLLQPSRLTVYARYVRRGGLDINPYRSSGAIAPDNRRLVRQ

SEQ ID NO: 48836 - protein, 276 aa, unidentified
  source 1..276: note = Pseudomonas denitrificans
  REGION 1..276: note = tr|A0A5J6R1U4|A0A5J6R1U4_PSEDE NADPH-dependent 7-cyano-7-deazaguanine reductase QueF OS=Pseudomonas denitrificans OX=43306 GN=queF PE=4 SV=1
MQHPAEHSPLGKSSEYVSTYAPELLFPISRTTKWAELGLTAQTLPYQGVDLWNCYELSWLTASGKPVVAIGEFAIPAQSPNIIESKSFKLYLNSLNQTAFDNAEAVRAVMERDLSAAAGAPVGVRVRGLDEVAGEGVAVIDGTCVDDLDVAVASYDHPRPELLRCDDTRRVDEVLYSHLLKSNCPVTGQPDWGTLVVEYSGPVLDAASLLAYVVSFRQHQDFHEQCVERIYLDLQRLLQPTRLTVYARYVRRGGLDINPYRSSEAVQPDNRRLVRQ

SEQ ID NO: 48837 - protein, 276 aa, unidentified
  source 1..276: note = Pseudomonas donghuensis
  REGION 1..276: note = tr|A0A2M9VM89|A0A2M9VM89_9PSED NADPH-dependent 7-cyano-7-deazaguanine reductase OS=Pseudomonas donghuensis OX=1163398 GN=queF PE=3 SV=1
MHPAAEHSPLGKSSEYVATYTPSLLFPIPRAAKWAELGVSAETLPWLGVDFWNCFELSWLLPSGKPVVAIGEFAIPADSPNIIESKSFKLYLNSLNQTVFESPAALQACLVKDLSAAAGKPVGVQIRSLAEVEGQGVVGLPGVCIDELDVSISNYEQPQPELLRCDSSHVVEETLHSHLLKSNCPVTGQPDWGSVTVHYRGAALDHASLLTYLISFRQHADFHEQCVERIYLDLKRLLNPEHLTVYARYVRRGGLDINPYRSTSQVTLENLRLVRQ

SEQ ID NO: 48838 - protein, 276 aa, unidentified
  source 1..276: note = Pseudomonas dryadis
  REGION 1..276: note = tr|A0A4Q9QUQ7|A0A4Q9QUQ7_9PSED NADPH-dependent 7-cyano-7-deazaguanine reductase OS=Pseudomonas dryadis; OX = 2487520 GN=queF PE=3 SV=1
MHPVVENSPLGKASEYIDTYTPELLFPISRAAKWAELGLTAETLPYQGVDFWNCFELSWLLPSGKPVVAIGEFAIAADSPNIIESKSFKLYLNSLNQSVFASEAELLGVLRKDLSAAAGKPVGVRLRSLGEVAAEGLASLPGICIDELDVHISQYDAPQAGLLRCNPERIVEQSLHSHLLKSNCPVTGQPDWGSVVVQYRGAELEPASLLAYLVSFRQHADFHEQCVERIFLDLKRVLQPESLTVYARYVRRGGLDINPYRSTAAIEPDNRRLVRQ

SEQ ID NO: 48839 - protein, 275 aa, Pseudomonas duriflava
  REGION 1..275: note = tr|A0A562Q8R2|A0A562Q8R2_9PSED NADPH-dependent 7-cyano-7-deazaguanine reductase OS=Pseudomonas duriflava; OX = 459528 GN=queF PE=3 SV=1
MHSVEHSPLGKSSQYTDTYAPALLYPIPRATKWAELGLTRENLPYVGVDIWNCYELSWLTQKGKPVVAVAQFSIPADSPHIIESKSFKLYLNSLNQTRFDHADAVRDVLIKDLSSAAGAAVGVSIESLQNVAIAGFGAAPGFCIDELDVEIDQYNHPDAARLLCSPGRVVKETLHSHLLRSNCPVTGQPDWGSVVIDYEGAQLDREALLAYVVSFRQHADFHEQCVERIFIDLKTLLQPAYLTVYARYVRRGGLDINPYRSTAAIAPEVARLARQ

SEQ ID NO: 48840 - protein, 276 aa, unidentified
  source 1..276: note = Pseudomonas endophytica
  REGION 1..276: note = tr|A0A0Q0WYX5|A0A0Q0WYX5_9PSED NADPH-dependent 7-cyano-7-deazaguanine reductase OS=Pseudomonas endophytica OX=1563157 GN=queF PE=3 SV=1
MHPAAEHSPLGKSSEYISTYTPSLLFPIPRAAKWAELGLSAETLPYVGVDFWNCFELSWLLPSGKPVVAIGEFCFSADSPNIVESKSFKLYLNSLNQTVFDDVNSLEATLQADLSAASGKPVSVRVRSLNEVQADGVGVLPGVCIDDLNITVSDYEHPRPELLKCDESQVVEESLYSHLLKSNCPVTSQPDWGTVVVEYRGAALNHASLLAYLVSFRQHSDFHEQCVERIFLDLQRLLKPEKLTVYARYVRRGGLDINPYRSTEAVEFSNLRLVRQ

SEQ ID NO: 48841 - protein, 276 aa, unidentified
  source 1..276: note = Pseudomonas entomophila
  REGION 1..276: note = sp|Q1I7F9|QUEF_PSEE4 NADPH-dependent 7-cyano-7-deazaguanine reductase OS=Pseudomonas entomophila (strain L48) OX=384676 GN=queF PE=3 SV=1
MHPAAEHSPLGKSSEYIATYTPSLLFPIPRLAKWAELGVSGDALPWQGVDYWNCFELSWLLPSGKPVVAIGEFAIPCDSPNIIESKSFKLYLNSLNQTKFESVAQLQACLAKDLSAAAGKVVAVKVSTLADVEAQGVTTLPGQCIDALDVTIDNYEQPQPELLRCSTERVVEETVHSHLLKSNCPVTGQPDWGSVVVEYKGRALDHASLLTYLISFRQHADFHEQCVERIYLDLKKLLQPEYLTVYARYVRRGGLDINPYRSTRAISPENLRLVRQ

SEQ ID NO: 48842 - protein, 276 aa, unidentified
  source 1..276: note = Pseudomonas entomophila
  REGION 1..276: note = tr|A0A3Q8U0K9|A0A3Q8U0K9_9PSED NADPH-dependent 7-cyano-7-deazaguanine reductase OS=Pseudomonas entomophila OX=312306 GN=queF PE=3 SV=1
MHPAAEHSPLGKSSEYIATYTPALLFPIPRLAKWAELGVSGDALPWQGVDFWNCFELSWLLPSGKPVVAIAEFAIPCDSPNIIESKSFKLYLNSLNQTVFASLTELQACLEKDLSGAAGKPVLVKVRTLAEVEAQGVTALPGQCIDALDITISNYEQPQPELLRCSAERVVEETVHSHLLKSNCPVTGQPDWGSVVVEYKGRALDHASLLTYLISFRQHADFHEQCVERIYLDLKNLLQPEYLTVYARYVRRGGLDINPYRSTGPISPANLRLVRQ

SEQ ID NO: 48843 - protein, 276 aa, Pseudomonas extremaustralis
  REGION 1..276: note = tr|A0A5C5Q7Y5|A0A5C5Q7Y5_9PSED NADPH-dependent 7-cyano-7-deazaguanine reductase OS=Pseudomonas extremaustralis OX=359110 GN=queF PE=3 SV=1
MHPAAEHSPLGKSSEYICTYTPSLLFPIPRAAKWAELGLSAETLPYKGVDFWNCFELSWLLPSGKPVVAIGEFSIPADSPNIIESKSFKLYLNSLNQTVFADVPSLEAILRTDLSAAAGKPVNVRIRSLADVEAEGVQALPGICIDDLDISVSNYEHPRPELLRCDDSRIVEERVHSHLLKSNCPVTSQPDWGSVAVDYRGSALDHASLLEYLVSFRQHSDFHEQCVERIFLDLQRLLKPEKLTVYARYVRRGGLDINPYRSTEDVAFQNVRLVRQ

SEQ ID NO: 48844 - protein, 276 aa, Pseudomonas extremorientalis
  REGION 1..276: note = tr|A0A1H0VXV5|A0A1H0VXV5_9PSED NADPH-dependent 7-cyano-7-deazaguanine reductase OS=Pseudomonas extremorientalis OX=169669 GN=queF PE=3 SV=1
MHPAAEHSPLGKSSEYISTYTPSLLFPIPRAAKWAELGLSAETLPYKGVDFWNCFELSWLLPSGKPVVAIGEFSIPADSPNIIESKSFKLYLNSLNQTAFADTASLEATLRTDLSTAAGKPVSVRIRSLAEIEAEGVMALPGVCIDDLDISVSNYGHPRPELLRCDNSRVVEESVHSHLLKSNCPVTSQPDWGSVVVQYRGHALDHASLLEYIVSFRQHSDFHEQCVERIFLDLQRLLKPERLTVYARYVRRGGLDINPYRSTEDVAFQNVRLARQ

SEQ ID NO: 48845 - protein, 276 aa, Pseudomonas ficuserectae
  REGION 1..276: note = tr|A0A0P9RRF3|A0A0P9RRF3_9PSED NADPH-dependent 7-cyano-7-deazaguanine reductase OS=Pseudomonas ficuserectae OX=53410 GN=queF PE=3 SV=1
MHPAAEHSPLGKSSEYIATYTPSLLFPIPRAAKWAELGLTAQTLPYQGVDFWNCYELSWLLPSGKPVVAIAEFSIPADSPNIIESKSFKLYLNSLNQTAFATVEEVQTTLERDLSAAAGKPIGVRIRSLSDIEGEGVATLPGVCIDDLDITVSSYDRPQPELLRCDESQIIEESVHSHLLKSNCPVTSQPDWGSVVVEYRGAALDHSSLLAYIVSFRQHSDFHEQCVERIFLDLQRLLKPEKLTVYARYVRRGGLDINPYRSTETLDVNNRRLARQ

SEQ ID NO: 48846 - protein, 275 aa, Pseudomonas flavescens
  REGION 1..275: note = tr|A0A1G8L2N5|A0A1G8L2N5_9PSED NADPH-dependent 7-cyano-7-deazaguanine reductase OS=Pseudomonas flavescens; OX = 29435 GN=queF PE=3 SV=1
MHSVEHSPLGKRSEYIASYSPELLFAIPRAAKWAELGLSAQTLPYRGVDFWNCFELSWLLPSGKPVVAIGEFSIAADSPNIIESKSFKLYLNSLNQSVFASKAELVTVLERDLSATAGKAVGVRVRSLSEVAKEGLATLPGVCIDDLDISVSTYEAPRPELLSCDASRIVEEALHSHLLKSNCPVTGQPDWGSVVVEYRGAALQPASLLAYLVSFRQHADFHEQCVERIFLDLQRLLRPEHLTVYARYVRRGGLDINPYRTTLTQLPENRRLVRQ

SEQ ID NO: 48847 - protein, 275 aa, unidentified
  source 1..275: note = Pseudomonas flexibilis
  REGION 1..275: note = tr|A0A0B3BN76|A0A0B3BN76_9PSED NADPH-dependent 7-cyano-7-deazaguanine reductase OS=Pseudomonas flexibilis; OX = 706570 GN=queF PE=3 SV=1
MHPAEHSPLGKSSEYVDHYSPELLYPIPRAPKWAELGLQAGQLPYQGVDYWNCYELSWLLPSGKPVVAIGEFAIPADSPNIIESKSFKLYLNSLNQTPFADTQAVCEALRRDLSAVAGAPVGVRVRSLDEVGEEGVARLPGRCIDALDVEITGYDHPRPELLRCDPQRQVEECLHSHLLKSNCPVTGQPDWGSVVVDYQGPALDPASLLAYLISFRQHRDFHEQCVERIFLDLQRLLQPRRLTVYARYVRRGGLDINPYRSSEASQVDNRRLVRQ

SEQ ID NO: 48848 - protein, 275 aa, unidentified
  source 1..275: note = Pseudomonas flexibilis
  REGION 1..275: note = tr|A0A1N6P5C6|A0A1N6P5C6_9PSED NADPH-dependent 7-cyano-7-deazaguanine reductase OS=Pseudomonas flexibilis; OX = 706570 GN=queF PE=3 SV=1
MHPAEHSPLGKSSEYVDHYSPELLYPIPRAPKWAELGLQAGQLPYQGVDYWNCYELSWLLPSGKPVVAIGEFAIPADSPNIIESKSFKLYLNSLNQTVFADAQAVREALRRDLSAVAGAPVGVRVRSLDEVGEEGVARLPGRCIDDLDVEVTGYDHPRPELLRCDPQRQVEECLHSHLLKSNCPVTGQPDWGSVVVDYQGPALDPASLLAYLISFRQHRDFHEQCVERIFLDLQRLLQPRRLTVYARYVRRGGLDINPYRSSEAPQVDNRRLVRQ

SEQ ID NO: 48849 - protein, 276 aa, unidentified
  source 1..276: note = Pseudomonas floridensis
  REGION 1..276: note = tr|A0A1X0N060|A0A1X0N060_9PSED NADPH-dependent 7-cyano-7-deazaguanine reductase OS=Pseudomonas floridensis OX=1958950 GN=queF PE=3 SV=1
MHPAAEHSPLGKSSEYISTYTPSLLFPIPRAAKWTELGLTAETLPYKGVDYWNCYELSWLLPSGKPVVAIAEFSIPADSPNIIESKSFKLYLNSLNQTAFESREQVQVTLEKDLSAAAGTPVGVRIRNLDEVEREGVATLPGVCIDDLDIHVSSYDRPQPELLRCDASRVVEESVYSHLLKSNCPVTSQPDWGSVVVEYRGAALDPASLLAYIVSFRQHSDFHEQCVERIFLDLQRLLKPEKLTVYARYVRRGGLDINPYRSTETLDVDNGRLARQ

SEQ ID NO: 48850 - protein, 276 aa, Pseudomonas fluorescens
  REGION 1..276: note = tr|A0A5E7CZY2|A0A5E7CZY2_PSEFL NADPH-dependent 7-cyano-7-deazaguanine reductase OS=Pseudomonas fluorescens OX=294 GN=queF_1 PE=3 SV=1
MHPAAEHSPLGKSSEYISTYTPSLLFPIPRAAKWAELGLSAETLPYKGVDFWNCFELSWLLPSGKPVVAIGEFSIPADSPNIIESKSFKLYLNSLNQTPFADRQSLEATLQADLSAAAGKPVGVRIRSLSEVQAEGVAGLPGVCIDELEVSVSDYAQPRPELLRCDESRVIEESVHSHLLKSNCPVTGQPDWGSVAVEYRGAALDHASLLAYLVSFRQHADFHEQCVERIFLDLQRLLKPEKLTVYARYVRRGGLDINPYRSTEALELPNLRLVRQ

SEQ ID NO: 48851 - protein, 276 aa, Pseudomonas fluorescens
  REGION 1..276: note = tr|A0A125QI75|A0A125QI75_PSEFL NADPH-dependent 7-cyano-7-deazaguanine reductase OS=Pseudomonas fluorescens OX=294 GN=queF PE=3 SV=1
MHPAAEHSPLGKSSEYISTYTPSLLFPIPRAAKWAELGLSAETLPYKGVDFWNCFELSWLLPSGKPVVAIGEFSIPADSPNIIESKSFKLYLNSLNQTAFADTSSLEATLRTDLSAAAGKPVNVRIRSLADIEAEGVMALPGVCIDGLDINVSSYEHPRPELLRCDDSRVVEESVHSHLLKSNCPVTSQPDWGSVVVEYRGAALDHASLLEYIVSFRQHSDFHEQCVERIFLDLQRLLKPEKLTVYARYVRRGGLDINPYRSTENTQFLNVRLARQ

SEQ ID NO: 48852 - protein, 277 aa, unidentified
  source 1..277: note = Pseudomonas formosensis
  REGION 1..277: note = tr|A0A1I6AQ23|A0A1I6AQ23_9PSED NADPH-dependent 7-cyano-7-deazaguanine reductase OS=Pseudomonas formosensis OX=1002526 GN=queF PE=3 SV=1
MHPAEQSPLGKTSEYSGIYTPSLLYPIPRQPIWEGLGLDPQRLPFHGADVWNSYEVSWLTPSGKPEVAVVEFVFPLTPSSRIVESKSFKLYLNSFNQTVFSDRAEVLRTLESDLSVTAQAPVLVRVQDTHRIQQLGIARLPGECLDDMDVRISSYEYDPGLLRLLPGARQVRETLNSNLLKSNCPVTGQPDWASVMISYSGPAIDRASLLRYLVSFRQHRDFHEQCVERIFLDLQRLLGEGCELSVHARYLRRGGLDINPWRSTQPGMPDNLRLARQ

SEQ ID NO: 48853 - protein, 276 aa, Pseudomonas fragi
  REGION 1..276: note = tr|A0A1Z3J176|A0A1Z3J176_PSEFR NADPH-dependent 7-cyano-7-deazaguanine reductase OS=Pseudomonas fragi; OX = 296 GN=queF PE=3 SV=1
MHPAAEHSPLGKSSEYISTYTPSLLFPIPRAAKWAELGLSAETLPYVGVDFWTCFELSWLLPSGKPVVAIAEFCFAADSPNIVESKSFKLYLNSLNQTVFADTPSLEATLRADLSAASGKPVSVRVRSLDEVQADGVGVLPGVCIDGLDITVSDYAQPRPELLKCDDSQVVEESVYSHLLKSNCPVTSQPDWGTVVVEYRGAALDHASLLAYLVSFRQHSDFHEQCVERIFLDLQRLLKPEKLTVYARYVRRGGLDINPYRSTEAVEFQNVRLVRQ

SEQ ID NO: 48854 - protein, 276 aa, Pseudomonas fragi
  REGION 1..276: note = tr|A0A267BZB1|A0A267BZB1_PSEFR NADPH-dependent 7-cyano-7-deazaguanine reductase OS=Pseudomonas fragi; OX = 296 GN=queF PE=3 SV=1
MHPAAEHSPLGKSSEYISTYTPSLLFPIPRAAKWAELGLSAETLPYVGVDFWTCFELSWLLPSGKPVVAIGEFCFAADSPNIVESKSFKLYLNSLNQTVFADTPSLEATLRADLSAASGKPVSVRVRSLDEVQADGVAVLPGVCIDDLDITVSDYAQPRPELLKCDDSQVVEESVYSHLLKSNCPVTSQPDWGTVVVEYRGAALDHASLLAYLVSFRQHSDFHEQCVERIFLDLQRLLKPEKLTVYARYVRRGGLDINPYRSTEAVEFQNVRLVRQ

SEQ ID NO: 48855 - protein, 276 aa, Pseudomonas frederiksbergensis
  REGION 1..276: note = tr|A0A423J3W1|A0A423J3W1_9PSED NADPH-dependent 7-cyano-7-deazaguanine reductase OS=Pseudomonas frederiksbergensis OX=104087 GN=queF PE=3 SV=1
MHPAAEHSPLGKSSEYIATYTPSLLFPIPRTAKWAELGLTAETLPYKGVDFWNCFELSWLLPSGKPVVAIGEFSIPADSPNIIESKSFKLYLNSLNQTAFADTASLEATLAKDLSAAAGKPVGVRIRSLKDVEAEGVVALPGVCIDDLDISVSNYEHPRPELLRCNESLIIEECVHSHLLKSNCPVTSQPDWGSVAVEYRGAALDHASLLEYIVSFRQHSDFHEQCVERIFLDLQRLLKPEKLTVYARYVRRGGLDINPYRSTEEVQLPNHRLVRQ

SEQ ID NO: 48856 - protein, 276 aa, Pseudomonas frederiksbergensis
  REGION 1..276: note = tr|A0A1H4YYX2|A0A1H4YYX2_9PSED NADPH-dependent 7-cyano-7-deazaguanine reductase OS=Pseudomonas frederiksbergensis OX=104087 GN=queF PE=3 SV=1
MHPAAEHSPLGKSSEYIATYTPSLLFPIPRTAKWAELGLTAETLPYKGVDFWNCFELSWLLPSGKPVVAIGEFSIPADSPNIIESKSFKLYLNSLNQTPFADTASIEATLVKDLSAAAGKPVGVRIRSLKDVEAEGVVALPGVCIDDLDISVSNYEHPRPELLRCDASRVVEESVHSHLLKSNCPVTSQPDWGSVAVEYRGAALDHASLLEYIVSFRQHSDFHEQCVERIFLDLQRLLKPEKLTVYARYVRRGGLDINPYRSTETVQLPNHRLVRQ

SEQ ID NO: 48857 - protein, 275 aa, Pseudomonas fulva
  REGION 1..275: note = tr|A0A0D0KT93|A0A0D0KT93_9PSED NADPH-dependent 7-cyano-7-deazaguanine reductase OS=Pseudomonas fulva; OX = 47880 GN=queF PE=3 SV=1
MHSVEHSPLGKSSEYIATYSPELLFPIPRAAKWAELGLSAQTLPYRGVDYWNCFELSWLLPSGKPVVAIGEFSIAADSPNIIESKSFKLYLNSLNQSVFASEAELVGVLERDLSATAGKPVGVRVRSLGEVAREGLAVLPGTCIDELDISISDYQAPRPELLVCDASRIVEESLHSHLLKSNCPVTGQPDWGSVVVEYRGAALEPASLLAYLVSFRQHADFHEQCVERIFLDLQRLLQPEHLTVYARYVRRGGLDINPYRTTLGRLPDNRRLVRQ

SEQ ID NO: 48858 - protein, 275 aa, Pseudomonas fulva
  REGION 1..275: note = tr|F6AA05|F6AA05_PSEF1 NADPH-dependent 7-cyano-7-deazaguanine reductase OS=Pseudomonas fulva (strain 12-X) OX=743720 GN=queF PE=3 SV=1
MNSVEHSPLGKSSEYIATYSPELLFPIPRATKWAELGLSAETLPYRGVDYWNCFELSWLLPSGKPMVAIGEFAIPADSPNIIESKSFKLYLNSLNQSVFVSVAQLVAVLEKDLSATAGKPVAVRVRSLEEAAREGLSVLPGICIDELDVSISNYAAPQPELLRCDPARVVEQSLHSHLLKSNCPVTGQPDWGSVVVEYRGAELDPASLLAYLVSFRQHADFHEQCVERIFLDLQKLLQPEYLTVYARYVRRGGLDINPYRTTLAALPDNRRLVRQ

SEQ ID NO: 48859 - protein, 276 aa, unidentified
  source 1..276: note = Pseudomonas furukawaii
  REGION 1..276: note = tr|L8MM50|L8MM50_PSEFK NADPH-dependent 7-cyano-7-deazaguanine reductase OS=Pseudomonas furukawaii; OX = 1149133 GN=queF PE=3 SV=1
MQHPAEHSPLGKSSEYVSSYSPELLFPISRETKWNELGLTAETLPYKGVDYWNCYELSWLTASGKPVVAIGEFAIPADSPNIIESKSFKLYLNSLNQSVFEGAEALARVLERDLSAAAGAPVAVRVRSLAEVEAEGVAPLAGVCIDELDLVIDNYSHPHPELLKVEPVAADEALYSHLLKSNCPVTGQPDWGTVAVEYKGPNRLDHASFLAYLVSFRQHADFHEQCVERIFLDLQRLLMPERLTVYARYVRRGGLDINPCRSTHECRVDNRRLVRQ

SEQ ID NO: 48860 - protein, 276 aa, Pseudomonas fuscovaginae
  REGION 1..276: note = tr|A0A0M9GE74|A0A0M9GE74_9PSED NADPH-dependent 7-cyano-7-deazaguanine reductase OS=Pseudomonas fuscovaginae OX=50340 GN=queF PE=3 SV=1
MHPAAEHSPLGKSSEYIATYTPSLLFPIPRAAKWAELGLSAETLPYHGVDFWNCFELSWLLPSGKPVVAIGEFSIPADSPNIIESKSFKLYLNSLNQTPFADIPSLEAVLRADLSAAAGKPVGVRIRRLGDVQAEGVVALPGTCIDDLDISVSDYAHPRPELLRCDPSRVVEESVHSHLLKSNCPVTSQPDWGSVVVEYRGAALDHASLLAYLVSFRQHSDFHEQCVERIFLDLQRLLKPEKLTVYARYVRRGGLDINPYRSTEVVAFQNRRLVRQ

SEQ ID NO: 48861 - protein, 276 aa, Pseudomonas fuscovaginae
  REGION 1..276: note = tr|A0A1H6PDF2|A0A1H6PDF2_9PSED NADPH-dependent 7-cyano-7-deazaguanine reductase OS=Pseudomonas fuscovaginae OX=50340 GN=queF PE=3 SV=1
MHPAAEHSPLGKSSEYIATYTPSLLFPIPRAAKWAELGLSADTLPYQGVDFWNCFELSWLLPSGKPVVAIGEFSIPADSPNIIESKSFKLYLNSLNQTPFADIPSLEAVLRADLSAAAGKPVGVRVRPLSEVQAEGVVALPGVCIDELDISVSDYAHPRPELLRCDPSRVVEESVHSHLLKSNCPVTSQPDWGSVVVEYRGAALDHASLLAYLVSFRQHSDFHEQCVERIFLDLQRLLKPEKLTVYARYVRRGGLDINPYRSTESVAFQNQRLVRQ

SEQ ID NO: 48862 - protein, 278 aa, unidentified
  source 1..278: note = Pseudomonas gallaeciensis
  REGION 1..278: note = tr|A0A395R9T1|A0A395R9T1_9PSED NADPH-dependent 7-cyano-7-deazaguanine reductase OS=Pseudomonas gallaeciensis OX=857227 GN=queF PE=3 SV=1
MSDHPATDSPLGKSSAYVSVYTPSLLYPIARQAKWQELGLDPQNLPFHGADIWNCFELSWLTPSGKPEVAAAEFVFPIKAARIVESKSFKLYLNSLNQTVFRDRRELLETLESDLSVAAQGPVAVRLFSMQQLHQLGMFTLPGRCIDDEEVAVSRYHYDASLLALDSGRVQVSEVLHSHLLKSNCPVTGQPDWGSVLISYSGPRLDPAALVRYLVSFREHSDFHEQCVERIFLDLLALLGEGAQLTVYARYVRRGGLDINPWRSTEAGMPENLRLARQ

SEQ ID NO: 48863 - protein, 272 aa, unidentified
  source 1..272: note = [Pseudomonas] geniculata
  REGION 1..272: note = tr|A0A0L8A528|A0A0L8A528_9GAMM NADPH-dependent 7-cyano-7-deazaguanine reductase OS=[Pseudomonas] geniculata N1 OX=1167641 GN=queF PE=3 SV=1
MNTPQDSSLGREVSYPSQYDPGLLFPIPRSGARAEIGLDDAALPFVGHDRWHAFELSWLDPRGKPQVAVATVQVPCTSPRLIESKSFKLYLNSLNSTRIDSAEALRERLVADLSACAGAPVQVEFGLPGLRETPLGESIDGLDVEIDCYGPPQADFLAADAGEVVEETLVSSLLKSNCPVTGQPDWATVSLRYRGPKIDRAGLLRYLVSYREHAEFHEQCVERIFSEVTSRCQPQWLEVEARYTRRGGLDINPWRASPGIAAPAATYRELRQ

SEQ ID NO: 48864 - protein, 276 aa, Pseudomonas gessardii
  REGION 1..276: note = tr|A0A1V2JUG7|A0A1V2JUG7_9PSED NADPH-dependent 7-cyano-7-deazaguanine reductase OS=Pseudomonas gessardii; OX = 78544 GN=queF PE=3 SV=1
MHPAAEHSPLGKSSEYISTYTPSLLFPIPRAAKWAELGLSAETLPYKGVDFWNCFELSWLLPSGKPVVAIGEFSIPADSPNIIESKSFKLYLNSLNQTPFADGPSLEATLRADLSAAAGKPVGVRIRSLAEVEGEGVVSLPGVCIDDLQISVSNYEHPRPELLRCDDSRVVEESVHSHLLKSNCPVTSQPDWGSVAVEYRGAALDHASLLAYLVSFRQHSDFHEQCVERIFLDLQRLLKPEKLTVYARYVRRGGLDINPYRSTEAVQFQNLRLARQ

SEQ ID NO: 48865 - protein, 276 aa, unidentified
  source 1..276: note = Pseudomonas gingeri
  REGION 1..276: note = tr|A0A2K1FKB4|A0A2K1FKB4_9PSED NADPH-dependent 7-cyano-7-deazaguanine reductase OS=Pseudomonas gingeri NCPPB 3146 = LMG 5327 OX=707248 GN=queF PE=3 SV=1
MHPAAEHSPLGKSSEYIATYTPSLLFPIPRAAKWAELGLSADTLPYRGVDFWNCFELSWLLPSGKPVVAIGEFSIPADSPNIIESKSFKLYLNSLNQTPFTDTASLEAVLRADLSAAAGKPVGVRVRSLGDVQAEGVVALPGVCIDDLDISVSDYAHPRPELLRCDESRVIEESVHSHLLKSNCPVTSQPDWGSVVVEYRGAALDHASLLAYLVSFRQHSDFHEQCVERIFLDLQRLLKPEKLTVYARYVRRGGLDINPYRSTEAVEFQNLRLVRQ

SEQ ID NO: 48866 - protein, 276 aa, Pseudomonas graminis
  REGION 1..276: note = tr|A0A4R7V3K6|A0A4R7V3K6_9PSED NADPH-dependent 7-cyano-7-deazaguanine reductase OS=Pseudomonas graminis; OX = 158627 GN=queF PE=3 SV=1
MHPAAEHSPLGKSSEYIATYTPSLLFPIPRAAKWAELGLTAETLPYQGVDFWNCYELSWLLPSGKPVVAIGEFSIAADSANIIESKSFKLYLNSLNQTAFASEAELIATLEKDLSAAAGKPVGVRIRSLKDIEAEGIVAVPGVCVDELDVSISSYDRPQPELLRCDESRVVDDVLHSHLLKSNCPVTSQPDWGSVAVEYRGAALDHASFLAYIVSFRQHSDFHEQCVERIFMDLQRLLKPEKLTVYARYVRRGGLDINPYRSTEKLTFENGRLARQ

SEQ ID NO: 48867 - protein, 276 aa, Pseudomonas graminis
  REGION 1..276: note = tr|A0A1X0VMF7|A0A1X0VMF7_9PSED NADPH-dependent 7-cyano-7-deazaguanine reductase OS=Pseudomonas graminis; OX = 158627 GN=queF PE=3 SV=1
MHPAAEHSPLGKSSEYIATYTPSLLFPIPRAAKWAELGLTAQTLPYQGVDFWNCYELSWLLPAGKPVVAIAEFSIPADSPNIIESKSFKLYLNSLNQTAFDNAAEVQATLERDLSAAAGKPVGVRIRSLAEIEREGVATLPGVCIDDLDITVSSYDRPQPELLRCEASQVIEESVYSHLLKSNCPVTSQPDWGSVVVEYRGAALDHASLLAYIVSFRQHSDFHEQCVERIFLDLQRLLKPERLTVYARYVRRGGLDINPYRSTETLNVDNRRLARQ

SEQ ID NO: 48868 - protein, 276 aa, Pseudomonas grimontii
  REGION 1..276: note = tr|A0A1H1IIK1|A0A1H1IIK1_9PSED NADPH-dependent 7-cyano-7-deazaguanine reductase OS=Pseudomonas grimontii; OX = 129847 GN=queF PE=3 SV=1
MHPAAEHSPLGKSSEYISTYTPSLLFPIPRAAKWAELGLSAETLPYKGVDFWNCFELSWLLPSGKPVVAIGEFSIPADSPNIIESKSFKLYLNSLNQTAFADTPSLEATLRTDLSAAAGKPVSVRIRRLAEIEAEGVMALPGVCIDDLDIRVSNYEHPRPELLRCDDSRIVEESVHSHLLKSNCPVTSQPDWGSVVVEYRGAALDHASLLEYLVSFRQHSDFHEQCVERIFLDLQRLLKPEKLTVYARYVRRGGLDINPYRSTEDVAFQNVRLARQ

SEQ ID NO: 48869 - protein, 276 aa, unidentified
  source 1..276: note = Pseudomonas guangdongensis
  REGION 1..276: note = tr|A0A1H2HGG2|A0A1H2HGG2_9PSED NADPH-dependent 7-cyano-7-deazaguanine reductase OS=Pseudomonas guangdongensis OX=1245526 GN=queF PE=3 SV=1
MAQDVHHSPLGKTTEYVAEYAPELLFPIPRLAKWLELGIDPQALPFEGVDLWNCYELSWLNEKGKPVVAIGEFAIPARSPNIIESKSFKLYLNSLNQTRFAGREALVEVLARDLSAAAGAAVAVRVRTLDEVAAEGIAGPRGECLDDLDVAIDSYGPPDAGLLACDRERLVSETLYSHLLKSNCPVTGQPDWGTVSIDYCGPALERAALLAYVVSLRMHGDFHEQCVERIYLDLRALLQPQRLTVQARYVRRGGLDINPCRSTHPVEADNRRLVRQ

SEQ ID NO: 48870 - protein, 276 aa, unidentified
  source 1..276: note = Pseudomonas guariconensis
  REGION 1..276: note = tr|A0A1G6N5I3|A0A1G6N5I3_9PSED NADPH-dependent 7-cyano-7-deazaguanine reductase OS=Pseudomonas guariconensis OX=1288410 GN=queF PE=3 SV=1
MHPAAEHSPLGKSSEYIATYTPSLLFPIPRAAKWAELGVTAQTLPWQGVDYWNCFELSWLLPSGKPVVAIGEFAIPADSPNIIESKSFKLYLNSLNQTVFASTRELQACLEKDLSAAAGKSVTVRVRTLADVEAQGVVALPGHCIDDLDVSISNYEQPRPELLQCDPQRVVEEAVHSHLLKSNCPVTGQPDWGSVVVAYKGLALDHASLLSYLVSFRQHSDFHEQCVERIYLDLLRLLKPEHLTVYARYVRRGGLDINPYRSTGAISPDNQRLVRQ

SEQ ID NO: 48871 - protein, 276 aa, unidentified
  source 1..276: note = Pseudomonas guariconensis
  REGION 1..276: note = tr|A0A2N5Q9W0|A0A2N5Q9W0_9PSED NADPH-dependent 7-cyano-7-deazaguanine reductase OS=Pseudomonas guariconensis OX=1288410 GN=queF PE=3 SV=1
MHPAAEHSPLGKSSEYIATYTPSLLFPIPRAAKWAELGVTAQTLPWQGVDYWNCFELSWLLPSGKPVVAIGEFAIPADSPNIIESKSFKLYLNSLNQTVFASTRELQACLERDLSAAAGKSVTVRVRTLADVEAQGVVALPGHCIDDLDVSISNYEQPRPELLQCDPQRVVEEAVHSHLLKSNCPVTGQPDWGSVVVAYKGLALDHASLLSYLVSFRQHSDFHEQCVERIYLDLLRLLKPEHLTVYARYVRRGGLDINPYRSTGAISPDNQRLVRQ

SEQ ID NO: 48872 - protein, 276 aa, unidentified
  source 1..276: note = Pseudomonas guguanensis
  REGION 1..276: note = tr|A0A1H0VZ70|A0A1H0VZ70_9PSED NADPH-dependent 7-cyano-7-deazaguanine reductase OS=Pseudomonas guguanensis OX=1198456 GN=queF PE=3 SV=1
MQHPAEHSPLGKSSQYIAEYSPELLFPISRTTKWAELSLDGANLPYRGVDYWNCYELSWLLPSGKPVVAIGEFAIPADSPNIIESKSFKLYLNSLNQTAFASWDEVQATLARDLSAVAGKPVAVRLRALAEVAAEGVATLPGQCIDELDVSVSQYAHPQPELLRCDASRVVEESLHSHLLKSNCPVTGQPDWGSLVVEYRGAALDHASLLAYLVSFRQHADFHEQCVERIFLDLQRLLQPQTLTVYARYVRRGGLDINPYRSTEATTADNTRLARQ

SEQ ID NO: 48873 - protein, 276 aa, Pseudomonas guineae
  REGION 1..276: note = tr|A0A1I3JQK9|A0A1I3JQK9_9PSED NADPH-dependent 7-cyano-7-deazaguanine reductase OS=Pseudomonas guineae; OX = 425504 GN=queF PE=3 SV=1
MHPAAEDSPLGKSSEYIATYTPALLFPIPRAAKWAELGLSAETLPYQGVDFWNCFELSWLLPSGKPVVAMGEFAIPADSPNIIESKSFKLYLNSLNQSVFNTADELVVVLVKDLSAAAGKPVGVRVRSLAEVTADGVTAAPGTCIDELDVSISNYAQPQPELLRCDSARVVEESLHSHLLKSNCPVTGQPDWGTLVVQYRGLALDHASLLAYLVSFRQHADFHEQCVERIFLDLQRLLKPEHLTVYARYVRRGGLDINPYRSTGPISPDNQRLARQ

SEQ ID NO: 48874 - protein, 276 aa, unidentified
  source 1..276: note = Pseudomonas helleri
  REGION 1..276: note = tr|A0A0J6ICD8|A0A0J6ICD8_9PSED NADPH-dependent 7-cyano-7-deazaguanine reductase OS=Pseudomonas helleri; OX = 1608996 GN=queF PE=3 SV=1
MHPAAEHSPLGKSSEYISTYTPSLLFPIPRAAKWAELGLSADTLPYVGVDFWNCFELSWLLPSGKPVVAIGEFAFAADSPNIVESKSFKLYLNSLNQTVFADTPTLEATLQADLSAASGKPVRVRVRSLNDVQADGVGVLPGVCIDDLNITVSDYAHPRPELLKCDPSQVVEESMYSHLLKSNCPVTSQPDWGTVVVEYRGAALDHASLLAYLVSFRQHSDFHEQCVERIFLDLQRLLKPEKLTVYARYVRRGGLDINPYRSTEKVEFNNLRLVRQ

SEQ ID NO: 48875 - protein, 276 aa, unidentified
  source 1..276: note = Pseudomonas helmanticensis
  REGION 1..276: note = tr|A0A4R7V349|A0A4R7V349_9PSED NADPH-dependent 7-cyano-7-deazaguanine reductase OS=Pseudomonas helmanticensis OX=1471381 GN=queF PE=3 SV=1
MHPAAEHSPLGKSSEYIATYTPSLLFPIPRTAKWAELGLTAETLPYKGVDFWNCFELSWLLPSGKPVVAIGEFSIPADSPNIIESKSFKLYLNSLNQTAFADVTSLEATLVKDLSAAAGKPVGVRVRSLKDVEAEGVVALPGMCIDDLDISVSNYEHPRPELLRCDDSRIVEETVYSHLLKSNCPVTSQPDWGTVVVEYRGSALDHASLLEYIVSFRQHSDFHEQCVERIFLDLQRLLKPEKLTVFARYVRRGGLDINPYRSTESVQLPNHRLVRQ

SEQ ID NO: 48876 - protein, 276 aa, unidentified
  source 1..276: note = Pseudomonas hunanensis
  REGION 1..276: note = tr|A0A2I0CA71|A0A2I0CA71_9PSED NADPH-dependent 7-cyano-7-deazaguanine reductase OS=Pseudomonas hunanensis; OX = 1247546 GN=queF PE=3 SV=1
MHPAAEHSPLGKSSEYIATYSPEQLFPIPRTAKWAELGVTAQTLPWLGVDFWNCFELSWLLPSGKPVVAIGEFAIPADSPNIIESKSFKLYLNSLNQTVFASLDALQACLEKDLSAAAGKPVGVKVRTLAEVEAQGVVALPGQCIDALDVAISNYEQPQPELLRCDPARVVEETLHSHLLKSNCPVTGQPDWGSVVVEYKGRALDHASLLTYLISFRQHADFHEQCVERIYLDLKNLLQPEHLTVYARYVRRGGLDINPYRSTGAISPDNKRLVRQ

SEQ ID NO: 48877 - protein, 275 aa, unidentified
  source 1..275: note = Pseudomonas hussainii
  REGION 1..275: note = tr|A0A1H7PLN8|A0A1H7PLN8_9PSED NADPH-dependent 7-cyano-7-deazaguanine reductase OS=Pseudomonas hussainii; OX = 1429083 GN=queF PE=3 SV=1
MTNDVLHSPLGKSSEYRDTYSPELLYPIPRAPKWAELGLSADALPFAGVDVWTCYELSWLAPGGKPVVAIAEFSIPAASPNIIESKSFKLYLNSLNQTRYASPNEVQDVLQRDLSAAAGAQVSVVVYRLDQAPAIQSLKGVCLDELDVAIDSYQLDARLLKLAAPSQSVVERLYSHLLKSNCPVTGQPDWGTVVIDYRGPQLDHASVLAYLVSFRQHADFHEQCVERIFCDLRALLGDGAELTVYARYVRRGGLDINPYRSTSQAAPQWGRLPRQ

SEQ ID NO: 48878 - protein, 276 aa, Pseudomonas indica
  REGION 1..276: note = tr|A0A1G9EN22|A0A1G9EN22_9PSED NADPH-dependent 7-cyano-7-deazaguanine reductase OS=Pseudomonas indica; OX = 137658 GN=queF PE=3 SV=1
MHPSAEHSPLGKSSEYIAVYTPELLFPIPRAPKWAELGLSAQALPYQGVDIWTCYELSWLAPSGKPCVAIGEFAIPADSPNIIESKSFKLYLNSLNQTVFADRVELQATLERDLSSAAGKSVAVRVRNLDEVAAEGVALLPGRCIDDLDVTISRYDHPQPDLLRCDPERQVEECLYSHLLKSNCPVTGQPDWGSVVVDYRGPALDPASLLAYLVSFRQHADFHEQCVERVYLDLLRLLRPERLTVYARYVRRGGLDINPYRSTDAVQPDNRRLVRQ

SEQ ID NO: 48879 - protein, 276 aa, unidentified
  source 1..276: note = Pseudomonas indoloxydans
  REGION 1..276: note = tr|A0A2T5PGM2|A0A2T5PGM2_9PSED NADPH-dependent 7-cyano-7-deazaguanine reductase OS=Pseudomonas indoloxydans OX=404407 GN=queF PE=3 SV=1
MQHPAEHSPLGKSSQYIAEYSPELLFPISRTTKWAELGLEGANLPYQGVDYWNCYELSWLLPSGKPVVAIGEFAIPADSPNIIESKSFKLYLNSLNQSAFTSWDELQATLVHDLSTVAGKPVAVRLRSLTEVAEEGVATLPGQCIDELDISVSQYDHPQPELLRCDADRVVEESLHSHLLKSNCPVTGQPDWGSLVVEYRGAALDHASLLAYLVSFRQHADFHEQCVERIFLDLQRLLQPQALTVYARYVRRGGLDINPYRSTEALTPENGRLARQ

SEQ ID NO: 48880 - protein, 276 aa, Pseudomonas japonica
  REGION 1..276: note = tr|A0A239I7B1|A0A239I7B1_9PSED NADPH-dependent 7-cyano-7-deazaguanine reductase OS=Pseudomonas japonica; OX = 256466 GN=queF PE=3 SV=1
MHPAAEHSPLGKSSEYVSTYTPSLLFPIPRLAKWAELGVSGDSLPWHGVDFWNCFELSWLLSSGKPVVAIGEFAIPADSPNIIESKSFKLYLNSLNQTVFESPAALQACLEKDLSAAAGKPVGVRIRGLDEVTGEGVISLPGQCIDDLDVSISNYEQPQPELLRCNKEKQVDQVLHSHLLKSNCPVTGQPDWGSVVVEYRGPELDAASLLTYLISFRQHADFHEQCVERIWLDLKRLLDPEHLTVYARYVRRGGLDINPYRSTGPVDVDNRRLVRQ

SEQ ID NO: 48881 - protein, 276 aa, Pseudomonas jessenii
  REGION 1..276: note = tr|A0A2W0EYC2|A0A2W0EYC2_9PSED NADPH-dependent 7-cyano-7-deazaguanine reductase OS=Pseudomonas jessenii; OX = 77298 GN=queF PE=3 SV=1
MHPAAEHSPLGKSSEYIATYTPSLLFPIPRTAKWAELGLTAQTLPYKGVDFWNCFELSWLLPSGKPVVAIGEFSIPADSPNIIESKSFKLYLNSLNQTPFTDTASLEATLAKDLSTAAGKPVGVRIRSLKDVESEGVVALPGVCIDELDISVSNYEHPRPELLRCDDSRIVEESVHSHLLKSNCPVTSQPDWGSVAVEYRGAALDHASLLEYIVSFRQHSDFHEQCVERIFLDLQRLLKPEKLTVYARYVRRGGLDINPYRSTEEVQLPNHRLVRQ

SEQ ID NO: 48882 - protein, 276 aa, Pseudomonas jessenii
  REGION 1..276: note = tr|A0A5C4KSW9|A0A5C4KSW9_9PSED NADPH-dependent 7-cyano-7-deazaguanine reductase OS=Pseudomonas jessenii; OX = 77298 GN=queF PE=3 SV=1
MHPAAEHSPLGKSSEYIATYTPSLLFPIPRTAKWAELGLTAETLPYKGVDFWNCFELSWLLPSGKPVVAIGEFSIPADSPNIIESKSFKLYLNSLNQTPFADIASLEATLVKDLSAAAGKPVGVRVRSLKDVEAEGVVALPGVCIDDLDISVSNYEHPRPELLRCDDSKIVEESVHSHLLKSNCPVTSQPDWGSVVVEYRGAALDHASLLEYIVSFRQHSDFHEQCVERIFLDLQRLLKPEKLTVFARYVRRGGLDINPYRSTEAVQLPNHRLVRQ

SEQ ID NO: 48883 - protein, 276 aa, Pseudomonas jinjuensis
  REGION 1..276: note = tr|A0A1H0E4U8|A0A1H0E4U8_9PSED NADPH-dependent 7-cyano-7-deazaguanine reductase OS=Pseudomonas jinjuensis; OX = 198616 GN=queF PE=3 SV=1
MHHPAEHSPLGKSSEYVSTYSPELLFPISRATKWAELGLSAETLPYRGVDIWNCYELSWLTPSGKPVVAIGEFAIPADSPNIIESKSFKLYLNSLNQSAFESPEALRVVLERDLSAAAGKSVGVRVRGLDEVADEGVAKLAGTCIDDLDVTVESYDHPRPELLRCDDTQRVDEVLYSHLLKSNCPVTGQPDWGTLVVEYHGPALDPASLLAYVISFRQHQDFHEQCVERIFLDLQRLLQPSRLTVHARYVRRGGLDINPYRSTEDVRPDNRRLVRQ

SEQ ID NO: 48884 - protein, 276 aa, unidentified
  source 1..276: note = Pseudomonas kairouanensis
  REGION 1..276: note = tr|A0A4Z0AXF5|A0A4Z0AXF5_9PSED NADPH-dependent 7-cyano-7-deazaguanine reductase OS=Pseudomonas kairouanensis OX=2293832 GN=queF PE=3 SV=1
MHPAAEHSPLGKSSEYISTYTPSLLFPIPRAAKWAELGLSAQTLPYKGVDFWNCFELSWLLPSGKPVVAIGEFSIPADSPNIIESKSFKLYLNSLNQTAFADSASLEATLRTDLSAAAGKPVSVRIRSLAEIEAEGVMALPGVCIDGLDISVSNYEHPRPELLRCDDSRVVEESVHSHLLKSNCPVTSQPDWGSVVVEYRGSALDHASLLEYIVSFRQHSDFHEQCVERIFLDLQRLLKPEKLTVYARYVRRGGLDINPYRSTEDVGFQNVRLARQ

SEQ ID NO: 48885 - protein, 276 aa, Pseudomonas kilonensis
  REGION 1..276: note = tr|A0A2U1BU20|A0A2U1BU20_9PSED NADPH-dependent 7-cyano-7-deazaguanine reductase OS=Pseudomonas kilonensis; OX = 132476 GN=queF PE=3 SV=1
MHPAAEHSPLGKSSEYIATYTPSLLFPIPRAAKWAELGLTAETLPYKGVDFWNCFELSWLLPSGKPVVAIGEFAIPADSPNIIESKSFKLYLNSLNQTPFADTASLETTLRQDLSAAAGKAVGVRIRSLKDVEREGIVALPGTCIDDLDISVDSYAHPRPELLRCDASRIVEQSLHSHLLKSNCPVTSQPDWGSVAVEYRGAALDPASLLAYIVSFRQHSDFHEQCVERIFLDLQRLLKPEKLTVYARYVRRGGLDINPYRSTEDVQLPNHRLVRQ

SEQ ID NO: 48886 - protein, 276 aa, Pseudomonas kilonensis
  REGION 1..276: note = tr|A0A0F4XG53|A0A0F4XG53_9PSED NADPH-dependent 7-cyano-7-deazaguanine reductase OS=Pseudomonas kilonensis; OX = 132476 GN=queF PE=3 SV=1
MHPAAEHSPLGKSSEYIATYTPSLLFPIPRTAKWAELGLTAETLPYKGVDFWNCFELSWLLPSGKPVVAIGEFAIPADSPNIIESKSFKLYLNSLNQTPFADTASLEATLRQDLSAAAGKAVGVRIRSLKDVEHEGIVALPGSCIDDLDISVDSYAHPRPELLRCDASRIVEQSLHSHLLKSNCPVTSQPDWGSVAVEYRGAALDPASLLAYIVSFRQHSDFHEQCVERIFLDLQRLLKPEKLTVYARYVRRGGLDINPYRSTEDVQLPNHRLVRQ

SEQ ID NO: 48887 - protein, 276 aa, Pseudomonas knackmussii
  REGION 1..276: note = tr|A0A024HK18|A0A024HK18_PSEKB NADPH-dependent 7-cyano-7-deazaguanine reductase OS=Pseudomonas knackmussii (strain DSM 6978 / LMG 23759 / B13) OX=1301098; GN = queF PE= 3 SV=1
MQHPAEHSPLGKSSEYVSTYSPELLFPISRATKWAELGLDGSNLPYQGVDIWNCYELSWLTPGGKPVVAIGEFAIPAASPNIIESKSFKLYLNSLNQSPFDSREAVKAVLVRDLSAAAGAPVAVRLRSLDEVAEEGVARLPGRCVDELDVTVESYDHPRPELLRCNDAQRVDEVLYSHLLKSNCPVTGQPDWGTLVVDYSGPALDPASLLAYVVSFRQHQDFHEQCVERIYLDLQRLLQPSRLTVYARYVRRGGLDINPYRSSEAVVADNRRLVRQ

SEQ ID NO: 48888 - protein, 276 aa, Pseudomonas koreensis
  REGION 1..276: note = tr|A0A142NCB6|A0A142NCB6_9PSED NADPH-dependent 7-cyano-7-deazaguanine reductase OS=Pseudomonas koreensis; OX = 198620 GN=queF PE=3 SV=1
MHPAAEHSPLGKSSEYIATYTPSLLFPIPRTAKWAELGLTAETLPYKGVDFWNCFELSWLLPSGKPVVAIAEFSIPADSPNIIESKSFKLYLNSLNQTPFADVATLQATLVKDLSAAAGKPVGVRVRSLKDVEAEGVVGLPGVCIDDLDISVSNYEHPRPELLRCDDSRIVEESVHSHLLKSNCPVTSQPDWGSVVVEYRGAALDHASLLEYIVSFRQHSDFHEQCVERIFLDLQRLLKPEKLTVFARYVRRGGLDINPYRSTESVQLPNHRLVRQ

SEQ ID NO: 48889 - protein, 276 aa, Pseudomonas koreensis
  REGION 1..276: note = tr|A0A4U3EKS3|A0A4U3EKS3_9PSED NADPH-dependent 7-cyano-7-deazaguanine reductase OS=Pseudomonas koreensis; OX = 198620 GN=queF PE=3 SV=1
MHPAAEHSPLGKSSEYIATYTPSLLFPIPRTAKWAELGLTAETLPYKGVDFWNCFELSWLLPSGKPVVAIGEFSIPADSPNIIESKSFKLYLNSLNQTAFADVTSLEATLVKDLSAAAGKPVGVRVRSLKDVEAEGVVALPGVCIDDLDISVSNYEHPRPELLRCDESRVVEETVYSHLLKSNCPVTSQPDWGTVVVEYRGSALDHASLLEYIVSFRQHSDFHEQCVERIFLDLQRLLKPEKLTVFARYVRRGGLDINPYRSTESVQLPNHRLVRQ

SEQ ID NO: 48890 - protein, 276 aa, unidentified
  source 1..276: note = Pseudomonas kribbensis
  REGION 1..276: note = tr|A0A4Y8VGE5|A0A4Y8VGE5_9PSED NADPH-dependent 7-cyano-7-deazaguanine reductase OS=Pseudomonas kribbensis; OX = 1628086 GN=queF PE=3 SV=1
MHPAAEHSPLGKSSEYIATYTPSLLFPIPRTAKWAELGLTAETLPYKGVDFWNCFELSWLLPSGKPVVAIGEFSIPADSPNIIESKSFKLYLNSLNQTPFADTASLEATLVKDLSAAAGKPVGVRVRSLKEVEAEGVVALPGVCIDDLDISVSNYEHPRPELLRCDDSRVVEESVHSHLLKSNCPVTSQPDWGSVVVEYRGAALDHASLLEYIVSFRQHSDFHEQCVERIFLDLQRLLKPEKLTVFARYVRRGGLDINPYRSTESAQLPNHRLVRQ

SEQ ID NO: 48891 - protein, 276 aa, unidentified
  source 1..276: note = Pseudomonas kribbensis
  REGION 1..276: note = tr|A0A345RTA7|A0A345RTA7_9PSED NADPH-dependent 7-cyano-7-deazaguanine reductase OS=Pseudomonas kribbensis; OX = 1628086 GN=queF PE=3 SV=1
MHPAAEHSPLGKSSEYIATYTPSLLFPIPRTAKWAELGLTAETLPYKGVDFWNCFELSWLLPSGKPVVAIGEFSIPADSPNIIESKSFKLYLNSLNQTPFADTASLEATLVKDLSAAAGKPVGVRVRSLKEVEAEGVVALPGVCIDDLDISVSNYEHPRPELLRCDDSRVVEESVHSHLLKSNCPVTSQPDWGSVVVEYRGAALDHASLLEYIVSFRQHSDFHEQCVERIFLDLQRLLKPEKLTVFARYVRRGGLDINPYRSTESVQLPNHRLVRQ

SEQ ID NO: 48892 - protein, 276 aa, unidentified
  source 1..276: note = Pseudomonas kunmingensis
  REGION 1..276: note = tr|A0A1I3K5C1|A0A1I3K5C1_9PSED NADPH-dependent 7-cyano-7-deazaguanine reductase OS=Pseudomonas kunmingensis OX=1211807 GN=queF PE=3 SV=1
MQHPAEHSPLGKSSDYVATYSPHLLFPIPRAPKWAELGLTAETLPYQGVDLWNCYELSWLLPSGKPVVAIGEFEIPADSPSIIESKSFKLYLNSLNQSVFESREALAEVMSSDLSAAAGKPVKVRLRTLDEVAAEGVATLPGRCVDDLDVTIEHYDHPQAGLLACDAGHMVEESLHSHLLKSNCPVTGQPDWGSVVVEYRGAALQAESLLAYLVSFRQHADFHEQCVERIFLDLQRLLQPEKLTVYARYVRRGGLDINPYRSTEAMVVDNRRLVRQ

SEQ ID NO: 48893 - protein, 276 aa, unidentified
  source 1..276: note = Pseudomonas kunmingensis
  REGION 1..276: note = tr|A0A2N8SBT9|A0A2N8SBT9_9PSED NADPH-dependent 7-cyano-7-deazaguanine reductase OS=Pseudomonas kunmingensis OX=1211807 GN=queF PE=3 SV=1
MQHPAEHSPLGKSSDYVATYSPHLLFPIPRAPKWAELGLTAETLPYQGVDLWNCYELSWLLPSGKPVVAIGEFEIPADSPSIIESKSFKLYLNSLNQSVFESREALAVVMSSDLSAAAGKPVKVRLRTLDEVAAEGVATLPGRCVDDLDVTIEHYDHPQPGLLACDAGHMVEESLHSHLLKSNCPVTGQPDWGSVVVEYRGAALQAESLLAYLVSFRQHADFHEQCVERIFLDLQRLLQPEKLTVYARYVRRGGLDINPYRSTEAMVVDNRRLVRQ

SEQ ID NO: 48894 - protein, 276 aa, unidentified
  source 1..276: note = Pseudomonas kuykendallii
  REGION 1..276: note = tr|A0A2W5F0Y8|A0A2W5F0Y8_9PSED NADPH-dependent 7-cyano-7-deazaguanine reductase OS=Pseudomonas kuykendallii OX=1007099 GN=queF PE=3 SV=1
MQHPAEHSPLGKSSEYVSTYTPSLLFPIPRAPKWAELGLTAQSLPYSGVDYWNCYELSWLTVSGKPVVAVGEFAIPADSPNIIESKSFKLYLNSLNQTRFASRDEVQALLVRDLSAAAGATVAVTLKTLGRVAQEGIVEPAGVCIDELDVEIDDFSRPRAELLRCNADEVIEESFHSHLLKSNCPVTGQPDWGTLVVQYRGPKLDHACFLAYLVSFRQHSDFHEQCVERIYLDLLDLLQPECLSVHARYVRRGGLDINPYRSNHATTFDNRRLARQ

SEQ ID NO: 48895 - protein, 276 aa, unidentified
  source 1..276: note = Pseudomonas kuykendallii
  REGION 1..276: note = tr|A0A1H3B8G2|A0A1H3B8G2_9PSED NADPH-dependent 7-cyano-7-deazaguanine reductase OS=Pseudomonas kuykendallii OX=1007099 GN=queF PE=3 SV=1
MQHPAEHSPLGKSSEYVSTYTPSLLFPIPRAPKWAELGLTAQSLPYSGVDYWNCYELSWLTVSGKPVVAVGEFAIPADSPNIIESKSFKLYLNSLNQTRFASGDELQALLARDLSAAAGATVAVTLKTLGRVAEEGIAEPAGVCIDELDVEIDDFSRPRAELLRCNADEVIEESFHSHLLKSNCPVTGQPDWGTLVVEYCGPKLDHARFLAYLVSFRQHSDFHEQCVERIYLDLLDLLQPERLSVHARYVRRGGLDINPYRSNHATTFDNRRLARQ

SEQ ID NO: 48896 - protein, 276 aa, unidentified
  source 1..276: note = Pseudomonas lactis
  REGION 1..276: note = tr|A0A0R3CK60|A0A0R3CK60_9PSED NADPH-dependent 7-cyano-7-deazaguanine reductase OS=Pseudomonas lactis; OX = 1615674 GN=queF PE=3 SV=1
MHPAAEHSPLGKSSEYISTYTPSLLFPIPRAAKWAELGLSAETLPYKGVDFWNCFELSWLLPSGKPVVAIGEFSIPADSPNIIESKSFKLYLNSLNQTAFAETQSLEATLRTDLSFSAGKPVSVRIRSLADIEAEGVMALPGVCIDGLDINVSSYEHPRPELLRCDDSRVVEESVHSHLLKSNCPVTSQPDWGSVVVEYRGAALDHASLLEYIVSFRQHSDFHEQCVERIFLDLQRLLKPEKLTVYARYVRRGGLDINPYRSTENTQFLNVRLARQ

SEQ ID NO: 48897 - protein, 276 aa, unidentified
  source 1..276: note = Pseudomonas lactis
  REGION 1..276: note = tr|I4K2U4|I4K2U4_9PSED NADPH-dependent 7-cyano-7-deazaguanine reductase OS=Pseudomonas lactis; OX = 1615674 GN=queF PE=3 SV=1
MHPAAEHSPLGKSSEYISTYTPSLLFPIPRAAKWAELGLSAETLPYKGVDFWNCFELSWLLPSGKPVVAIGEFSIPADSPNIIESKSFKLYLNSLNQTAFADTQSLEATLRTDLSAAAGKPVSVRIRSLADIEAEGVMALPGVCIDDLDINVSSYEHPRPELLRCDDSRVVEESVHSHLLKSNCPVTSQPDWGSVVVEYRGAALDHASLLEYIVSFRQHSDFHEQCVERIFLDLQRLLKPEKLTVYARYVRRGGLDINPYRSTENTQFLNVRLARQ

SEQ ID NO: 48898 - protein, 276 aa, unidentified
  source 1..276: note = Pseudomonas laurylsulfatiphila
  REGION 1..276: note = tr|A0A2S6FK05|A0A2S6FK05_9PSED NADPH-dependent 7-cyano-7-deazaguanine reductase OS=Pseudomonas laurylsulfatiphila OX=2011015 GN=queF PE=3 SV=1
MHPAAEHSPLGKSSEYIATYTPSLLFPIPRTAKWAELGLTAETLPYKGVDFWNCFELSWLLPSGKPVVAIGEFSIPADSPNIIESKSFKLYLNSLNQTPFTDTASLEATLVKDLSAAAGKPVGVRIRSLKDVEREGVVALPGLCIDELDISVSNYEHPRPELLRCDDSRMVEESVHSHLLKSNCPVTSQPDWGSVAVEYRGAALDHASLLEYIVSFRQHSDFHEQCVERIFLDLQRLLKPEKLTVYARYVRRGGLDINPYRSTEAVQLPNHRLVRQ

SEQ ID NO: 48899 - protein, 276 aa, unidentified
  source 1..276: note = Pseudomonas laurylsulfativorans
  REGION 1..276: note = tr|A0A2S3VQL4|A0A2S3VQL4_9PSED NADPH-dependent 7-cyano-7-deazaguanine reductase OS=Pseudomonas laurylsulfativorans OX=1943631 GN=queF PE=3 SV=1
MHPAAEHSPLGKSSEYIATYTPSLLFPIPRTAKWAELGLTAQTLPYKGVDFWNCFELSWLLPSGKPVVAIGEFSIPADSPNIIESKSFKLYLNSLNQTPFADTASLEATLAKDLSAAAGKPVGVRIRSLKEVESEGVVALPGVCIDELDISVSNYEHPRPELLRCDDSRIVEESVHSHLLKSNCPVTSQPDWGSVAVEYRGAALDHASLLEYIVSFRQHSDFHEQCVERIFLDLQRLLKPEKLTVYARYVRRGGLDINPYRSTEEVQLPNHRLVRQ

SEQ ID NO: 48900 - protein, 276 aa, Pseudomonas libanensis
  REGION 1..276: note = tr|A0A0R2Y6M3|A0A0R2Y6M3_9PSED NADPH-dependent 7-cyano-7-deazaguanine reductase OS=Pseudomonas libanensis; OX = 75588 GN=queF PE=3 SV=1
MHPAAEHSPLGKSSEYISTYTPSLLFPIPRAAKWAELGLSADTLPYKGVDFWNCFELSWLLPSGKPVVAIGEFSIPADSPNIIESKSFKLYLNSLNQTAFIDTPSLEATLRTDLSFAAGKPVNVRIRSLADIEAEGVMALPGACIDGLDISVSNYEHPRPELLRCDDSRVVEESVHSHLLKSNCPVTSQPDWGSVVVDYRGAALDHASLLEYIVSFRQHSDFHEQCVERIFLDLQRLLKPEKLTVYARYVRRGGLDINPYRSTENTQFLNVRLARQ

SEQ ID NO: 48901 - protein, 276 aa, Pseudomonas lini
  REGION 1..276: note = tr|A0A423IM54|A0A423IM54_9PSED NADPH-dependent 7-cyano-7-deazaguanine reductase OS=Pseudomonas lini; OX = 163011 GN=queF PE=3 SV=1
MHPAAEHSPLGKSSEYIATYTPSLLFPIPRTAKWAELGLTAETLPYKGVDFWNCFELSWLLPSGKPVVAIGEFSIPADSPNIIESKSFKLYLNSLNQTAFADTASLEATLAKDLSAAAGKPVGVRIRSLKDVEAEGVVALPGVCIDDLDISVSNYEQPRPELLRCDESLIIEESVHSHLLKSNCPVTSQPDWGSVAVEYRGAALDHASLLEYIVSFRQHSDFHEQCVERIFLDLQRLLKPEKLTVYARYVRRGGLDINPYRSTEDVQLPNHRLVRQ

SEQ ID NO: 48902 - protein, 276 aa, Pseudomonas lini
  REGION 1..276: note = tr|A0A0J6H902|A0A0J6H902_9PSED NADPH-dependent 7-cyano-7-deazaguanine reductase OS=Pseudomonas lini; OX = 163011 GN=queF PE=3 SV=1
MHPAAEHSPLGKSSEYIATYTPSLLFPIPRTAKWAELGLTAETLPYKGVDFWNCFELSWLLPSGKPVVAIGEFSIPADSPNIIESKSFKLYLNSLNQTAFADTASLEATLAKDLSAAAGKPVGVRIRSLKDVEAEGVVALPGVCIDDLDISVSNYEHPRPELLRCDESLIIEECVHSHLLKSNCPVTSQPDWGSVAVEYRGAALDHASLLEYIVSFRQHSDFHEQCVERIFLDLQRLLKPEKLTVYARYVRRGGLDINPYRSTEEVQLPNHRLVRQ

SEQ ID NO: 48903 - protein, 276 aa, unidentified
  source 1..276: note = Pseudomonas linyingensis
  REGION 1..276: note = tr|A0A1H7CRC0|A0A1H7CRC0_9PSED NADPH-dependent 7-cyano-7-deazaguanine reductase OS=Pseudomonas linyingensis OX=915471 GN=queF PE=3 SV=1
MAQDVHHSPLGKTTEYVAEYAPELLFPIPRAPKWIELGIDPAALPFQGVDLWNCYELSWLTEKGKPVVAIGEFAIPAHSPCIIESKSFKLYLNSLNQTRFAGREALVEVLARDLSAAAGAPVAVRVRSLDEVAAEGVTRPAGECIDEQDIAIDHYGPPDAGLLVCDRSRLVSETLHSQLLKSNCPVTGQPDWGTVVIDYAGPALDRAALLAYVVSLRMHGDFHEQCVERIYLDLKALLQPERLTVHARYVRRGGLDINPYRSTHAVSPDNRRLVRQ

SEQ ID NO: 48904 - protein, 277 aa, Pseudomonas litoralis
  REGION 1..277: note = tr|A0A1H1NS64|A0A1H1NS64_9PSED NADPH-dependent 7-cyano-7-deazaguanine reductase OS=Pseudomonas litoralis; OX = 797277 GN=queF PE=3 SV=1
MHPAEQSPLGKTTSYNGIYTPSLLYPIPRQPIWHGLGLDPENLPFHGVDVWNSYEVSWLTPSGKPEVAAVEFIFPVTASGRIVESKSFKLYLNSLNQTVFSDRSDVLRTLESDLSVTAQAPVMVRLLNMGRLQQEGIARLPGECLDDLDIAVDVYEYTPSLLQRVSGGGWARETLHSHLLKSNCPVTGQPDWGSVMISYAGPAIDKAGLLRYLVSFRQHADFHEQCVERIFLDLQRLLGDGCELTVYARYLRRGGLDINPWRSTKAGVPDNMRLARQ

SEQ ID NO: 48905 - protein, 276 aa, Pseudomonas lundensis
  REGION 1..276: note = tr|A0A266N7L8|A0A266N7L8_9PSED NADPH-dependent 7-cyano-7-deazaguanine reductase OS=Pseudomonas lundensis; OX = 86185 GN=queF PE=3 SV=1
MHPAAEHSPLGKSSEYISTYTPSLLFPIPRAAKWAELGLSAETLPYVGVDYWTCFELSWLLPSGKPVVAIGEFCFAADSPNIVESKSFKLYLNSLNQTVFTDTSSLLETLTSDLSEASGKPVIVRVRTLDEVQADGVGVLPGVCIDGLDITVSDYAQPRPELLECDDSQVIEESVYSHLLKSNCPVTSQPDWGTVVVQYRGAALDHASLLAYLVSFRQHSDFHEQCVERIFLDLQRLLKPEKLTVYARYVRRGGLDINPYRSTETVEFNNVRLVRQ

SEQ ID NO: 48906 - protein, 276 aa, Pseudomonas lundensis
  REGION 1..276: note = tr|A0A1D9IHY8|A0A1D9IHY8_9PSED NADPH-dependent 7-cyano-7-deazaguanine reductase OS=Pseudomonas lundensis; OX = 86185 GN=queF PE=3 SV=1
MHPAAEHSPLGKSSEYISTYTPSLLFPIPRAAKWAELGLSAETLPYVGVDFWTCFELSWLLPSGKPVVAIGEFCFAADSPNIVESKSFKLYLNSLNQTVFPDTSSLLETLTSDLSEASGKPVIVRVRTLDEVQADGVGVLPGVCIDGLDITVSDYAQPRPELLKCDASHVVEESVYSHLLKSNCPVTSQPDWGTVVVQYRGAALDHASLLAYLVSFRQHSDFHEQCVERIFLDLQRLLKPEALTVYARYVRRGGLDINPYRSTETAEFKNLRLVRQ

SEQ ID NO: 48907 - protein, 276 aa, Pseudomonas lurida
  REGION 1..276: note = tr|A0A2A9D827|A0A2A9D827_9PSED NADPH-dependent 7-cyano-7-deazaguanine reductase OS=Pseudomonas lurida; OX = 244566 GN=queF PE=3 SV=1
MHPAAEHSPLGKSSEYISTYTPSLLFPIPRAAKWAELGLSAETLPYKGVDFWNCFELSWLLPSGKPVVAIGEFSIPADSPNIIESKSFKLYLNSLNQTAFADTASLEATLRTDLSAAAGKPVSVRIRRLAEIEAEGVMALPGVCIDDLDIRVSNYEHPRPELLRCDDSRVVEESVHSHLLKSNCPVTSQPDWGSVVVEYRGHALDHASLLEYIVSFRQHSDFHEQCVERIFLDLQRLLKPQTLTVYARYVRRGGLDINPYRSTEDVAFQNVRLARQ

SEQ ID NO: 48908 - protein, 276 aa, Pseudomonas lutea
  REGION 1..276: note = tr|A0A098T177|A0A098T177_9PSED NADPH-dependent 7-cyano-7-deazaguanine reductase OS=Pseudomonas lutea; OX = 243924 GN=queF PE=3 SV=1
MHPAAEHSPLGKSSEYIATYTPSLLFPIPRAAKWAELGLTAETLPYQGVDFWNCYELSWLLPSGKPVVAIGEFSIPADSPNIIESKSFKLYLNSLNQTAFASRDELVVTLERDLSAAAGKPVGVRIRSLNDIEAEGIVAVPGVCIDDLDVKITSYDRPQPELLHCDESRVVDDALHSHLLKSNCPVTSQPDWGSVAVEYRGAALDHASFLAYIVSFRQHSDFHEQCVERIFMDLQRLLKPEKLTVYARYVRRGGLDINPYRSTEGLTLENGRLARQ

SEQ ID NO: 48909 - protein, 277 aa, Pseudomonas luteola
  REGION 1..277: note = tr|A0A427I567|A0A427I567_PSELU NADPH-dependent 7-cyano-7-deazaguanine reductase OS=Pseudomonas luteola; OX = 47886 GN=queF PE=3 SV=1
MQTVDHSPLGKTSEYVDIYTPSLLYPIPRSPKWTELGLTRETLPYCGMDIWTCYELSWLNSKGKPVAAIAEFSIPANSPNIIESKSFKLYLNSLNQTTFEGPEALTEVLTRDLSQAAGDHVGVLVKPIDLVAREGFVTPSGSCIDELDIEVQHYDVPRPDLLKALPGQLVKESLYSHLLRSNCPVTGQPDWGSVVIEYKGRAVLDRASLLAYIISFRRHADFHEQCVERMFLDLRSVLEPESLTVYARYVRRGGLDINPYRSTHAAHLPVAGRLARQ

SEQ ID NO: 48910 - protein, 277 aa, Pseudomonas luteola
  REGION 1..277: note = tr|A0A2X2CLV7|A0A2X2CLV7_PSELU NADPH-dependent 7-cyano-7-deazaguanine reductase OS=Pseudomonas luteola; OX = 47886 GN=queF PE=3 SV=1
MQTVDHSPLGKTSEYVDIYTPSLLYPIPRSPKWTELGLTRETLPYCGMDIWTCYELSWLNSKGKPVAAIAEFSIPANSPNIIESKSFKLYLNSLNQTTFEGPEALTEVLTRDLSQAAGDHVGVLVKPVDLVAREGFVTPPGSCIDELDIEVQHYDVPRPDLLKALPGQLVKESLYSHLLRSNCPVTGQPDWGSVVIEYEGRAVLDRASLLAYIISFRRHADFHEQCVERMFLDLRSVLEPESLTVYARYVRRGGLDINPYRSTHAAHLPVAGRLARQ

SEQ ID NO: 48911 - protein, 276 aa, Pseudomonas mandelii
  REGION 1..276: note = tr|A0A5C5QTV6|A0A5C5QTV6_9PSED NADPH-dependent 7-cyano-7-deazaguanine reductase OS=Pseudomonas mandelii; OX = 75612 GN=queF PE=3 SV=1
MHPAAEHSPLGKSSEYIATYTPSLLFPIPRTAKWAELGLTAQTLPYKGVDFWNCFELSWLLPSGKPVVAIGEFSIPADSPNIIESKSFKLYLNSLNQTPFADSATLEATLVKDLSAAAGKPVGVRIRSLKDVEAEGVVALPGVCIDDLEISVSNYEHPRPELLRCDDSRIVEESVHSHLLKSNCPVTSQPDWGSVAVEYRGAALDHASLLEYIVSFRQHSDFHEQCVERIFLDLQRLLKPERLTVYARYVRRGGLDINPYRSTEDVQLPNHRLVRQ

SEQ ID NO: 48912 - protein, 276 aa, Pseudomonas mandelii
  REGION 1..276: note = tr|A0A059KTX4|A0A059KTX4_9PSED NADPH-dependent 7-cyano-7-deazaguanine reductase OS=Pseudomonas mandelii PD30 OX=1419583 GN=queF PE=3 SV=1
MHPAAEHSPLGKSSEYIATYTPSLLFPIPRTAKWAELGLTAETLPYKGVDFWNCFELSWLLPSGKPVVAIGEFTIPADSPNIIESKSFKLYLNSLNQTPFADTASLEATLAKDLSAAAGKPVGVRIRSLKDVEAEGVVALPGVCIDDLDISVSNYEHPRPELLRCDESRIVEESVHSHLLKSNCPVTSQPDWGSVAVEYRGAALDHASLLEYIVSFRQHSDFHEQCVERIFLDLQRLLKPEKLTVYARYVRRGGLDINPYRSTEDVQLPNHRLVRQ

SEQ ID NO: 48913 - protein, 276 aa, Pseudomonas marginalis
  REGION 1..276: note = tr|A0A3M5PN18|A0A3M5PN18_PSEMA NADPH-dependent 7-cyano-7-deazaguanine reductase OS=Pseudomonas marginalis pv. marginalis OX=97473 GN=queF PE=3 SV=1
MHPAAEHSPLGKSSEYISTYTPSLLFPIPRAAKWAELGLSAETLPYKGVDFWNCFELSWLLPSGKPVVAIGEFSIPADSPNIIESKSFKLYLNSLNQTAFADTHSLEATLRADLSAAAGKPVTVRIRRLAEIEAEGVMALPGVCIDDLDINVSSYEHPRPELLRCDDSRIVEESVHSHLLKSNCPVTSQPDWGSVVVEYRGHALDRASLLEYIVSFRQHSDFHEQCVERIFLDLQRLLKPEKLTVYARYVRRGGLDINPYRSTEDVAFQNVRLARQ

SEQ ID NO: 48914 - protein, 276 aa, Pseudomonas marginalis
  REGION 1..276: note = tr|A0A0W0M1Q9|A0A0W0M1Q9_PSEMA NADPH-dependent 7-cyano-7-deazaguanine reductase OS=Pseudomonas marginalis ICMP 11289 OX=1198318 GN=queF PE=3 SV=1
MHPAAEHSPLGKSSEYIATYTPSLLFPIPRAAKWAELGLTAETLPYRGVDFWNCYELSWLLPSGKPVVAIAEFSIPADSPNIIESKSFKLYLNSLNQTAFETREQLQVTLEKDLSAAAGKPVGVRIRSLDEIEREGVAALPGVCIDDLDISVSSYDRPQPELLRCDESRIVEESVYSHLLKSNCPVTSQPDWGSVVVEYRGAALDHASLLAYIVSFRQHSDFHEQCVERIFLDLQRLLKPEKLTVYARYVRRGGLDINPYRSTEVLDVENGRLARQ

SEQ ID NO: 48915 - protein, 276 aa, Pseudomonas marincola
  REGION 1..276: note = tr|A0A1I6XC10|A0A1I6XC10_9PSED NADPH-dependent 7-cyano-7-deazaguanine reductase OS=Pseudomonas marincola; OX = 437900 GN=queF PE=3 SV=1
MHHSAENSPLGKSSEYIATYSPQLLFPIPRAPKWAELGLTAETLPYQGVDFWNCFELSWLLPSGKPVVAMAEFAIPADSPNIIESKSFKLYLNSLNQSVFADADAVAAVMVKDLSAAAGKPVAVRVRSLNEVAAEGVAQLPGTCIDELDVAISNYAQPRPELLACDAQRVVSETVYSNLLKSNCPVTGQPDWGTVVIEYRGPAIDQASLLAYLVSFRQHADFHEQCVERIFLDLQRLLKPESLTVYARYVRRGGLDINPYRSTSPIAPDNRRLVRQ

SEQ ID NO: 48916 - protein, 276 aa, Pseudomonas mediterranea
  REGION 1..276: note = tr|A0A0A4GG50|A0A0A4GG50_9PSED NADPH-dependent 7-cyano-7-deazaguanine reductase OS=Pseudomonas mediterranea CFBP 5447 OX=1348058 GN=queF PE=3 SV=1
MHPAAEHSPLGKSSEYIATYTPSLLFPIPRTAKWAELGLTADTLPYKGVDFWNCFELSWLLPSGKPVVAIGEFAIPADSPNIIESKSFKLYLNSLNQTPFADTASLEATLRQDLSAAAGKPVQVRVRSLKDVEQEGVVALPGVCIDDLDISVDSYAHPRPELLQCDESRIVEESLHSHLLKSNCPVTSQPDWGSVVVEYRGAALDPASLLAYIVSFRQHSDFHEQCVERIFLDLKRLLKPEKLTVYARYVRRGGLDINPYRSTESVQLPNHRLVRQ

SEQ ID NO: 48917 - protein, 276 aa, unidentified
  source 1..276: note = Pseudomonas meliae
  REGION 1..276: note = tr|A0A0P9V5S7|A0A0P9V5S7_9PSED NADPH-dependent 7-cyano-7-deazaguanine reductase OS=Pseudomonas meliae; OX = 86176 GN=queF PE=3 SV=1
MHPAAEHSPLGKSSEYIATYTPSLLFPIPRAAKWAELGLTAQTLPYQGVDFWNCYELSWLLPSGKPVVAIAEFSIPADSPNIIESKSFKLYLNSLNQTAFATVEHVQTTLEQDLSTAAGKPIGVRIRSLSDIEGEGVATLPGVCIDDLDITVSSYDRPQPELLRCDESQIIEESVHSHLLKSNCPVTSQPDWGSVVVEYRGAALDHSSLLAYIVSFRQHSDFHEQCVERIFLDLQRLLKPEKLTVYARYVRRGGLDINPYRSTETLDVNNRRLARQ

SEQ ID NO: 48918 - protein, 276 aa, Pseudomonas mendocina
  REGION 1..276: note = sp|A4XTL9|QUEF_PSEMY NADPH-dependent 7-cyano-7-deazaguanine reductase OS=Pseudomonas mendocina (strain ymp) OX=399739 GN=queF PE=3 SV=1
MQHPAEHSPLGKSSQYIAEYSPELLFPISRTSKWAELGLDGANLPYQGVDYWNCYELSWLLPSGKPVVAIGEFAIPADSPNIIESKSFKLYLNSLNQTVFASWGELQATLARDLSAVAGKPVAVRLRSLTEVAGEGVATLPGQCIDELEISVTQYAHPQPELLRCDASRVVEESLHSHLLKSNCPVTGQPDWGSLVVQYRGAALDHASLLAYLVSFRQHADFHEQCVERIFLDLQRLLQPQSLTVYARYVRRGGLDINPYRSTEALRVDNARLVRQ

SEQ ID NO: 48919 - protein, 276 aa, Pseudomonas mendocina
  REGION 1..276: note = tr|A0A291K6S2|A0A291K6S2_PSEME NADPH-dependent 7-cyano-7-deazaguanine reductase OS=Pseudomonas mendocina; OX = 300 GN=queF PE=3 SV=1
MQHPAEHSPLGKSSQYIAEYSPELLFPISRTSKWAELGLDGANLPYQGVDYWNCYELSWLLPSGKPVVAIGEFAIPADSPNIIESKSFKLYLNSLNQTVFASWGELQATLARDLSAVAGKPVAVRLRSLAEVAGEGVATLPGQCIDELEISVTQYAHPQPELLRCDASRVVEESLHSHLLKSNCPVTGQPDWGSLVVQYRGAALDHASLLAYLVSFRQHADFHEQCVERIFLDLQRLLQPQSLTVYARYVRRGGLDINPYRSTEALRVDNARLVRQ

SEQ ID NO: 48920 - protein, 274 aa, unidentified
  source 1..274: note = [Pseudomonas] mesoacidophila
  REGION 1..274: note = tr|A0A2A4FGI5|A0A2A4FGI5_9BURK NADPH-dependent 7-cyano-7-deazaguanine reductase OS=[Pseudomonas] mesoacidophila OX=265293 GN=queF PE=3 SV=1
MNPEHSPLGKATVYANQYDASLLFPIPRAGARAQIGITSALPFFGTDIWNAYELSWLNARGKPQVAVATFYVPAESPNIVESKSFKLYLGAFAQTKFESIDAVRDALKRDVSAACGASVSVQLVSPHDFGKLEMDELDGLSLDRLDLDTDIYEPDPSLLTAAHDEAPVEETLVSDLLRSNCPVTGQPDWGSVQIHYVGPQIDHAGLLRYIISFRNHTGFHEQCVERIFLDILHACKPVKLAVYARYTRRGGLDINPFRTNYNQPMPDNARTARQ

SEQ ID NO: 48921 - protein, 276 aa, unidentified
  source 1..276: note = [Pseudomonas] mesoacidophila
  REGION 1..276: note = tr|A0A2A4F7U8|A0A2A4F7U8_9BURK NADPH-dependent 7-cyano-7-deazaguanine reductase OS=[Pseudomonas] mesoacidophila OX=265293 GN=queF PE=3 SV=1
MNSLSNQGTLELGKQSKYESIYNPEKLYAIPRTIKREEIGITDTLPFFGVDVWNHYEVSWLTPRGVPRVAIATIVVPCTSPNVIESKSMKLYFNTFNNTSFESREEVERIAANDLSRCAGAPVSVTLESLEYAAALQIGAPVGASIDEQDIDIAQFSVDRQLLATHDEHVSETLYSNLLKSNCLVTGQPDWGTVSIEYEGRRIDRDALLRYVVSFRNHEEFHEQCVERIFKDIQDQCAPARLTVSARYTRRGGLDINPVRSSAPVQDVPNTRLIRQ

SEQ ID NO: 48922 - protein, 276 aa, Pseudomonas migulae
  REGION 1..276: note = tr|A0A1H5IAU9|A0A1H5IAU9_9PSED NADPH-dependent 7-cyano-7-deazaguanine reductase OS=Pseudomonas migulae; OX = 78543 GN=queF PE=3 SV=1
MHPAAEHSPLGKSSEYIATYTPSLLFPIPRTAKWAELGLTAETLPYKGVDFWNCFELSWLLPSGKPVVAIGEFSIPADSPNIIESKSFKLYLNSLNQTPFTDTASLEATLVKDLSAAAGKPVGVRIRSLKDVEAEGVVALPGVCIDDLEISVSNYEHPRPELLRCDESRIVEESVHSHLLKSNCPVTSQPDWGSVAVEYRGAALDHASLLEYIVSFRQHSDFHEQCVERIFLDLQRLLKPEKLTVYARYVRRGGLDINPYRSTETVQLPNHRLVRQ

SEQ ID NO: 48923 - protein, 276 aa, Pseudomonas mohnii
  REGION 1..276: note = tr|A0A1H4PEW9|A0A1H4PEW9_9PSED NADPH-dependent 7-cyano-7-deazaguanine reductase OS=Pseudomonas mohnii; OX = 395600 GN=queF PE=3 SV=1
MHPAAEHSPLGKSSEYIATYTPSLLFPIPRTAKWAELGLTAETLPYKGVDFWNCFELSWLLPSGKPVVAIGEFSIPADSPNIIESKSFKLYLNSLNQTPFADTASLEATLVKDLSAAAGKPVGVRIRSLKDVEAEGVVALPGVCIDELDISVSNYEHPRPELLRCDESRIVEESVHSHLLKSNCPVTRQPDWGSVAVEYRGAALDHASLLEYIVSFRQHSDFHEQCVERIFLDLQRLLKPEKLTVYARYVRRGGLDINPYRSTEEVQLPNHRLVRQ

SEQ ID NO: 48924 - protein, 276 aa, Pseudomonas monteilii
  REGION 1..276: note = tr|V9UWP2|V9UWP2_9PSED NADPH-dependent 7-cyano-7-deazaguanine reductase OS=Pseudomonas monteilii SB3101 OX=1435058 GN=queF PE=3 SV=1
MHPAAEHSPLGKSSEYIATYSPELLFPIPRTAKWAELGVTAQTLPWQGVDYWNCFELSWLLPSGKPVVAIGEFAIPADSPNIIESKSFKLYLNSLNQTVFASLGELQACLEKDLSAAAGKPVGVKVRTLAEVEAQGVVALPGQCIDELDVAISNYEQPQPELLRCNPEQQVEETLHSHLLKSNCPVTGQPDWGSVVVEYKGRALDHASLLTYLISFRQHADFHEQCVERIYLDLKNLLQPEHLTVYARYVRRGGLDINPYRSTGAISPDNMRLVRQ

SEQ ID NO: 48925 - protein, 276 aa, Pseudomonas monteilii
  REGION 1..276: note = tr|A0A2L2L5D8|A0A2L2L5D8_9PSED NADPH-dependent 7-cyano-7-deazaguanine reductase OS=Pseudomonas monteilii; OX = 76759 GN=queF PE=3 SV=1
MHPAAEHSPLGKSSEYIATYSPEQLFPIPRTAKWAELGVTAQTLPWQGVDYWNCFELSWLLPSGKPVVAIGEFAIPADSPNIIESKSFKLYLNSLNQTVFASLGELQACLEKDLSAAAGKPVGVKVRTLAEVEAQGVVALPGLCIDALDVAISNYEQPQPELLRCDPERVVEEILHSHLLKSNCPVTGQPDWGSVVVEYKGRALDHASLLTYLISFRQHADFHEQCVERIYLDLKNLLQPEHLTVYARYVRRGGLDINPYRSTGAISPQNTRLVRQ

SEQ ID NO: 48926 - protein, 276 aa, Pseudomonas moorei
  REGION 1..276: note = tr|A0A1H1CGN3|A0A1H1CGN3_9PSED NADPH-dependent 7-cyano-7-deazaguanine reductase OS=Pseudomonas moorei; OX = 395599 GN=queF PE=3 SV=1
MHPAAEHSPLGKSSEYIATYTPSLLFPIPRTAKWAELGLTAETLPYKGVDFWNCFELSWLLPSGKPVVAIAEFSIPADSPNIIESKSFKLYLNSLNQTPFANTASLEATLVKDLSAAAGKPVGVRIRSLKDVEAEGVVALPGVCIDELDISVSNYEHPRPELLRCDETRIVEESVHSHLLKSNCPVTSQPDWGSVAVEYRGAALDHASLLEYIVSFRQHSDFHEQCVERIFLDLQRLLKPEKLTVYARYVRRGGLDINPYRSTEEVQLPNHRLVRQ

SEQ ID NO: 48927 - protein, 276 aa, Pseudomonas moorei
  REGION 1..276: note = tr|A0A4Q7H6I5|A0A4Q7H6I5_9PSED NADPH-dependent 7-cyano-7-deazaguanine reductase OS=Pseudomonas moorei; OX = 395599 GN=queF PE=3 SV=1
MHPAAEHSPLGKSSEYIATYTPSLLFPIPRTAKWAELGLTAETLPYKGVDFWNCFELSWLLPSGKPVVAIGEFSIPADSPNIIESKSFKLYLNSLNQTPFADTASLEATLVKDLSAAAGKPVGVRIRSLKEVEAEGVVALPGVCIDELDISVSNYEHPRPELLRCDETRIVEESVHSHLLKSNCPVTRQPDWGSVAVEYRGAALDHASLLEYIVSFRQHSDFHEQCVERIFLDLQRLLKPEKLTVYARYVRRGGLDINPYRSTEEVQLSNHRLVRQ

SEQ ID NO: 48928 - protein, 276 aa, Pseudomonas moraviensis
  REGION 1..276: note = tr|V8R4Y6|V8R4Y6_9PSED NADPH-dependent 7-cyano-7-deazaguanine reductase OS=Pseudomonas moraviensis R28-S OX=1395516 GN=queF PE=3 SV=1
MHPAAEHSPLGKSSEYIATYTPSLLFPIPRTAKWAELGLTAETLPYKGVDFWNCFELSWLLPSGKPVVAIAEFSIPADSPNIIESKSFKLYLNSLNQTPFADVATLQATLVKDLSAAAGKPVGVRVRSLKDVEAEGVVALPGVCIDDLDISVSNYEHPRPELLRCDDSRIVEESVHSHLLKSNCPVTSQPDWGSVVVEYRGAALDHASLLEYIVSFRQHSDFHEQCVERIFLDLQRLLKPEKLTVFARYVRRGGLDINPYRSTEEVQLPNHRLVRQ

SEQ ID NO: 48929 - protein, 276 aa, Pseudomonas moraviensis
  REGION 1..276: note = tr|A0A1Q3ICC2|A0A1Q3ICC2_9PSED NADPH-dependent 7-cyano-7-deazaguanine reductase OS=Pseudomonas moraviensis OX=321662 GN=queF PE=3 SV=1
MHPAAEHSPLGKSSEYIATYTPSLLFPIPRTAKWAELGLTAETLPYKGVDFWNCFELSWLLPSGKPVVAIAEFSIPADSPNIIESKSFKLYLNSLNQTPFADVATLQATLVKDLSAAAGKPVGVRVRSLKDVEAEGVVGLPGVCIDDLDISVSNYEHPRPELLRCDDSRIVEESVHSHLLKSNCPVTSQPDWGSVVVEYRGAALDHASLLEYIVSFRQHSDFHEQCVERIFLDLQRLLKPQKLTVFARYVRRGGLDINPYRSTEEVQLPNHRLVRQ

SEQ ID NO: 48930 - protein, 276 aa, Pseudomonas mosselii
  REGION 1..276: note = tr|A0A290HP21|A0A290HP21_9PSED NADPH-dependent 7-cyano-7-deazaguanine reductase OS=Pseudomonas mosselii; OX = 78327 GN=queF PE=3 SV=1
MHPAAEHSPLGKSSEYIATYTPSLLFPIPRLAKWAELGVSGDALPWQGVDFWNCFELSWLLPSGKPVVAIGEFAIPCDSPNIIESKSFKLYLNSLNQTVFESVAALQACLVQDLSAAAGKPVAVKVSTLAEVEGQGVTTLPGQCIDALDVNISNYEQPQPELLRCAPERVVEETVHSHLLKSNCPVTGQPDWGSVVVEYKGRALDHASLLTYLISFRQHADFHEQCVERIYLDLKNLLKPEHLTVYARYVRRGGLDINPYRSTGAINPQNLRLVRQ

SEQ ID NO: 48931 - protein, 276 aa, Pseudomonas mosselii
  REGION 1..276: note = tr|A0A1X1P252|A0A1X1P252_9PSED NADPH-dependent 7-cyano-7-deazaguanine reductase OS=Pseudomonas mosselii; OX = 78327 GN=queF PE=3 SV=1
MHPAAEHSPLGKSSEYIATYTPSLLFPIPRLAKWAELGVSADALPWQGVDFWNCFELSWLLPSGKPVVAIGEFAIPCDSPNIIESKSFKLYLNSLNQTVFESVAALQACLVQDLSAAAGKPVAVKVSTLAEVEGQGVTTLPGQCIDALDVNISNYEQPQPELLRCAPERVVEETVHSHLLKSNCPVTGQPDWGSVVVEYKGRALDHASLLTYLISFRQHADFHEQCVERIYLDLKNLLKPEHLTVYARYVRRGGLDINPYRSTGAINPQNLRLVRQ

SEQ ID NO: 48932 - protein, 276 aa, Pseudomonas mucidolens
  REGION 1..276: note = tr|A0A1H2M3G2|A0A1H2M3G2_9PSED NADPH-dependent 7-cyano-7-deazaguanine reductase OS=Pseudomonas mucidolens; OX = 46679 GN=queF PE=3 SV=1
MHPAAEHSPLGKSSEYISTYTPSLLFPIPRAAKWAELGLTAETLPYKGVDFWNCFELSWLLPSGKPVVAIGEFSIAADSPNIIESKSFKLYLNSLNQTPFADVQSLETTLRTDLSAAAGKPVGVRIRSLGDVEGEGVVALPGVCIDDLDISVSNYEQPRPELLRCDDSRVVEESVHSHLLKSNCPVTSQPDWGSVAVEYCGSALDHASLLEYLVSFRQHSDFHEQCVERIFLDLQRLLKPSKLTVYARYVRRGGLDINPYRSTEDMAFQNQRLVRQ

SEQ ID NO: 48933 - protein, 276 aa, unidentified
  source 1..276: note = Pseudomonas nabeulensis
  REGION 1..276: note = tr|A0A4Z0BC39|A0A4Z0BC39_9PSED NADPH-dependent 7-cyano-7-deazaguanine reductase OS=Pseudomonas nabeulensis OX=2293833 GN=queF PE=3 SV=1
MHPAAEHSPLGKSSEYISTYTPSLLFPIPRAAKWAELGLSAETLPYKGVDFWNCFELSWLLPSGKPVVAIGEFSIPADSPNIIESKSFKLYLNSLNQTAFADTASLEAVLRTDLSAAAGKPVDVRIRRLAEIEAEGVMALPGVCIDELDINVSSYEHPRPELLRCDDSRIVEESVHSHLLKSNCPVTSQPDWGSVVVEYRGSALDHASLLEYIVSFRQHSDFHEQCVERIFLDLQRLLKPEKLTVYARYVRRGGLDINPYRSTEDVAFQNVRLARQ

SEQ ID NO: 48934 - protein, 276 aa, Pseudomonas nitroreducens
  REGION 1..276: note = tr|A0A239AZM6|A0A239AZM6_9PSED NADPH-dependent 7-cyano-7-deazaguanine reductase OS=Pseudomonas nitroreducens OX=46680 GN=queF PE=3 SV=1
MQHPAEHSPLGKSSEYVSTYAPELLFPISRSTKWAELGLTADTLPYQGVDLWNCYELSWLTASGKPVVAIGEFSIPAQSPNIIESKSFKLYLNSLNQTAFDSAEAVRAVMERDLSTAAGAPVGVRVRSLDEVAGEGVAVIEGTCVDDLDVAVESYDHPRPELLSCDDTRRVDEVLYSHLLKSNCPVTGQPDWGTLVVEYAGPALDAASLLAYVVSFRQHQDFHEQCVERIYLDLQRLLQPTRLTVYARYVRRGGLDINPYRSSEAVQPDNRRLVRQ

SEQ ID NO: 48935 - protein, 276 aa, Pseudomonas nitroreducens
  REGION 1..276: note = tr|A0A246F527|A0A246F527_9PSED NADPH-dependent 7-cyano-7-deazaguanine reductase OS=Pseudomonas nitroreducens OX=46680 GN=queF PE=3 SV=1
MQHPAEHSPLGKSSEYVSTYAPELLFPISRTTKWAELGLTAETLPYQGVDLWNCYELSWLTASGKPVVAIGEFAIPAQSPNIIESKSFKLYLNSLNQTAFDNADAVRAVLERDLSAAAGAPVGVRVRGLDEVAGEGVAVIEGTCVDDLDVAVESYDHPRPELLRCDDTRRVEEVLYSHLLKSNCPVTGQPDWGTLVVDYTGPALDAASLLAYVVSFRQHQDFHEQCVERIYLDLQRLLQPARLTVYARYVRRGGLDINPYRSSEAVQPDNRRLVRQ

SEQ ID NO: 48936 - protein, 278 aa, unidentified
  source 1..278: note = Pseudomonas oceani
  REGION 1..278: note = tr|A0A2P4EU38|A0A2P4EU38_9PSED NADPH-dependent 7-cyano-7-deazaguanine reductase OS=Pseudomonas oceani; OX = 1708783 GN=queF PE=3 SV=1
MTDHPATESPLGKSSAYISVYTPSLLYPISRLPKWQELGLDPQQLPFHGADIWNCFELSWLTPSGKPVVAAAEFVFPIKAARIVESKSFKLYLNSLNQTVFRDRHDLLKTLETDLSVAAQGPVMVRLLSMQQLHQAGLFMLPGTCIDDLDVEVSSYSYDPSLLSLAASAGPVTEVLHSHLLKSNCPVTGQPDWGSVQISYSGPALDHASLVRYLVSFRQHSDFHEQCVERIFLDILKLLGEGATLTVYARYVRRGGLDINPWRSTQPGMPENLRLARQ

SEQ ID NO: 48937 - protein, 276 aa, Pseudomonas oleovorans
  REGION 1..276: note = tr|A0A379JWS5|A0A379JWS5_PSEOL NADPH-dependent 7-cyano-7-deazaguanine reductase OS=Pseudomonas oleovorans; OX = 301 GN=queF PE=3 SV=1
MQHPAEHSPLGKSSQYIAEYSPELLFPISRTTKWAELGLEGANLPYQGVDYWNCYELSWLLPSGKPVVAIGEFAIPADSPNIIESKSFKLYLNSLNQSAFASWDELQATLVHDLSTVAGKPVAVRLRSLTEVAEEGVATLPGQCIDELDISVSQYDHPQPELLRCDADRVVEESLHSHLLKSNCPVTGQPDWGSLVVEYRGAALDHASLLAYLVSFRQHADFHEQCVERIFLDLQRLLQPQALTVYARYVRRGGLDINPYRSTEALTPENGRLARQ

SEQ ID NO: 48938 - protein, 276 aa, Pseudomonas oleovorans
  REGION 1..276: note = tr|A0A2S7FJ61|A0A2S7FJ61_PSEOL NADPH-dependent 7-cyano-7-deazaguanine reductase OS=Pseudomonas oleovorans; OX = 301 GN=queF PE=3 SV=1
MQHPAEHSPLGKSSQYIAEYSPELLFPISRTTKWAELGLDGTSLPYQGVDYWNCYELSWLLPSGKPVVAIGEFAIPADSPNIIESKSFKLYLNSLNQSAFASWDELQATLVRDLSAVAGKPVAVRLRSLAEVSEEGVATLPGQCIDELDVSVSQYDHPQPELLRCDAGRVVDESLHSHLLKSNCPVTGQPDWGSLVVEYRGAALDHASLLAYLVSFRQHADFHEQCVERIFLDLQRLLQPQSLTVYARYVRRGGLDINPYRSTEAIKPENGRLARQ

SEQ ID NO: 48939 - protein, 276 aa, Pseudomonas orientalis
  REGION 1..276: note = tr|A0A0R3A1R9|A0A0R3A1R9_9PSED NADPH-dependent 7-cyano-7-deazaguanine reductase OS=Pseudomonas orientalis; OX = 76758 GN=queF PE=3 SV=1
MHPAAEHSPLGKSSEYICTYTPSLLFPIPRAAKWAELGLNAETLPYKGVDFWNCFELSWLLPSGKPVVAIGEFSIPADSPNIIESKSFKLYLNSLNQTAFADTHQLEETLRNDLGAAAGKPVSVRIRSLADIEAEGVMALPGVCIDELDINVSSYEHPRPELLRCDDSRVVEESVHSHLLKSNCPVTSQPDWGSVVVEYRGAALDHASLLEYLVSFRQHSDFHEQCVERIFLDLQRLLKPEKLTVYARYVRRGGLDINPYRSTEDVDFQNVRLARQ

SEQ ID NO: 48940 - protein, 276 aa, Pseudomonas orientalis
  REGION 1..276: note = tr|A0A3G7XUM0|A0A3G7XUM0_9PSED NADPH-dependent 7-cyano-7-deazaguanine reductase OS=Pseudomonas orientalis; OX = 76758 GN=queF PE=3 SV=1
MHPAAEHSPLGKSSEYISTYTPSLLFPIPRAAKWAELGLSAETLPYKGVDFWNCFELSWLLPSGKPVVAIGEFSIPADSPNIIESKSFKLYLNSLNQTAFADTRQLEETLRNDLGAAAGKPVGVRIRSLADIEAEGVMALPGVCIDELDINASSYEHPRPELLRCDDSRVVEESVHSHLLKSNCPVTSQPDWGSVVVEYRGAALDHASLLEYLVSFRQHSDFHEQCVERIFLDLQRLLKPEKLTVYARYVRRGGLDINPYRSTEDVAFQNVRLARQ

SEQ ID NO: 48941 - protein, 279 aa, unidentified
  source 1..279: note = Pseudomonas oryzae
  REGION 1..279: note = tr|A0A1H1NDA3|A0A1H1NDA3_9PSED NADPH-dependent 7-cyano-7-deazaguanine reductase OS=Pseudomonas oryzae; OX = 1392877 GN=queF PE=3 SV=1
MAQDVHHSPLGKTTEYVAEYAPELLFPIPREPKWRELGIDPQALPFQGVDLWNCYELSWLNAKGKPLVAIGEFAIPAHSPCIIESKSFKLYLNSLNQTRFASREALVEVLARDLSAAAGAPVAVRVRTLDEVAEEGVAHPAGECLDDQDIAIDCYGPPDAGLLLCDRSRPVSEVLYSHLLKSNCPVTGQPDWGTVVIDYVGPALDRAALLAYMVSLRMHGDFHEQCVERIYLDLKALLAPERLTVHARYVRRGGWTSIPTAAPTRSAWTTDAWFASKHA

SEQ ID NO: 48942 - protein, 275 aa, Pseudomonas oryzihabitans
  REGION 1..275: note = tr|A0A0U4WPW1|A0A0U4WPW1_9PSED NADPH-dependent 7-cyano-7-deazaguanine reductase OS=Pseudomonas oryzihabitans OX=47885 GN=queF PE=3 SV=1
MHSVEQSPLGKSTEYVSQYAPTLLYPIPRAPKWAELGLHGQSLPFRGVDVWTCYELSWLLPSGKPVVAIAEFAIPADSPNIIESKSFKLYLNSLNQSVFASMAELEAVLVKDLSEAAGGAVGVSLVSLDAWTTRGVQRPDGQCVDDLDVSVDRYAHPQADLLSVGEARDSQRFYSHLLKSNCPVTGQPDWGTVVVEYAEGLALDPESLLRYLVAFRQHADFHEQCVERIYLDLWRLLKPVKLTVFARYVRRGGLDINPYRSSDAIQPAAERYVRQ

SEQ ID NO: 48943 - protein, 275 aa, Pseudomonas oryzihabitans
  REGION 1..275: note = tr|A0A2Z5A8X6|A0A2Z5A8X6_9PSED NADPH-dependent 7-cyano-7-deazaguanine reductase OS=Pseudomonas oryzihabitans OX=47885 GN=queF PE=3 SV=1
MHSVEQSPLGKSTEYVSQYAPSLLYPIPRAPKWAELGLDGQNLPFRGVDVWTCYELSWLLPSGKPVVAIGEFAIPADSPNIIESKSFKLYLNSLNQSMFASLAELEAVLVKDLSAAAGGSVGVSLVSLDDWTARGVQRPAGQCVDELDISLARYAHPQAELLRVGEASDSRKFYSHLLKSNCPVTGQPDWGTVVIDYEEGLALEPASLLRYLVAFRQHADFHEQCVERIYLDLWRLLKPAKLTVFARYVRRGGLDINPYRSSDAIQPAAERYVRQ

SEQ ID NO: 48944 - protein, 276 aa, Pseudomonas otitidis
  REGION 1..276: note = tr|A0A1I0TW85|A0A1I0TW85_9PSED NADPH-dependent 7-cyano-7-deazaguanine reductase OS=Pseudomonas otitidis; OX = 319939 GN=queF PE=3 SV=1
MQHPAEHSPLGKSSEYISTYSPQLLFPISRVAKWSELGLTAETLPYKGVDFWNCYELSWLTPSGKPVVAIGEFAIPADSPNIIESKSFKLYLNSLNQSAFATVAELVAVLEKDLSAAAGAEVKVRVRSLAEVEAEGVARAAGICIDDLDVSIDHYDHPQPELLRADAAEVVEEALHSHLLKSNCPVTGQPDWGTLVVQYKGARLDHASFLAYLVSFRQHCDFHEQCVERVFLDLLRLLEPEHLTVQARYVRRGGLDINPYRSTHPISPDNGRLVRQ

SEQ ID NO: 48945 - protein, 278 aa, Pseudomonas pachastrellae
  REGION 1..278: note = tr|A0A1S8DKV1|A0A1S8DKV1_9PSED NADPH-dependent 7-cyano-7-deazaguanine reductase OS=Pseudomonas pachastrellae OX=254161 GN=queF PE=3 SV=1
MFDHPATGSPLGKSSAYVSVYTPSLLFPIPRQPKWQELGLDAQQLPFHGADIWNCFELSWLTPSGKPEVAAAEFVFPIKAARIVESKSFKLYLNSLNQTVFRDRRELLETLESDLSVAAQGPVAVRLFNMQQLHQLGMLTLPGRCIDDLDVSVSQYHYDASLLALDASGVQVNETLHSHLLKSNCPVTGQPDWGSVLISYSGPRIDEAALVRYLVSFREHSDFHEQCVERVFLDLLTLLGEGAKLTVYARYVRRGGLDINPWRSTEPGMPENLRLARQ

SEQ ID NO: 48946 - protein, 276 aa, Pseudomonas palleroniana
  REGION 1..276: note = tr|A0A2L1JH50|A0A2L1JH50_9PSED NADPH-dependent 7-cyano-7-deazaguanine reductase OS=Pseudomonas palleroniana OX=191390 GN=queF PE=3 SV=1
MHPAAEHSPLGKSSEYISTYTPSLLFPIPRAAKWAELGLIAETLPYKGVDFWNCFELSWLLPSGKPVVAIGEFSIPADSPNIIESKSFKLYLNSLNQTAFADIQGLEATLRDDLSAAAGKPVTVRIRSLAEIEAEGVMALPGVCIDGLDISVSNYEHPRPELLRCDDSRIVEESVHSHLLKSNCPVTSQPDWGSVVVEYRGAALDHASLLEYIVSFRQHSDFHEQCVERIFLDLQRLLKPEKLTVYARYVRRGGLDINPYRSTENVTFQNVRLARQ

SEQ ID NO: 48947 - protein, 276 aa, Pseudomonas palleroniana
  REGION 1..276: note = tr|A0A1H5GHS2|A0A1H5GHS2_9PSED NADPH-dependent 7-cyano-7-deazaguanine reductase OS=Pseudomonas palleroniana OX=191390 GN=queF PE=3 SV=1
MHPAAEHSPLGKSSEYISTYTPSLLFPIPRAAKWAELGLSAETLPYKGVDFWNCFELSWLLPSGKPVVAIGEFSIPADSPNIIESKSFKLYLNSLNQTAFADIQGLEATLRDDLSAAAGKPVTVRIRSLAEIEGEGVMALPGVCIDGLDISVSNYEHPRPELLRCDDSRIVEESVHSHLLKSNCPVTSQPDWGSVVVEYRGSALDHASLLEYIVSFRQHSDFHEQCVERIFLDLQRLLKPEKLTVYARYVRRGGLDINPYRSTENVTFQNVRLARQ

SEQ ID NO: 48948 - protein, 276 aa, Pseudomonas panacis
  REGION 1..276: note = tr|A0A1H4PNY6|A0A1H4PNY6_PSEPA NADPH-dependent 7-cyano-7-deazaguanine reductase OS=Pseudomonas panacis; OX = 307251 GN=queF PE=3 SV=1
MHPAAEHSPLGKSSEYISTYTPSLLFPIPRAAKWAELGLSAETLPYTGVDFWNCFELSWLLPSGKPVVAIGEFSIAADSPNIIESKSFKLYLNSLNQTVFADTQSLEATLRTDLSAAAGKPVGVRVRSLAEVEAEGVVALPGVCIDDLDISVSNYEHPRPELLRCDDSRIVEESVYSHLLKSNCPVTSQPDWGSVAVQYRGAQLDHASLLEYLVSFRQHSDFHEQCVERIFLDLQRLLKPEKLTVYARYVRRGGLDINPYRSTEAVPFQNLRLARQ

SEQ ID NO: 48949 - protein, 276 aa, Pseudomonas panipatensis
  REGION 1..276: note = tr|A0A1G8CT13|A0A1G8CT13_9PSED NADPH-dependent 7-cyano-7-deazaguanine reductase OS=Pseudomonas panipatensis OX=428992 GN=queF PE=3 SV=1
MQHPAEHSPLGKSSEYVSTYAPELLFPIARATKWAELGLSAQTLPYRGVDIWNCYELSWLTRGGKPVVAIGEFTIPADSPNIIESKSFKLYLNSLNQSAFDSREALREVLARDLSAAAGAPVGVRLRSLDEVAADGIASLPGTCVDDLDVTVERYDQPRPELLRCDDTRRVDEVLYSHLLKSNCPVTGQPDWGTLVVEYSGPALDPVSLLAYLVSFRQHQDFHEQCVERIYLDLQRLLQPSRLTVYARYVRRGGLDINPYRSSDSIVPDNRRLVRQ

SEQ ID NO: 48950 - protein, 276 aa, Pseudomonas parafulva
  REGION 1..276: note = tr|A0A497UBR2|A0A497UBR2_9PSED NADPH-dependent 7-cyano-7-deazaguanine reductase OS=Pseudomonas parafulva; OX = 157782 GN=queF PE=3 SV=1
MHPAAEHSPLGKSSEYIATYTPSLLFPIPRTAKWAELGLTAETLPYKGVDFWNCFELSWLLPSGKPVVAIGEFSIPADSPNIIESKSFKLYLNSLNQTPFADIASLEATLVKDLSAAAGKPVGVRVRSLKEVEAEGVVALPGVCIDDLDISVSNYEHPRPELLRCDDSRIVEESVHSHLLKSNCPVTSQPDWGSVVVEYRGAALDHASLLEYIVSFRQHSDFHEQCVERIFLDLQRLLKPEKLTVFARYVRRGGLDINPYRSTEAVQLPNHRLVRQ

SEQ ID NO: 48951 - protein, 276 aa, Pseudomonas parafulva
  REGION 1..276: note = tr|A0A0A7JPC8|A0A0A7JPC8_9PSED NADPH-dependent 7-cyano-7-deazaguanine reductase OS=Pseudomonas parafulva; OX = 157782 GN=queF PE=3 SV=1
MHPAAEHSPLGKSSEYIAIYTPSLLFPIPRAAKWAELGVTAQTLPWQGVDYWNCFELSWLLPSGKPVVAIGEFAIPADSPNIIESKSFKLYLNSLNQTVFASAEELVACLEQDLSAAAGKPVRVRVRSLDDVQNEGVMALPGQCIDSRDVTISHYGEPQPELLRCDPDRVVEETLHSHLLKSNCPVTGQPDWGSVMVEYKGRALDPASLLTYLVSFRQHADFHEQCVERIYLDLLRLLQPEHLTVYARYVRRGGLDINPYRSTAPISPRNGRLVRQ

SEQ ID NO: 48952 - protein, 276 aa, unidentified
  source 1..276: note = Pseudomonas paralactis
  REGION 1..276: note = tr|A0A0R3AFN1|A0A0R3AFN1_9PSED NADPH-dependent 7-cyano-7-deazaguanine reductase OS=Pseudomonas paralactis; OX = 1615673 GN=queF PE=3 SV=1
MHPAAEHSPLGKSSEYISTYTPSLLFPIPRAAKWAELGLSADTLPYKGVDFWNCFELSWLLPSGKPVVAIGEFSIPADSPNIIESKSFKLYLNSLNQTAFVDTQSLEATLQTDLSAAAGKPVAVRIRSLADIEAEGVMALPGVCIDELDINVSSYEHPRPELLRCDDSRVVEESVHSHLLKSNCPVTSQPDWGSVVVEYRGAALDHASLLEYIVSFRQHSDFHEQCVERIFLDLQRLLKPEKLTVYARYVRRGGLDINPYRSTENTQFLNVRLARQ

SEQ ID NO: 48953 - protein, 278 aa, Pseudomonas pelagia
  REGION 1..278: note = tr|A0A2A4ARA7|A0A2A4ARA7_9PSED NADPH-dependent 7-cyano-7-deazaguanine reductase OS=Pseudomonas pelagia; OX = 553151 GN=queF PE=3 SV=1
MDQHPAEQSPLGKSSVYVSVYTPSLLFPIAREPKWLQLELDPEHLPFHGADIWNCYELSWLSPSGKPEVAAAEFIFPIKAKRIVESKSFKLYLNSFNQTVFRDRAEVLHTLESDLSVAAQGPVMVRLFGMNQLYHVGMSQLPGECIDDLPVAVSQYTYDPTLLELAEAGGLARESLHSHLLKSNCPVTGQPDWGSIMLSYSGKRLDHASVLRYLVSFRQHSDFHEQCVERIFCDVLALLGRGAELTVYARYVRRGGLDINPYRSTSASFPDNLRLARQ

SEQ ID NO: 48954 - protein, 276 aa, Pseudomonas peli
  REGION 1..276: note = tr|A0A1G4PB04|A0A1G4PB04_9PSED NADPH-dependent 7-cyano-7-deazaguanine reductase OS=Pseudomonas peli; OX = 592361 GN=queF PE=3 SV=1
MHPAAEDSPLGKSSEYIATYTPSLLFPIPRAAKWAELGLSAETLPYQGVDFWNCFELSWLLPSGKPVVAMGEFAIPADSPNIIESKSFKLYLNSLNQSVFSSADELVTVLVRDLSAAAGKPVGVRVRSLAEVTADGVQAAPGICIDELDVAISNYAQPQPELLRCDAARVVEESLHSHLLKSNCPVTGQPDWGTLVVEYRGLALDHASLLAYLVSFRQHADFHEQCVERIFLDLQRLLKPEHLTVYARYVRRGGLDINPYRSSGPISPDNQRLVRQ

SEQ ID NO: 48955 - protein, 276 aa, Pseudomonas plecoglossicida; identical to SEQ ID NO: 48924
  REGION 1..276: note = tr|A0A0B5K850|A0A0B5K850_9PSED NADPH-dependent 7-cyano-7-deazaguanine reductase OS=Pseudomonas plecoglossicida OX=70775 GN=queF PE=3 SV=1

SEQ ID NO: 48956 - protein, 276 aa, Pseudomonas plecoglossicida
  REGION 1..276: note = tr|A0A2R7URC3|A0A2R7URC3_9PSED NADPH-dependent 7-cyano-7-deazaguanine reductase OS=Pseudomonas plecoglossicida OX=70775 GN=queF PE=3 SV=1
MHPAAEHSPLGKSSEYIATYSPELLFPIPRTAKWAELGVTAQTLPWQGVDYWNCFELSWLLPSGKPVVAIGEFAIPADSPNIIESKSFKLYLNSLNQTVFASPGELQACLEKDLSAAAGKPVGVKVRTLAEVEAQGVVALPGQCIDALDVAISNYEQPQPGLLRCNPEQQVEETLHSHLLKSNCPVTGQPDWGSLVVEYKGRGLDHASLLTYLISFRQHADFHEQCVERIYLDLKNLLQPEHLTVYARYVRRGGLDINPYRSTGAISPDNKRLVRQ

SEQ ID NO: 48957 - protein, 276 aa, Pseudomonas poae
  REGION 1..276: note = tr|A0A3Q9DA08|A0A3Q9DA08_9PSED NADPH-dependent 7-cyano-7-deazaguanine reductase OS=Pseudomonas poae; OX = 200451 GN=queF PE=3 SV=1
MHPAAEHSPLGKSSEYISTYTPSLLFPIPRAAKWAELGLSAETLPYKGVDFWNCFELSWLLPSGKPVVAIGEFSIPADSPNIIESKSFKLYLNSLNQTAFVDTASLEATLRTDLSAAAGKPVLVRIRQLAEIEAEGVMALPGVCIDDLDINVSSYEHPRPELLRCDDSRIVEESVHSHLLKSNCPVTSQPDWGSVVVEYRGSALDHASLLEYIVSFRQHSDFHEQCVERIFLDLQRLLKPEKLTVYARYVRRGGLDINPYRSTEDVAFQNVRLARQ

SEQ ID NO: 48958 - protein, 276 aa, Pseudomonas poae
  REGION 1..276: note = tr|A0A2S9ETR9|A0A2S9ETR9_9PSED NADPH-dependent 7-cyano-7-deazaguanine reductase OS=Pseudomonas poae; OX = 200451 GN=queF PE=3 SV=1
MHPAAEHSPLGKSSEYISTYTPSLLFPIPRAAKWAELGLSAETLPYKGVDFWNCFELSWLLPSGKPVVAIGEFSIPADSPNIIESKSFKLYLNSLNQTAFADTASLEGVLRTDLSAAAGKPVDVRIRSLAEIEAEGVMALPGECIDELDINVSSYEHPRPELLRCDDSRIVEESVHSHLLKSNCPVTSQPDWGSVVVEYRGSALDHASLLEYIVSFRQHSDFHEQCVERIFLDLQRLLKPEKLTVYARYVRRGGLDINPYRSTEDVAFQNVRLARQ

SEQ ID NO: 48959 - protein, 276 aa, Pseudomonas pohangensis
  REGION 1..276: note = tr|A0A1H2FHM4|A0A1H2FHM4_9PSED NADPH-dependent 7-cyano-7-deazaguanine reductase OS=Pseudomonas pohangensis OX=364197 GN=queF PE=3 SV=1
MQHPAEHSPLGKSSEYTSQYAPGLLFPIARSTKWAELGLHAGNLPYQGVDIWNCYELSWLLPSGKPVVAIGEFSIPADSANIIESKSFKLYLNSLNQSVFATHDELQKTLCRDLSACADAPVAVRIRSLDEVSAEGVTVLPGVCIDDLEISVSNYAQPQPELLRCAGSVQVSESLHSHLLRSNCPVTGQPDWGSVAVDYLGPQLDHASFLAYLVSFRQHADFHEQCVERIFLDLQRLLKPERLTVYARYVRRGGLDINPYRSTHAVEPANQRLARQ

SEQ ID NO: 48960 - protein, 276 aa, unidentified
  source 1..276: note = Pseudomonas prosekii
  REGION 1..276: note = tr|A0A1H1P8H1|A0A1H1P8H1_9PSED NADPH-dependent 7-cyano-7-deazaguanine reductase OS=Pseudomonas prosekii; OX = 1148509 GN=queF PE=3 SV=1
MHPAAEHSPLGKSSEYIATYTPSLLFPIPRTAKWAELGLTAETLPYKGVDFWNCFELSWLLPSGKPVVAIGEFTIPADSPNIIESKSFKLYLNSLNQTPFAETAGLEATLVKDLSAAAGKPVGVRIRSLREVEAEGVVALPGVCIDDLDISVSNYEQPRPELLRCDASRIVEESVHSHLLKSNCPVTSQPDWGSVAVEYRGAALDHASLLEYIVSFRQHSDFHEQCVERIFLDLQRLLKPQKLTVYARYVRRGGLDINPYRSTEDVQLPNHRLARQ

SEQ ID NO: 48961 - protein, 276 aa, unidentified
  source 1..276: note = Pseudomonas prosekii
  REGION 1..276: note = tr|A0A3L8CU11|A0A3L8CU11_9PSED NADPH-dependent 7-cyano-7-deazaguanine reductase OS=Pseudomonas prosekii; OX = 1148509 GN=queF PE=3 SV=1
MHPAAEHSPLGKSSEYIATYTPSLLFPIPRTAKWAELGLTAETLPYKGVDFWNCFELSWLLPSGKPVVAIGEFTIPADSPNIIESKSFKLYLNSLNQTPFADTASLEATLVKDLSAAAGKPVGVRIRSLREVEAEGVVALPGVCIDDLDISVSNYEQPRPELLRCDASRIVEESVHSHLLKSNCPVTSQPDWGSVAVEYRGAALDHASLLEYIVSFRQHSDFHEQCVERIFLDLQRLLKPQKLTVYARYVRRGGLDINPYRSTEDVQLPNQRLARQ

SEQ ID NO: 48962 - protein, 276 aa, unidentified
  source 1..276: note = Pseudomonas protegens
  REGION 1..276: note = tr|A0A2J7UMG0|A0A2J7UMG0_9PSED NADPH-dependent 7-cyano-7-deazaguanine reductase OS=Pseudomonas protegens; OX = 380021 GN=queF PE=3 SV=1
MHPAAEHSPLGKSSEYVSTYTPSLLFPIPRAAKWAELGLSADTLPYKGVDFWNCFELSWLLPSGKPVVAIGEFSIPADSPNIIESKSFKLYLNSLNQTPFADRATLEATLRQDLSAAAGKPVGVRIRSLGEVEAQGVVALPGICIDELDISVDSYEHPRPELLRCDDSQVVEESVHSHLLKSNCPVTSQPDWGSVVVEYRGAALDHASLLAYLVSFRQHSDFHEQCVERIFLDLQRLLKPEKLTVYARYVRRGGLDINPYRSTETMEFANQRLVRQ

SEQ ID NO: 48963 - protein, 276 aa, unidentified
  source 1..276: note = Pseudomonas protegens
  REGION 1..276: note = tr|A0A423E4I1|A0A423E4I1_9PSED NADPH-dependent 7-cyano-7-deazaguanine reductase OS=Pseudomonas protegens; OX = 380021 GN=queF PE=3 SV=1
MHPAAEHSPLGKSSEYVSTYTPSLLFPIPRAAKWAELGLSADTLPYKGVDFWNCFELSWLLPSGKPVVAIGEFSIPADSPNIIESKSFKLYLNSLNQTPFADRTTLEATLRQDLSAAAGKPVGVRVRSLGEVEAQGVVALPGTCIDELDISVDSYEHPRPELLRCDDSQVVEESVHSHLLKSNCPVTSQPDWGSVVVEYRGAALDHASLLAYLVSFRQHSDFHEQCVERIFLDLQRLLKPEKLTVYARYVRRGGLDINPYRSTETAEFANQRLVRQ

SEQ ID NO: 48964 - protein, 276 aa, Pseudomonas pseudoalcaligenes
  REGION 1..276: note = tr|W6QX49|W6QX49_PSEP5 NADPH-dependent 7-cyano-7-deazaguanine reductase OS=Pseudomonas pseudoalcaligenes (strain CECT 5344) OX=1182590 GN=queF; PE = 3 SV=1
MQHPAEHSPLGKSSQYIAEYSPELLFPISRTTKWAELGLEGANLPYQGVDYWNCYELSWLLPSGKPVVAIGEFAIPADSPNIIESKSFKLYLNSLNQSAFASWDELQATLVRDLSAVAGKPVAVRLRSLAEVAEEGVATLPGQCIDDLDISVSQYDHPQPELLRCDAGRVVEESLHSHLLKSNCPVTGQPDWGSLVVEYRGAALDHASLLAYLVSFRQHADFHEQCVERIFLDLQRLLQPQALTVYARYVRRGGLDINPYRSTEALTPENGRLARQ

SEQ ID NO: 48965 - protein, 276 aa, Pseudomonas psychrophila
  REGION 1..276: note = tr|A0A0J6I245|A0A0J6I245_9PSED NADPH-dependent 7-cyano-7-deazaguanine reductase OS=Pseudomonas psychrophila OX=122355 GN=queF PE=3 SV=1
MHPAAEHSPLGKSSEYISTYTPSLLFPIPRAAKWAELGLSAETLPYVGVDFWTCFELSWLLPSGKPVVAIGEFCFAADSPNIVESKSFKLYLNSLNQSVFADTPSLEATLQADLSAASGKPVSVRVRSLNDVQADGVGVLPGVCIDDLDITVSDYEQPRPELLKCDDSQIVEESVYSHLLKSNCPVTSQPDWGTVVVEYRGAALDHASLLAYLVSFRQHSDFHEQCVERIFLDLQRLLKPETLTVYARYVRRGGLDINPYRSTEAVEFQNVRLVRQ

SEQ ID NO: 48966 - protein, 276 aa, Pseudomonas psychrophila
  REGION 1..276: note = tr|A0A3N2A3N7|A0A3N2A3N7_9PSED NADPH-dependent 7-cyano-7-deazaguanine reductase OS=Pseudomonas psychrophila OX=122355 GN=queF PE=3 SV=1
MHPAAEHSPLGKSSEYISTYTPSLLFPIPRAAKWAELGLSADTLPYVGVDFWNCFELSWLLPSGKPVVAIGEFAFAADSPNIVESKSFKLYLNSLNQTVFADTQTLEATLQADLSAASGKPVSVSVRSLNDVQADGVGVLPGVCIDDLDITVSDYAHPRPELLKCDPAQVVEESVYSHLLKSNCPVTSQPDWGTVVVEYRGAALDHASLLAYLVSFRQHSDFHEQCVERIFLDVQRLLKPEKLTVYARYVRRGGLDINPYRSTETVEFNNLRLVRQ

SEQ ID NO: 48967 - protein, 275 aa, Pseudomonas psychrotolerans
  REGION 1..275: note = tr|A0A1G5M1B4|A0A1G5M1B4_9PSED NADPH-dependent 7-cyano-7-deazaguanine reductase OS=Pseudomonas psychrotolerans OX=237610 GN=queF PE=3 SV=1
MHSVEQSPLGKSTEYVSQYAPELLYPIPRAPKWAELGLDGQGLPFRGVDIWTCYELSWLLPSGKPVVAIGEFAIPADSPNIIESKSFKLYLNSLNQSAFASLADVEAVLVRDLSAASGGTVGVSLVSLDDWAARGVQRPDGQCVDELDIGLDRYAHPQPELLSVGEARDSQRFYSHLLKSNCPVTGQPDWGTVVIDYEEGLALEAASLLRYLVAFRQHADFHEQCVERIYLDLWRLLKPAKLTVFARYVRRGGLDINPYRSSDAIQPAAERYVRQ

SEQ ID NO: 48968 - protein, 275 aa, Pseudomonas psychrotolerans
  REGION 1..275: note = tr|A0A147H3J2|A0A147H3J2_9PSED NADPH-dependent 7-cyano-7-deazaguanine reductase OS=Pseudomonas psychrotolerans OX=237610 GN=queF PE=3 SV=1
MHSVEQSPLGKSTEYVSQYTPGLLYPIPRALKWTELGVDGANLPFHGVDVWTCYELSWLLPSGKPVVAIAEFAIPAASPNIVESKSFKLYLNSLNQSVFASVKELQAALEKDLSHVAGAPVTVLLWSLDEWAARGIQRPAGRCIDELGVPIKGYAHPQQELLSVGEARDSQRLYSHLLKSNCPVTGQPDWGTLVVDYQEGLALEPESLLRYVVAFRQHADFHEQCVERIYLDLWRLLKPEKLTVFARYVRRGGLDINPYRSSEAVQPVAERYVRQ

SEQ ID NO: 48969 - protein, 275 aa, unidentified
  source 1..275: note = Pseudomonas punonensis
  REGION 1..275: note = tr|A0A1M7MF15|A0A1M7MF15_9PSED NADPH-dependent 7-cyano-7-deazaguanine reductase OS=Pseudomonas punonensis; OX = 1220495 GN=queF PE=3 SV=1
MNSVEHSPLGKSSEYIATYSPELLFPIPRATKWAELGLSAETLPYRGVDYWNCFELSWLLPSGKPVVAIGEFSVPADSPHIIESKSFKLYLNSLNQSVFASAQELISVLEKDLSATAGKPVGVRVRSLDEVAVEGMAALPGLCVDELDVSISNYAAPQPELLRCDPAIIVEGSLHSHLLKSNCPVTGQPDWGSVAVQYKGAALEPASLLAYLVSFRQHADFHEQCVERIFLDLQKLLQPEYLTVYARYVRRGGLDINPYRTTLAEVPQNLRLVRQ

SEQ ID NO: 48970 - protein, 276 aa, Pseudomonas putida
  REGION 1..276: note = sp|Q88KX9|QUEF_PSEPK NADPH-dependent 7-cyano-7-deazaguanine reductase OS=Pseudomonas putida (strain ATCC 47054 / DSM 6125 / NCIMB 11950 / KT2440); OX = 160488 GN=queF P E=3 SV=1
MHPAAEHSPLGKSSEYIATYSPEQLFPIPRTAKWAELGVTAQTLPWQGVDYWNCFELSWLLPSGKPVVAIGEFAIPADSPNIIESKSFKLYLNSLNQTVFTSLGALQVCLEKDLSAAAGKPVGVKVRTLAEVEAQGVVALPGQCIDALDVAISNYEQPQPELLRCNPERVVEETLHSHLLKSNCPVTGQPDWGSVVVQYKGRALDHASLLTYLISFRQHADFHEQCVERIYLDLKNLLQPEHLTVYARYVRRGGLDINPYRSTGPISPDNKRLVRQ

SEQ ID NO: 48971 - protein, 276 aa, Pseudomonas putida
  REGION 1..276: note = tr|A0A1X1ACP6|A0A1X1ACP6_PSEPU NADPH-dependent 7-cyano-7-deazaguanine reductase OS=Pseudomonas putida; OX = 303 GN=queF PE=3 SV=1
MHPAAEHSPLGKSSEYIATYSPEQLFPIPRTAKWAELGVTAQTLPWQGVDYWNCFELSWLLPSGKPVVAIGEFAIPADSPNIIESKSFKLYLNSLNQTVFASLGELQACLQKDLSAAAGKPVGVKVRTLAEVEAQGVVALPGQCIDALDVAISNYEQPQPELLRCNPERVVEETLHSHLLKSNCPVTGQPDWGSVVVEYKGRALDHASLLTYLISFRQHADFHEQCVERIYLDLKNLLQPEHLTVYARYVRRGGLDINPYRSTGAISPDNKRLVRQ

SEQ ID NO: 48972 - protein, 276 aa, unidentified
  source 1..276: note = Pseudomonas reidholzensis
  REGION 1..276: note = tr|A0A383RR44|A0A383RR44_9PSED NADPH-dependent 7-cyano-7-deazaguanine reductase OS=Pseudomonas reidholzensis OX=1785162 GN=queF PE=3 SV=1
MHPAAEHSPLGKSSEYISTYTPSLLFPIPRLAKWAELGVSGDALPWQGVDYWNCFELSWLLPSGKPVVAIGEFAIPAASPNIIESKSFKLYLNSLNQTVFASTEALQACLEQDLSAAAGKPVSVRVRTLAEVEGEGVVALPGQCIDGLDVAINNYEQPQPQLLQCDADRVVEEAVHSHLLKSNCPVTGQPDWGSVVVEYKGLALDHGSLLTYLVSFRQHADFHEQCVERIYLDLKRLLKPEHLTVYARYVRRGGLDINPYRSTGPISPRNLRLVRQ

SEQ ID NO: 48973 - protein, 276 aa, Pseudomonas reinekei
  REGION 1..276: note = tr|A0A1H0IGX9|A0A1H0IGX9_9PSED NADPH-dependent 7-cyano-7-deazaguanine reductase OS=Pseudomonas reinekei; OX = 395598 GN=queF PE=3 SV=1
MHPAAEHSPLGKSSEYIATYTPSLLFPIPRTAKWAELGLMAESLPYKGVDFWNCFELSWLLPSGKPVVAIGEFSIPADSPNIIESKSFKLYLNSLNQTPFADTASLEATLVNDLSAAAGKPVGVRVRSLKDVEAEGVVALPGVCIDDLDIRVSNYEHPRPELLRCDDSRIVEESVHSHLLKSNCPVTSQPDWGSVVVEYRGAALDHASLLEYIVSFRQHSDFHEQCVERIFLDLQRLLKPEKLTVYARYVRRGGLDINPYRSTEAVQLPNRRLVRQ

SEQ ID NO: 48974 - protein, 277 aa, Pseudomonas resinovorans
  REGION 1..277: note = tr|S6AKW0|S6AKW0_PSERE NADPH-dependent 7-cyano-7-deazaguanine reductase OS=Pseudomonas resinovorans NBRC 106553 OX=1245471 GN=queF PE=3 SV=1
MQHPAEHSPLGKSSEYVSSYSPELLFPISRVTKWNELGLTAATLPYQGVDFWNCYELSWLTPSGKPVVAIGEFAIPAESPNIIESKSFKLYLNSLNQSVFANAAELEQVLARDLGAAAGAQVQVRVRSLSDVADEGVASLPGACIDELDVVIDRYEHPQPELLRAEAGQPVEDALHSHLLKSNCPVTGQPDWGSVVVEYRGAKRLDHASFLAYLVSFRQHADFHEQCVERIFLDLKRLLEPESLTVFARYVRRGGLDINPYRSTHKVQTDNRRLVRQ

SEQ ID NO: 48975 - protein, 276 aa, Pseudomonas rhizosphaerae
  REGION 1..276: note = tr|A0A089ZQS2|A0A089ZQS2_9PSED NADPH-dependent 7-cyano-7-deazaguanine reductase OS=Pseudomonas rhizosphaerae OX=216142 GN=queF PE=3 SV=1
MHPAAEHSPLGKSSEYVSTYTPSLLFPIPRAAKWAELGLSAETLPYTGVDVWNCFELSWLLPSGKPVVAIGEFTIPADSPNIIESKSFKLYLNSLNQTAFASVDDLQAVLVQDLSGAAGKPVGVRVRRLEEVEAEGVVRLPGVCIDDLDITVSSYDHPQPELLRCDPAKAVNETLHSHLLRSNCPVTSQPDWGSVCITYSGAALDHASVLAYLVSFRQHSDFHEQCVERIFTDLQRLVQPEKLTVFARYVRRGGLDINPYRSTEAMHIANDRLVRQ

SEQ ID NO: 48976 - protein, 276 aa, Pseudomonas rhodesiae
  REGION 1..276: note = tr|A0A5C5NHX5|A0A5C5NHX5_9PSED NADPH-dependent 7-cyano-7-deazaguanine reductase OS=Pseudomonas rhodesiae; OX = 76760 GN=queF PE=3 SV=1
MHPAAEHSPLGKSSEYISTYTPSLLFPIPRAAKWAELGLSAETLPYQGVDFWNCFELSWLLPSGKPVVAIGEFSIPADSPNIIESKSFKLYLNSLNQSAFADSQSLEATLRADLSAAAGKPVGVRIRSLADVEAEGVQALPGVCIDDLDIKVSSYEHPRPELLRCDASRIVEESVHSHLLKSNCPVTSQPDWGSVVVEYRGAALDHASLLEYLVSFRQHSDFHEQCVERIFLDVQRLLKPEKLTVYARYVRRGGLDINPYRSTENTQFLNMRLARQ

SEQ ID NO: 48977 - protein, 277 aa, Pseudomonas sabulinigri
  REGION 1..277: note = tr|A0A1H1NKF7|A0A1H1NKF7_9PSED NADPH-dependent 7-cyano-7-deazaguanine reductase OS=Pseudomonas sabulinigri OX=472181 GN=queF PE=3 SV=1
MSEHPAELSPLGKSSAYVSVYTPSLLFPIARQPKWQELGLDAARLPFHGVDIWNCYELSWLTPSGKPEVAAAEFVFPIKAARIVESKSFKLYLNSFNQTVFRDRQEVQQTLETDLSVAAQGPVMVRLLSMQQLHQGGMLPLAGDCIDDLDVTVDCYEYDRSLLALNLPQVEVSEQLHSHLLKSNCPVTGQPDWGSLQISYRGPQLNRAALLRYLISFRQHADFHEQCVERIFLDLRRVLGEGELTVYARYVRRGGLDINPYRSTRAGVPENLRLARQ

SEQ ID NO: 48978 - protein, 276 aa, unidentified
  source 1..276: note = Pseudomonas sagittaria
  REGION 1..276: note = tr|A0A1I5R5X9|A0A1I5R5X9_9PSED NADPH-dependent 7-cyano-7-deazaguanine reductase OS=Pseudomonas sagittaria; OX = 1135990 GN=queF PE=3 SV=1
MAQDVHHSPLGKTTEYVAEYAPELLFPIPRTAKWLELGIDPAALPFQGVDLWNCYELSWLTEKGKPVVAIGEFAIPAHSPCIIESKSFKLYLNSLNQTRFASRAALVEVLARDLSAAAGAPVAVRVRSLDEVAEEGVARPAGDCLDEQDIAIDHYGPPDAGLLLCDRSRVVSETLHSNLLKSNCPVTGQPDWGTVVIDYTGPALDRAALLAYVVSLRMHGDFHEQCVERIYLDLKTLLQPERLSVHARYVRRGGLDINPYRSTHAPSPDNRRLVRQ

SEQ ID NO: 48979 - protein, 278 aa, unidentified
  source 1..278: note = Pseudomonas salegens
  REGION 1..278: note = tr|A0A1H2FUB3|A0A1H2FUB3_9PSED NADPH-dependent 7-cyano-7-deazaguanine reductase OS=Pseudomonas salegens; OX = 1434072 GN=queF PE=3 SV=1
MDQHPAEQSPLGKSSDYVSVYTPSLLFPIARAPKWAELGLQPEQLPFNGADIWNCYELSWLTPSGKPAVAAVEFVFPLKAARIVESKSFKLYLNSFNQTVFSDRADVVRTLESDLSVAAQGPVMVHLSGMDVLLQEGVGKLQGRCLDDLDVSINEYHYNPELLRLADSGLNVAESLYSHLLKSNCPVTGQPDWASVQIDYRGPALDQEALLCYLISFRQHADFHEQCVERIFVDLLRVLGQGAELTVYARYLRRGGLDINPWRSTQPGMPKNLRLARQ

SEQ ID NO: 48980 - protein, 276 aa, Pseudomonas salomonii
  REGION 1..276: note = tr|A0A1H3IQ26|A0A1H3IQ26_9PSED NADPH-dependent 7-cyano-7-deazaguanine reductase OS=Pseudomonas salomonii; OX = 191391 GN=queF PE=3 SV=1
MHPAAEHSPLGKSSEYISTYTPSLLFPIPRAAKWAELGLTAETLPYKGVDFWNCFELSWLLPSGKPVVAIGEFSIPAESPNIIESKSFKLYLNSLNQTAFADTQSLEATLRTDLSAAAGLPVSVRIRSLAEVEAEGVMALPGACIDDLDISVSNYEHPRPELLRCDDSRIVDESVHSHLLKSNCPVTSQPDWGSVVVEYRGHALDHASLLEYIVSFRQHSDFHEQCVERIFLDVQRLLKPEKLTVYARYVRRGGLDINPYRSTENVQFQNVRLARQ

SEQ ID NO: 48981 - protein, 276 aa, Pseudomonas salomonii
  REGION 1..276: note = tr|A0A3M4QA42|A0A3M4QA42_9PSED NADPH-dependent 7-cyano-7-deazaguanine reductase OS=Pseudomonas salomonii; OX = 191391 GN=queF PE=3 SV=1
MHPAAEHSPLGKSSEYISTYTPSLLFPIPRAAKWAELGLTAETLPYKGVDFWNCFELSWLLPSGKPVVAIGEFSIPAESPNIIESKSFKLYLNSLNQTAFADTQSLEATLRTDLSAAAGLPVSVRIRSLAEIEAEGVMALPGACIDDLDISVSNYEHPRPELLRCDDSRIVEESVHSHLLKSNCPVTSQPDWGSVVVEYRGHALDHASLLEYIVSFRQHSDFHEQCVERIFLDLQRLLKPEKLTVYARYVRRGGLDINPYRSTENVQFQNVRLARQ

SEQ ID NO: 48982 - protein, 276 aa, Pseudomonas saponiphila
  REGION 1..276: note = tr|A0A1H4RBV3|A0A1H4RBV3_9PSED NADPH-dependent 7-cyano-7-deazaguanine reductase OS=Pseudomonas saponiphila OX=556534 GN=queF PE=3 SV=1
MHPAAEHSPLGKSSEYISTYTPSLLFPIPRAAKWAELGLSADTLPYKGVDFWNCFELSWLLPSGKPVVAIGEFSIPADSPNIIESKSFKLYLNSLNQTPFVDRAALEATLREDLSAAAGKPVAVRIRSLGEVEAEGVVALPGVCIDDLDISVDSYAHPRPELLRCDASRVVEESVHSHLLKSNCPVTSQPDWGSVVVEYRGAALDHASLLAYLVSFRQHSDFHEQCVERIFLDLQRLLKPEKLTVYARYVRRGGLDINPYRSTETADFANQRLVRQ

SEQ ID NO: 48983 - protein, 277 aa, unidentified
  source 1..277: note = Pseudomonas saudimassiliensis
  REGION 1..277: note = tr|A0A078M575|A0A078M575_9PSED NADPH-dependent 7-cyano-7-deazaguanine reductase OS=Pseudomonas saudimassiliensis OX=1461581 GN=queF PE=3 SV=1
MHPAEQSPLGKSSSYNGIYTPSLLYPIPRQPIWQELGIDPQRLPFHGVDVWNSYEVSWLTPSGKPEVAAVEFVFPVTANARIVESKSFKLYLNSFNQTVFRDRADVLRTLESDLSVTAQAPVMVRLLTMPRLQQVGVGRLPGECLDDLDVTIDVYEYSPELLQRVPGDGWARETLHSHLLKSNCPVTGQPDWGSVAISYAGPALDKAALLRYLVSFRQHGDFHEQCVERIFLDLQRVLGEGCELTVYARYLRRGGLDINPWRSTHPGTPDNTRLARQ

SEQ ID NO: 48984 - protein, 276 aa, unidentified
  source 1..276: note = Pseudomonas saudiphocaensis
  REGION 1..276: note = tr|A0A078LRQ9|A0A078LRQ9_9PSED NADPH-dependent 7-cyano-7-deazaguanine reductase OS=Pseudomonas saudiphocaensis OX=1499686 GN=queF PE=3 SV=1
MQHPAELSPLGKSSAYVATYSPEQLFPIPRAPKWAELGLTAETLPYQGVDIWNCYELSWLLPSGKPVVAIGEFRIPADSPNIIESKSFKLYLNSLNQSVFDSHEALQAVMVKDLSAAAGKEVEVRLRTLDEVAAEGVAPLPGRCIDDLEVTIKDYDAPQTDLLRCDAGRQVEDCVHSHLLRSNCPVTGQPDWGSLVVDYRGAALDSASLLAYLVSFRQHADFHEQCVERIFLDLQRLLKPERLTVYARYLRRGGLDINPYRSTEPLVADNRRLVRQ

SEQ ID NO: 48985 - protein, 276 aa, unidentified
  source 1..276: note = Pseudomonas saudiphocaensis
  REGION 1..276: note = tr|A0A427E6J6|A0A427E6J6_9PSED NADPH-dependent 7-cyano-7-deazaguanine reductase OS=Pseudomonas saudiphocaensis OX=1499686 GN=queF PE=3 SV=1
MQHPAELSPLGKSSAYVATYSPEQLFPIPRAPKWAELGLTAETLPYQGVDIWNCYELSWLLPSGKPVVAIGEFRIPADSPNIIESKSFKLYLNSLNQSVFDSHEALQVVMVKDLSAAAGKGVEVRLRTLDEVAAEGVAPLPGRCIDDLEATIKDYDAPQTDLLRCDAGRQVEDCVHSHLLRSNCPVTGQPDWGSLVVDYRGAALDSASLLAYLVSFRQHADFHEQCVERIFLDLQRLLKPERLTVYARYLRRGGLDINPYRSTEPLVADNRRLVRQ

SEQ ID NO: 48986 - protein, 276 aa, Pseudomonas savastanoi
  REGION 1..276: note = sp|Q48KI2|QUEF_PSE14 NADPH-dependent 7-cyano-7-deazaguanine reductase OS=Pseudomonas savastanoi pv. phaseolicola (strain 1448A / Race 6) OX=264730 GN=queF; PE = 3 SV=1
MHPAAEHSPLGKSSEYIATYTPSLLFPISRAAKWAELGLTAQTLPYQGVDFWNCYELSWLLPSGKPVVAIAEFSIPADSPNIIESKSFKLYLNSLNQTAFATVEQVQTTLEQDLSTAAGKPVGVRIRSLSDIEGEGVATLPGVCIDDLDITVSSYDRPQPELLCCDESQIIEESVHSHLLKSNCPVTSQPDWGSVVVEYRGAALDHSSLLAYIVSFRQHSDFHEQCVERIFLDLQRLLKPEKLTVYARYVRRGGLDINPYRSTETLDVNNRRLARQ

SEQ ID NO: 48987 - protein, 276 aa, Pseudomonas savastanoi; identical to SEQ ID NO: 48986
  REGION 1..276: note = tr|A0A3M3G425|A0A3M3G425_PSESG NADPH-dependent 7-cyano-7-deazaguanine reductase OS=Pseudomonas savastanoi pv. glycinea OX=318 GN=queF PE=3 SV=1

SEQ ID NO: 48988 - protein, 276 aa, Pseudomonas segetis
  REGION 1..276: note = tr|A0A239HMM7|A0A239HMM7_9PSED NADPH-dependent 7-cyano-7-deazaguanine reductase OS=Pseudomonas segetis; OX = 298908 GN=queF PE=3 SV=1
MHPAAEDSPLGKSSEYIATYTPSLLFPIPRAPKWAELGLSADTLPYQGVDFWNCFELSWLLPTGKPVVAIGEFAIPADSPNIIESKSFKLYLNSLNQSVFASTAELVEVISKDLSAAAGKPVLVKVRSLDDVAADGVSSLPGLCIDDADISISNYEQPQPELLRCDAQRVVSETLYSHLLKSNCPVTGQPDWGTVVIEYRGPALDQGSLLAYLVSFRQHADFHEQCVERIFLDIQRLLKPDSLTVYARYVRRGGLDINPYRSTGPIKPDNRRLVRQ

SEQ ID NO: 48989 - protein, 275 aa, Pseudomonas seleniipraecipitans
  REGION 1..275: note = tr|A0A1G7QJA6|A0A1G7QJA6_9PSED NADPH-dependent 7-cyano-7-deazaguanine reductase OS=Pseudomonas seleniipraecipitans OX=640205 GN=queF PE=3 SV=1
MHSVEHSPLGKSSEYIATYSPELLFPIPRAGKWAELGLSAETLPYRGVDYWNCFELSWLLPSGKPVVAIGEFAIAADSPNIIESKSFKLYLNSLNQSVFATEAELVEVLEKDLSATAGKPVGVRVRHLSAVAHEGLAALPGTCIDDLDVSISNYAMPQPDLLACDASRIVEESLHSHLLKSNCPVTGQPDWGSVVVQYRGAALEPASLLAYLVSFRQHADFHEQCVERIFLDVQRLLQPEYLTVYARYVRRGGLDINPYRTTLDQLPENRRLVRQ

SEQ ID NO: 48990 - protein, 276 aa, unidentified
  source 1..276: note = Pseudomonas sihuiensis
  REGION 1..276: note = tr|A0A1H2LK46|A0A1H2LK46_9PSED NADPH-dependent 7-cyano-7-deazaguanine reductase OS=Pseudomonas sihuiensis; OX = 1274359 GN=queF PE=3 SV=1
MQHPAEHSPLGKSSQYIAEYSPELLFPISRTTKWAELGLDGASLPYQGVDYWNCYELSWLLPSGKPVVAIGEFAIPADSPNIIESKSFKLYLNSLNQSAFAGWDELQATLVRDLSAVAGKPVAVRLRSLAEVSEEGVAILPGQCIDELDISVSQYDHPQPELLRCDAGRVLEESLHSHLLKSNCPVTGQPDWGSLVVEYRGAALDHASLLAYLVSFRQHADFHEQCVERIFLDLQRLLQPQSLTVYARYVRRGGLDINPYRSTEAITPENGRLARQ

SEQ ID NO: 48991 - protein, 276 aa, unidentified
  source 1..276: note = Pseudomonas silesiensis
  REGION 1..276: note = tr|A0A191YQT6|A0A191YQT6_9PSED NADPH-dependent 7-cyano-7-deazaguanine reductase OS=Pseudomonas silesiensis OX=1853130 GN=queF PE=3 SV=1
MHPAAEHSPLGKSSEYIATYTPSLLFPIPRAAKWAELGLTAETLPYKGVDFWNCFELSWLLPSGKPVVAIGEFSIPADSPNIIESKSFKLYLNSLNQTPFADNAGLEATLVKDLSAAAGKPVGVRIRRLQEVEAEGVVALPGVCIDELDISVSNYEHPRPELLRCDESRIVEESVHSHLLKSNCPVTSQPDWGSVAVEYRGAALDHASLLEYIVSFRQHSDFHEQCVERIFLDLQRLLKPEKLTVYARYVRRGGLDINPYRSTEEVQLPNHRLVRQ

SEQ ID NO: 48992 - protein, 276 aa, Pseudomonas simiae
  REGION 1..276: note = tr|A0A1I1BVD8|A0A1I1BVD8_9PSED NADPH-dependent 7-cyano-7-deazaguanine reductase OS=Pseudomonas simiae; OX = 321846 GN=queF PE=3 SV=1
MHPAAEHSPLGKSSEYISTYTPSLLFPIPRAAKWAELGLSAETLPYKGVDFWNCFELSWLLPSGKPVVAIGEFSIPADSPNIIESKSFKLYLNSLNQTAFADTTSLEAALRTDLSAAAGKPVSVRIRSLAEIEAEGVMALPGVCIDELDISVSNYEHPRPELLRCDDSRVVEESVHSHLLKSNCPVTSQPDWGSVVVEYRGSALDHASLLEYIVSFRQHSDFHEQCVERIFLDLQRLLKPEKLTVYARYVRRGGLDINPYRSTEDVAFQNVRLARQ

SEQ ID NO: 48993 - protein, 276 aa, Pseudomonas simiae
  REGION 1..276: note = tr|A0A1N7U8V6|A0A1N7U8V6_9PSED NADPH-dependent 7-cyano-7-deazaguanine reductase OS=Pseudomonas simiae; OX = 321846 GN=queF PE=3 SV=1
MHPAAEHSPLGKSSEYISTYTPSLLFPIPRAAKWAELGLSAETLPYKGVDFWNCFELSWLLPSGKPVVAIGEFSIPADSPNIIESKSFKLYLNSLNQTAFADTTSLEAALRTDLSAAAGKPVSVRIRSLAEIEAEGVMALPGVCIDELDISVSNYEHPRPELLRCDDSHVVEESVHSHLLKSNCPVTSQPDWGSVVVEYRGSALDHASLLEYIVSFRQHSDFHEQCVERIFLDLQRLLKPEKLTVYARYVRRGGLDINPYRSTEDVAFQNVRLARQ

SEQ ID NO: 48994 - protein, 276 aa, unidentified
  source 1..276: note = Pseudomonas soli
  REGION 1..276: note = tr|A0A1H9EN64|A0A1H9EN64_9PSED NADPH-dependent 7-cyano-7-deazaguanine reductase OS=Pseudomonas soli; OX = 1306993 GN=queF PE=3 SV=1
MHPAAEHSPLGKSSEYVATYTPSLLFPIPRLAKWAELGVSGDTLPWQGVDFWNCFELSWLLPSGKPVVAIGEFAIPCDSPNIIESKSFKLYLNSLNQTVFASVAELQACLVKDLSGAAGKPVAVKVSTLAEVEGQGVTALPGQCIDALDVSISNYEQPQPELLRCAADRLVEETVHSHLLKSNCPVTGQPDWGSVVVEYKGRALDHASLLTYLISFRQHADFHEQCVERIYLDLKNLLEPEHLTVYARYVRRGGLDINPYRSTGAINPQNLRLVRQ

SEQ ID NO: 48995 - protein, 276 aa, unidentified
  source 1..276: note = Pseudomonas soli
  REGION 1..276: note = tr|A0A2V4I3J2|A0A2V4I3J2_9PSED NADPH-dependent 7-cyano-7-deazaguanine reductase OS=Pseudomonas soli; OX = 1306993 GN=queF PE=3 SV=1
MHPAAEHSPLGKSSEYVATYTPSLLFPIPRLAKWAELGVSGDALPWQGVDFWNCFELSWLLPSGKPVVAIGEFAIPCDSPNIIESKSFKLYLNSLNQTVFASVAELQACLVKDLSAAAGKPVAVKVSTLAEVEGQGVTALPGQCIDALDVSISNYEQPQPELLRCAADRVVEETVHSHLLKSNCPVTGQPDWGSVVVEYKGRALDHASLLTYLISFRQHADFHEQCVERIYLDLKNLLKPEHLTVYARYVRRGGLDINPYRSTGAINPQNLRLVRQ

SEQ ID NO: 48996 - protein, 276 aa, unidentified
  source 1..276: note = Pseudomonas songnenensis
  REGION 1..276: note = tr|A0A482U4G8|A0A482U4G8_9PSED NADPH-dependent 7-cyano-7-deazaguanine reductase OS=Pseudomonas songnenensis OX=1176259 GN=queF PE=3 SV=1
MQHPAEHSPLGKSSDYVATYSPHLLFPIPRAPKWAELGLTAETLPYQGVDLWNCYELSWLLPSGKPVVAIGEFEIPADSPSIIESKSFKLYLNSLNQSVFESREALVEVMIADLSAAAGKAVKVRLRTLDEVAREGVATLPGRCIDDLDVAIEHYDHPQPELLVCDAGRVVEESLHSHLLKSNCPVTGQPDWGSVVVEYRGAALQAESLLAYLVSFRQHADFHEQCVERIFLDLQRLLQPEKLTVYARYVRRGGLDINPYRSTEAMAVDNRRLVRQ

SEQ ID NO: 48997 - protein, 276 aa, Pseudomonas sp.
  REGION 1..276: note = tr|A0A1B5EIT1|A0A1B5EIT1_9PSED NADPH-dependent 7-cyano-7-deazaguanine reductase OS=Pseudomonas sp. 22 E 5; OX = 1844093 GN=queF_1 PE=3 SV=1
MHPAAEHSPLGKSSEYISTYTPSLLFPIPRAAKWAELGLSAETLPYKGVDFWNCFELSWLLPSGKPVVAIGEFSIPADSPNIIESKSFKLYLNSLNQTAFTDTSSLEATLRTDLSAAAGKPVSVRIRSLVEVEAEGVMALPGVCIDDLDINVSSYEHPRPELLRCDASRVVEESVHSHLLKSNCPVTSQPDWGSVVVEYRGRALDHASLLEYVVSFRQHSDFHEQCVERIFLDLQRLLKPEKLTVYARYVRRGGLDINPYRSTEDVVFQNVRLARQ

SEQ ID NO: 48998 - protein, 276 aa, Pseudomonas sp.
  REGION 1..276: note = tr|A0A0M9AUE9|A0A0M9AUE9_9PSED NADPH-dependent 7-cyano-7-deazaguanine reductase OS=Pseudomonas sp. 655; OX = 1705718 GN=queF PE=3 SV=1
MHPAAEHSPLGKSSEYIATYTPSLLFPIPRTAKWAELGLTADTLPYKGVDFWNCFELSWLLPSGKPVVAIGEFSIPADSPNIIESKSFKLYLNSLNQTPFADTASLEATLVKDLSAAAGKPVGVRIRSLKDVEAEGVVALPGVCIDELDISVSNYEHPRPELLRCDDSRIVEEAVHSHLLKSNCPVTSQPDWGSVAVEYRGAALDHASLLEYIVSFRQHSDFHEQCVERIFLDLQRLLKPEKLTVYARYVRRGGLDINPYRSTETVQLPNHRLARQ

SEQ ID NO: 48999 - protein, 275 aa, Pseudomonas straminea
  REGION 1..275: note = tr|A0A1I1WFF7|A0A1I1WFF7_PSEOC NADPH-dependent 7-cyano-7-deazaguanine reductase OS=Pseudomonas straminea; OX = 47882 GN=queF PE=3 SV=1
MNSVEHSPLGKSSEYIATYSPELLFPIPRATKWAELGLSADTLPYSGVDYWNCFELSWLLPSGKPVVAIGEFAIPADSPNIIESKSFKLYLNSLNQSVFASVAELVAVLEKDLSATAGKPVSVRVRSLEEAAREGLSALPGLCIDELDVSISNYAAPQPELLRCDPARVVEQSLHSHLLKSNCPVTGQPDWGSVVVECRGAKLDPASLLAYLVSFRQHADFHEQCVERIFLDLHKLLQPEYLTVYARYVRRGGLDINPYRTTLKALSANRRLVRQ

SEQ ID NO: 49000 - protein, 276 aa, Pseudomonas stutzeri
  REGION 1..276: note = tr|F8H699|F8H699_PSEUT NADPH-dependent 7-cyano-7-deazaguanine reductase OS=Pseudomonas stutzeri (strain ATCC 17588 / DSM 5190 / CCUG 11256 / JCM 5965 / LMG 11199 / N CIMB 11358 / Stanier 221) OX=96563 GN=queF; PE = 3
MQHPAEHSPLGKSSDYVATYSPGLLFPIPRAPKWAELGLTAETLPYQGVDLWNCYELSWLLPSGKPVVAIGEFEIPADSPNIIESKSFKLYLNSLNQSVFESRDALLEVMTGDLSAAAGKPVRVRLRTLDEVTADGVATLPGRCIDALDVAIQDYDHPRPELLTCDAGRVVEESLHSHLLKSNCPVTGQPDWGSVVVEYRGAALLPESLLAYLVSFRQHADFHEQCVERIFLDLQRLLQPEKLTVYARYVRRGGLDINPYRSTEALVVDNRRLVRQ

SEQ ID NO: 49001 - protein, 276 aa, Pseudomonas stutzeri; identical to SEQ ID NO: 48817
  REGION 1..276: note = tr|A0A0M2RFH2|A0A0M2RFH2_PSEST NADPH-dependent 7-cyano-7-deazaguanine reductase OS=Pseudomonas stutzeri; OX = 316 GN=queF PE=3 SV=1

SEQ ID NO: 49002 - protein, 276 aa, Pseudomonas synxantha
  REGION 1..276: note = tr|I4KYA5|I4KYA5_9PSED NADPH-dependent 7-cyano-7-deazaguanine reductase OS=Pseudomonas synxantha BG33R OX=96901 GN=queF PE=3 SV=1
MHPAAEHSPLGKSSEYISTYTPSLLFPIPRAAKWAELGLSADTLPYKGVDFWNCFELSWLLPSGKPVVAIGEFSIPADSPNIIESKSFKLYLNSLNQTAFADTPSLEATLRTDLSFAAGKPVTVRIRSLADIEAEGVMALPGACIDGLDINVSSYEHPRPELLRCDDSRVVEESVHSHLLKSNCPVTSQPDWGSVVVEYRGAALDHASLLEYIVSFRQHSDFHEQCVERIFLDLQRLLKPEKLTVYARYVRRGGLDINPYRSTENTQFLNVRLARQ

SEQ ID NO: 49003 - protein, 276 aa, Pseudomonas synxantha
  REGION 1..276: note = tr|A0A3G7U5S9|A0A3G7U5S9_9PSED NADPH-dependent 7-cyano-7-deazaguanine reductase OS=Pseudomonas synxantha; OX = 47883 GN=queF PE=3 SV=1
MHPAAEHSPLGKSSEYISTYTPSLLFPIPRAAKWAELGLSADTLPYKGVDFWNCFELSWLLPSGKPVVAIGEFSIPADSPNIIESKSFKLYLNSLNQTAFADTQSLEATLRTDLSAAAGKPVTVRIRSLADIEAEGVMALPGACIDGLDINVSSYEHPRPELLRCDDSRVVEESVHSHLLKSNCPVTSQPDWGSVVVEYRGAALDHASLLEYIVSFRQHSDFHEQCVERIFLDLQRLLKPEKLTVYARYVRRGGLDINPYRSTENTQFLNVRLARQ

SEQ ID NO: 49004 - protein, 276 aa, Pseudomonas syringae
  REGION 1..276: note = sp|Q4ZV71|QUEF_PSEU2 NADPH-dependent 7-cyano-7-deazaguanine reductase OS=Pseudomonas syringae pv. syringae (strain B728a) OX=205918 GN=queF PE=3 SV=2
MHPAAEHSPLGKSSEYIATYTPSLLFPIPRAAKWAELGLTAQTLPYQGVDFWNCYELSWLLPSGKPVVAIGEFSIPAESPNIIESKSFKLYLNSLNQTAFATVEQLQTTLEQDLSAAAGKPVGVRIRSLAEIEEEGVAALPGVCIDDLDISVSSYDRPQPELLCCDDSRVVAESVHSHLLKSNCPVTSQPDWGSVVVEYRGAALDHASLLAYIVSFRQHSDFHEQCVERIFLDLQRLLKPEKLTVYARYVRRGGLDINPYRSTETLDVDNRRLARQ

SEQ ID NO: 49005 - protein, 276 aa, Pseudomonas syringae
  REGION 1..276: note = tr|A0A0N0WSQ3|A0A0N0WSQ3_PSEYM NADPH-dependent 7-cyano-7-deazaguanine reductase OS=Pseudomonas syringae pv. maculicola OX=59511 GN=queF PE=3 SV=1
MHPAAEHSPLGKSSEYIATYTPSLLFPIPRAAKWAELGLTAQTLPYKGVDFWNCYELSWLLPSGKPVVAIAEFSIPADSPNIIESKSFKLYLNSLNQTAFDGSARVQATLEKDLSAAAGKPVGVRIRNLAEIEEEGVAVLPGMCIDELDITVSSYDQPQPELLRCDDSQVIEEAVHSHLLKSNCPVTSQPDWGSVVVEYRGAALDHASLLAYIVSFRQHSDFHEQCVERIFLDLQRLLKPEKLTVYARYVRRGGLDINPCRSTEVLDVDNRRLARQ

SEQ ID NO: 49006 - protein, 276 aa, Pseudomonas taeanensis
  REGION 1..276: note = tr|A0A0A1YGG5|A0A0A1YGG5_9PSED NADPH-dependent 7-cyano-7-deazaguanine reductase OS=Pseudomonas taeanensis MS-3 OX=1395571 GN=queF PE=3 SV=1
MHPAAEHSPLGKSSEYIATNTPSLLFPIPRAPKWAELGLSAETLPYQGVDFWNCFELSWLLPSGKPVVAIGEFAIPADSPNIIESKSFKLYLNSLNQTVFAESAELVEVLQKDLSAAAGKAVVVRVRSLDEVAAEGVAALPGTCIDDLDVSISNYDEPQPGLLRCESGRVIEESLHSHLLKSNCPVTGQPDWGSVVVQYRGAALDHAGLLAYLVSFRQHADFHEQCVERIFLDLQRLLKPEHLTVYARYVRRGGLDINPYRSTAVIQPDNRRLVRQ

SEQ ID NO: 49007 - protein, 276 aa, Pseudomonas taetrolens
  REGION 1..276: note = tr|A0A0J6JJ42|A0A0J6JJ42_PSETA NADPH-dependent 7-cyano-7-deazaguanine reductase OS=Pseudomonas taetrolens; OX = 47884 GN=queF PE=3 SV=1
MHPAAEHSPLGKSSEYISTYTPSLLFPIPRAAKWAELGLSAETLPYVGVDFWNCFELSWLLPSGKPVVAIGEFCFAADSPNIVESKSFKLYLNSLNQTVFTDVQSLEATLQADLSAASGKPVSVRVRSLNDVQADGVGTLPGVCIDELDISVSDYAQPRPELLKCDESRVIEESLYSHLLKSNCPVTSQPDWGTVVVEYRGAALDHASLLAYLVSFRQHSDFHEQCVERIFLDLQRLLKPEKLTVYARYVRRGGLDINPYRSTEAVEFQNLRLVRQ

SEQ ID NO: 49008 - protein, 276 aa, Pseudomonas taiwanensis; identical to SEQ ID NO: 48924
  REGION 1..276: note = tr|V7DAX9|V7DAX9_9PSED NADPH-dependent 7-cyano-7-deazaguanine reductase OS=Pseudomonas taiwanensis SJ9 OX=1388762 GN=queF PE=3 SV=1

SEQ ID NO: 49009 - protein, 276 aa, Pseudomonas thivervalensis
  REGION 1..276: note = tr|A0A176NG63|A0A176NG63_9PSED NADPH-dependent 7-cyano-7-deazaguanine reductase OS=Pseudomonas thivervalensis OX=86265 GN=queF PE=3 SV=1
MHPAAEHSPLGKSSEYIATYTPSLLFPIPRTAKWAELGLTAETLPYKGVDFWNCFELSWLLPSGKPVVAIGEFAIPADSPNIIESKSFKLYLNSLNQTPFADTASLEATLRQDLSAAAGKSVGVRIRSLKDVEREGVVALPGTCIDDLAISVDSYAHPRPELLRCDASRIVEQSLHSHLLKSNCPVTSQPDWGSVAVEYRGAALDPASLLAYIVSFRQHSDFHEQCVERIFLDLQRLLKPEKLTVYARYVRRGGLDINPYRSTEDVQLPNHRLVRQ

SEQ ID NO: 49010 - protein, 276 aa, Pseudomonas thivervalensis
  REGION 1..276: note = tr|A0A2Z4Z9Y2|A0A2Z4Z9Y2_9PSED NADPH-dependent 7-cyano-7-deazaguanine reductase OS=Pseudomonas thivervalensis OX=86265 GN=queF PE=3 SV=1
MHPAAEHSPLGKSSEYIATYTPSLLFPIPRTAKWAELGLTAETLPYKGVDFWNCFELSWLLPSGKPVVAIGEFAIPADSPNIIESKSFKLYLNSLNQTPFADTASLEATLRQDLSAAAGKSVGVRIRSLKDVEREGVVALPGTCIDDLDISVDSYAHPRPELLRCDASRIVEQSLHSHLLKSNCPVTSQPDWGSVAVEYRGAALDPASLLAYIVSFRQHSDFHEQCVERIFLDLQRLLKPEKLTVYARYVRRGGLDINPYRSTEDVQLPNHRLVRQ

SEQ ID NO: 49011 - protein, 276 aa, Pseudomonas tolaasii
  REGION 1..276: note = tr|A0A2N0E7Y3|A0A2N0E7Y3_PSETO NADPH-dependent 7-cyano-7-deazaguanine reductase OS=Pseudomonas tolaasii NCPPB 2192 OX=564423 GN=queF PE=3 SV=1
MHPAAEHSPLGKSSEYISTYTPSLLFPIPRAAKWAELGLSAETLPYKGVDFWNCFELSWLLPSGKPVVAIGEFSIPADSPNIIESKSFKLYLNSLNQTAFTDTASLEATLRTDLSAAAGKPVTVRIRSLAEIEAEGVMALPGVCIDDLNINVSSYEHPRPELLRCDDARVVEESVHSHLLKSNCPVTSQPDWGSVVVEYRGHALDHASLLEYIVSFRQHSDFHEQCVERIFLDLQRLLKPEKLTVYARYVRRGGLDINPYRSTEDVAFQNVRLARQ

SEQ ID NO: 49012 - protein, 276 aa, Pseudomonas toyotomiensis
  REGION 1..276: note = tr|A0A1I5UCR7|A0A1I5UCR7_9PSED NADPH-dependent 7-cyano-7-deazaguanine reductase OS=Pseudomonas toyotomiensis OX=554344 GN=queF PE=3 SV=1
MQHPAEHSPLGKSSQYIAEYSPELLFPISRTTKWAELGLDGASLPYQGVDYWNCYELSWLLPSGKPVVAIGEFAIPADSPNIIESKSFKLYLNSLNQSAFASWDELQATLVRDLSVVAGKPVAVRLRSLVEVSEEGVATLPGQCIDELDISVSQYDHPQPELLRCDAGRVVEESLHSHLLKSNCPVTGQPDWGSLVVEYRGAALDHASLLAYLVSFRQHADFHEQCVERIFLDLQRLLQPQSLTVYARYVRRGGLDINPYRSTEALKSENGRLARQ

SEQ ID NO: 49013 - protein, 276 aa, Pseudomonas tremae; identical to SEQ ID NO: 48828
  REGION 1..276: note = tr|A0A0Q0DD29|A0A0Q0DD29_9PSED NADPH-dependent 7-cyano-7-deazaguanine reductase OS=Pseudomonas tremae; OX = 200454 GN=queF PE=3 SV=1

SEQ ID NO: 49014 - protein, 276 aa, Pseudomonas trivialis
  REGION 1..276: note = tr|A0A0R2ZBF2|A0A0R2ZBF2_9PSED NADPH-dependent 7-cyano-7-deazaguanine reductase OS=Pseudomonas trivialis; OX = 200450 GN=queF PE=3 SV=1
MHPAAEHSPLGKSSEYISTYTPSLLFPIPRAAKWAELGLSAETLPYKGVDFWNCFELSWLLPSGKPVVAIGEFSIPADSPNIIESKSFKLYLNSLNQTAFADSQDLQATLHNDLSFAAGKPVSVRIRSLAEVEAEGVMALPGMCIDGLDISVSSYEHPRPELLRCDDSRVVQESVHSHLLKSNCPVTRQPDWGSVVVDYCGAALDHASLLEYIVSFRQHSDFHEQCVERIFLDLQRLLKPERLTVYARYVRRGGLDINPYRSTEEVAFQNVRLARQ

SEQ ID NO: 49015 - protein, 276 aa, Pseudomonas trivialis
  REGION 1..276: note = tr|A0A0H5A431|A0A0H5A431_9PSED NADPH-dependent 7-cyano-7-deazaguanine reductase OS=Pseudomonas trivialis; OX = 200450 GN=queF PE=3 SV=1
MHPAAEHSPLGKSSEYISTYTPSLLFPIPRAAKWAELGLSAETLPYKGVDFWNCFELSWLLPSGKPVVAIGEFSIPADSPNIIESKSFKLYLNSLNQTAFADPASLEATLRTDLSAAAGKPVSVRIRSLAEIEAEGVMALPGVCIDELDINVSSYEHPRPELLRCDDSRTVEESVHSHLLKSNCPVTSQPDWGSVVVEYRGSALDHASLLEYIVSFRQHSDFHEQCVERIFLDLQRLLKPEKLTVYARYVRRGGLDINPYRSTEEVAFQNVRLARQ

SEQ ID NO: 49016 - protein, 276 aa, Pseudomonas umsongensis
  REGION 1..276: note = tr|A0A1H1TW44|A0A1H1TW44_9PSED NADPH-dependent 7-cyano-7-deazaguanine reductase OS=Pseudomonas umsongensis OX=198618 GN=queF PE=3 SV=1
MHPAAEHSPLGKSSEYIATYTPSLLFPIPRTAKWAELGLTAQTLPYKGVDFWNCFELSWLLPSGKPVVAIGEFSIPADSPNIIESKSFKLYLNSLNQTPFADTASLEATLAKDLSAAAGKPVGVRIRSLKEVEAEGVVALPGVCIDDLDISVSNYEHPRPELLRCDESRIVEESVHSHLLKSNCPVTSQPDWGSVAVEYRGAALDHASLLEYIVSFRQHSDFHEQCVERIFLDLQRLLKPEKLTVYARYVRRGGLDINPYRSTEEVQLPNHRLVRQ

SEQ ID NO: 49017 - protein, 276 aa, Pseudomonas vancouverensis
  REGION 1..276: note = tr|A0A1H2MRD1|A0A1H2MRD1_9PSED NADPH-dependent 7-cyano-7-deazaguanine reductase OS=Pseudomonas vancouverensis OX=95300 GN=queF PE=3 SV=1
MHPAAEHSPLGKSSEYIATYTPSLLFPIPRTAKWAELGLTAETLPYKGVDFWNCFELSWLLPSGKPVVAIGEFSIPADSPNIIESKSFKLYLNSLNQTPFADTASLEATLVKDLSAAAGKPVGVRVRSLKDVEAEGVVALPGVCIDDLDISVSNYEHPRPELLRCDPSRIVEESVHSHLLKSNCPVTSQPDWGSVTVEYRGAALDHASLLEYIVSFRQHSDFHEQCVERIFLDLQRLLKPEKLTVYARYVRRGGLDINPYRSTEEAQLPNHRLVRQ

SEQ ID NO: 49018 - protein, 276 aa, Pseudomonas veronii
  REGION 1..276: note = tr|A0A1D3JTY8|A0A1D3JTY8_9PSED NADPH-dependent 7-cyano-7-deazaguanine reductase OS=Pseudomonas veronii 1YdBTEX2 OX=1295141 GN=queF PE=3 SV=1
MHPAAEHSPLGKSSEYISTYTPSLLFPIPRAAKWAELGLSAETLPYTGVDFWNCFELSWLLPSGKPVVAIGEFSIAADSPNIIESKSFKLYLNSLNQTVFADTQSLEATLRTDLSAAAGKPVGVRVRSLAEVEAEGVVALPGVCIDDLDISVSNYEHPRPELLRCDDSRIVEESVYSHLLKSNCPVTSQPDWGSVAVQYRGAQLDHASLLEYLVSFRQHSDFHEQCVERIFLDLQRLLKPEKLTVYARYVRRGGLDINPYRSTEDVQFQNLRLARQ

SEQ ID NO: 49019 - protein, 276 aa, Pseudomonas veronii; identical to SEQ ID NO: 48948
  REGION 1..276: note = tr|A0A0R3B063|A0A0R3B063_9PSED NADPH-dependent 7-cyano-7-deazaguanine reductase OS=Pseudomonas veronii; OX = 76761 GN=queF PE=3 SV=1

SEQ ID NO: 49020 - protein, 276 aa, unidentified
  source 1..276: note = Pseudomonas versuta
  REGION 1..276: note = tr|A0A0M4Q7X7|A0A0M4Q7X7_9PSED NADPH-dependent 7-cyano-7-deazaguanine reductase OS=Pseudomonas versuta; OX = 1788301 GN=queF PE=3 SV=1
MHPAAEHSPLGKSSEYISTYTPSLLFPIPRAAKWAELGLSAETLPYVGVDFWNCFELSWLLPSGKPVVAIGEFCFAADSPNIVESKSFKLYLNSLNQTVFADTQSLEQTLQADLSAASGKPVSVRVRSLDEVQADGTGVLPGVCIDDLDITVSDYQQPRPELLKCDESRVIEESVYSHLLKSNCPVTSQPDWGTVVVEYRGAALDHASLLAYLVSFRQHSDFHEQCVERIFLDLQRLLKPEKLTVYARYVRRGGLDINPYRSTETVEFQNVRLVRQ

SEQ ID NO: 49021 - protein, 276 aa, Pseudomonas viridiflava
  REGION 1..276: note = tr|A0A3M4NVF5|A0A3M4NVF5_PSEVI NADPH-dependent 7-cyano-7-deazaguanine reductase OS=Pseudomonas viridiflava OX=33069 GN=queF PE=3 SV=1
MHPAAEHSPLGKSSEYIATYTPSLLFPIPRAAKWAELGLTAQTLPYQGVDFWNCYELSWLLPSGKPVVAIAEFSIPADSPNIIESKSFKLYLNSLNQTAFATVEQVQATLEQDLSAAAGKPVGVRIRSLSDIEGEGVATLPGVCIDDLDITVSSYDRPQPELLRCDESRIFEESVHSHLLKSNCPVTSQPDWGSVVVEYRGAALDHSSLLAYIVSFRQHSDFHEQCVERIFLDLQRLLKPEKLTVYARYVRRGGLDINPYRSTETLNVDNRRLARQ

SEQ ID NO: 49022 - protein, 276 aa, Pseudomonas viridiflava
  REGION 1..276: note = tr|A0A2G0YKS2|A0A2G0YKS2_PSEVI NADPH-dependent 7-cyano-7-deazaguanine reductase OS=Pseudomonas viridiflava OX=33069 GN=queF PE=3 SV=1
MHPAAEHSPLGKSSEYIAIYTPSLLFPIPRTAKWAELGLTAETLPYQGVDFWNCYELSWLLPSGKPVVAIAEFSIPADSPNIIESKSFKLYLNSLNQSAFETREELQATLEKDLSAAAGKPVGVRIRSLEEIEREGVAALPGVCIDDLDISVSSYDRPQPELLRCDESRVVEESVYSHLLKSNCPVTSQPDWGSVVVEYRGPALDHASLLAYIVSFRQHSDFHEQCVERIFLDLQRLLKPEKLTVYARYVRRGGLDINPYRSTEALDVDNGRLARQ

SEQ ID NO: 49023 - protein, 276 aa, Pseudomonas vranovensis
  REGION 1..276: note = tr|A0A423DTH1|A0A423DTH1_9PSED NADPH-dependent 7-cyano-7-deazaguanine reductase OS=Pseudomonas vranovensis OX=321661 GN=queF PE=3 SV=1
MHPAAEHSPLGKSSEYVSTYTPSLLFPIPRAAKWAELGVSAQTLPWLGVDFWNCFELSWLLPSGKPVVAIGEFAIPADSPNIIESKSFKLYLNSLNQTVFESPAALQACLVKDLSAAAGKPVGVQVRSLAEVEGQGVVGLPGVCIDELDVSISNYEQPQPELLRCDSGNIVEETLHSHLLKSNCPVTGQPDWGSVTVHYRGAALDHASLLTYLISFRQHADFHEQCVERIYLDLKRLLNPEHLTVYARYVRRGGLDINPYRSTSQVTLENLRLVRQ

SEQ ID NO: 49024 - protein, 276 aa, unidentified
  source 1..276: note = Pseudomonas wadenswilerensis
  REGION 1..276: note = tr|A0A380SWT6|A0A380SWT6_9PSED NADPH-dependent 7-cyano-7-deazaguanine reductase OS=Pseudomonas wadenswilerensis OX=1785161 GN=queF PE=3 SV=1
MHPAAEHSPLGKSSEYVATYTPSLLFPIPRAAKWAELGVSAETLPWLGVDFWNCFELSWLLPSGKPVVAIGEFAIPADSPNIIESKSFKLYLNSLNQTVFESPAALQACLVKDLSAAAGKPVGVQIRSLAEVEGQGVVGLPGVCIDELDVSISNYEQPQPELLRCDSSNIVEETLHSHLLKSNCPVTGQPDWGSVTVHYRGAALDHASLLTYLISFRQHADFHEQCVERIYLDLKRLLNPEHLTVYARYVRRGGLDINPYRSTGQVTLANLRLVRQ

SEQ ID NO: 49025 - protein, 276 aa, unidentified
  source 1..276: note = Pseudomonas weihenstephanensis
  REGION 1..276: note = tr|A0A0J6LEM0|A0A0J6LEM0_9PSED NADPH-dependent 7-cyano-7-deazaguanine reductase OS=Pseudomonas weihenstephanensis OX=1608994 GN=queF PE=3 SV=1
MHPAAEHSPLGKSSEYISTYTPSLLFPIPRAAKWAELGLSAETLPYVGVDYWTCFELSWLLPSGKPVVAIGEFCFAADSPNIVESKSFKLYLNSLNQSVFADTPSLVATLQADLSVASGKPVSVRVRSLDDVQADGVGVLPGVCIDDLDITVSDYAQPRPELLACDASRIVEESVYSHLLKSNCPVTSQPDWGTVVVEYRGAALDPASLLAYLVSFRQHSDFHEQCVERIFLDLQRLLKPEKLTVYARYVRRGGLDINPYRSTETVAFKNVRLVRQ

SEQ ID NO: 49026 - protein, 276 aa, Pseudomonas xanthomarina
  REGION 1..276: note = tr|A0A1C2DZC7|A0A1C2DZC7_9PSED NADPH-dependent 7-cyano-7-deazaguanine reductase OS=Pseudomonas xanthomarina OX=271420 GN=queF PE=3 SV=1
MQHPAELSPLGKSSAYVATYSPQVLFPIPRAPKWAELGVTAETLPYQGVDIWNCYELSWLLPSGKPVVAIGEFVIPADSPNIIESKSFKLYLNSLNQSVFESREHLLDVMRGDLSAAAGKPVGIRLRSLEEVEREGIAPLPGRCIDELDLSIDHYDSPRADLLRCDPERRIEETLHSHLLKSNCPVTGQPDWGSVLVEYHGAALEPASLLAYLVSFRQHADFHEQCVERIFLDLQRLLQPERLTVYARYVRRGGLDINPYRSTEALTAANGRLVRQ

SEQ ID NO: 49027 - protein, 276 aa, Pseudomonas xanthomarina; identical to SEQ ID NO: 48817
  REGION 1..276: note = tr|A0A098FQH0|A0A098FQH0_9PSED NADPH-dependent 7-cyano-7-deazaguanine reductase OS=Pseudomonas xanthomarina OX=271420 GN=queF PE=3 SV=1

SEQ ID NO: 49028 - protein, 279 aa, Pseudomonas xinjiangensis
  REGION 1..279: note = tr|A0A1H1SG20|A0A1H1SG20_9PSED NADPH-dependent 7-cyano-7-deazaguanine reductase OS=Pseudomonas xinjiangensis OX=487184 GN=queF PE=3 SV=1
MSQQHPAEQSPLGKSSAYVSVYTPSLLFPIAREPKWQELGLDAENLPFHGADIWNCYELSWLNPSGKPEIAAAEFVFPLRGARIVESKSFKLYLNSFNQTVFSDRREVLRTLESDLSVAAQGPVMVRLLNMGQLYQGGMSQMPGFCLDDLDVRVDCYEYDAGLLQLDSNSEATRESLYSHLLKSNCPVTGQPDWASVSIRYAGPRIDRASLLRYLVSFRQHSDFHEQCVERIFCDMRALLGDSAELTVYARYVRRGGLDINPYRSTEPGMPENFRLARQ

SEQ ID NO: 49029 - protein, 276 aa, unidentified
  source 1..276: note = Pseudomonas yamanorum
  REGION 1..276: note = tr|A0A143GLB2|A0A143GLB2_9PSED NADPH-dependent 7-cyano-7-deazaguanine reductase OS=Pseudomonas yamanorum; OX = 515393 GN=queF PE=3 SV=1
MHPAAEHSPLGKSSEYISTYTPSLLFPIPRAAKWAELGLSAETLPYKGVDFWNCFELSWLLPSGKPVVAIGEFSIPADSPNIIESKSFKLYLNSLNQTVFVDVQSLEATLRTDLSAAAGKPVGVRIRSLGEVEAEGVVALPGVCIDGLDITVSNYEHPRPELLRCDDSRVVEESVHSHLLKSNCPVTSQPDWGSVAVEYRGAALDHASLLEYLVSFRQHSDFHEQCVERIFLDLQRLLKPEKLTVYARYVRRGGLDINPYRSTEELQFQNLRLARQ

SEQ ID NO: 49030 - protein, 276 aa, unidentified
  source 1..276: note = Pseudomonas yamanorum
  REGION 1..276: note = tr|A0A1H2F642|A0A1H2F642_9PSED NADPH-dependent 7-cyano-7-deazaguanine reductase OS=Pseudomonas yamanorum; OX = 515393 GN=queF PE=3 SV=1
MHPAAEHSPLGKSSEYISTYTPSLLFPIPRAAKWAELGLSAETLPYKGVDFWNCFELSWLLPSGKPVVAIGEFSIPADSPNIIESKSFKLYLNSLNQTAFVDVQSLEATLRTDLSAAAGKPVGVRIRSLGEVEAEGVVALPGVCIDDLDITVSNYEHPRPELLRCDDSRVVEESVHSHLLKSNCPVTSQPDWGSVAVEYRGAALDHASLLEYLVSFRQHSDFHEQCVERIFLDLQRLLKPEKLTVYARYVRRGGLDINPYRSTEEQQFQNLRLARQ

SEQ ID NO: 49031 - protein, 278 aa, unidentified
  source 1..278: note = Pseudomonas yangmingensis
  REGION 1..278: note = tr|A0A1I4S8V2|A0A1I4S8V2_9PSED NADPH-dependent 7-cyano-7-deazaguanine reductase OS=Pseudomonas yangmingensis OX=1720063 GN=queF PE=3 SV=1
MNSHPAEQSPLGKSTAYVSHYSPQLLFPIARDAKWQELGLRGDSLPFVGEDIWNCCELSWLESGGKPRVMAAEFRFAASSPAIIESKSFKLYLNSFNQSRFDSVEAVQQVLQQDLSAACGAPVQVLLQDLHGLREAGLAELQGKSLDDLDVQVDQYHYNPALLALVEPAVRVEQTWVTDLFKSNCPVTGQPDWASLQISYAGPQLDEKALLRYLLSFREHADFHEQCVERIFCDLRGILGDDCRLLVSARYLRRGGLDINPWRSCGMPAPGNLRLARQ

SEQ ID NO: 49032 - protein, 277 aa, unidentified; identical to SEQ ID NO: 48910
  source 1..277: note = Pseudomonas zeshuii
  REGION 1..277: note = tr|A0A1M6A0M0|A0A1M6A0M0_9PSED NADPH-dependent 7-cyano-7-deazaguanine reductase OS=Pseudomonas zeshuii; OX = 1076620 GN=queF PE=3 SV=1

SEQ ID NO: 49033 - protein, 276 aa, unidentified
  source 1..276: note = Pseudomonas zhaodongensis
  REGION 1..276: note = tr|A0A365PU08|A0A365PU08_9PSED NADPH-dependent 7-cyano-7-deazaguanine reductase OS=Pseudomonas zhaodongensis OX=1176257 GN=queF PE=3 SV=1
MQHPAELSPLGKSSAYVATYSPEQLFPIPRAPKWAELGLTAESLPYGGVDIWNCYELSWLLPSGKPVVAIGEFSIPADSPNIIESKSFKLYLNSLNQSVFESRQALVDVMTRDLSAAAGKPVGVRLRTLDEVAEEGIAALDGLCIDDLDVTIEDYDSPRPELLRSDSLRQVEERVYSHLLKSNCPVTGQPDWGTVVIEYRGAALDHGSLLAYLVSFRQHADFHEQCVERIFLDLQRVLTPDRLSVHARYVRRGGLDINPYRSTHDVFPDNGRQVRQ

SEQ ID NO: 49034 - protein, 276 aa, unidentified
  source 1..276: note = Pseudomonas zhaodongensis
  REGION 1..276: note = tr|A0A3M2HS19|A0A3M2HS19_9PSED NADPH-dependent 7-cyano-7-deazaguanine reductase OS=Pseudomonas zhaodongensis OX=1176257 GN=queF PE=3 SV=1
MQHPAELSPLGKTSAYVATYSPEQLFPIPRAPKWAELGLTADTLPYGGVDIWNCYELSWLLPSGKPVVAIGEFSIPADSPNIIESKSFKLYLNSLNQSVFENRDALVKVMISDLSAAAGKPVGVRLRTLDEVALDGIAPLRGHCVDELDVAIDHYDAPRADLLRCDANRQVEECLYSHLLKSNCPVTGQPDWGTVVIEYRGAALNHPSLVAYLVSFRQHADFHEQCVERIFLDLQRLLAPERLSVHARYVRRGGLDINPYRSTDYVNADNGRLVRQ

SEQ ID NO: 49035 - protein, 152 aa, unidentified
  source 1..152: note = Pseudooceanicola marinus
  REGION 1..152: note = tr|A0A1X6ZYC6|A0A1X6ZYC6_9RHOB NADPH-dependent 7-cyano-7-deazaguanine reductase OS=Pseudooceanicola marinus OX=396013 GN=queF PE=3 SV=1
MTDTTGLTQLGQTTGLPASPEAAVLERVPQPNPGERYNVRFTAPEFTSLCPMTGQPDFAHIMIDYVPRDWLVESKSLKLFLGSFRNHGAFHEECTVMIGRRLADLLDPEWLRIGAYWYPRGGIPIDVFWATGPAPEDLWIPDQGVPPYRGRG

SEQ ID NO: 49036 - protein, 154 aa, unidentified
  source 1..154: note = Pseudorhizobium pelagicum
  REGION 1..154: note = tr|A0A081MRN2|A0A081MRN2_9RHIZ NADPH-dependent 7-cyano-7-deazaguanine reductase OS=Pseudorhizobium pelagicum OX=1509405 GN=queF PE=3 SV=1
MSMTDTSSLSQLGQAVETPQNPEAAVLEKVPNGNQGTDYVVRFTAPEFTSLCPMTGQPDFAHIVIDYIPDGFLVESKSLKLFLHSFRNHGAFHEDCSVYIAKRIVDLLAPKWLRIGAYWYPRGGIPIDVFWQTGAVPEGVWLPDQGVPTYRGRG

SEQ ID NO: 49037 - protein, 154 aa, Pseudorhodobacter sp.
  REGION 1..154: note = tr|A0A257GHP8|A0A257GHP8_9RHOB NADPH-dependent 7-cyano-7-deazaguanine reductase OS=Pseudorhodobacter sp. PARRP1 OX=2015560 GN=queF PE=3 SV=1
MTQTDVSGLTQLGAASALPASPDQAVLEKVPAGHAGTLYCVRFTAPEFTSLCPMTGQPDFAHIVIDYVPRDWLVESKSLKLYLGSFRNHGAFHEDCTLDIGKKLVALLGPVWLRIGAYWFPRGGIPIDVFWQTAAPPDGVWLPDQGVAPYRGRG

SEQ ID NO: 49038 - protein, 281 aa, Pseudorhodoferax soli
  REGION 1..281: note = tr|A0A368YBG1|A0A368YBG1_9BURK NADPH-dependent 7-cyano-7-deazaguanine reductase OS=Pseudorhodoferax soli; OX = 545864 GN=queF PE=3 SV=1
MNSPDQSPLGKASPYADQYDASLLFPIPRAGKRAEIGADGASPFFGADLWTAYELSWLNTRGKPQVALVHFTIPCETPNIVESKSFKLYLGSFTNTVLESVDEVRARLRTDISEAVWRGSDTPATVGVRVLMPEQFDQQPIHELDGLSLDRLDLECTHYQPAPELLTASFDESPVTEVLSSNLLKSNCLVTGQPDWGSVQISYSGPQIDQAGLLRYIVSFRNHNEFHEQCVERIFMDIWRRCRPVKLTVYARYTRRGGLDINPWRTSHPGAVPANVRTARQ

SEQ ID NO: 49039 - protein, 281 aa, Pseudorhodoferax sp.
  REGION 1..281: note = tr|A0A0Q4YAZ0|A0A0Q4YAZ0_9BURK NADPH-dependent 7-cyano-7-deazaguanine reductase OS=Pseudorhodoferax sp. Leaf267 OX=1736316 GN=queF PE=3 SV=1
MTSPDQSPLGKASAYADRYDASLLFPIPRADKRAELGIQGASPFFGADLWTAYELSWLNTRGKPQVALAHFTVPCETPNIIESKSLKLYLGSFSNTPFESVDAVRAHLRTDLSEAVWRGSDQPATIGVRVLGPELFDREPVHELDGLSLDRLDLECTHYQPAPELLTAAFDEAPVTEVLTSNLLKSNCLVTGQPDWGAVQVSYSGPQIDQAGLLRYIVSFRNHNEFHEQCVERMFMDIWRRCRPVKLTVYARYTRRGGLDINPWRTSHPGAVPANVRTARQ

SEQ ID NO: 49040 - protein, 284 aa, Pseudorhodoferax sp.
  REGION 1..284: note = tr|A0A0S9MUQ7|A0A0S9MUQ7_9BURK NADPH-dependent 7-cyano-7-deazaguanine reductase OS=Pseudorhodoferax sp. Leaf274 OX=1736318 GN=queF PE=3 SV=1
MNSPDQSPLGKASPYADQYDASLLFPIARAEKRAEIGVDGTGARPPFFGADLWTAYELSWLNPRGKPQVALVQFTIPCETPHIVESKSFKLYLGSFTNTRFDSVDAVRARLRTDISEAVWRGSATPSTVGVRVLLPEQFDQQAIHELDGLSLDRLDLECTQYQPDPTLLTAAFDEVPVTEVLTSGLLKSNCLVTGQPDWGSVQISYSGPQIDQAGLLQYIVSFRNHNEFHEQCVERFFMDIWRRCRPVKLTVYARYTRRGGLDINPWRTSHPGAAPANVRTARQ

SEQ ID NO: 49041 - protein, 159 aa, unidentified
  source 1..159: note = Pseudorhodoplanes sinuspersici
  REGION 1..159: note = tr|A0A1W6ZWC2|A0A1W6ZWC2_9RHIZ NADPH-dependent 7-cyano-7-deazaguanine reductase OS=Pseudorhodoplanes sinuspersici OX=1235591 GN=queF PE=3 SV=1
MARKKTSQVLPNPALQLGRATALPASPDEAVLDRVDNPHPDTNYVARFTMPEFTALCPITGQPDFAHFVIDYVPNKFLVESKSLKLYLNSFRNHGSFHEDCTVSIGKRLVSLLKPRWLRIGGYWYPRGGMPIDVFWQAGKLPNGVWVPDQGVAPYRGRG

SEQ ID NO: 49042 - protein, 129 aa, unidentified
  source 1..129: note = Pseudoroseicyclus aestuarii
  REGION 1..129: note = tr|A0A318T6M2|A0A318T6M2_9RHOB NADPH-dependent 7-cyano-7-deazaguanine reductase OS=Pseudoroseicyclus aestuarii OX=1795041 GN=queF PE=3 SV=1
MLERVPNPQPEARYAVRFTAPEFTSLCPMTGQPDFAHLVIDYVPQDWLVESKSLKLYLTSFRNHGAFHEDCTVAIGLRLRELLDPHWLRIGGYWYPRGGIPIDVFYQTGATPQDVWIPDQGVPPYRGRG

SEQ ID NO: 49043 - protein, 281 aa, Pseudospirillum japonicum
  REGION 1..281: note = tr|A0A1H6SVW5|A0A1H6SVW5_9GAMM NADPH-dependent 7-cyano-7-deazaguanine reductase OS=Pseudospirillum japonicum OX=64971 GN=queF PE=3 SV=1
MHPAEASNLGKASPYPKKYDSKWLYPIARHLQRQHLQTEGVPCYGEDMWTAYEVSWLDMKAKPQIALASIRLPLQSQNLIESKSLKLYLNSFNQSQWPSLEAVQAQISQDLTQVAGMQVQVDLWTWQQAEMYLQPKPIQGMCLDDLELQDEIASAPVDQPDLLADVEKGKKLVKPEYYYSHLLKSNCPVTGQPDWATLWIEYQGAPLNLSALLAYILSFRQHQDFHEHCVERIYYTLWHVCQPEKLSVYARYTRRGGLDINPWRTSDAKAAHAPLIRTIRQ

SEQ ID NO: 49044 - protein, 136 aa, unidentified
  source 1..136: note = Pseudothermotoga hypogea
  REGION 1..136: note = tr|A0A0X1KRZ6|A0A0X1KRZ6_9THEM NADPH-dependent 7-cyano-7-deazaguanine reductase OS=Pseudothermotoga hypogea DSM 11164 = NBRC 106472 OX=1123384 GN=queF PE=3; SV = 1
MPKAEGKTFQFEGHESIRTDFLETIDFDGKDEYIKIETDEFSAVCPFSGLPDIGRVIIEYYPDGGKIVELKSLKYYFVSFRNVGIYQEEATKRIYEDLKRLLKTDRLRVTVVYNVRGGIKTTTQMGDLAGHDRKVE

SEQ ID NO: 49045 - protein, 136 aa, unidentified
  source 1..136: note = Pseudothermotoga sp.
  REGION 1..136: note = tr|A0A3D3V138|A0A3D3V138_9THEM NADPH-dependent 7-cyano-7-deazaguanine reductase OS=Pseudothermotoga sp.; OX = 2033661 GN=queF PE=3 SV=1
MPRAEGKTFQFEGHESIRTDFLETIDFDGKDEYIKIETDEFSAVCPFSGLPDIGRVIIEYYPDGGKIVELKSLKYYFVSFRNVGIYQEEVTKRIYEDLRKLLKTGRLRVTVVYNIRGGIKTTTQMGDLAGHDRKVE

SEQ ID NO: 49046 - protein, 155 aa, unidentified
  source 1..155: note = Pseudovibrio axinellae
  REGION 1..155: note = tr|A0A165UN64|A0A165UN64_9RHOB NADPH-dependent 7-cyano-7-deazaguanine reductase OS=Pseudovibrio axinellae; OX = 989403 GN=queF PE=3 SV=1
MSKDDIYKNLTMLGGETVQPQSPEEAVLERVPNPQQGTPYAIRFTAPEFTSLCPITNQPDFAHLVIDYVPDEWLVESKSLKLFLTSFRNHGAFHEDCTVSIGKRLVDTLKPIWLRIGGYWYPRGGIPIDVFYQTGEEPKGVWIPEQGVPTYRGRG

SEQ ID NO: 49047 - protein, 155 aa, Pseudovibrio denitrificans
  REGION 1..155: note = tr|A0A1I6XPY1|A0A1I6XPY1_9RHOB NADPH-dependent 7-cyano-7-deazaguanine reductase OS=Pseudovibrio denitrificans OX=258256 GN=queF PE=3 SV=1
MSKDDIYKNLTMLGGDTVQPQSPEEAVLEKVPNPQQGTPYAIRFTAPEFTSLCPITNQPDFAHLVIDYVPDQWLVESKSLKLFLTSFRNHGAFHEDCTVSIGKRLVDTLNPIWLRIGGYWYPRGGIPIDVFYQTGEEPKGVWIPEQGVPTYRGRG

SEQ ID NO: 49048 - protein, 155 aa, Pseudovibrio sp.
  REGION 1..155: note = tr|A0A1H1FAH1|A0A1H1FAH1_9RHOB NADPH-dependent 7-cyano-7-deazaguanine reductase OS=Pseudovibrio sp. Tun.PSC04-5.I4 OX=1798213 GN=queF PE=3 SV=1
MSKSDIYKNLTMLGGATVQPQSPEEAVLEKVPNPQQSTRYAIRFTAPEFTSLCPITGQPDFAHLVIDYVPDEWLVESKSLKLFLTSFRNHGAFHEDCTVSIGKRIVDTLNPIWLRIGGYWYPRGGIPIDVFYQTGEAPKGVWIPEQGVPTYRGRG

SEQ ID NO: 49049 - protein, 155 aa, Pseudovibrio sp.
  REGION 1..155: note = tr|A0A165UC54|A0A165UC54_9RHOB NADPH-dependent 7-cyano-7-deazaguanine reductase OS=Pseudovibrio sp. Ad26; OX = 989410 GN=queF PE=3 SV=1
MSNDDIYKNLTMLGGDTVQPQSPEEAVLERVPNPQQGTPYAVRFTAPEFTSLCPITNQPDFAHLVIDYVPDEWLVESKSLKLFLTSFRNHGAFHEDCTVSIGKRLVDTLNPIWLRIGGYWYPRGGIPIDVFYQTGEEPKGVWIPEQGVPTYRGRG

SEQ ID NO: 49050 - protein, 274 aa, unidentified
  source 1..274: note = Pseudoxanthomonas composti
  REGION 1..274: note = tr|A0A4V1N158|A0A4V1N158_9GAMM NADPH-dependent 7-cyano-7-deazaguanine reductase OS=Pseudoxanthomonas composti OX=2137479 GN=queF PE=3 SV=1
MSTPADSMLGREVAYPAHYDPSLLFPIPREGARRQLGLDPQALPFIGHDRWHAYELGWLDIKGKPQVGTATLTVPCDSQHLIESKSLKLYLNSLNGERFNSAEAVRERIATDLSARAGAPVAVLLGLPPLPRDESADAGVVLDHQDLEIDDYGPPNPGYLSVQADTPAAETLVSHLLKSNCPVTGQPDWATLIVRYRGARIDRAGLLRYIVSYRNHSGFHEQCVEGIFADLLRTCEPECLYVEARYTRRGGLDINPCRATPGMTLPPPVREVRQ

SEQ ID NO: 49051 - protein, 271 aa, Pseudoxanthomonas dokdonensis
  REGION 1..271: note = tr|A0A0R0CQ12|A0A0R0CQ12_9GAMM NADPH-dependent 7-cyano-7-deazaguanine reductase OS=Pseudoxanthomonas dokdonensis OX=344882 GN=queF PE=3 SV=1
MNTPEDSSLGREVAYPDRYDPGLLFPIPRAGARAAMGIDDNALPFIGHDRWHAYELSWLDAGGKPCVGTATLYVPFDSPALIESKSLKLYLNSLNGVRFNSPAAVCERIGNDLSARAGAVVRVSLGLPDMQQHRKGESLDGLSLEINDYGPPNADYLGTLAGGPVTEILFSDLLKSNCPVTGQPDWATLEIRYHGAPINREGLLRYLVSFRDHAGFHEQCVERIFHDLINHCQPQQLSVEARYTRRGGLDINPWRATPGFLPPVPVRDLRQ

SEQ ID NO: 49052 - protein, 271 aa, Pseudoxanthomonas indica
  REGION 1..271: note = tr|A0A1T5KM06|A0A1T5KM06_9GAMM NADPH-dependent 7-cyano-7-deazaguanine reductase OS=Pseudoxanthomonas indica OX=428993 GN=queF PE=3 SV=1
MSTPEESLLGRDVTYPDHYDPSLLFPIPRQAARDSLGLSGDALPFIGHDRWHGYELSWLDARGKPRVATATFTVPCTSSNLIESKSFKLFLNSLNNARFNSDAAVLDCLRTDLSARAGADIEVTFGLPPMAEYPEGDSLDDLDVEIDHYGPPRADGLLVDPSERVQEVLRSALLKSNCPVTGQPDWATVIIRYAGPRIDRNELLRYLISFRNHAEFHEHCVERIYSDLMAHCQPEWVSVEARYTRRGGLDINPWRASPGVAAPVALRENRQ

SEQ ID NO: 49053 - protein, 272 aa, Pseudoxanthomonas sp.
  REGION 1..272: note = tr|A0A4V2HD72|A0A4V2HD72_9GAMM NADPH-dependent 7-cyano-7-deazaguanine reductase OS=Pseudoxanthomonas sp. NML171200 OX=2480816 GN=queF PE=3 SV=1
MNTPQESLLGREVAYPSHYDPALLFPIPRAAARAEIGLDAAALPFTGHDRWHAYELAWLDTRGKPQVATATLTVPADAPNLIESKSLKLYLNSLNAERFETLDAVCARVAADLSARAGGAVTVQAGLPPFGEQPGTLLDALELDMDDYGPPNPTHLSADVDDQASETLVSHLLKSNCPVTGQPDWGTVVLRYDGPRIDHAGLLRYLVSFRDHAGFHEQCVERIFADVSARCAPQRLSVEARYTRRGGLDINPWRITPGWDAGITAPIRELRQ

SEQ ID NO: 49054 - protein, 272 aa, Pseudoxanthomonas sp.
  REGION 1..272: note = tr|A0A3R8TZJ2|A0A3R8TZJ2_9GAMM NADPH-dependent 7-cyano-7-deazaguanine reductase OS=Pseudoxanthomonas sp. SGD-10 OX=2493089 GN=queF PE=3 SV=1
MNTPHDSSLGREVAYPTRYDPTLLFPIPRAGARAELGLQAGAALPFTGHDRWHAYELGWLDGRGRPQAATATVLVPADSPCLVESKSFKLYLNSLNGERFADAGALRARIAADLSQAAGAAVRVEFGLPPMAAGAEGASIDDADVDIDHYGPPQAEVLRADPAEVAEEYLHSGLLKSNCPVTGQPDWGSVHLRYRGPRIDRGSLLRYLAGYREHAGFHEQCVEQIFLDVLARCRPQWLSVEARYTRRGGLDINPWRATPGQPAPAPLRDLRQ

SEQ ID NO: 49055 - protein, 272 aa, Pseudoxanthomonas spadix
  REGION 1..272: note = tr|G7USW1|G7USW1_PSEUP NADPH-dependent 7-cyano-7-deazaguanine reductase OS=Pseudoxanthomonas spadix (strain BD-a59) OX=1045855 GN=queF PE=3 SV=1
MNTPQDSLLGRTVAYPAHYDPDLLFAIARAGARAELGLDSAALPFVGHDRWHAYELGWLDLRGKPQVATATLTVPQDSPNLIESKSLKLYLNSLNATGFASAEAVCAQIAQDLSARAGAPVTVAPGLPGFGHHADALLLDTLELDIDDYGPPNPGHLAAGSHVVSETLVSHLLKSNCPVTGQPDWGSVVLRYEGPKIDHEGLLRYLVSFREHAGFHEQCVERIFVDLSARCAPIRLSVEARYTRRGGLDINPWRVTPGWEDHAPAPLRELRQ

SEQ ID NO: 49056 - protein, 272 aa, Pseudoxanthomonas spadix; identical to SEQ ID NO: 49055
  REGION 1..272: note = tr|A0A3M6PMG5|A0A3M6PMG5_9GAMM NADPH-dependent 7-cyano-7-deazaguanine reductase OS=Pseudoxanthomonas spadix OX=415229 GN=queF PE=3 SV=1

SEQ ID NO: 49057 - protein, 272 aa, Pseudoxanthomonas suwonensis
  REGION 1..272: note = tr|E6WP12|E6WP12_PSEUU NADPH-dependent 7-cyano-7-deazaguanine reductase OS=Pseudoxanthomonas suwonensis (strain 11-1) OX=743721 GN=queF PE=3 SV=1
MNTPQDSSLGREVAYPTRYDPTLLFPIPRAGARAELGLAPGTALPFIGHDRWHAYELGWLDGRGRPQAGTATVVVPADSPCLVESKSFKLYLNSLNAARFDDAEALRLRVVDDLSRAAGAPVEVRFGLPPMAGGQEGTSVDDADVDIDHYGPPQAEVLRADAGEVVEEYLHSGMLKSNCPVTGQPDWGSVHLRYLGPRIDRGSLLRYIAGYREHAGFHEQCVEQIFLDVLARCQPQWLSVEARYTRRGGLDINPWRATPGQPAPGAERDLRQ

SEQ ID NO: 49058 - protein, 277 aa, Pseudoxanthomonas suwonensis
  REGION 1..277: note = tr|A0A0E3Z0M7|A0A0E3Z0M7_9GAMM NADPH-dependent 7-cyano-7-deazaguanine reductase OS=Pseudoxanthomonas suwonensis OX=314722 GN=queF PE=3 SV=1
MNTPHDSSLGREVAYPTRYDPSLLFPIPRAAGRAELGLAAGATPPFVGHDRWHAYELSWLDARGKPQVSTATLQVPCDSPNLVESKSLKLYLNSLNAARFDDAQALHAAIAGDLSRCTGAAVTVAAGLPPMTGSGADAGNDGESLDGIEADFDDYGPPNAGYLRADDAVQVEEHLCSALLKSNCPVTGQPDWASLHLRYRGPRIDRTGLLRYLVSFREHAGFHEQCVERIFIDLLRQCRPAALSVEARYTRRGGLDINPWRATAGMPAPPALRDLRQ

SEQ ID NO: 49059 - protein, 254 aa, Pseudoxanthomonas taiwanensis
  REGION 1..254: note = tr|A0A562DZU6|A0A562DZU6_9GAMM 7-cyano-7-deazaguanine reductase OS=Pseudoxanthomonas taiwanensis J19 OX=935569 GN=L613_000200000290 PE=4 SV=1
  VARIANT 122..130: note = Xaa can be any naturally occurring amino acid
MNTPHDSSLGREVAYPTRYDPTLLFPIPRAGARAELGLQAGAALPFTGHDRWHAYELGWLDGRGRPQAATATVLVPADSPCLVESKSFKLYLNSLNGERFADAGALRARIAADLSQAAGAAXXXXXXXXXHYGPPQAEVLRADPAEVAEEYLHSGLLKSNCPVTGQPDWGSVHLRYRGPRIDRGSLLRYLAGYREHAGFHEQCVEQIFLDVLARCRPQWLSVEARYTRRGGLDINPWRATPGQPAPAPLRDLRQ

SEQ ID NO: 49060 - protein, 264 aa, unidentified
  source 1..264: note = Pseudoxanthomonas wuyuanensis
  REGION 1..264: note = tr|A0A286D9P2|A0A286D9P2_9GAMM NADPH-dependent 7-cyano-7-deazaguanine reductase OS=Pseudoxanthomonas wuyuanensis OX=1073196 GN=queF PE=3 SV=1
MLGRDVAYPSQFDPSLLFPIPRAAARESIGIIPDALPFIGHDRWHAYELSWLDARGKPRVATATFTVPCDSPHLIESKSLKLYLNSLNATRFNSDTAVLDRITLDLSVRTGADVAVAFGLPPLAELEEGESLDTLDIEIDHYGPPQADYLVADRQAIVTEVLSSQLLKSNCPVTGQPDWASVIIRYHGPRIDRGELLRYLISFRDHAEFHEQCVERLFHDLMAHCRPQALSVEARYTRRGGLDINPWRATAGFQAPTARRDLRQ

SEQ ID NO: 49061 - protein, 166 aa, Psychrobacillus insolitus
  REGION 1..166: note = tr|A0A2W7MFG9|A0A2W7MFG9_9BACI NADPH-dependent 7-cyano-7-deazaguanine reductase OS=Psychrobacillus insolitus OX=1461 GN=queF PE=3 SV=1
MSGRSQDEGLKDLTLLGNQGTKYSFDYAPEILESVDNLHSTRDYFVKFNCPEFTSLCPITGQPDFATMYISYIPDKKIVESKSLKLYLFSFRNHGDFHEDCVNIIMNDLIELLDPRYIEVWGKFTPRGGISIDPWCNYGRPDTKYVEMADFRLMNHDLYPEKIDNR

SEQ ID NO: 49062 - protein, 166 aa, unidentified
  source 1..166: note = Psychrobacillus lasiicapitis
  REGION 1..166: note = tr|A0A544T6X0|A0A544T6X0_9BACI NADPH-dependent 7-cyano-7-deazaguanine reductase OS=Psychrobacillus lasiicapitis OX=1636719 GN=queF PE=3 SV=1
MSGRSHEEGLKDLTLLGNQGTQYSFEYAPEVLESVDSLHSNRDYFVKFNCPEFTSLCPITQQPDFATMYISYIPDKKIVESKSLKLYLFSFRNHGDFHEDCVNIIMNDLIKLLDPRYIEVWGKFTPRGGISIDPWCNYGRPGTKYEEMADYRLMNHDLYPEKIDNR

SEQ ID NO: 49063 - protein, 166 aa, Psychrobacillus psychrodurans
  REGION 1..166: note = tr|A0A1I4X977|A0A1I4X977_9BACI NADPH-dependent 7-cyano-7-deazaguanine reductase OS=Psychrobacillus psychrodurans OX=126157 GN=queF PE=3 SV=1
MSGRSHDEGLKDLTLLGNQGTKYSFDYAPEVLESVDNLHSTRDYFVKFNCPEFTSLCPITNQPDFATMYISYIPDKKIVESKSLKLYLFSFRNHGDFHEDCVNIIMNDLIELLDPRYIEVWGKFTPRGGISIDPWCNYGRPGTKYVEMADFRLMNHDLYPEKIDNR

SEQ ID NO: 49064 - protein, 166 aa, Psychrobacillus psychrotolerans
  REGION 1..166: note = tr|A0A1I5XZ89|A0A1I5XZ89_9BACI NADPH-dependent 7-cyano-7-deazaguanine reductase OS=Psychrobacillus psychrotolerans OX=126156 GN=queF PE=3 SV=1
MSGRSHDEGLKDLTLLGNQGTKYSFDYAPEVLESVDNLHSTRDYFVKFNCPEFTSLCPITNQPDFATMYISYIPDKKIVESKSLKLYLFSFRNHGDFHEDCVNIIMNDLIELLDPRYIEVWGKFTPRGGISIDPWCNYGRPGTKYVEIADFRLMNHDLYPEKIDNR

SEQ ID NO: 49065 - protein, 166 aa, unidentified
  source 1..166: note = Psychrobacillus soli
  REGION 1..166: note = tr|A0A544TGC9|A0A544TGC9_9BACI NADPH-dependent 7-cyano-7-deazaguanine reductase OS=Psychrobacillus soli; OX = 1543965 GN=queF PE=3 SV=1
MSGRSQEEGLKDLTLLGNQGTQYSFEYAPEVLESVDSLHSNRDYFVKFNCPEFTSLCPITQQPDFATMYISYIPDKKIVESKSLKLYLFSFRNHGDFHEDCVNIIMNDLIKLLDPRYIEVWGKFTPRGGISIDPWCNYGRPGTKYEEIANYRLMNHDLYPEKIDNR

SEQ ID NO: 49066 - protein, 166 aa, Psychrobacillus sp.; identical to SEQ ID NO: 49065
  REGION 1..166: note = tr|A0A1H9VVR8|A0A1H9VVR8_9BACI NADPH-dependent 7-cyano-7-deazaguanine reductase OS=Psychrobacillus sp. OK032 OX=1884358 GN=queF PE=3 SV=1

SEQ ID NO: 49067 - protein, 166 aa, Psychrobacillus sp.
  REGION 1..166: note = tr|A0A544TMM6|A0A544TMM6_9BACI NADPH-dependent 7-cyano-7-deazaguanine reductase OS=Psychrobacillus sp. Z8; OX = 2325572 GN=queF PE=3 SV=1
MSGRSQEEGLKDLTLLGNQGTQYSFEYAPEVLESVDSLHTNRDYFVKFNCPEFTSLCPITQQPDFATMYISYIPDKKIVESKSLKLYLFSFRNHGDFHEDCVNIIMNDLIKLLDPRYIEVWGKFTPRGGISIDPWCNYGRPGTKYEEIANYRLMNHDLYPEKIDNR

SEQ ID NO: 49068 - protein, 292 aa, Psychrobacter alimentarius
  REGION 1..292: note = tr|A0A144NHH8|A0A144NHH8_9GAMM NADPH-dependent 7-cyano-7-deazaguanine reductase OS=Psychrobacter alimentarius OX=261164 GN=A3K91_0543 PE=3 SV=1
MSIHGILGEQTTNYPTQYSPETLYPIAREMGRNAIGWHADKLTIGVDWWQAFEMSWLNTQGVSQVAIARFSIPASSPYIVESKSLKLYLNSINFTEFASWQEVETLIAKDLSACVQADVTVELFGLEEDLSSLLIAKPEGICIDNALDALSDITEKVTLCEHPDASLLQDQTRADDSQLERDESQPYTFYSNLLRSNCPVTNQPDWGTLAVSITTDKPFSNANMLRYILSFRQHNGFHEQCVEQIFADLSKYYEPSELMVRAWYTRRGGIDINPCRVSDASLLPKPSRLIRQ

SEQ ID NO: 49069 - protein, 289 aa, Psychrobacter aquaticus
  REGION 1..289: note = tr|U4T659|U4T659_9GAMM NADPH-dependent 7-cyano-7-deazaguanine reductase OS=Psychrobacter aquaticus CMS 56 OX=1354303 GN=M917_0678 PE=3 SV=1
MSIHGILGEQTTDYPTEYNPETLYPIARSMGRDAIAWHAGKLAVGVDWWQAFEMSWLNTQGLSQVAIARFSIPASSPFIVESKSLKLYLNSINFTEFASWEDVETLIAKDLSACVQADVTVELFGLEDDRSELLIIQPEGVCIDSALADTTDKVTLCEHPDASLLQDQTQADDSKLESGKPQPYTFYSNLLRSNCPVTNQPDWGTLAVSITSEKSVNEANMLRYILSFRQHNGFHEQCVEQIFADLSQYYAPSELMVRAWYTRRGGIDINPCRVSNVSLLPKPSRLIRQ

SEQ ID NO: 49070 - protein, 285 aa, Psychrobacter arcticus
  REGION 1..285: note = sp|Q4FUL7|QUEF_PSYA2 NADPH-dependent 7-cyano-7-deazaguanine reductase OS=Psychrobacter arcticus (strain DSM 17307 / 273-4) OX=259536 GN=queF PE=3 SV=1
MSIHGILGEQTTDYPTEYSPETLYPIARSMGRDVIGWQNDKLEVGVDWWQAFELSWLNQQGISQVAIARFGIPANSPFIVESKSLKLYLNSINFTEFGSWAEVQKLIAEDLSKCVQAEVQVELFHLADRHSGLLIAQPDGICIDDALVNSTEKVALMLHPDASLLERDSSDAQISDGKTFSFYSNLLRSNCPVTNQPDWAALAVSITSKKVVNQANMLRYILSFRQHNGFHEQCVEQIFADLSQYYEPSKLMVRAWYTRRGGIDINPCRVSDIALLPVPSRLIRQ

SEQ ID NO: 49071 - protein, 285 aa, Psychrobacter cryohalolentis
  REGION 1..285: note = sp|Q1QDK8|QUEF_PSYCK NADPH-dependent 7-cyano-7-deazaguanine reductase OS=Psychrobacter cryohalolentis (strain K5) OX=335284 GN=queF PE=3 SV=1
MSIHGILGEQTTDYPTEYSPETLYPIARSMGREVIGWQDDKLEVGFDWWQAFELSWLNEQGISQVAIARFGIPASSPFIVESKSLKLYLNSINFTEFGSLETVQTLIAKDLSKCVQAEVNVELFDLEDEHSGLLIAQPDGICIDDALADSTEKVALTLHPDASLLERNTSDAKISEGKTFSFYSNLLRSNCPVTNQPDWGTLAVSITSNKPVNNANMLRYILSFRQHNGFHEQCVEQIFADLSQYYEPSELMVRAWYTRRGGIDINPCRVSDIALLPVPSRLIRQ

SEQ ID NO: 49072 - protein, 290 aa, Psychrobacter fozii
  REGION 1..290: note = tr|A0A2V4UWH9|A0A2V4UWH9_9GAMM NADPH-dependent 7-cyano-7-deazaguanine reductase OS=Psychrobacter fozii; OX = 198480 GN=DFP82_10960 PE=3 SV=1
MSIHGILGEQTTDYPTEYSPETLYPIARSMGRDVIGWQDDKLTVGVDWWQAFEMSWLNTQGISQVAIARFAIPASSPFIVESKSLKLYLNSINFTEFASWAEVQTLIAKDLSACIQADVIVELFGLDDEQGNKQSGLLIAQPEGVCIDEALANSSEKVALCEHPDASLLNDHEAESMISDSTQPYTFYSNLLRSNCPVTNQPDWGTLAVSITTDKPVNTANVLRYILSFRQHNGFHEQCVEQIFADLSRYYKPSALMVRAWYTRRGGIDINPCRVSDITLLPQPSRLIRQ

SEQ ID NO: 49073 - protein, 288 aa, Psychrobacter frigidicola
  REGION 1..288: note = tr|A0A5C7AA40|A0A5C7AA40_9GAMM NADPH-dependent 7-cyano-7-deazaguanine reductase OS=Psychrobacter frigidicola OX=45611 GN=queF PE=3 SV=1
MSIHGILGEQTTTYPTQYNPEMLYPIARSVGRDAINWQDDKLNVGVDWWHSFEMSWLNPQGISQVAMARFSIPASSPFIVESKSLKLYLNSINFTEFNSWQEVETLIAKDLSKCVQADVQVELFELNDNDSGLLITQPDGVCIDNALADSTDKVALTVHPDASLLGINDSGHAGITKNEDQSFTFYSNLLRSNCPVTNQPDWGTLAVTITTTQMINQANMLRYILSFRQHNGFHEQCVEQIFADLSQYYQPSSLMVRAWYTRRGGIDINPCRVSELSLLPQPSRLIRQ

SEQ ID NO: 49074 - protein, 291 aa, Psychrobacter immobilis
  REGION 1..291: note = tr|A0A2V1ZZ80|A0A2V1ZZ80_PSYIM NADPH-dependent 7-cyano-7-deazaguanine reductase OS=Psychrobacter immobilis OX=498 GN=C8D84_109104 PE=3 SV=1
MSIHGILGEQTTDYPTEYSPETLYPIARSMGRDVIGWQDDKLMVGIDWWQAFEMSWLNQQGISQVAIARFGIPASSPFIVESKSLKLYLNSINFTEFVSWAEVQALIAKDLSACVQADVQVELFGLNDDLHDKTSGLLVAQSEGICIDDALANSSEKVALCEHPDASLLNDDQTGAHSGVDSAQPYTFYSNLLRSNCPVTNQPDWGTLAVSMTSNKTVDEAGMLRYILSFRQHNGFHEQCVEQIFADLSKYYEPSELMVRAWYTRRGGIDINPCRVSDITLLPKPSRLIRQ

SEQ ID NO: 49075 - protein, 289 aa, Psychrobacter pacificensis
  REGION 1..289: note = tr|A0A1G6X4K4|A0A1G6X4K4_9GAMM NADPH-dependent 7-cyano-7-deazaguanine reductase OS=Psychrobacter pacificensis OX=112002 GN=SAMN05660405_01174 PE=3 SV=1
MSIHGILGEQTTDYPTEYSPETLYPIARSMGRDVIGWHADKLTVGVDWWQAFELSWLNLQGISQVAMVRFSIPASSPFIVESKSLKLYLNSINFTEFASWNDVQALIAKDLSACLQAEVQVELFTLNDAASLLIAQPTGICIDDALAGSTGKIALTEHPDASLLSNDETEASSERVANNSNQPYVFYSNLLRSNCPVTNQPDWGTLAVSITTDKTFNNANMLRYILSFRQHNGFHEQCVEQIFADLSQYYQPSELMVRAWYTRRGGIDINPCRVSDMALLPAPSRLIRQ

SEQ ID NO: 49076 - protein, 292 aa, unidentified
  source 1..292: note = Psychrobacter pasteurii
  REGION 1..292: note = tr|A0A1R4EGH8|A0A1R4EGH8_9GAMM NADPH-dependent 7-cyano-7-deazaguanine reductase OS=Psychrobacter pasteurii OX=1945520 GN=queF PE=3 SV=1
MSIHGVLGESTSYPKTYQPDTLYAIPRSMGRNEINWQDDKLQVGVDWWHAFEVSWLNPQGISQMAIARFGIPASSPNIVESKSLKLYLNSLNFTEFESWEAVQQTIAKDLAACVGADVEVSLFELDAISSGSEADTGFLIAHPKGKCIDKALDNSEIKVELVEHPDAKFLAEEGQSESVSNEAEKEYQLYSNLLRSNCPVTNQPDWGTLAIDITTSQYIDEAKLLSYILSFRQHNGFHEQCVEQIFADLSQRYSPSKLMVRAWYTRRGGIDINPCRVSDSSLLPKPSRLVRQ

SEQ ID NO: 49077 - protein, 292 aa, Psychrobacter phenylpyruvicus
  REGION 1..292: note = tr|A0A379LLI7|A0A379LLI7_9GAMM NADPH-dependent 7-cyano-7-deazaguanine reductase OS=Psychrobacter phenylpyruvicus OX=29432 GN=queF PE=3 SV=1
MSIHGVLGESTSYPKTYQPDTLYAIPRSMGRKEINWQDDNLQVGVDWWHAFEVSWLNSKGISQMAIARFGIPASSPNIVESKSLKLYLNSLNFTEFESWQTVEQTIAKDLAACVGAEVQVSLFELDAISSGRDADSGFLIAHPQGKCIDQALDNLQGKVELVEHPDATLLAEDADSKPSLDQAEIEYQLYSNLLRSNCPVTNQPDWGTLAIDITTSQDIDEAKLLTYILSFRQHNGFHEQCVEQIFADLSQRYSPSKLMVRAWYTRRGGIDINPCRVSDSRLLPKPSRLVRQ

SEQ ID NO: 49078 - protein, 292 aa, unidentified
  source 1..292: note = Psychrobacter piechaudii
  REGION 1..292: note = tr|A0A1R4GUI8|A0A1R4GUI8_9GAMM NADPH-dependent 7-cyano-7-deazaguanine reductase OS=Psychrobacter piechaudii OX=1945521 GN=queF PE=3 SV=1
MSIHGVLGESTSYPKTYQPDTLYAIPRSMGRNEINWQEDKLQVGVDWWHAFEMSWLNSQGISQMAIARFGIPASSPNIVESKSLKLYLNSLNFTEFDSWETVEQTIAKDLAACVGAEVQVSLFGLDAISSGREADTGFLIAHPQGKCIDQALDNLPGKVELVEHPDASLLAEDVDVSASLDQAEKQYQLYSNLLRSNCPVTNQPDWGTLAIDITTSQNIDEAKLLTYILSFRQHNGFHEQCVEQIFADLSQRYSPSKLMVRAWYTRRGGIDINPCRVSDSSLLPQPSRLVRQ

SEQ ID NO: 49079 - protein, 289 aa, Psychrobacter piscatorii
  REGION 1..289: note = tr|A0A0T6DTM4|A0A0T6DTM4_9GAMM NADPH-dependent 7-cyano-7-deazaguanine reductase OS=Psychrobacter piscatorii OX=554343 GN=AS194_05550 PE=3 SV=1
MSIHGILGEQTTDYPTEYSPETLYPIARSMGRDVIGWHADKLTVGVDWWQAFEISWLNLQGISQVAMARFSIPASSPFIVESKSLKLYLNSINFTEFASWNDVQALIAKDLSACLQAEVQVELFTLNDAASLLIAQPTGICIDDALAGSTGKIELTEHPDASLLSNDETEASSERVANNSNQPYVFYSNLLRSNCPVTNQPDWGTLAVSITTDKTFNNANMLRYILSFRQHNGFHEQCVEQIFADLSQYYQPETLMVRAWYTRRGGIDINPCRVSDMALLPAPSRLIRQ

SEQ ID NO: 49080 - protein, 292 aa, Psychrobacter sp.
  REGION 1..292: note = tr|A0A229G135|A0A229G135_9GAMM NADPH-dependent 7-cyano-7-deazaguanine reductase OS=Psychrobacter sp. DAB_AL32B OX=1028414 GN=CAN34_13120 PE=3 SV=1
MSIHGILGEQTTDYPTNYSPETLYPIARSMGRNIIGWQDDKLKVGVDWWHAFELSWLNTQGISQVAVARFGIPASSEYIVESKSLKLYLNSINFTEFASWAEVQTLITKDLSACVQAEVTVELFGLDNDLHDKNSGLLVTQPEGVCIDDALAGSTDKVALTVHPDASLLNSLEDKSTEIQQDISQSFTFYSNLLRSNCPVTNQPDWGTLAVSINSNKPVNNANMLRYILSFRQHNGFHEQCVEQIFADLSKYYEPSELMVRAWYTRRGGIDINPCRVSDIALLPVPSRLIRQ

SEQ ID NO: 49081 - protein, 291 aa, Psychrobacter sp.
  REGION 1..291: note = tr|X0RG78|X0RG78_9GAMM NADPH-dependent 7-cyano-7-deazaguanine reductase OS=Psychrobacter sp. JCM 18903 OX=1298610 GN=JCM18903_2236 PE=3 SV=1
MSIHGILGEQTTDYPTEYSPETLYPIARSMGRDVIGWQDDKLMVGIDWWQAFEMSWLNPQGLSQVAIARFGIPASSPFIVESKSLKLYLNSINFTEFASWNDVQALIAKDLSAVYKQTVQVELFSLNDDLHNKTTGLLIAQPEGVCIDNALGNSTDKVALTMHPDASLLSGDKTDAHSEIHSVQPYTFYSNLLRSNCPVTNQPDWGTLAVSITSNKTVDEAGMLRYILSFRQHNGFHEQCVEQIFADLSQYYEPSELMVRAWYTRRGGIDINPCRVSDIRLMPQPSRLIRQ

SEQ ID NO: 49082 - protein, 287 aa, Psychrobacter urativorans
  REGION 1..287: note = tr|A0A0M4TFP3|A0A0M4TFP3_9GAMM NADPH-dependent 7-cyano-7-deazaguanine reductase OS=Psychrobacter urativorans OX=45610 GN=AOC03_08835 PE=3 SV=1
MNIHGILGEQTTDYPTQYSPETLYPIARSIGRDAIGWQDDKLNVGVDWWHAFEMSWLNTQGISQVAMARFSIPASSPFIVESKSLKLYLNSLNFTEFNNWQAVETLIAKDLSKCVQAAVQVELFALNNNDSGLLITQPAGVCIDNALADSTDKVALSLHPDASLLKVDSVDADAQQNGSQTFTFYSNLLRSNCPVTNQPDWGTLAVTMTSEKAVNQANMLRYILSFRQHNGFHEQCVEQIFADLSQYYEPSALMVRAWYTRRGGIDINPCRLSESSLLPTPSRLIRQ

SEQ ID NO: 49083 - protein, 285 aa, Psychromonas ingrahamii
  REGION 1..285: note = sp|A1SYB5|QUEF_PSYIN NADPH-dependent 7-cyano-7-deazaguanine reductase OS=Psychromonas ingrahamii (strain 37) OX=357804 GN=queF PE=3 SV=1
MTNKPLYDQDSTLKNLSLGKITEYKSSYDPTLLQAVPRSLNRNELQLSEHNLPFYGVDLWNIYELSWLNSKGKPVVATGVVKVPFDSKNLIESKSFKLYLNSFNQSKFVSIEAVQKVLTADLSHCADKAVSVELHTDLDNFSDKLGTFSGQCLDVLDIEIDNYQLNADYLQDLSSQEQVTETLYSHLLKSNCLITSQPDWASIEISYTGKKLDREKLLRYLISFRQHNEFHEQCVERIYCDIMKFGQIDSLCVYARYTRRGGLDINPLRTTEHINEINNLRLLRQ

SEQ ID NO: 49084 - protein, 285 aa, Psychromonas sp.
  REGION 1..285: note = tr|A0A4Y7ZYP0|A0A4Y7ZYP0_9GAMM NADPH-dependent 7-cyano-7-deazaguanine reductase OS=Psychromonas sp. RZ22; OX = 2555643 GN=queF PE=3 SV=1
MSNSNLYTQDDALKNLSLGKVTEYKCHYDNTLLQGVPRSLNRNELALAAESLPFYGDDLWNIYELSWLNKKGKPMVATGLVKVPFDSEFLIESKSFKLYLNSFNQSRFDSVETVQNTLMADLSACANKPVEVTLNATLDNINDTLGTFSGINLDTLDIEVSEYQLSPSLLENISSAETVTETLYSHLLKSNCLITSQPDWASVEISYTGGQLDREKLLRYLISFRQHNEFHEQCVERIFCDLMKYGSLTSLTVYARYTRRGGLDINPLRSTTPSPSINNMRLLRQ

SEQ ID NO: 49085 - protein, 285 aa, Psychromonas sp.
  REGION 1..285: note = tr|A0A366WD21|A0A366WD21_9GAMM NADPH-dependent 7-cyano-7-deazaguanine reductase OS=Psychromonas sp. B3M02; OX = 2267226 GN=queF PE=3 SV=1
MSNSTLYDQDVALTGLSLGKVTEYKCHYDNSLLQGVPRSLNRNELSLEANSLPFYGIDLWNIYELSWLNSKGKPIVATGVVKVPYDSEFLIESKSFKLYLNSFNQSKFDSVETVQKILSNDLSACAKKPVEVTLNANLNTVVDELGTLSGINIDELDIEVDQYQLSPNLLQDISLEETVTETLYSNLLKSNCLITSQPDWGSVQISYTGKQLDQEKLLRYLVSFRQHNEFHEQCVERIFCDLMAHGSLTSLTVYARYTRRGGLDINPLRSTEASPSIDNVRLVRQ

SEQ ID NO: 49086 - protein, 282 aa, Psychrosphaera saromensis
  REGION 1..282: note = tr|A0A2S7UWE3|A0A2S7UWE3_9GAMM NADPH-dependent 7-cyano-7-deazaguanine reductase OS=Psychrosphaera saromensis OX=716813 GN=queF PE=3 SV=1
MTSKYTETGALDELTLGKQTAYETKYNPKLLQPVPRSLNRDDLNLSNPLPFYGHDLWTGYEVSWLNAKGKPVVAIAEFVVPATSANLIESKSFKLYLNSFNQTKFANWDDVQSAMVKDLSQCAGQAVDVDLLSVDQVAPFQVTALNGNNIDELDIEIDNYDFNNQLLQLDATNIKVTEELNSHLLKSNCLITSQPDWASIVISYTGLKIDHESLLRYLISFRMHNEFHEQCVERIFTDIQALCKPSELTVYARYTRRGGLDINPYRTTSSTLIPDRIRTNRQ

SEQ ID NO: 49087 - protein, 153 aa, unidentified
  source 1..153: note = Puniceibacterium antarcticum
  REGION 1..153: note = tr|A0A2G8RF77|A0A2G8RF77_9RHOB NADPH-dependent 7-cyano-7-deazaguanine reductase OS=Puniceibacterium antarcticum OX=1206336 GN=queF PE=3 SV=1
METIYSNLTQLGGKTELPASPEEATLERVANPQADVSYCVRFTAPEFTSLCPMTGQPDFAHLVIDYVPDAFLVESKSLKLFLGAFRNHGAFHEDCTISIARRLVDLLSPRWLRIGGYWYPRGGIPIDVFWQTGATPNEVWIPDQGVPPYRGRG

SEQ ID NO: 49088 - protein, 140 aa, unidentified
  source 1..140: note = Puniceicoccaceae bacterium
  REGION 1..140: note = tr|A0A2E6TK06|A0A2E6TK06_9BACT NADPH-dependent 7-cyano-7-deazaguanine reductase OS=Puniceicoccaceae bacterium OX=2026784 GN=queF PE=3 SV=1
MKEGNPEHVNLTKLGEGGTSPKRELETFPNRNPERDYVVELRTSEFTCICPKTGQPDFADILIRYVPDQKIVESKSLKLYLWTFRDQGTFHEHFANLLLDDLVAALDPRWCRVEVDFNARGGIGIMVSAEHGTNPEIGYS

SEQ ID NO: 49089 - protein, 124 aa, unidentified
  source 1..124: note = Puniceicoccaceae bacterium
  REGION 1..124: note = tr|A0A368BEY2|A0A368BEY2_9BACT NADPH-dependent 7-cyano-7-deazaguanine reductase OS=Puniceicoccaceae bacterium OX=2026784 GN=queF PE=3 SV=1
MDIETFPNPNAERNYTIQHIQEEFTSTCPMTGHPDYATVVFSYAPDEVCMELKAMKLYLHSFRNKGIFFEAASNQIFEDFYVACKPRWARLETIWRGRGGIRSNVVVEDSQDGYDGPVTLPFSA

SEQ ID NO: 49090 - protein, 270 aa, Pusillimonas ginsengisoli
  REGION 1..270: note = tr|A0A4U5LHV5|A0A4U5LHV5_9BURK NADPH-dependent 7-cyano-7-deazaguanine reductase OS=Pusillimonas ginsengisoli OX=453575 GN=queF PE=3 SV=1
MLQHAPLGQDVAFPQAYDPLLLFPISRSTNRQTLPIPAKWYGADIWNAYELSWLTPRGKPVVAVGQFTFPYSSPSLVESKSFKLYLNSFSEERYVDAAAVSAVMRHDLEKVTEQQIAINIVPLSGNERQLCQPLEGINIDAADIEIKHYSPAPERLACLSDASVVTETLVSDLLKSNCPVTGQPDWASVQIRYTGPQINREALLEYIVSLRRHTEFHEHCVEKMFCDIWAACAPQALFVRACYTRRGGLDINPWRSSEPAQPQPARTIRQ

SEQ ID NO: 49091 - protein, 273 aa, Pusillimonas noertemannii
  REGION 1..273: note = tr|A0A2U1CSW2|A0A2U1CSW2_9BURK NADPH-dependent 7-cyano-7-deazaguanine reductase OS=Pusillimonas noertemannii OX=305977 GN=queF PE=3 SV=1
MNTPLIHAPLGQEVVYPTSYDPKLLFPIDRAPNRQTLGPLPDWAGADIWNAYEISWLNPRGKPIVATARFVFPHSSPRLVESKSFKLYLNSFNDERFANEQEVGERMRADLAAACGATVEVEITRVGRQAGQGYEALEGENIDDIDVEIEVYTPSPELLRCVPGGAVVEETLVSDLLKSNCPVTGQPDWASVQVRYTGPQIDRAALLKYIVSLRRHDEFHEHCVEKMYCDIWRICRPESLLVYARYTRRGGLDINPWRASSKVEVSQVRTVRQ

SEQ ID NO: 49092 - protein, 274 aa, Pusillimonas sp.
  REGION 1..274: note = tr|A0A368WHT5|A0A368WHT5_9BURK NADPH-dependent 7-cyano-7-deazaguanine reductase OS=Pusillimonas sp. EA3; OX = 2183983 GN=queF PE=3 SV=1
MSSSSLDQAPLGRDVVYPTHYDASILFPVNREINRAQLPFIPNWAGADIWHAYEVSWLNARGKPMVAMARFIVPHNSPNIIESKSFKLYLNSFNESRFNSMNHVQQRLEKDLSAVAGAHIEVALTDLHDIQTIQCAPLEGLNIDGADVDIEHYQPNAGLLKCTTNPQPVNETLTSDLLKSNCPVTGQPDWGSLQIQYQGPQIDRESLLKYIVSLRQHTEFHEHCVEKIYCDIWQACQPEFLFVYACYTRRGGLDINPWRSSGPLVFEPARTPRQ

SEQ ID NO: 49093 - protein, 274 aa, Pusillimonas sp.
  REGION 1..274: note = tr|A0A410GBG1|A0A410GBG1_9BURK NADPH-dependent 7-cyano-7-deazaguanine reductase OS=Pusillimonas sp. ye3; OX = 2028345 GN=queF PE=3 SV=1
MQDTHLAHAPLGQDVVYPVTYDAGLLFPIERARNRQQLNIPSVWHGADIWNAYELSWLDARGKPVVAIGRFVFDHSSPRLIESKSFKLYLNSFNEERQQDEATVRGTLQRDLERACGGPVEVSLQRLGDGQALQCAPMDGISIDGADIEISAYEPTPGLLQCVADAPQVTETLTSDLLKSNCPVTGQPDWGSVQVRYTGPRIDRDALLRYIVSLRRHTEFHEHCVEKMYCDIWQACQPESLFVYARYTRRGGLDINPWRSSAATTVVDARTPRQ

SEQ ID NO: 49094 - protein, 130 aa, unidentified
  source 1..130: note = Unknown
  REGION 1..130: note = tr|A0A1E4ZHQ3|A0A1E4ZHQ3_9BACT NADPH-dependent 7-cyano-7-deazaguanine reductase OS=PVC group bacterium (ex Bugula neritina AB1) OX=1868283 GN=queF PE=3 SV=1
MEKKTYQNAQGDLSNLQTPDIEVWENQYKDRDYTVSFELAEFTCVCPKTGLPDFATLYLNYVPEKWCIELKSFKMYILFYRDIGIFHEHFVNKILDDIVKACSPRSASLKAIVNTRGGILTTVESIYPYK

SEQ ID NO: 49095 - protein, 163 aa, Pyramidobacter piscolens
  REGION 1..163: note = tr|D1Y6U4|D1Y6U4_9BACT NADPH-dependent 7-cyano-7-deazaguanine reductase OS=Pyramidobacter piscolens W5455 OX=352165 GN=queF PE=3 SV=1
MTRTPEEMKDLSLLGRRTAYKSDYAPEVLESFPNKHPGRDYFVKFNCPEFTSLCPMTGQPDFANITISYVPDGRLVESKSLKLYLFSFRNHGDFHEDCVNVILEDLVRLLSPKYIEVWGRFTPRGGLSIDPYANWGKPGTAWEKTAEDRLRLHDLSPELVNYR

SEQ ID NO: 49096 - protein, 163 aa, Pyramidobacter sp.
  REGION 1..163: note = tr|A0A3A9HNH0|A0A3A9HNH0_9BACT NADPH-dependent 7-cyano-7-deazaguanine reductase OS=Pyramidobacter sp. CG50-2 OX=2382160 GN=queF PE=3 SV=1
MTRTPEEMKDLSLLGHKTAYRSDYAPEVLESFPNKHPGRDYFVKFNCPEFTSLCPMTGQPDFANITISYVPDERLVESKSLKLYLFSFRNHGDFHEDCVNVILEDLVRLMSPKYIEVWGRFTPRGGLSIDPYANWGKPGTVWEKTAEERLRLHDLSPELVNYR

SEQ ID NO: 49097 - protein, 163 aa, Pyramidobacter sp.; identical to SEQ ID NO: 49096
  REGION 1..163: note = tr|A0A1V4AN84|A0A1V4AN84_9BACT NADPH-dependent 7-cyano-7-deazaguanine reductase OS=Pyramidobacter sp. C12-8 OX=1943580 GN=queF PE=3 SV=1

SEQ ID NO: 49098 - protein, 147 aa, unidentified
  source 1..147: note = Pyrinomonas methylaliphatogenes
  REGION 1..147: note = tr|A0A0B6WZ87|A0A0B6WZ87_9BACT NADPH-dependent 7-cyano-7-deazaguanine reductase OS=Pyrinomonas methylaliphatogenes OX=454194 GN=queF PE=3 SV=1
MKVTTEGMVLPPPNWQGLDIRSTPREEMNLYPLDTFPYEFVGREIRIHFEIPEFTCICPFSDFPDFATIRIEYVPNERCIELKSLKLYINSFRQVKIFHEHVVNVILEDFVRACDPLRVEIEGDFNVRGNIKTIVRASYQRPQQADK

SEQ ID NO: 49099 - protein, 166 aa, unidentified
  source 1..166: note = Quasibacillus thermotolerans
  REGION 1..166: note = tr|A0A0F5HV10|A0A0F5HV10_9BACI NADPH-dependent 7-cyano-7-deazaguanine reductase OS=Quasibacillus thermotolerans OX=1221996 GN=queF PE=3 SV=1
MAGRNEEELKKDISLLGNQGTTYTFEYDPSILETFENKHQNRDYFVKFNCPEFTSLCPMTGQPDFATIYISYIPDVKMVESKSLKLYLFSFRNHGDFHEDCMNIILNDLVELMDPRYIEVWGKFTPRGGISIDPYTNYGRPGTKYEKMAEYRMMNHDLYPETVDNR

SEQ ID NO: 49100 - protein, 139 aa, unidentified
  source 1..139: note = Quisquiliibacterium sp.
  REGION 1..139: note = tr|A0A5C8P1N5|A0A5C8P1N5_9BURK NADPH-dependent 7-cyano-7-deazaguanine reductase OS=Quisquiliibacterium sp. CC-CFT501 OX=2498847 GN=queF PE=3 SV=1
MPSKPATQLETFPNPAPRRDYVVHIEIPEFTCLCPLTGQPDFATIVLDYIPDKRNLELKALKLYMWSFRDQGAFHEDVTNRLLDAFAKATAPRFMRVTAKWYVRGGIFTTVVAEHRKRGWKPAPRVELEHFPSERSTRG

SEQ ID NO: 49101 - protein, 281 aa, Rahnella aquatilis
  REGION 1..281: note = tr|H2IXL3|H2IXL3_RAHAC NADPH-dependent 7-cyano-7-deazaguanine reductase OS=Rahnella aquatilis (strain ATCC 33071 / DSM 4594 / JCM 1683 / NBRC 105701 / NCIMB 13365 /CIP 78.65) OX=745277 GN=queF PE=3 SV=1
MSSYQDNPALAQLTLGKSTAYVDQYDASLLQAVPRSMNREPLGLYPDDLPFHGADIWTLYELSWLNAKGLPQVAVGEISLNAHSQNLIESKSFKLYLNSFNQTVFPDWQAVQETLTRDLSACAQGDVTVTVSRLSEIEGSPVGHFEGTCIDEQDIEIDSYVFSTDYLANAKGDEIVEETLVSHLLKSNCLITHQPDWGSVQIQYRGPKIDREALLRYLVSFRHHNEFHEQCVERIFNDLMRFCQPEKLAVYARYTRRGGLDINPWRSNFPFEPATTRLVRQ

SEQ ID NO: 49102 - protein, 281 aa, Rahnella aquatilis
  REGION 1..281: note = tr|H8NMN8|H8NMN8_RAHAQ NADPH-dependent 7-cyano-7-deazaguanine reductase OS=Rahnella aquatilis HX2; OX = 1151116 GN=queF PE=3 SV=1
MSSYQDNPALAQLTLGKSTAYVDQYDASLLQAVPRSMNREPLGLYPDNLPFHGADIWTLYELSWLNAKGLPQVAVGEISLNANSQNLIESKSFKLYLNSFNQTVFADWQAVKETLTRDLSACAQGEVTVSVSRLSEIEGSAVGHFDGVCIDEQDIEIDSYEFSTDYLANAKGAEIVEESLVSHLLKSNCLITHQPDWGSVQVQYRGPKIDREALLRYLVSFRHHNEFHEQCVERIFNDLLRFCQPEKLAVYARYTRRGGLDINPWRSNFPFEPATARLVRQ

SEQ ID NO: 49103 - protein, 281 aa, unidentified
  source 1..281: note = Rahnella inusitata
  REGION 1..281: note = tr|A0A419LYI5|A0A419LYI5_9GAMM NADPH-dependent 7-cyano-7-deazaguanine reductase OS=Rahnella inusitata; OX = 58169 GN=queF PE=3 SV=1
MSSYQDNPALAQLTLGKSTAYVDHYDASLLQAVPRSMNREPLGLFPDTLPFHGADIWTLYELSWLNAKGLPQVAVGEISLNADSQNLIESKSFKLYLNSFNQTVFPDWQAVQETLTRDLSACAQGNVTVTISRLSDIEGSPVGHFSGECIDDQDIEIDSYEFSTGYLAEAAGDEIVEESLVSHLLKSNCLITHQPDWGSVQIQYRGPKIDREALLRYVVSFRHHNEFHEQCVERIFNDILRFCQPEKLAVYARYTRRGGLDINPWRSNFPFEPATARLVRQ

SEQ ID NO: 49104 - protein, 281 aa, Rahnella sp.; identical to SEQ ID NO: 49102
  REGION 1..281: note = tr|A0A0H3F6J2|A0A0H3F6J2_RAHSY NADPH-dependent 7-cyano-7-deazaguanine reductase OS=Rahnella sp. (strain Y9602) OX=741091 GN=queF PE=3 SV=1

SEQ ID NO: 49105 - protein, 281 aa, Rahnella sp.
  REGION 1..281: note = tr|A0A2N0VWU2|A0A2N0VWU2_9GAMM NADPH-dependent 7-cyano-7-deazaguanine reductase OS=Rahnella sp. AA; OX = 2057180 GN=queF PE=3 SV=1
MSSYQDNPALAQLTLGKSTAYVDHYDASLLQAVPRSMNREPLGLFPDNLPFQGADIWTLYELSWLNAKGLPQVAVGEISLKADSQNLIESKSFKLYLNSFNQTVFPDWQAVQETLTRDLSACAQGDVTVTVSRLSDIEGSPVGHFAGTCIDDQDIEIDSYEFSTDYLADAAGEEIVEESLVSHLLKSNCLITHQPDWGSVQIQYRGPKIDREALLRYLVSFRHHNEFHEQCVERIFNDILRFCQPEKLAVYARYTRRGGLDINPWRSNFPFEPATARLVRQ

SEQ ID NO: 49106 - protein, 281 aa, unidentified
  source 1..281: note = Rahnella woolbedingensis
  REGION 1..281: note = tr|A0A419N3L0|A0A419N3L0_9GAMM NADPH-dependent 7-cyano-7-deazaguanine reductase OS=Rahnella woolbedingensis OX=1510574 GN=queF PE=3 SV=1
MSSYQDNPALAQLTLGKSMAYVDHYDASLLQAVPRSMNREPLGLYPDNLPFHGADIWTLYELSWLNAKGLPQVAVGEISLNANSQNLIESKSFKLYLNSFNQTVFPDWETVQETLTRDLSACAQGDVTVTVSRLSEIEGTPVGHFAGVCIDEQDIEIDSYEFSTDYLANAKGDEIVEESLVSHLLKSNCLITHQPDWGSVQIQYRGPKIDREALLRYLVSFRHHNEFHEQCVERIFNDLLRFCQPEKLAVYARYTRRGGLDINPWRSNFPFEPATARLVRQ

SEQ ID NO: 49107 - protein, 278 aa, Ralstonia insidiosa
  REGION 1..278: note = tr|A0A191ZTB2|A0A191ZTB2_9RALS NADPH-dependent 7-cyano-7-deazaguanine reductase OS=Ralstonia insidiosa; OX = 190721 GN=queF PE=3 SV=1
MSNQPEHSPLGKTSAYKTEYDPSLLFPIPRQGKRDEIGLPAGSALPFFGVDLWNLYELSWLNLRGKPQVAIGTVIVPADSPNIVESKSFKLYLNSFNQTKVASYEALQQLIHHDLSEACGAPVQVRIVPQEEFARQKMHELDGLLLDRLDIETDVYQPTPELLHADEEESPVEETLVSHLLKSNCLVTGQPDWGSVQIRYVGAPINQEALLKYLISFREHNEFHEQCVERIFTDIQRQCRPVKLAVYARYTRRGGLDINPFRTNYNTPWPDNLRNARQ

SEQ ID NO: 49108 - protein, 278 aa, Ralstonia mannitolilytica
  REGION 1..278: note = tr|A0A2N5L3M9|A0A2N5L3M9_9RALS NADPH-dependent 7-cyano-7-deazaguanine reductase OS=Ralstonia mannitolilytica OX=105219 GN=queF PE=3 SV=1
MHNQPEHSPLGKTSAYKTEYDPSLLFPIPRQGKRDEIGLPAGTALPFFGVDLWNLYELSWLNLKGKPQVAVGTVIVPADSPNIVESKSFKLYLNSFNQTKVASHEALQQLIHHDLSEACGAPVQVRIVPQEEFARQKMGELDGLLLDRLDIETDIYQPAPELLQADGNESPVEETLVSHLLKSNCLVTGQPDWGSVQIRYVGAPINQEGLLKYLISFREHNEFHEQCVERIFTDILRQCRPVKLAVYARYTRRGGLDINPFRTNTNTPWPDNLRNARQ

SEQ ID NO: 49109 - protein, 278 aa, Ralstonia mannitolilytica
  REGION 1..278: note = tr|A0A160BUC6|A0A160BUC6_9RALS NADPH-dependent 7-cyano-7-deazaguanine reductase OS=Ralstonia mannitolilytica OX=105219 GN=queF PE=3 SV=1
MHNQPEHSPLGKTSAYKTEYDPSLLFPIPRQGKRDEIGLPAGTALPFFGVDLWNLYELSWLNLKGKPQVAVGTVIVPADSPNIVESKSFKLYLNSFNQTKVASYEALQQLVHHDLSEACGAPVQVRIVPQEEFARQKMGELDGLLLDRLDIETDIYQPAPELLQADENESPVEETLVSHLLKSNCLVTGQPDWGSVQIRYVGAPINQEGLLKYLISFREHNEFHEQCVERIFTDILRQCRPVKLAVYARYTRRGGLDINPFRTNTNTPWPDNLRNARQ

SEQ ID NO: 49110 - protein, 278 aa, Ralstonia pickettii
  REGION 1..278: note = tr|R0CHF7|R0CHF7_RALPI NADPH-dependent 7-cyano-7-deazaguanine reductase OS=Ralstonia pickettii OR214 OX=1264675 GN=queF PE=3 SV=1
MSNQPEHSPLGKTSAYKTEYDPHLLFPIPRQGKRDEIGLAAGTPLPFFGVDLWNLYELSWLNLRGKPQVALGTVIVPADSPNIVESKSFKLYLNSFNQTKVASHEALQQLIHHDLSEACGAPVQVRIVTQEEFARQKMGELDGLLLDRLDIETDVYQPTPELLHADEEESPVEETLVSHLLKSNCLVTGQPDWGSVQIRYVGAPINQEALLKYLISFREHNEFHEQCVERIFTDILRQCRPVKLAVYARYTRRGGLDINPFRTNYNTPWPDNLRNARQ

SEQ ID NO: 49111 - protein, 278 aa, Ralstonia pickettii
  REGION 1..278: note = tr|C6BC11|C6BC11_RALP1 NADPH-dependent 7-cyano-7-deazaguanine reductase OS=Ralstonia pickettii (strain 12D) OX=428406 GN=queF PE=3 SV=1
MSNQPEHSPLGKTSAYKTEYDPSLLFPIPRQGKRDEIGLAAGTPLPFFGVDLWNLYELSWLNLRGKPQVALGTVIVPADSPNIVESKSFKLYLNSFNQTKVASHEALQQLIHHDLSEACGAPVQVRIVTQEEFARQKMGELDGLLLDRLDIETDVYQPTPELLHADEEESPVEETLVSHLLKSNCLVTGQPDWGSVQIRYVGAPINQEALLKYLISFREHNEFHEQCVERIFTDILRQCHPVKLAVYARYTRRGGLDINPFRTNYNTPWPDNLRNARQ

SEQ ID NO: 49112 - protein, 277 aa, unidentified
  source 1..277: note = Ralstonia pseudosolanacearum
  REGION 1..277: note = tr|A0A454TW33|A0A454TW33_9RALS NADPH-dependent 7-cyano-7-deazaguanine reductase OS=Ralstonia pseudosolanacearum OX=1310165 GN=queF PE=3 SV=1
MSHPEHSPLGKASAYKTQYDPSLLFPIPRQAKRDEIGLAAGSALPFFGIDLWNLYELSWLNLKGKPQVAIGTVIVPADSPNIVESKSFKLYLNAFNQTKVASSEALQQLIHHDLSEACGAPVQVRIVPQEEFARQKMGELAGLSLDRLDVETDVYQPTPGLLHADQDESPVEEVLVSHLLKSNCLVTGQPDWGSVQIRYVGAPINQEGLLKYLISFREHNEFHEQCVERIFMDIQRQCRPVKLAVYARYTRRGGLDINPFRTNFNTPWPDNLRNARQ

SEQ ID NO: 49113 - protein, 277 aa, unidentified
  source 1..277: note = Ralstonia pseudosolanacearum
  REGION 1..277: note = tr|A0A223GJ94|A0A223GJ94_9RALS NADPH-dependent 7-cyano-7-deazaguanine reductase OS=Ralstonia pseudosolanacearum OX=1310165 GN=queF PE=3 SV=1
MSHPEHSPLGKASAYKTQYDPSLLFPIPRQAKRDEIGLAAGSALPFFGIDLWNLYELSWLNLKGKPQVAIGTVIVPADSPNIVESKSFKLYLNTFNQTKVASSEALQQLIHHDLSEACGAPVQVRIVPQEEFARQKMGELAGLSLDRLDVETDVYQPTPGLLHADQDESPVEEVLVSHLLKSNCLVTGQPDWGSVQIRYVGAPINQEGLLKYLISFREHNEFHEQCVERIFMDIQRQCRPVKLAVYARYTRRGGLDINPFRTNFNTPWPDNLRNARQ

SEQ ID NO: 49114 - protein, 277 aa, Ralstonia solanacearum; identical to SEQ ID NO: 49113
  REGION 1..277: note = sp|Q8Y288|QUEF_RALSO NADPH-dependent 7-cyano-7-deazaguanine reductase OS=Ralstonia solanacearum (strain GMI1000) OX=267608 GN=queF PE=3 SV=1

SEQ ID NO: 49115 - protein, 277 aa, Ralstonia solanacearum
  REGION 1..277: note = tr|A0A0S4TQ96|A0A0S4TQ96_RALSL NADPH-dependent 7-cyano-7-deazaguanine reductase OS=Ralstonia solanacearum; OX = 305 GN=queF PE=3 SV=1
MSHPEHSPLGKASAYKTQYDPSLLFPIPRQAKRDEIGLAAGSALPFFGIDLWNLYELSWLNLKGKPQVAIGTVIVPADSPNIVESKSFKLYLNSFNQTKVASSEALQQLIHHDLSEACGAPVQVRIVPQEEFARQKMGELAGLSLDRLDVETDVYQPTPELLRADQDESPVEEVLVSHLLKSNCLVTGQPDWGSVQIRYVGAPISQEGLLKYLISFREHNEFHEQCVERIFMDIQRQCRPVKLAVYARYTRRGGLDINPFRTNFNTPWPDNLRNARQ

SEQ ID NO: 49116 - protein, 278 aa, Ralstonia sp.
  REGION 1..278: note = tr|A0A0B1YA21|A0A0B1YA21_9RALS NADPH-dependent 7-cyano-7-deazaguanine reductase OS=Ralstonia sp. A12; OX = 1217052 GN=queF PE=3 SV=1
MSNQPEHSPLGKTSAYITQYDPSLLFPIPRQGKRDEIGLPAGSALPFFGVDLWNLYELSWLNLRGKPQVAIGTVIVPADSPNIIESKSFKLYLNSFNQTKVASYEALQQLIHHDLSEACGAPVQVRIVPHEEFARQKMGELDGLLLDRLDIETDIYQPTPELLQVNEEESPVEESLVSHLLKSNCLVTGQPDWGSVQIRYVGAPINQEGLLKYLISFREHNEFHEQCVERIFTDILRQCRPVKLAVYARYTRRGGLDINPFRTNYNTPWPDNMRNARQ

SEQ ID NO: 49117 - protein, 278 aa, Ralstonia sp.
  REGION 1..278: note = tr|A0A0J9GHT0|A0A0J9GHT0_9RALS NADPH-dependent 7-cyano-7-deazaguanine reductase OS=Ralstonia sp. MD27; OX = 1676617 GN=queF PE=3 SV=1
MSNQPEHSPLGKTSAYKTEYDPSLLFPIPRQGKRDEIGLPTGSALPFFGVDLWNLYELSWLNLRGKPQVAIGTVIVPADSPNIIESKSFKLYLNSFNQTKVASYEALQQLIHHDLSEACGAPVQVRIVPQEEFARQKMHELDGLLLDRLDIETDVYQPTPELLHADEEESPVEETLVSHLLKSNCLVTGQPDWGSVQIRYVGAPINQEALLKYLISFREHNEFHEQCVERIFTDILRQCRPVKLAVYARYTRRGGLDINPFRTNYNTPWPDNLRNARQ

SEQ ID NO: 49118 - protein, 277 aa, Ralstonia syzygii
  REGION 1..277: note = tr|G3A4H2|G3A4H2_9RALS NADPH-dependent 7-cyano-7-deazaguanine reductase OS=Ralstonia syzygii R24; OX = 907261 GN=queF PE=3 SV=1
MSHPEHSPLGKVSAYKTQYDPSLLFPIPRQAKRDEIGLAAGSALPFFGVDLWNLYELSWLNLKGKPQVAIGTVIVPADSPNLVESKSFKLYLNSFNQTKVASSEALQQLIHHDLSEACGAPVQVRIVPREEFGRQKMGELEGLSLDRLDIETDIYQPTPGLLHADLDESPVEEVLVSHLLKSNCLVTGQPDWGSVQIRYVGAPINQEGLLKYLVSFREHNEFHEQCVERIFMDIQHQCQPVKLAVYARYTRRGGLDINPFRTNFNTPWPDNLRNARQ

SEQ ID NO: 49119 - protein, 283 aa, Ramlibacter henchirensis
  REGION 1..283: note = tr|A0A4Z0C1F6|A0A4Z0C1F6_9BURK NADPH-dependent 7-cyano-7-deazaguanine reductase OS=Ramlibacter henchirensis OX=204072 GN=queF PE=3 SV=1
MQDNTPGGSLLGKPAAYRDQYAPELLYPIPRLDKRQELGIDGQPPFFGADLWTAYELSWLTPRGKPVVAIAHVTVPCETPNIVESKSFKLYLNSFSNTRFGSAGEVLARLRGDLSEAVWRNSGSSGSVGVRLLAPDVFDQEQVHELDGFNLDRLDIECTHYEPEPSLLTAAFDEQPVEEVLVSNLLKSNCLVTGQPDWGAVQIRYSGPQIDQGGLLRYLVSFRNHNEFHEQCVERIFMDIRRRCRPAKLAVYARYTRRGGLDINPFRTSHPLALPANIRTARQ

SEQ ID NO: 49120 - protein, 282 aa, unidentified
  source 1..282: note = Ramlibacter rhizophilus
  REGION 1..282: note = tr|A0A4Z0BQL8|A0A4Z0BQL8_9BURK NADPH-dependent 7-cyano-7-deazaguanine reductase OS=Ramlibacter rhizophilus OX=1781167 GN=queF PE=3 SV=1
MSNSPEQSLLGKPAAYADRYDASLLYPLSRAGHRAELGIGTRPPFFGADLWTAYELSWLTPRGKPQVALAHVTIPCESPNLVESKSFKLYLNSFTNTPFASADAVRDRIRADVSEAVWRGAPAASTVGVRLLMPEQFDLELVSELDGVNLDRLDIECTQYTPAPELLTAAFDEQPVEEVLTSNLLKSNCLVTGQPDWGSVQIRYSGPQIDQGQLLRYLVSFRNHNEFHEQCVERIFMDIRERCRPVKLSVYARYTRRGGLDINPFRTSHPGGVPANVRTARQ

SEQ ID NO: 49121 - protein, 281 aa, Ramlibacter sp.
  REGION 1..281: note = tr|A0A4Y7BBJ3|A0A4Y7BBJ3_9BURK NADPH-dependent 7-cyano-7-deazaguanine reductase OS=Ramlibacter sp. WS9; OX = 1882741 GN=queF PE=3 SV=1
MNTPEQSQLGKPAPYIDHYDASLLFPISRQPKRVELGLHGAVPFFGADLWTAFELSWLTPRGKPQVAIVHVTVPCETPNIVESKSFKLYLNSFTNTAFASADEVRDRIRADISEAAWRGAPAQSSVGVRILMPDQFDKEPVHELDGLNLDRLDIECTQYTPAPELLTAAFDEKPVDEVLTSNLLKSNCLVTGQPDWGSVQIRYSGPQIDQGGLLRYLVSFRNHNEFHEQCVERIFMDVWKQCKPVKLAVYARYTRRGGLDINPFRTSHPMAIPPNIRTARQ

SEQ ID NO: 49122 - protein, 282 aa, Ramlibacter sp.
  REGION 1..282: note = tr|A0A4Z0BXF5|A0A4Z0BXF5_9BURK NADPH-dependent 7-cyano-7-deazaguanine reductase OS=Ramlibacter sp. 18x22-1 OX=2530451 GN=queF PE=3 SV=1
MDNVPEDSLLGKPAPYRDEYAPDLLYPIPRAPKRHEIGVAGQPPFFGADLWTAYELSWLTPRGKPAVAIAHFTVPCETPNIVESKSFKLYLNSFTNTRFAGAEEVSARLRADVSEAVWRGGAGSASVGVRLVSPDAFDQQQVHEMDGLNVDRLDIECTEYTPNPELLTAALDEKPVDETLVSHLLKSNCLVTGQPDWGSVQVRYSGPQIDQGGLLRYLVSFRNHHEFHEQCVERIFMDIRRRCRPTKLAVYARYTRRGGLDINPLRTSHPLPLPANVRTARQ

SEQ ID NO: 49123 - protein, 283 aa, Ramlibacter tataouinensis
  REGION 1..283: note = tr|F5Y6C5|F5Y6C5_RAMTT NADPH-dependent 7-cyano-7-deazaguanine reductase OS=Ramlibacter tataouinensis (strain ATCC BAA-407 / DSM 14655 / LMG 21543 / TTB310) OX=365046GN=queF PE=3 SV=1
MTRTPEQSLLGKAADYRDRYDASLLFPIARAPKREELGLAPDTIPFFGADLWTAFELSWLTPRGKPQVAIAHVTVPCETPNIVESKSFKLYLGSFSNTPFASADEVRERIRADVSEAVWRGAPAASSVGVRLLTPELFDREPIHELDGLNLDRLDIECSQYTPAPELLTAAFDEQPVQEVLVSQLLKSNCLVTGQPDWGSVQIRYSGPQIDQAGLLRYLVSFRNHNEFHEQCVERIFMDIRRRCRPVKLSVYARYTRRGGLDINPFRTSHPGALPPNVRTARQ

SEQ ID NO: 49124 - protein, 281 aa, Ramlibacter tataouinensis
  REGION 1..281: note = tr|A0A127JQD9|A0A127JQD9_9BURK NADPH-dependent 7-cyano-7-deazaguanine reductase OS=Ramlibacter tataouinensis OX=94132 GN=queF PE=3 SV=1
MTTPEQSQLGKPSAYADSYDPALLFPISREPKRLELGLRQPLPFSGADLWTAFELSWLTPRGKPHVAIAHLTVPCETPNIVESKSFKLYLNSFSNTSFGSADEVRERIRADVSEAVWRGAPTRATVGVRLLGPEQFDAEPIHELDGLCLDRLDIECSQYTPAPELLTAAFDEQPVDEVLTSNLLKSNCLVTGQPDWGSVQIRYCGPQIDQGGLLRYLVSFRNHNEFHEQCVERIFVDLWKRCQPAKLAVYARYTRRGGLDINPFRSSHPMAAPRNVRTARQ

SEQ ID NO: 49125 - protein, 281 aa, unidentified
  source 1..281: note = Raoultella electrica
  REGION 1..281: note = tr|A0A514EMC8|A0A514EMC8_9ENTR NADPH-dependent 7-cyano-7-deazaguanine reductase OS=Raoultella electrica; OX = 1259973 GN=queF PE=3 SV=1
MSSYDNHQALAGLTLGKSTDYRDTYDASLLQGVPRSLNRDPLGLHADNLPFHGGDIWTLYELSWLNAKGLPQVAVGHVELNDTTVNLVESKSFKLYLNSFNQTRFASWHEVQATLTHDLSACAQGEVTVSLYRLDELEGQPVAHLHGTCIDFQDIEIDNYQFSADYLQDAASGKVVEETLVSHLLKSNCLITHQPDWGSVQIQYRGSRIDREKLLRYLVSFRHHNEFHEQCVERIFNDIQRFCQPETLSVYARYTRRGGLDINPWRSNTDFVPATGRLARQ

SEQ ID NO: 49126 - protein, 281 aa, Raoultella ornithinolytica
  REGION 1..281: note = tr|A0A4S3RQA2|A0A4S3RQA2_RAOOR NADPH-dependent 7-cyano-7-deazaguanine reductase OS=Raoultella ornithinolytica OX=54291 GN=queF PE=3 SV=1
MSSYDNHQALAGLTLGKSTDYRDTYDASLLQGVPRSLNRDPLGLHADNLPFHGADIWTLYELSWLNAKGLPQVAVGHVELNDTTVNLVESKSFKLYLNSFNQTRFADWQEVKATLTRDLSACAEGEVQVSLYRLDELEGQPVAHLHGACIDDQDIEIDNYQFSADYLQDAASGKVVEETLVSHLLKSNCLITHQPDWGSVQIQYRGAKIDREKLLRYLVSFRHHNEFHEQCVERIFNDILRFCQPEALSVYARYTRRGGLDINPWRSNTDFVPAIGRLARQ

SEQ ID NO: 49127 - protein, 281 aa, Raoultella ornithinolytica
  REGION 1..281: note = tr|A0A1Y6GCQ4|A0A1Y6GCQ4_RAOOR NADPH-dependent 7-cyano-7-deazaguanine reductase OS=Raoultella ornithinolytica OX=54291 GN=queF PE=3 SV=1
MSSYDNHQALAGLTLGKSTDYRDTYDASLLQGVPRSLNRDPLGLHADNLPFHGADIWTLYELSWLNAKGLPQVAVGHVELNDTTVNLVESKSFKLYLNSFNQTRFADWQEVEATLTRDLSACAEGEVQVSLYRLDELEGQPVAHLHGACIDDQDIEIDNYQFSADYLQDAANGKVVEETLVSHLLKSNCLITHQPDWGSVQIQYRGAKIDREKLLRYLVSFRHHNEFHEQCVERIFNDILRFCQPEALSVYARYTRRGGLDINPWRSNTDFVPAIGRLARQ

SEQ ID NO: 49128 - protein, 281 aa, Raoultella planticola
  REGION 1..281: note = tr|A0A377T358|A0A377T358_RAOPL NADPH-dependent 7-cyano-7-deazaguanine reductase OS=Raoultella planticola; OX = 575 GN=queF PE=3 SV=1
MSSYDNHQALAGLTLGKSTDYRDTYDASLLQGVPRSLNRDPLGLHADNLPFHGADIWTLYELSWLNAKGLPQVAVGHVELNDTTVNLVESKSFKLYLNSFNQTRFADWQEVEATLTRDLSACAEGEVQVSLYRLDELEGQPVAHLHGACIDDQDIEIDNYQFSADYLQDAASGKVVEETLVSHLLKSNCLITHQPDWGSVQIQYRGAKIDREKLLRYLVSFRHHNEFHEQCVERIFNDILRFCQPEALSVYARYTRRGGLDINPWRSNTDFVPAIGRLARQ

SEQ ID NO: 49129 - protein, 269 aa, Raoultella planticola
  REGION 1..269: note = tr|A0A0D8MH26|A0A0D8MH26_RAOPL NADPH-dependent 7-cyano-7-deazaguanine reductase (Fragment) OS=Raoultella planticola OX=575 GN=queF PE=3 SV=1
MSSYDNHQALAGLTLGKSTDYRDTYDASLLQGVPRSLNRDPLGLHADNLPFHGADIWTLYELSWLNAKGLPQVAVGHVELNDTTVNLVESKSFKLYLNSFNQTRFADWQEVEATLTRDLSACAEGEVQVSLYRLDELEGQPVAHLHGACIDDQDIEIDNYQFSADYLQDAASGKVVEETLVSHLLKSNCLITHQPDWGSVQIQYRGAKIDREKLLRYLVSFRHHNEFHEQCVERIFNDILRFCQPEALSVYARYTRRGGLDINPWRSNT

SEQ ID NO: 49130 - protein, 281 aa, Raoultella sp.
  REGION 1..281: note = tr|A0A509BND3|A0A509BND3_9ENTR NADPH-dependent 7-cyano-7-deazaguanine reductase OS=Raoultella sp. NCTC 9189 OX=2583577 GN=queF PE=3 SV=1
MSSYENHQALAGLTLGKSTDYRDTYDASLLQGVPRSLNRDPLGLHADSLPFHGGDIWTLYELSWLNAKGLPQVAVGHVELSDTSVNLVESKSFKLYLNSFNQTRFADWQEVQATLSRDLSACAQGEVTVALYRLDELEGQPVAHLHGTCIDDQDIEVDNYEFSTDYLLDAAGDKIVEETLVSHLLKSNCLITHQPDWGSVQIQYRGPKIDREKLLRYLVSFRHHNEFHEQCVERIFNDLLRFCRPQSLSVYARYTRRGGLDINPWRSNADFVPAIGRLARQ

SEQ ID NO: 49131 - protein, 281 aa, Raoultella sp.
  REGION 1..281: note = tr|A0A4R3ZDN6|A0A4R3ZDN6_9ENTR NADPH-dependent 7-cyano-7-deazaguanine reductase OS=Raoultella sp. BIGb0138 OX=2485115 GN=queF PE=3 SV=1
MSSYDNHQALSGLTLGKSTDYRDTYDASLLQGVPRSLNRDPLGLRADNLPFHGGDIWTLYELSWLNAKGLPQVAVGHVELSDTSVNLVESKSFKLYLNSFNQTRFASWQEVQATLTRDLSACAQGEVSVSLYRLDELEGQPVAHLHGTCIDDQDIAIDNYEFSTDYLQDAAGEKIVEETLVSHLLKSNCLITHQPDWGSVQIQYRGPKIDREKLLRYLVSFRHHNEFHEQCVERIFNDLLRFCQPQSLSVYARYTRRGGLDINPWRSNAEFVPSIARLARQ

SEQ ID NO: 49132 - protein, 122 aa, Raoultella terrigena
  REGION 1..122: note = tr|A0A3P8K8I2|A0A3P8K8I2_RAOTE NADPH-dependent 7-cyano-7-deazaguanine reductase OS=Raoultella terrigena; OX = 577 GN=queF PE=4 SV=1
MEFSTDYLLDAAGDKIVEETLVSHLLKSNCLITHQPDWGSVQIQYRGPKIDREKLLRYLISFRHHNEFHEQCVERIFNDLLRFCRPQSLSVYARYTRRGGLDINPWRSNADFVPAIARLARQ

SEQ ID NO: 49133 - protein, 192 aa, Raoultella terrigena
  REGION 1..192: note = tr|A0A4U9D2C6|A0A4U9D2C6_RAOTE NADPH-dependent 7-cyano-7-deazaguanine reductase OS=Raoultella terrigena; OX = 577 GN=queF PE=4 SV=1
MPRSLNRDPLGLHADSLPFHGGDIWTLYELSWLNAKGLPQVAVGHVELSDTSVNLVESKSFKLYLNSFNQTRFADWQEVQATLSRDLSACAQGEVTVALYRLDELEGQPVAHLHGTCIDDQDIEVDNYEFSTDYLLDAAGDKIVEETLVSPSAEIQLPDHPSAGLGFGANPVSRAKNRSRKAAALPGLVPPP

SEQ ID NO: 49134 - protein, 142 aa, unidentified; identical to SEQ ID NO: 45555
  source 1..142: note = Raphidiopsis brookii
  REGION 1..142: note = tr|D4TT55|D4TT55_9CYAN NADPH-dependent 7-cyano-7-deazaguanine reductase OS=Raphidiopsis brookii D9 OX=533247 GN=queF PE=3 SV=1

SEQ ID NO: 49135 - protein, 141 aa, unidentified
  source 1..141: note = Raphidiopsis curvata
  REGION 1..141: note = tr|A0A1Z4VCL6|A0A1Z4VCL6_9CYAN NADPH-dependent 7-cyano-7-deazaguanine reductase OS=Raphidiopsis curvata NIES-932 OX=1973482 GN=queF PE=3 SV=1
MSHSVSNILPSENPVKEVKYGEREIEEGKLITFPNPRVGREYTIDITLPEFTCKCPFSGYPDFATIHITYIPDQRVVELKALKLYINSYRDKYISHEEVTNQILDDMVIACAPLEMTVKADFSPRGNVHMVVEVNYKKGAG

SEQ ID NO: 49136 - protein, 275 aa, Reinekea blandensis
  REGION 1..275: note = tr|A4BGN8|A4BGN8_9GAMM NADPH-dependent 7-cyano-7-deazaguanine reductase OS=Reinekea blandensis MED297 OX=314283 GN=queF PE=3 SV=1
MALPEQSPLGKQSAYVDTYTPSLLFPIPRQDKRDEIGVSGDLPFQGVDIWNAYELSWLNQRGKPVVALAEFFIPADSKNIIESKSFKLYLNTFNQTRFASARDVQDRLTEDLSTAAQAPVKVTVVELGQAGHSADIYQWNAQCIDDLDIDVTQYHADPSILSIEDGEPVHERLCSHLLKSNCLVTGQPDWGSVLIEYRGPKINHDALLAYLISFRQHNEFHEQCVERIFVDLMAQCDCQELTVYARYVRRGGLDINPYRSNRPDAYPENERLVRQ

SEQ ID NO: 49137 - protein, 273 aa, unidentified
  source 1..273: note = Reinekea forsetii
  REGION 1..273: note = tr|A0A2K8KU73|A0A2K8KU73_9GAMM NADPH-dependent 7-cyano-7-deazaguanine reductase OS=Reinekea forsetii; OX = 1336806 GN=queF PE=3 SV=1
MKPEYSPLGKSSAYADQYDASLLFPIPRLDKRLELGLTTDLPFSGVDIWNAYELSWLNARGKPRVALAEFSVPAGSPNIVESKSLKLYLNSFNQTRFDDDEQVQQRLVQDLSSAANSPVQVKVIALNAEPSSLVFQSDSAECIDDLDIEIENYQPSPGGLVVSDTVVSEQLVSHLLKSNCLVTGQPDWGSVYIDYTGPQIDRATLLRYLISFRQHNEFHEQCVERIFVDLKSACQCDKLTVYARYIRRGGLDINPFRSDDPSAVVNNIRHIRQ

SEQ ID NO: 49138 - protein, 275 aa, Reinekea marinisedimentorum
  REGION 1..275: note = tr|A0A4R3I489|A0A4R3I489_9GAMM NADPH-dependent 7-cyano-7-deazaguanine reductase OS=Reinekea marinisedimentorum OX=230495 GN=queF PE=3 SV=1
MNSPESSPLGKASSYKDTYDASLLFPIARQEKRTEIGVDSAELPFAGVDVWNGYELSWLNPKGKPVVAIAVFRIPAESPKLIESKSFKLYLNSFNQSHFDSIDEVQARLAADLTAAAEAAVGVDVFKLDQAAEHEQVSAMAAECIDDLDVQITGYQTDASLLECSDEIVSEKLCSHLLKSNCLVTGQPDWGSVFIEYTGPKINRESLLKYLISFRQHNEFHEQCVERIFVDLKAQCRCQTLTVYARYVRRGGLDINPFRSDDAQAEVNNIRLVRQ

SEQ ID NO: 49139 - protein, 275 aa, Reinekea sp.
  REGION 1..275: note = tr|A0A5C8ZDG6|A0A5C8ZDG6_9GAMM NADPH-dependent 7-cyano-7-deazaguanine reductase OS=Reinekea sp. SSH23; OX = 2593301 GN=queF PE=3 SV=1
MNSPESSPLGKTSRYIDQYDASLLFPIARVAKREELGLTDRDLPFHGVDIWNGYELSWLNLKGKPMVAIAVFYIPASSVNIIESKSFKLYLNSFNQSRFESLNVVSSLLAEDLTKAVGAEVKVALHSLNKAVTHEQIHQWQADCIDDLDIEITDYQTDASLLRCSDEQVQESLCSHLLKSNCLVTGQPDWGSVYIEYSGAKIDRESLLKYLISFRQHNEFHEQCVERIFVDLQQHCQCKSLTVYARYVRRGGLDINPFRSNQADAIVNNLRMVRQ

SEQ ID NO: 49140 - protein, 152 aa, unidentified
  source 1..152: note = Reyranella soli
  REGION 1..152: note = tr|A0A512NIL2|A0A512NIL2_9PROT NADPH-dependent 7-cyano-7-deazaguanine reductase OS=Reyranella soli; OX = 1230389 GN=queF PE=3 SV=1
MTKYPKLSQLGRPAILPDSPEKAVLETVPNPQPRALYLVRFTAPEFTTLCPVTGQPDFAHLVIDYAPRAKLVESKSLKLYLGSFRNHADFHEACTLAIGMRLEKVLAPRWLRIGGYWYPRGGMPIDVFWQTGQPPKGLWLPDPGVQPYRGRG

SEQ ID NO: 49141 - protein, 152 aa, Reyranella sp.
  REGION 1..152: note = tr|A0A5C5ST45|A0A5C5ST45_9PROT NADPH-dependent 7-cyano-7-deazaguanine reductase OS=Reyranella sp. CPCC 100927 OX=2599616 GN=queF PE=3 SV=1
MAKYKHLQQLGQATSLPASPDQAVLETVPNPHPRTLYLVRFTQPEFTSLCPMTGQPDFAHLVIDYAPAAKLIESKSLKLFLGSFRNHGAFHEDCTMLIAKRLVAALKPKWLRIGGYWYPRGGMPIDVFWQTGAPPRGLWLPDQGVAPYRGRG

SEQ ID NO: 49142 - protein, 91 aa, Reyranella sp.
  REGION 1..91: note = tr|A0A521LXD7|A0A521LXD7_9PROT NADPH-dependent 7-cyano-7-deazaguanine reductase (Fragment) OS=Reyranella sp. OX=1929291 GN=EPO67_03950 PE=3 SV=1
VIDYVPRARLVESKSLKLYLNSFRSEAAFHEDCTVGIAKRLVKELAPRWLRIAGYWYPRGGMPIDVFWQTAAPPKGLWLPDTGVAPYRGRG

SEQ ID NO: 49143 - protein, 285 aa, Rheinheimera nanhaiensis
  REGION 1..285: note = tr|I1E1S7|I1E1S7_9GAMM NADPH-dependent 7-cyano-7-deazaguanine reductase OS=Rheinheimera nanhaiensis E407-8 OX=562729 GN=queF PE=3 SV=1
MTATEMIKGHADALAGLSLGKVTAYADQYDASLLQAVPRSLGRDDIGLDAAALPFCGQDIWHGYELSWLNAKGKPMVALATFVVPFDSANLIESKSFKLYLNSFNQSRFADLGQVYQHLQRDLSACAGKPVKVSLHNVNEIMAFQPTWIPGRCIDDLDIEITQYQYDAALLQLQPGGDKVEEKLNSHLLKSNCLITSQPDWASVFIHYRGAAIDHASLLRYLISFRSHNEFHEQCVERIFTDIWQRCQPEFLAVYARYTRRGGLDINPWRASEPCNPPAIRLSRQ

SEQ ID NO: 49144 - protein, 285 aa, Rheinheimera pacifica
  REGION 1..285: note = tr|A0A1H6MWI0|A0A1H6MWI0_9GAMM NADPH-dependent 7-cyano-7-deazaguanine reductase OS=Rheinheimera pacifica; OX = 173990 GN=queF PE=3 SV=1
MTKTDMTSSHSELLAGLSLGKVTAYADQYDASLLQAVPRSLGRDDIGLASAALPFVGQDIWHGYELSWLNAKGKPMVALATFVVPYDSANLIESKSFKLYLNSFNQSRFADLGQVYQHLQRDLSACAGKTVKVSLHNVNEIMAFQPTWIPGRCIDDLDIEITQYHYDASLLQTQTDADIVEEKLHSHLLKSNCLITSQPDWASVYIHYRGKALDHAALLRYLISFRSHNEFHEQCVERIFSDIWSHCQPSFLCVYARYTRRGGLDINPWRASEPCTPPAIRLSRQ

SEQ ID NO: 49145 - protein, 280 aa, unidentified
  source 1..280: note = Rheinheimera salexigens
  REGION 1..280: note = tr|A0A1E7Q8S7|A0A1E7Q8S7_9GAMM NADPH-dependent 7-cyano-7-deazaguanine reductase OS=Rheinheimera salexigens OX=1628148 GN=queF PE=3 SV=1
MSNDPSEILASLSLGKATDYIDQYDASLLQGVPRSMGRKAIGLNSTDLPFVGHDTWHGYELSWLNHKGKPQVALATFTVPFDSVNLIESKSFKLYLNSFNQSRFADLGQVYQHLQRDLSACAGAAVAVNLHNVNEITTFQPTWIPGHCLDDQDIAIDQYQYDASLLHTQKDADIVAEKLHSHLLKSNCLITSQPDWASIYIDYRGVQIDHESLLRYLISFRNHNEFHEQCVERIFLDIWSRCQPQYLAVYARYTRRGGLDINPWRCSEQRSPPAIRLSRQ

SEQ ID NO: 49146 - protein, 279 aa, Rheinheimera sp.
  REGION 1..279: note = tr|A0A3S2UJ90|A0A3S2UJ90_9GAMM NADPH-dependent 7-cyano-7-deazaguanine reductase OS=Rheinheimera sp. YQF-1; OX = 2499626 GN=queF PE=3 SV=1
MTKIQTEQLAGLTLGQATAYIDHYSPELLQAVPRTLGRQAIGLGEELPFVGQDTWHGYELSWLTPKGKPMVALATFVVPFNTPNLIESKSFKLYLNSLNQSKFADISQLYRTMKTDLSACAGGPVQVTLHNVNELTAFQPTWLPGRCIDDLDIEVEHYDYKPELLQLNPTGALVDEKLHSHLLKSNCLITSQPDWASVYIHYKGKAIDHASLLKYLISFRSHNEFHEQCVERIYLDLWKLCQPEFLMVYARYTRRGGLDINPLRSSEPCAQPNLRLTRQ

SEQ ID NO: 49147 - protein, 280 aa, Rheinheimera sp.
  REGION 1..280: note = tr|A0A486XGZ0|A0A486XGZ0_9GAMM NADPH-dependent 7-cyano-7-deazaguanine reductase OS=Rheinheimera sp. BAL341 OX=1708203 GN=queF PE=3 SV=1
MTSRHSDALTGLSLGKITAYADKYDASLLQAVPRSLGRDDIGLTASALPFVGHDIWHGYELSWLNAKGKPMVALATFVVPFDSANLIESKSFKLYLNSFNQSRFADLGQVYQHLQRDLSACAGKQVKVSLHNVNEIMAFQPTWIPGRCIDDLDIEIEHYQYDASLLQLQQDGDRVEEKLHSHLLKSNCLITSQPDWASVYLHYRGPAIDHASLLRYLISFRSHNEFHEQCVERIFNDIWSRCQPEFLAVYARYTRRGGLDINPWRSSEPVSPPPIRLSRQ

SEQ ID NO: 49148 - protein, 281 aa, unidentified
  source 1..281: note = Rheinheimera tuosuensis
  REGION 1..281: note = tr|A0A285J481|A0A285J481_9GAMM NADPH-dependent 7-cyano-7-deazaguanine reductase OS=Rheinheimera tuosuensis OX=1323745 GN=queF PE=3 SV=1
MTKSHSEIMAGLSLGKTTAYAEQYDPSLLQPVPRILGRDSLGLEHSATLPFIGEDIWHGYELSWLNAKGKPMVALATFVVPVTSANLIESKSFKLYLNSFNQSRFADLRQVYQALQRDLSGCAGSPVQVTLHNVNEIMAFQPTWIPGHCIDDLDISIDSYQYDPSLLQLADAAEAIDEKVHSHLLKSNCLITSQPDWASVYIHYRGPAIDHAALLRYLISFRSHNEFHEQCIERIFLDIWQRCNPEYLLVYARYTRRGGLDINPVRASASYKLPNLRLSRQ

SEQ ID NO: 49149 - protein, 147 aa, unidentified
  source 1..147: note = Rhizobacter gummiphilus
  REGION 1..147: note = tr|A0A1W6LHR9|A0A1W6LHR9_9BURK NADPH-dependent 7-cyano-7-deazaguanine reductase OS=Rhizobacter gummiphilus OX=946333 GN=queF PE=3 SV=1
MGHREKPATPPSAPSKQLDVFANPTPKRDYAIQFQVPEFTCHCPLTGQPDFAHFTIDMIADKLCVELKSLKMYMWSYRHEGAFHEKVTNDILDDIVRATDPRFIRITAKWYVRGGIYTNVVAEHRKKGWKPQPVVVMPAHTVATGLA

SEQ ID NO: 49150 - protein, 147 aa, Rhizobacter sp.
  REGION 1..147: note = tr|A0A0Q6WGD8|A0A0Q6WGD8_9BURK NADPH-dependent 7-cyano-7-deazaguanine reductase OS=Rhizobacter sp. Root1221 OX=1736433 GN=queF PE=3 SV=1
MGQREKPAKPPSVPSKQIDVFPNPTPKRDYAIQFQVPEFTCHCPLTGQPDFAHFTIDMIADKLCVELKSLKMYMWSYRHEGAFHEKVTNDILDDIVRATDPRFIRITAKWYVRGGIYTNVVAEHRKKGWKPQPVVVMPAHAPATGLA

SEQ ID NO: 49151 - protein, 157 aa, Rhizobacter sp.
  REGION 1..157: note = tr|A0A0Q7AMF1|A0A0Q7AMF1_9BURK NADPH-dependent 7-cyano-7-deazaguanine reductase OS=Rhizobacter sp. Root404 OX=1736528 GN=queF PE=3 SV=1
MAKTATPKTAPSQRQKPANPPSAPSKELQVFPNPTPQRDYVIQFQIPEFTCHCPLTGQPDFAHFTIDMVADRLCVELKSLKMYMWSYRNEGAFHEKVTNDIVDDIVRATDPRFIRITAKWYVRGGIYTNVVAEHRKKGWKPEPVVQLPRHDAATGLL

SEQ ID NO: 49152 - protein, 154 aa, unidentified
  source 1..154: note = Rhizobiaceae bacterium
  REGION 1..154: note = tr|A0A522S2J4|A0A522S2J4_9RHIZ NADPH-dependent 7-cyano-7-deazaguanine reductase OS=Rhizobiaceae bacterium; OX = 1913961 GN=queF PE=3 SV=1
MTKTGNLTQLGKTVSQPASPQEAVLETVPFAAGGDGAPAIVRFTCPEFTSLCPVTGQPDFAHIVIDYAPDRLLVESKSLKLFLTSFRNHGAFHEECTVTIGKRIVAAAKPLWLRIGGYWYPRGGIPIDVFWQTGAPPEGAWLPDTGVPPYRGRG

SEQ ID NO: 49153 - protein, 154 aa, unidentified
  source 1..154: note = Rhizobiaceae bacterium
  REGION 1..154: note = tr|A0A4Q3HVB4|A0A4Q3HVB4_9RHIZ NADPH-dependent 7-cyano-7-deazaguanine reductase OS=Rhizobiaceae bacterium; OX = 1913961 GN=queF PE=3 SV=1
MTMTDVSGLSQLGNQVEAPTSPETAVLEKVPNGNQGTDYVVRFTAPEFTSLCPMTGQPDFAHIVIDYIPDGFLVESKSLKLFLHAFRNHGAFHEDCSVYIGKRIVDLLNPKWLRIGAYWYPRGGIPIDVFWQTGEAPKGVWLPDQGVATYRGRG

SEQ ID NO: 49154 - protein, 155 aa, unidentified
  source 1..155: note = Rhizobiales bacterium
  REGION 1..155: note = tr|A0A1M3MI53|A0A1M3MI53_9RHIZ NADPH-dependent 7-cyano-7-deazaguanine reductase OS=Rhizobiales bacterium 63-22 OX=1895812 GN=queF PE=3 SV=1
MSENTIYSGLKQLGSETKIPATPEAAMLERVANPQKDVRYCVRFTAPEFTSLCPMTGQPDFAHLVIDYVPRDWLVESKSLKLFLFSFRNHGAFHEDCTVTIARRLADLLDPEWLRIGGYWYPRGGIPIDVFYQTGPAPQDVWIPAQDVPNYRGRG

SEQ ID NO: 49155 - protein, 150 aa, unidentified; identical to SEQ ID NO: 44178
  source 1..150: note = Rhizobiales bacterium
  REGION 1..150: note = tr|A0A257ZH06|A0A257ZH06_9RHIZ NADPH-dependent 7-cyano-7-deazaguanine reductase OS=Rhizobiales bacterium 12-68-15 OX=1970546 GN=queF PE=3 SV=1

SEQ ID NO: 49156 - protein, 154 aa, unidentified
  source 1..154: note = Rhizobium acidisoli
  REGION 1..154: note = tr|A0A0N0LEF1|A0A0N0LEF1_9RHIZ NADPH-dependent 7-cyano-7-deazaguanine reductase OS=Rhizobium acidisoli; OX = 1538158 GN=queF PE=3 SV=1
MPNTDVSSLSMLGQQTETAQSPEAAVLEKVPSNHAGTDYVVRFTAPEFTSLCPMTGQPDFAHIVIDYIPGEWLVESKSLKLFLHSFRNHGAFHEDCSIYIAKRIVELLDPKWLRIGAYWYPRGGIPIDVFWQTGKPPEGVWLPEQGVATYRGRG

SEQ ID NO: 49157 - protein, 154 aa, unidentified
  source 1..154: note = Rhizobium aethiopicum
  REGION 1..154: note = tr|A0A1C3XY03|A0A1C3XY03_9RHIZ NADPH-dependent 7-cyano-7-deazaguanine reductase OS=Rhizobium aethiopicum; OX = 1138170 GN=queF PE=3 SV=1
MPNTDVSSLSMLGQQTETAKSPEDAVLEKVPSNHAGTDYVVRFTAPEFTSLCPMTGQPDFAHIVIDYIPGEWLVESKSLKLFLHSFRNHGAFHEDCSIYIAKRIVELLDPKWLRIGAYWYPRGGIPIDVFWQTGKPPEDVWLPEQGVATYRGRG

SEQ ID NO: 49158 - protein, 154 aa, unidentified
  source 1..154: note = Rhizobium altiplani
  REGION 1..154: note = tr|A0A109JQH2|A0A109JQH2_9RHIZ NADPH-dependent 7-cyano-7-deazaguanine reductase OS=Rhizobium altiplani; OX = 1864509 GN=queF PE=3 SV=1
MPTTDVSNLSMLGSQTESPKSPEEAVLEKVPSSHASTDYVVRFTAPEFTSLCPMTGQPDFAHIVIDYIPNEWLVESKSLKLFLHAFRNHGAFHEDCSVYIAKRLVELLDPKWLRIGAYWYPRGGIPIDVFWQTGKPPEGVWLPDQGVATYRGRG

SEQ ID NO: 49159 - protein, 154 aa, unidentified
  source 1..154: note = Rhizobium anhuiense
  REGION 1..154: note = tr|A0A432NTK2|A0A432NTK2_9RHIZ NADPH-dependent 7-cyano-7-deazaguanine reductase OS=Rhizobium anhuiense; OX = 1184720 GN=queF PE=3 SV=1
MPSTDVSSLSMLGQQTETAQSPEEAVLEKVPSNHAGTDYVVRFTAPEFTSLCPMTGQPDFAHIVIDYIPGEWLVESKSLKLFLHSFRNHGAFHEDCSIYIAKRIVELLDPRWLRIGAYWYPRGGIPIDVFWQTGRPPEGVWLPEQGVATYRGRG

SEQ ID NO: 49160 - protein, 154 aa, unidentified
  source 1..154: note = Rhizobium azibense
  REGION 1..154: note = tr|A0A4R8A8C5|A0A4R8A8C5_9RHIZ NADPH-dependent 7-cyano-7-deazaguanine reductase OS=Rhizobium azibense; OX = 1136135 GN=queF PE=3 SV=1
MPKTDVSSLSMLGKETETAKSPEEAVLEKVPSNHAGTDYVVRFTAPEFTSLCPMTGQPDFAHIVIDYIPNEWLVESKSLKLFLHSFRNHGAFHEDCSIYIAKRIVELLDPKWLRIGAYWYPRGGIPIDVFWQTGKPPEGVWLPDQGVGTYRGRG

SEQ ID NO: 49161 - protein, 154 aa, unidentified
  source 1..154: note = Rhizobium azibense
  REGION 1..154: note = tr|A0A4R3QPG5|A0A4R3QPG5_9RHIZ NADPH-dependent 7-cyano-7-deazaguanine reductase OS=Rhizobium azibense; OX = 1136135 GN=queF PE=3 SV=1
MPKTDVSSLSMLGKETETAKSPEEAVLEKVPSNHAGTDYVVRFTAPEFTSLCPMTGQPDFAHIVIDYIPNEWLVESKSLKLFLHSFRNHGAFHEDCSIYIAKRIVELLDPKWLRIGAYWYPRGGIPIDVFWQTGKPPEGVWLPDQGVTTYRGRG

SEQ ID NO: 49162 - protein, 154 aa, unidentified
  source 1..154: note = Rhizobium esperanzae
  REGION 1..154: note = tr|A0A246DYK6|A0A246DYK6_9RHIZ NADPH-dependent 7-cyano-7-deazaguanine reductase OS=Rhizobium esperanzae; OX = 1967781 GN=queF PE=3 SV=1
MPNTDVSSLSMLGQQTETAKSPEEAVLEKVPSNHAGTDYVVRFTAPEFTSLCPMTGQPDFAHIVIDYIPGEWLVESKSLKLFLFSFRNHGAFHEDCSIYIAKRIVELLDPKWLRIGAYWYPRGGIPIDVFWQTGKPPEGVWLPEQGVATYRGRG

SEQ ID NO: 49163 - protein, 154 aa, Rhizobium etli
  REGION 1..154: note = tr|F2A578|F2A578_RHIET NADPH-dependent 7-cyano-7-deazaguanine reductase OS=Rhizobium etli CNPAF512 OX=993047 GN=queF PE=3 SV=1
MPNTDVSSLSMLGQQTETANSPEEAVLEKVPSNHAGTDYVVRFTAPEFTSLCPMTGQPDFAHIVIDYIPSEWLVESKSLKLFLHSFRNHGAFHEDCSIYIAKRIVELLDPKWLRIGAYWYPRGGIPIDVFWQTGKPPEGVWLPEQGVATYRGRG

SEQ ID NO: 49164 - protein, 155 aa, Rhizobium etli
  REGION 1..155: note = sp|B3PV52|QUEF_RHIE6 NADPH-dependent 7-cyano-7-deazaguanine reductase OS=Rhizobium etli (strain CIAT 652) OX=491916 GN=queF PE=3 SV=1
MMPNTDVSSLSMLGQQTETAKSPEEAVLEKVPSNHAGTDYVVRFTAPEFTSLCPMTGQPDFAHIVIDYIPSEWLVESKSLKLFLHSFRNHGAFHEDCSIYIAKRIVELLDPKWLRIGAYWYPRGGIPIDVFWQTGKPPEGVWLPEQGVATYRGRG

SEQ ID NO: 49165 - protein, 154 aa, unidentified
  source 1..154: note = Rhizobium favelukesii
  REGION 1..154: note = tr|W6RWG9|W6RWG9_9RHIZ NADPH-dependent 7-cyano-7-deazaguanine reductase OS=Rhizobium favelukesii; OX = 348824 GN=queF PE=3 SV=1
MPTTDVSNLSMLGSQTESPKSPEEAVLERVPSSHAGTDYVVRFTAPEFTSLCPMTGQPDFAHIVIDYIPNDWLVESKSLKLFLHAFRNHGAFHEDCSIYIAKRLVELLDPKWLRIGAYWYPRGGIPIDVFWQTGKPPENVWLPDQGVATYRGRG

SEQ ID NO: 49166 - protein, 154 aa, unidentified
  source 1..154: note = Rhizobium fredii
  REGION 1..154: note = tr|A0A2A6M299|A0A2A6M299_RHIFR NADPH-dependent 7-cyano-7-deazaguanine reductase OS=Rhizobium fredii; OX = 380 GN=queF PE=3 SV=1
MTKTDVSGLSQLGTKVDLPQSPEEAVLERVPSGHEGTDFVVRFTAPEFTSLCPMTGQPDFAHIVIDYVPNGWLVESKSLKLFLHSFRNHGAFHEDCTIDIAKRLVSLLSPKWLRIGAYWYPRGGIPIDVFWQTGNPPEGVWLPDQGVPTYRGRG

SEQ ID NO: 49167 - protein, 154 aa, unidentified
  source 1..154: note = Rhizobium fredii
  REGION 1..154: note = tr|A0A2L0H6V1|A0A2L0H6V1_RHIFR NADPH-dependent 7-cyano-7-deazaguanine reductase OS=Rhizobium fredii; OX = 380 GN=queF PE=3 SV=1
MPKTDVSGLSQLGAKVDLPQSPEEAVLERVPSGHEGTDFLVRFTAPEFTSLCPMTGQPDFAHIVIDYVPNGWLVESKSLKLFLHSFRNHGAFHEDCTIDIAKRLVSLLSPKWLRIGAYWYPRGGIPIDVFWQTGNPPAGVWLPDQGVPTYRGRG

SEQ ID NO: 49168 - protein, 154 aa, unidentified
  source 1..154: note = Rhizobium freirei
  REGION 1..154: note = tr|N6VA78|N6VA78_9RHIZ NADPH-dependent 7-cyano-7-deazaguanine reductase OS=Rhizobium freirei PRF 81 OX=363754 GN=queF PE=3 SV=1
MPKTDVSGLSMLGSQTETAANPESAVLEKVPAGHAGTDYVVRFTAPEFTSLCPMTGQPDFAHIVIDYVPNEWLVESKSLKLFLHSFRNHGAFHEDCSIYIAKRLVELLEPKWLRIGAYWYPRGGIPIDVFWQTGKPPEGVWLPDQGVQPYRGRG

SEQ ID NO: 49169 - protein, 154 aa, Rhizobium galegae
  REGION 1..154: note = tr|A0A5J5KRZ2|A0A5J5KRZ2_RHIGA NADPH-dependent 7-cyano-7-deazaguanine reductase QueF OS=Rhizobium galegae; OX = 399 GN=queF PE=4 SV=1
MTMTDVSGLSQLGSQVEAPQSPETAVLEKVPNGNQGTDYVVRFTAPEFTSLCPMTGQPDFAHIVIDYIPDGFLVESKSLKLFLHSFRNHGAFHEDCSIYIAKRIVDLLAPKWLRIGAYWYPRGGIPIDVFWQTGEAPAGVWLPEQGVATYRGRG

SEQ ID NO: 49170 - protein, 154 aa, Rhizobium gallicum; identical to SEQ ID NO: 49160
  REGION 1..154: note = tr|A0A0B4X659|A0A0B4X659_9RHIZ NADPH-dependent 7-cyano-7-deazaguanine reductase OS=Rhizobium gallicum bv. gallicum R602 OX=1418105 GN=queF PE=3 SV=1

SEQ ID NO: 49171 - protein, 154 aa, Rhizobium gallicum
  REGION 1..154: note = tr|A0A1L5NKH9|A0A1L5NKH9_9RHIZ NADPH-dependent 7-cyano-7-deazaguanine reductase OS=Rhizobium gallicum; OX = 56730 GN=queF PE=3 SV=1
MPKTDVSSLSMLGKETETAKSPEEAVLERVPSNHAGTDYVVRFTAPEFTSLCPMTGQPDFAHIVIDYIPNEWLVESKSLKLFLHSFRNHGAFHEDCSIYIAKRIVELLDPKWLRIGAYWYPRGGIPIDVFWQTGKPPEGVWLPDQGVATYRGRG

SEQ ID NO: 49172 - protein, 154 aa, unidentified
  source 1..154: note = Rhizobium grahamii
  REGION 1..154: note = tr|A0A370KPY6|A0A370KPY6_9RHIZ NADPH-dependent 7-cyano-7-deazaguanine reductase OS=Rhizobium grahamii; OX = 1120045 GN=queF PE=3 SV=1
MPTTDVSNLSMLGSQTESPKSPEEAVLEKVPASHVGTDYVVRFTAPEFTSLCPMTGQPDFAHIVIDYIPNEWLVESKSLKLFLHAFRNHGAFHEDCSIYIARRLVELLDPKWLRIGAYWYPRGGIPIDVFWQTGKPPEGVWLPDQGVATYRGRG

SEQ ID NO: 49173 - protein, 154 aa, unidentified
  source 1..154: note = Rhizobium grahamii
  REGION 1..154: note = tr|S3HGC1|S3HGC1_9RHIZ NADPH-dependent 7-cyano-7-deazaguanine reductase OS=Rhizobium grahamii CCGE 502 OX=990285 GN=queF PE=3 SV=1
MPTTDVSNLSMLGSQTESPKSPEEAVLEKVPASHVGTDYVVRFTAPEFTSLCPMTGQPDFAHIVIDYIPDEWLVESKSLKLFLHAFRNHGAFHEDCSVYIAKRLVELLDPKWLRIGAYWYPRGGIPIDVFWQTGKPPEGVWLPDQGVATYRGRG

SEQ ID NO: 49174 - protein, 154 aa, Rhizobium hainanense
  REGION 1..154: note = tr|A0A1C3U3M8|A0A1C3U3M8_9RHIZ NADPH-dependent 7-cyano-7-deazaguanine reductase OS=Rhizobium hainanense; OX = 52131 GN=queF PE=3 SV=1
MPKTDVSGLSMLGNQTETASNPEEAVLEKVPSGHAGTDYVVRFTAPEFTSLCPMTGQPDFAHIVIDYIPNEWLVESKSLKLFLHSFRNHGAFHEDCSIYIAKRLVDLLQPKWLRIGAYWYPRGGIPIDVFWQTGKPPEGVWLPDQGVQPYRGRG

SEQ ID NO: 49175 - protein, 154 aa, unidentified
  source 1..154: note = Rhizobium hidalgonense
  REGION 1..154: note = tr|A0A2A6KBM1|A0A2A6KBM1_9RHIZ NADPH-dependent 7-cyano-7-deazaguanine reductase OS=Rhizobium hidalgonense; OX = 1538159 GN=queF PE=3 SV=1
MPNTDVSSLSMLGQQTETAQSPEAAVLEKVPSNHAGTDYVVRFTAPEFTSLCPMTGQPDFAHIVIDYIPGEWLVESKSLKLFLHSFRNHGAFHEDCSIYIAKRIVELLNPKWLRIGAYWYPRGGIPIDVFWQTGKPPEGVWLPDQGVATYRGRG

SEQ ID NO: 49176 - protein, 154 aa, unidentified
  source 1..154: note = Rhizobium ipomoeae
  REGION 1..154: note = tr|A0A4S8P123|A0A4S8P123_9RHIZ NADPH-dependent 7-cyano-7-deazaguanine reductase OS=Rhizobium ipomoeae; OX = 1210932 GN=queF PE=3 SV=1
MSKTDTSGLTQLGQAVEAPTSPETAVLERVPNGNAGTDYVVRFTAPEFTSLCPMTGQPDFAHIVIDYIPGDWLVESKSLKLFLFAFRNHGAFHEDCSVYIAKRIVELLDPKWLRIGAYWYPRGGIPIDVFWQTGAPPEGVWLPDQGVATYRGRG

SEQ ID NO: 49177 - protein, 154 aa, unidentified
  source 1..154: note = Rhizobium jaguaris
  REGION 1..154: note = tr|A0A387FWE1|A0A387FWE1_9RHIZ NADPH-dependent 7-cyano-7-deazaguanine reductase OS=Rhizobium jaguaris; OX = 1312183 GN=queF PE=3 SV=1
MPTTDVSGLSMLGSQTETAANPEAAVLEKVPSGHAGTDYVVRFTAPEFTSLCPMTGQPDFAHIVIDYVPSEWLVESKSLKLFLHSFRNHGAFHEDCSIYIAKRLVDLLEPKWLRIGAYWYPRGGIPIDVFWQTGKPPEGVWLPDQGVQPYRGRG

SEQ ID NO: 49178 - protein, 154 aa, unidentified
  source 1..154: note = Rhizobium laguerreae
  REGION 1..154: note = tr|A0A4R3QJZ7|A0A4R3QJZ7_9RHIZ NADPH-dependent 7-cyano-7-deazaguanine reductase OS=Rhizobium laguerreae; OX = 1076926 GN=queF PE=3 SV=1
MPSTDVSSLSMLGKQTETAQSPEEAVLEKVPSNHAGTDYVVRFTAPEFTSLCPMTGQPDFAHIVIDYIPGEWLVESKSLKLFLHSFRNHGAFHEDCSIYIAKRIVELLDPRWLRIGAYWYPRGGIPIDVFWQTGKPPEGVWLPEQGVATYRGRG

SEQ ID NO: 49179 - protein, 154 aa, unidentified
  source 1..154: note = Rhizobium laguerreae
  REGION 1..154: note = tr|A0A1S9GS64|A0A1S9GS64_9RHIZ NADPH-dependent 7-cyano-7-deazaguanine reductase OS=Rhizobium laguerreae; OX = 1076926 GN=queF PE=3 SV=1
MPSTDVSSLSMLGQQTETAQSPEEAVLEKVPSNHAGTDYVVRFTAPEFTSLCPMTGQPDFAHIVIDYIPGEWLVESKSLKLFLHSFRNHGAFHEDCSIYIAKRIVELLDPRWLRIGAYWYPRGGIPIDVFWQTDKPPEGVWLPEQGVATYRGRG

SEQ ID NO: 49180 - protein, 154 aa, Rhizobium leguminosarum
  REGION 1..154: note = tr|A0A444IC00|A0A444IC00_RHILE NADPH-dependent 7-cyano-7-deazaguanine reductase OS=Rhizobium leguminosarum OX=384 GN=queF PE=3 SV=1
MPSTDVSSLSMLGQQTETAQSPEEAVLEKVPSNHAGTDYVVRFTAPEFTSLCPMTGQPDFAHMVIDYIPGEWLVESKSLKLFLHSFRNHGAFHEDCSIYIAKRIVELLDPRWLRIGAYWYPRGGIPIDVFWQTGKPPEGVWLPEQGVASYRGRG

SEQ ID NO: 49181 - protein, 154 aa, Rhizobium leguminosarum
  REGION 1..154: note = sp|B5ZY95|QUEF_RHILW NADPH-dependent 7-cyano-7-deazaguanine reductase OS=Rhizobium leguminosarum bv. trifolii (strain WSM2304) OX=395492; GN = queF PE=3 SV=1
MPNTDVSSLSMLGQQTETAQSPEQAVLEKVPSNHAGTDYVVRFTAPEFTSLCPMTGQPDFAHIVIDYIPGEWLVESKSLKLFLHSFRNHGAFHEDCSIYIAKRIVELLDPKWLRIGAYWYPRGGIPIDVFWQTGKPPEGVWLPEQGVATYRGRG

SEQ ID NO: 49182 - protein, 154 aa, Rhizobium loessense
  REGION 1..154: note = tr|A0A1G4RAK9|A0A1G4RAK9_9RHIZ NADPH-dependent 7-cyano-7-deazaguanine reductase OS=Rhizobium loessense; OX = 158890 GN=queF PE=3 SV=1
MPKTDVSSLSMLGKETETAKSPEEAVLEKVPSNHAGTDYVVRFTAPEFTSLCPMTGQPDFAHIVIDYIPNEWLVESKSLKLFLHSFRNHGAFHEDCSIYIAKRIVELLDPKWLRIGAYWYPRGGIPIDVFWQTGKPPEGVWLPDQGVATYRGRG

SEQ ID NO: 49183 - protein, 159 aa, unidentified
  source 1..159: note = Rhizobium loti
  REGION 1..159: note = tr|A0A1B4YYJ5|A0A1B4YYJ5_RHILI NADPH-dependent 7-cyano-7-deazaguanine reductase OS=Rhizobium loti OX=381; GN = queF PE=3 SV=1
MKEIPLMIDTKTLTQLGAHVETPQSPEQAVLETVPFTRGDGPPAIVRFTCPEFTSLCPVTGQPDFAHIVIDYAPDAALVESKSLKLFMTSFRNHGAFHEDCTVMIGRRIVAATKPLWLRIGGYWYPRGGIPIDVFWQTGAPPEGAWLPETGVAPYRGRG

SEQ ID NO: 49184 - protein, 153 aa, unidentified
  source 1..153: note = Rhizobium loti
  REGION 1..153: note = tr|A0A1A5QXZ6|A0A1A5QXZ6_RHILI NADPH-dependent 7-cyano-7-deazaguanine reductase OS=Rhizobium loti OX=381; GN = queF PE=3 SV=1
MIDTKTLTQLGAHVETPQSPEQAVLETVPFSRGDGPPAIVRFTCPEFTSLCPVTGQPDFAHIVIDYAPDAALVESKSLKLFMTSFRNHGAFHEDCTVMIGRRIVAATKPLWLRIGGYWYPRGGIPIDVFWQTGAPPDGAWLPDTGVAPYRGRG

SEQ ID NO: 49185 - protein, 154 aa, Rhizobium lusitanum
  REGION 1..154: note = tr|A0A1C3X295|A0A1C3X295_9RHIZ NADPH-dependent 7-cyano-7-deazaguanine reductase OS=Rhizobium lusitanum; OX = 293958 GN=queF PE=3 SV=1
MPNTDVSGLSMLGSQTETAANPEAAVLEKVPSGHAGTDYVVRFTAPEFTSLCPMTGQPDFAHIVIDYVPNEWLVESKSLKLFLHSFRNHGAFHEDCSIYIAKRLVELLDPKWLRIGAYWYPRGGIPIDVFWQTGKPPEGVWLPDQGVQPYRGRG

SEQ ID NO: 49186 - protein, 154 aa, unidentified
  source 1..154: note = Rhizobium meliloti
  REGION 1..154: note = tr|A0A2J0Z4I9|A0A2J0Z4I9_RHIML NADPH-dependent 7-cyano-7-deazaguanine reductase OS=Rhizobium meliloti; OX = 382 GN=queF PE=3 SV=1
MTKTDVSGLSQLGTKVDLPQSPEEAVLERVPSGHGGTDFVVRFTAPEFTSLCPMTRQPDFAHIVIDYVPDGWLVESKSLKLFLHSFRNHGAFHEDCTIEIAKRLVSLLSPKWLRIGAYWYPRGGIPIDVFWQTGNPPDGVWLPDQGVPTYRGRG

SEQ ID NO: 49187 - protein, 154 aa, unidentified
  source 1..154: note = Rhizobium meliloti
  REGION 1..154: note = sp|Q92N45|QUEF_RHIME NADPH-dependent 7-cyano-7-deazaguanine reductase OS=Rhizobium meliloti (strain 1021) OX=266834 GN=queF PE=3 SV=1
MTKTDVSGLSQLGAKVDLPQSPEEAVLERVPSGHGGTDFVVRFTAPEFTSLCPMTGQPDFAHIVIDYVPDGWLVESKSLKLFLHSFRNHGAFHEDCTIEIAKRLVSLLSPKWLRIGAYWYPRGGIPIDVFWQTGNPPEGVWLPDQGVPTYRGRG

SEQ ID NO: 49188 - protein, 144 aa, unidentified
  source 1..144: note = Rhizobium mesoamericanum
  REGION 1..144: note = tr|K0PJA7|K0PJA7_9RHIZ NADPH-dependent 7-cyano-7-deazaguanine reductase OS=Rhizobium mesoamericanum STM3625 OX=1211777 GN=queF PE=3 SV=1
MLGSQTESPKSPEEAVLEKVPSNHAGTDYVVRFTAPEFTSLCPMTGQPDFAHIVIDYIPNEWLVESKSLKLFLHAFRNHGAFHEDCSIYIAKRLVELLDPKWLRIGAYWYPRGGIPIDVFWQTGKPPEGVWLPDQGVATYRGRG

SEQ ID NO: 49189 - protein, 154 aa, Rhizobium miluonense
  REGION 1..154: note = tr|A0A1C3WKE9|A0A1C3WKE9_9RHIZ NADPH-dependent 7-cyano-7-deazaguanine reductase OS=Rhizobium miluonense; OX = 411945 GN=queF PE=3 SV=1
MPKTDVSGLSMLGSQTETASNPEEAVLEKVPAGHAGTDYVVRFTAPEFTSLCPMTGQPDFAHIVIDYVPNEWLVESKSLKLFLHSFRNHGAFHEDCSIYIAKRLVDLLEPKWLRIGAYWYPRGGIPIDVFWQTGKPPEGVWLPDQGVQPYRGRG

SEQ ID NO: 49190 - protein, 154 aa, Rhizobium mongolense
  REGION 1..154: note = tr|A0A559SLH9|A0A559SLH9_9RHIZ NADPH-dependent 7-cyano-7-deazaguanine reductase OS=Rhizobium mongolense USDA 1844 OX=1079460 GN=queF PE=3 SV=1
MPKTDVSSLSMLGKETETAKSPEEAVLEKVPSNHVGTDYVVRFTAPEFTSLCPMTGQPDFAHIVIDYIPNEWLVESKSLKLFLHSFRNHGAFHEDCSIYIAKRIVELLNPKWLRIGAYWYPRGGIPIDVFWQTGKPPEGVWLPDQGVATYRGRG

SEQ ID NO: 49191 - protein, 154 aa, Rhizobium multihospitium; identical to SEQ ID NO: 49174
  REGION 1..154: note = tr|A0A1C3VF64|A0A1C3VF64_9RHIZ NADPH-dependent 7-cyano-7-deazaguanine reductase OS=Rhizobium multihospitium OX=410764 GN=queF PE=3 SV=1

SEQ ID NO: 49192 - protein, 154 aa, unidentified
  source 1..154: note = Rhizobium naphthalenivorans
  REGION 1..154: note = tr|A0A512HEV8|A0A512HEV8_9RHIZ NADPH-dependent 7-cyano-7-deazaguanine reductase OS=Rhizobium naphthalenivorans OX=1118451 GN=queF PE=3 SV=1
MSKTDVSGLSQLGQSVEAPTSPEAAVLEKVPNGNAGTDYVVRFTAPEFTSLCPMTGQPDFAHIVIDYIPGDWLVESKSLKLFLFSFRNHGAFHEDCSIYIAKRLVELLDPKWLRIGAYWYPRGGIPIDVFWQTGAPPEGVWLPEQGVATYRGRG

SEQ ID NO: 49193 - protein, 154 aa, unidentified
  source 1..154: note = Rhizobium nepotum
  REGION 1..154: note = tr|A0A0D8KID7|A0A0D8KID7_9RHIZ NADPH-dependent 7-cyano-7-deazaguanine reductase OS=Rhizobium nepotum 39/7; OX = 1368418 GN=queF PE=3 SV=1
MSVTDVSGLSQLGTKVDTPESPEKAILEKVPNGNAGTDYVVRFTAPEFTSLCPMTGQPDFAHIVIDYIAGDFLVESKSLKLFLQSFRNHGAFHEDCSVYIARRLVELLQPKWLRIGAYWYPRGGIPIDVFWQTGPVPEGVWLPDQGVPTYRGRG

SEQ ID NO: 49194 - protein, 154 aa, Rhizobium oryzae
  REGION 1..154: note = tr|A0A1Q9AVD3|A0A1Q9AVD3_9RHIZ NADPH-dependent 7-cyano-7-deazaguanine reductase OS=Rhizobium oryzae; OX = 464029 GN=queF PE=3 SV=1
MTKTDVTGLSQLGQKTDLPANPDDAVLERVPSGHQGADFVVRFTAPEFTSLCPMTGQPDFAHIVIDYVPAGWLVESKSLKLFLHSFRNHGAFHEDCTLDIAKRLVDLLAPKWLRIGAYWYPRGGIPIDVFWQTGAPPEGLWLPDQGVPTYRGRG

SEQ ID NO: 49195 - protein, 154 aa, Rhizobium oryzae
  REGION 1..154: note = tr|A0A1X7GTT6|A0A1X7GTT6_9RHIZ NADPH-dependent 7-cyano-7-deazaguanine reductase OS=Rhizobium oryzae; OX = 464029 GN=queF PE=3 SV=1
MTMTDVSGLKQLGSNVEAPQSPEAAVLEKVPNGNQGTDYVVRFTAPEFTSLCPMTGQPDFAHIVIDYIPDGFLVESKSLKLFLHSFRNHGAFHEDCSIYIAKRIVDLLAPKWLRIGAYWYPRGGIPIDVFWQTGEAPAGVWLPEQGVATYRGRG

SEQ ID NO: 49196 - protein, 154 aa, unidentified
  source 1..154: note = Rhizobium oryziradicis
  REGION 1..154: note = tr|A0A1Q8ZQZ7|A0A1Q8ZQZ7_9RHIZ NADPH-dependent 7-cyano-7-deazaguanine reductase OS=Rhizobium oryziradicis; OX = 1867956 GN=queF PE=3 SV=1
MSKTDVSGLSQLGQQVDAPTSPETAVMERVPNGNAGTDYVVRFTAPEFTSLCPMTGQPDFAHIVIDYVPGEFLVESKSLKLFLFSFRNHGAFHEDCSVYIAKRLVELLNPKWLRIGAYWYPRGGIPIDVFWQTGEAPKGVWLPDQGVPTYRGRG

SEQ ID NO: 49197 - protein, 155 aa, Rhizobium phaseoli; identical to SEQ ID NO: 49164
  REGION 1..155: note = tr|A0A0M3GKU9|A0A0M3GKU9_9RHIZ NADPH-dependent 7-cyano-7-deazaguanine reductase OS=Rhizobium phaseoli Ch24-10 OX=1128399 GN=queF PE=3 SV=1

SEQ ID NO: 49198 - protein, 154 aa, Rhizobium phaseoli
  REGION 1..154: note = tr|A0A2U3CXY0|A0A2U3CXY0_9RHIZ NADPH-dependent 7-cyano-7-deazaguanine reductase OS=Rhizobium phaseoli; OX = 396 GN=queF PE=3 SV=1
MPNTDVSSLSMLGQQTETANSPEEAVLEKVPSNHAGTDYVVRFTAPEFTSLCPMTGQPDFAHIVIDYIPSEWLVESKSLKLFLHSFRNHGAFHEDCSIYIAKRIVELLDPKWLRIGAYWYPRGGIPIDVFWQTGKPPESVWLPEQGVATYRGRG

SEQ ID NO: 49199 - protein, 154 aa, Rhizobium pisi
  REGION 1..154: note = tr|A0A3R9GY71|A0A3R9GY71_9RHIZ NADPH-dependent 7-cyano-7-deazaguanine reductase OS=Rhizobium pisi; OX = 574561 GN=queF PE=3 SV=1
MPNTDVSSLSMLGQQTETAKSPEEAVLEKVPSNHAGTDYVVRFTAPEFTSLCPMTGQPDFAHIVIDYIPGEWLVESKSLKLFLHSFRNHGAFHEDCSIYIAKRIVELLDPKWLRIGAYWYPRGGIPIDVFWQTGKPPEGVWLPDQGVATYRGRG

SEQ ID NO: 49200 - protein, 154 aa, Rhizobium pusense; identical to SEQ ID NO: 43810
  REGION 1..154: note = tr|A0A1L9CEG0|A0A1L9CEG0_9RHIZ NADPH-dependent 7-cyano-7-deazaguanine reductase OS=Rhizobium pusense; OX = 648995 GN=queF PE=3 SV=1

SEQ ID NO: 49201 - protein, 154 aa, Rhizobium radiobacter
  REGION 1..154: note = tr|A0A1B9UVK3|A0A1B9UVK3_RHIRD NADPH-dependent 7-cyano-7-deazaguanine reductase OS=Rhizobium radiobacter; OX = 358 GN=queF PE=3 SV=1
MSVTDVSSLSQLGAKVDTPESPEKAILEKVPNGNAGTDYVVRFTAPEFTSLCPMTGQPDFAHIVIDYIAGDFLVESKSLKLFLQSFRNHGAFHEDCSVYIARRLVELLQPKWLRIGAYWYPRGGIPIDVFWQTGPVPEGVWLPDQGVPTYRGRG

SEQ ID NO: 49202 - protein, 154 aa, Rhizobium radiobacter; identical to SEQ ID NO: 43797
  REGION 1..154: note = tr|A0A083ZSU4|A0A083ZSU4_RHIRD NADPH-dependent 7-cyano-7-deazaguanine reductase OS=Rhizobium radiobacter; OX = 358 GN=queF PE=3 SV=1

SEQ ID NO: 49203 - protein, 154 aa, unidentified
  source 1..154: note = Rhizobium rhizosphaerae
  REGION 1..154: note = tr|A0A1Q9APE6|A0A1Q9APE6_9RHIZ NADPH-dependent 7-cyano-7-deazaguanine reductase OS=Rhizobium rhizosphaerae OX=1672749 GN=queF PE=3 SV=1
MTKTDVSGLSLLGQKTDLPAGPDEAVLERVPSGHQGTNFVVRFTAPEFTSLCPMTGQPDFAHIVIDYVPDEWLVESKSLKLFLHSFRNHGAFHEDCSIDIAKRLVDLLAPKWLRIGAYWYPRGGIPIDVFWQTGAPPEGVWLPDQGVQPYRGRG

SEQ ID NO: 49204 - protein, 154 aa, Rhizobium rosettiformans
  REGION 1..154: note = tr|A0A4S8PV91|A0A4S8PV91_9RHIZ NADPH-dependent 7-cyano-7-deazaguanine reductase OS=Rhizobium rosettiformans W3 OX=538378 GN=queF PE=3 SV=1
MSKTDTSGLTQLGQSVEAPTSPETAVMERVPNGNAGTDYVVRFTAPEFTSLCPMTGQPDFAHIVIDYIPGDWLVESKSLKLFLFSFRNHGAFHEDCSVYIAKRIVELLDPKWLRIGAYWYPRGGIPIDVFWQTGEPPKGVWLPDQGVATYRGRG

SEQ ID NO: 49205 - protein, 155 aa, Rhizobium selenitireducens
  REGION 1..155: note = tr|A0A376AE85|A0A376AE85_9RHIZ NADPH-dependent 7-cyano-7-deazaguanine reductase OS=Rhizobium selenitireducens ATCC BAA-1503 OX=1336235 GN=queF PE=3 SV=1
MMSKTDVSGLSQLGQTVEAPTSPETAVLERVPNGNAGTDYVVRFTAPEFTSLCPMTGQPDFAHIVLDYIPGDWLVESKSLKLFLFSFRNHGAFHEDCSIYIAKRLVDLLDPKWLRIGAYWYPRGGIPIDVFWQTGAPPQGVWLPDQGVATYRGRG

SEQ ID NO: 49206 - protein, 154 aa, unidentified
  source 1..154: note = Rhizobium smilacinae
  REGION 1..154: note = tr|A0A5C4XHI4|A0A5C4XHI4_9RHIZ NADPH-dependent 7-cyano-7-deazaguanine reductase OS=Rhizobium smilacinae; OX = 1395944 GN=queF PE=3 SV=1
MTMTDVSGLSQLGKQVDAPKSPEEAVLERVPNSNQGMDYVTRFTAPEFTSLCPMTGQPDFAHIVIDYIPDAYLVESKSLKLFLTSFRNHGAFHEDCSVYIAKRLVDLLAPKWLRIGAYWYPRGGIPIDVFWQTGAVPEGVWLPDQGVPTYRGRG

SEQ ID NO: 49207 - protein, 154 aa, unidentified
  source 1..154: note = Rhizobium sophoriradicis
  REGION 1..154: note = tr|A0A2A5KYF0|A0A2A5KYF0_9RHIZ NADPH-dependent 7-cyano-7-deazaguanine reductase OS=Rhizobium sophoriradicis OX=1535245 GN=queF PE=3 SV=1
MPNTDVSSLSMLGQQTETAKSPEEAVLEKVPSNHAGTDYVVRFTAPEFTSLCPMTGQPDFAHIVIDYIPGEWLVESKSLKLFLHSFRNHGAFHEDCSIYIAKRIVELLDPKWLRIGAYWYPRGGIPIDVFWQTGQPPEGVWLPEQGVATYRGRG

SEQ ID NO: 49208 - protein, 154 aa, Rhizobium sp.; identical to SEQ ID NO: 49162
  REGION 1..154: note = tr|A0A192LZM5|A0A192LZM5_9RHIZ NADPH-dependent 7-cyano-7-deazaguanine reductase OS=Rhizobium sp. N113; OX = 1703960 GN=queF PE=3 SV=1

SEQ ID NO: 49209 - protein, 154 aa, Rhizobium sp.
  REGION 1..154: note = tr|A0A4V2QG69|A0A4V2QG69_9RHIZ NADPH-dependent 7-cyano-7-deazaguanine reductase OS=Rhizobium sp. BK251; OX = 2512125 GN=queF PE=3 SV=1
MPNTDVSGLTMLGTNTEAPKTPEEAVLERVPAGHGGTNYVVRFTAPEFTSLCPMTGQPDFAHIVIDYIPDEWLVESKSLKLFLHSFRNHGAFHEDCSIYIAKRIVDLLQPKWLRIGAYWYPRGGIPIDVFWQTGAPPEGVWLPEQGVAPYRGRG

SEQ ID NO: 49210 - protein, 154 aa, unidentified
  source 1..154: note = Rhizobium straminoryzae
  REGION 1..154: note = tr|A0A549TDG2|A0A549TDG2_9RHIZ NADPH-dependent 7-cyano-7-deazaguanine reductase OS=Rhizobium straminoryzae OX=1387186 GN=queF PE=3 SV=1
MSMTDVSGLSQLGKQVDAPTSPETAVLERVPNSNAGTDYVVRFTAPEFTSLCPMTGQPDFAHIVIDYIPGEFLVESKSLKLFLFSFRNHGAFHEDCSVYIAKRLVDLLAPKWLRIGAYWYPRGGIPIDVFWQTGAAPEGVWLPDQGVPTYRGRG

SEQ ID NO: 49211 - protein, 154 aa, unidentified
  source 1..154: note = Rhizobium subbaraonis
  REGION 1..154: note = tr|A0A285UJY5|A0A285UJY5_9RHIZ NADPH-dependent 7-cyano-7-deazaguanine reductase OS=Rhizobium subbaraonis; OX = 908946 GN=queF PE=3 SV=1
MSKTDVSNLSQLGRNVDLPTTPEEAVLEKVPNGNQGTDYVVRFTAPEFTSLCPMTGQPDFAHIVIDYIPDAALVESKSLKLFLHSFRNHGAFHEDCSIYVAKRLVDLLEPKWLRIGAYWYPRGGIPIDVFWQTGIAPDGVWLPDQGVPTYRGRG

SEQ ID NO: 49212 - protein, 154 aa, Rhizobium sullae
  REGION 1..154: note = tr|A0A4R3Q735|A0A4R3Q735_RHISU NADPH-dependent 7-cyano-7-deazaguanine reductase OS=Rhizobium sullae; OX = 50338 GN=queF PE=3 SV=1
MPKTDVSSLSMLGKETETAKSPEEAVLEKVPSNHAGTDFVVRFTAPEFTSLCPMTGQPDFAHIVIDYIPNAWLVESKSLKLFLHSFRNHGAFHEDCSIYIAKRLVELLDPKWLRIGAYWYPRGGIPIDVFWQTGKPPEGVWLPDQGVATYRGRG

SEQ ID NO: 49213 - protein, 154 aa, Rhizobium sullae
  REGION 1..154: note = tr|A0A2N0D560|A0A2N0D560_RHISU NADPH-dependent 7-cyano-7-deazaguanine reductase OS=Rhizobium sullae; OX = 50338 GN=queF PE=3 SV=1
MPKTDVSSLSMLGNETETAKSPEEAVLEKVPSNHAGTDFVVRFTVPEFTSLCPMTGQPDFAHIVIDYIPNAWLVESKSLKLFLHSFRNHGAFHEDCSIYIAKRLVELLDPKWLRIGAYWYPRGGIPIDVFWQTGKPPEGVWLPDQGVATYRGRG

SEQ ID NO: 49214 - protein, 154 aa, Rhizobium taibaishanense
  REGION 1..154: note = tr|A0A1Q9A496|A0A1Q9A496_9RHIZ NADPH-dependent 7-cyano-7-deazaguanine reductase OS=Rhizobium taibaishanense OX=887144 GN=queF PE=3 SV=1
MSKTDVSGLSMLGSQVEAPTSPETAVLEKVPNNNAGTDYVVRFTAPEFTSLCPMTGQPDFAHIVIDYIPGDFLVESKSLKLFMTSFRNHGSFHEDCSIYIAKRLVDLLAPKWLRIGAYWYPRGGIPIDVFWQTGEVPAGVWLPDQGVPTYRGRG

SEQ ID NO: 49215 - protein, 154 aa, Rhizobium tibeticum
  REGION 1..154: note = tr|A0A1H8HJV6|A0A1H8HJV6_9RHIZ NADPH-dependent 7-cyano-7-deazaguanine reductase OS=Rhizobium tibeticum; OX = 501024 GN=queF PE=3 SV=1
MPTTDVSNLSMLGSQTESPKTPEEAVLERVPSSHAGTDYVVRFTAPEFTSLCPMTGQPDFAHIVIDYIPNDWLVESKSLKLFLHAFRNHGAFHEDCSIYIAKRLVELLDPKWLRIGAYWYPRGGIPIDVFWQTGKPPENVWLPDQGVATYRGRG

SEQ ID NO: 49216 - protein, 154 aa, Rhizobium tropici; identical to SEQ ID NO: 49174
  REGION 1..154: note = tr|L0LPC2|L0LPC2_RHITR NADPH-dependent 7-cyano-7-deazaguanine reductase OS=Rhizobium tropici CIAT 899 OX=698761 GN=queF PE=3 SV=1

SEQ ID NO: 49217 - protein, 203 aa, Rhizobium tropici
  REGION 1..203: note = tr|A0A2T0PGV7|A0A2T0PGV7_RHITR NADPH-dependent 7-cyano-7-deazaguanine reductase OS=Rhizobium tropici; OX = 398 GN=queF PE=3 SV=1
MALLLPQCIGREKAGWRPPLHGVVLQENRFPLFRIMLYETRTETPMAKTSSKSTTSPGLQLGRAVEWPDAPEKAQLDRVPNPQAGTDYLVRFTVPEFTSICPVTGQPDFAHLVIDYVPGRWLLESKSLKLFAASFRNHGAFHEDCTVMIGKRIADEIKPKWLRIGGYWYPRGGIPIDVFYQTGRLPKGLWVPDQGVAPYRGRG

SEQ ID NO: 49218 - protein, 154 aa, Rhizobium tubonense
  REGION 1..154: note = tr|A0A2W4D9P4|A0A2W4D9P4_9RHIZ NADPH-dependent 7-cyano-7-deazaguanine reductase OS=Rhizobium tubonense; OX = 484088 GN=queF PE=3 SV=1
MPSTDVSGLSMLGSHTDAPTNPEDAILEKVPSGHQGTDYVVRFTAPEFTSLCPMTGQPDFAHIVIDYIPQEWLVESKSLKLFLHSFRNHGAFHEDCSIYIAKRIVDLLQPKWLRIGAYWYPRGGIPIDVFWQTGKPPEGVWLPDQGVQPYRGRG

SEQ ID NO: 49219 - protein, 154 aa, unidentified
  source 1..154: note = Rhizobium tumorigenes
  REGION 1..154: note = tr|A0A2W4CTA0|A0A2W4CTA0_9RHIZ NADPH-dependent 7-cyano-7-deazaguanine reductase OS=Rhizobium tumorigenes; OX = 2041385 GN=queF PE=3 SV=1
MPNTDVSGLSMLGSQTATPTSPETAMLEKVPATHQGAEYLVRFTAPEFTSLCPMTGQPDFAHIVIDYVPGEWLVESKSLKLFLHAFRNHGAFHEDCSVYIAKRIVELLQPKWLRIGAYWYPRGGIPIDVFWQTGKPPEGLWLPDQGVPTYRGRG

SEQ ID NO: 49220 - protein, 154 aa, Rhizobium vallis
  REGION 1..154: note = tr|A0A432PDX7|A0A432PDX7_9RHIZ NADPH-dependent 7-cyano-7-deazaguanine reductase OS=Rhizobium vallis; OX = 634290 GN=queF PE=3 SV=1
MPNTDVSSLSMLGQQTETAKSPEEAVLEKVPSNHAGTDYVVRFTAPEFTSLCPMTGQPDFAHIVIDYIPGEWLVESKSLKLFLHSFRNHGAFHEDCSIYIAKRIVELLDPKWLRIGAYWYPRGGIPIDVFWQTGKPPEGVWLPEQGVATYRGRG

SEQ ID NO: 49221 - protein, 144 aa, Rhizobium yanglingense
  REGION 1..144: note = tr|A0A245Z450|A0A245Z450_9RHIZ NADPH-dependent 7-cyano-7-deazaguanine reductase OS=Rhizobium yanglingense; OX = 61013 GN=queF PE=3 SV=1
MLGKETETAKSPEEAVLERVPSNHAGTDYVVRFTAPEFTSLCPMTGQPDFAHIVIDYIPNEWLVESKSLKLFLHSFRNHGAFHEDCSIYIAKRIVELLDPKWLRIGAYWYPRGGIPIDVFWQTGKPPEGVWLPDQGVATYRGRG

SEQ ID NO: 49222 - protein, 150 aa, Rhizomicrobium sp.
  REGION 1..150: note = tr|A0A177Q8Y1|A0A177Q8Y1_9PROT NADPH-dependent 7-cyano-7-deazaguanine reductase OS=Rhizomicrobium sp. SCGC AG-212-E05 OX=1799655 GN=queF PE=3 SV=1
MAKKLTQLGHQVKQPASPDKAVLEAVANPHADTDYLVRFTAPEFTTLCPITGQPDFAHFVIDYVPGAKIVESKSLKLFLTSFRNASGFHEDCSLKIGKRIQAAIKPKFIRVAGYWYPRGGIPIDIFWQSGKLPAGVWLPDTGVASYRGRG

SEQ ID NO: 49223 - protein, 150 aa, unidentified
  source 1..150: note = Rhizorhabdus dicambivorans
  REGION 1..150: note = tr|A0A2A4G1Y9|A0A2A4G1Y9_9SPHN NADPH-dependent 7-cyano-7-deazaguanine reductase OS=Rhizorhabdus dicambivorans OX=1850238 GN=queF PE=3 SV=1
MAMTPLHLGKTSALPASPEQAVLDYVPNPRPGSLYLVRFAAPEFTSLCPVTGQPDFAHLVIDYAPGETIVESKSLKLFLGSFRNHAAFHEDCTVGIGERLVAEMQPRWLRIGGYWYPRGGIPIDVFWQSGAPPEGLWVPDQGVAGYRGRG

SEQ ID NO: 49224 - protein, 86 aa, unidentified
  source 1..86: note = Rhizorhabdus sp.
  REGION 1..86: note = tr|A0A521T6B5|A0A521T6B5_9SPHN NADPH-dependent 7-cyano-7-deazaguanine reductase (Fragment); OS = Rhizorhabdus sp. OX=1968843 GN=EPO38_04090 PE=3 SV=1
PGETIVESKSLKLFLGAFRNHAAFHEDCTVGIGERLFAEMQPRWLRIGGYWYPRGGIPIDVFWQSGTPPEGLWVPDQGVAGYRGRG

SEQ ID NO: 49225 - protein, 79 aa, unidentified
  source 1..79: note = Rhizorhabdus sp.
  REGION 1..79: note = tr|A0A521STR3|A0A521STR3_9SPHN NADPH-dependent 7-cyano-7-deazaguanine reductase QueF (Fragment); OS = Rhizorhabdus sp. OX=1968843 GN=EPO38_07465 PE=3 SV=1
MSQPTLHLGKTSALPASPEQAVLDYVPNPRPGSLYLVRFAAPEFTSLCPVTGQPDFAHLVIDYAPGDTIVESKSLKLFL

SEQ ID NO: 49226 - protein, 274 aa, unidentified
  source 1..274: note = Rhodanobacter denitrificans
  REGION 1..274: note = tr|I4WJV1|I4WJV1_9GAMM NADPH-dependent 7-cyano-7-deazaguanine reductase OS=Rhodanobacter denitrificans OX=666685 GN=queF PE=3 SV=1
MSTPEHSPLGKDTVYADRYEPRLLFPIPRADKRAELGIAESLPFHGVDIWNAYELSWLDPRGKPQVALAEFRVPAASPHIIESKSFKLYLNGFAQERLADAATLAATLMRDLSAAAGAVVGVQLREARTDALPVVDLDGHLLDTQDIAIDHYGPPQADFLQADTTAAPVAETVLSHLLRSNCPVTGQPDWGSVQIAYRGAPIDHAGLLRYLVSFRTHNEFHEQCVERIFVDLMQRCAPRQLSVHARYTRRGGLDINPFRSSTPATPGNLRTVRQ

SEQ ID NO: 49227 - protein, 274 aa, unidentified
  source 1..274: note = Rhodanobacter denitrificans
  REGION 1..274: note = tr|A0A368KC46|A0A368KC46_9GAMM NADPH-dependent 7-cyano-7-deazaguanine reductase OS=Rhodanobacter denitrificans OX=666685 GN=queF PE=3 SV=1
MSTPEHSPLGKDTVYAGRYDPSLLFPIPRADKRAEIGIADTLPFHGVDIWNAYELSWLDLRGKPQVAMAEFRVPALSPQIIESKSFKLYLNGFAQERIADAAALAATLTHDLSAAAGAAVGVQLRDARADALPVIDLDGHLLDDQNIAIDHYGPPQADFLQADTGAMPVAETVLSHLLRSNCPVTGQPDWGSVQIAYRGAPIDHAGLLRYLVSFRTHNEFHEQCVERIFVDLTQRCAPRQLSVYARYTRRGGLDINPFRSSAPASPGNPRTVRQ

SEQ ID NO: 49228 - protein, 274 aa, Rhodanobacter fulvus
  REGION 1..274: note = tr|I4VRA1|I4VRA1_9GAMM NADPH-dependent 7-cyano-7-deazaguanine reductase OS=Rhodanobacter fulvus Jip2 OX=1163408 GN=queF PE=3 SV=1
MNSPEHSPLGKETPYANRYDPALLFPIPRDSNRAALGLAEPLPFHGVDIWNAYELSWLDMRGKPVAALAEFRVPATSPQLIESKSFKLYLNGFAGERIADAATLTSTLVRDLSTAAGAVVGVQLSDARAAVYPVSDMDGHLLDHQAIDIDDYGPPNADFLRADRNATPVAETLVSHLLRSNCPVTGQPDWGSVQIAYRGAPIDHAGLLRYLVSFRNHNEFHEHCVERIFVDLGRCCEPQQLSVYARYTRRGGLDINPFRSSTPVTPPNLRTVRQ

SEQ ID NO: 49229 - protein, 274 aa, unidentified
  source 1..274: note = Rhodanobacter glycinis
  REGION 1..274: note = tr|A0A502CFV0|A0A502CFV0_9GAMM NADPH-dependent 7-cyano-7-deazaguanine reductase OS=Rhodanobacter glycinis; OX = 582702 GN=queF PE=3 SV=1
MSTPEHSPLGKDTIYADRYDPGLLFAIPRADKRVEIGVGEVLPFHGVDIWNAYELSWLDLRGKPQVALAEFHVPAASPHIIESKSFKLYLNGFAQERIADAASLTDALLHDLSAAAGAVVNVQLHAAHGATLPVTGLEGDLLDDQDIEVDHYGPPDADFLLVDRAATPVAETLVSHLLRSNCPVTGQPDWGSVQIAYCGAPIDHAGLLRYLISFRTHNEFHEQCVERIFVDLTQRCAPQQLSVYARYTRRGGLDINPFRSSTPGTPDNARTVRQ

SEQ ID NO: 49230 - protein, 275 aa, unidentified
  source 1..275: note = Rhodanobacter glycinis
  REGION 1..275: note = tr|A0A5B9E333|A0A5B9E333_9GAMM NADPH-dependent 7-cyano-7-deazaguanine reductase OS=Rhodanobacter glycinis; OX = 582702 GN=queF PE=3 SV=1
MSTPDHSPLGKATVYADRYDPGLLFPIPRAAKRNEIGVGMPLPFHGTDIWNAYELSWLDMRGKPQAAVAEFRIPASTPNIIESKSFKLYLNGFAQEPLASTAALRALLQQDLTTAAGDVVEVILHPARTAAHTFTDLAGESIDELPVAIDDYGPPKADYLHADTAAAVVEETLVSDLLRSNCPVTGQPDWGSVQIAYRGAPIDREGLLRYLVSFRTHSEFHEQCVERIFMDISARCAPERLSVYARYTRRGGLDINPFRSSVPGNVPDNRRGARQ

SEQ ID NO: 49231 - protein, 274 aa, Rhodanobacter lindaniclasticus
  REGION 1..274: note = tr|A0A4S3KLH8|A0A4S3KLH8_9GAMM NADPH-dependent 7-cyano-7-deazaguanine reductase OS=Rhodanobacter lindaniclasticus OX=75310 GN=queF PE=3 SV=1
MSTPEHSPLGKDTVYADRYDPSLLFPIPRADKRAEIGVAEALPFHGVDIWNAYELSWLDPRGKPQVALAEFRVPAASPYIIESKSFKLYLNGFAQESIADIDALAETLRHDLSAAAGAVVGVELSPLRAAALPVVELDGELLDEQDIAVDSYGPPDADFLQADTTATAVEETLVSHLLRSNCPVTGQPDWGSVQIAYRGAPIDHAGLLRYLVSFRTHNEFHEQCVERIFVDLTRRCAPLQLRVHARYTRRGGLDINPFRSSTPATPGNPRTVRQ

SEQ ID NO: 49232 - protein, 274 aa, Rhodanobacter sp.
  REGION 1..274: note = tr|A0A1V3PA20|A0A1V3PA20_9GAMM NADPH-dependent 7-cyano-7-deazaguanine reductase OS=Rhodanobacter sp. C05; OX = 1945855 GN=queF PE=3 SV=1
MSTPEHSPLGKSTIYADRYDPSLLFPIPRAGKRGEIGVAEPLPFHGVDIWNAYELSWLDLRGKPVVALAEFRVPAASPNIIESKSFKLYLNGFAQERIADATTLAATLTRDLSAAAGAVVDVKLRDANAAAYAVTDLDGHPLDGQDIAIDHYGPPQADFLHADVSANPIEETVVSHLLRSNCPVTGQPDWGSVQIAYRGAPIDYAGLLRYLVSFRDHNEFHEQCVERIFVDVMQRCAPQELSVHARYTRRGGLDINPFRSSMPATPANSRTVRQ

SEQ ID NO: 49233 - protein, 274 aa, Rhodanobacter sp.
  REGION 1..274: note = tr|A0A522N2Z5|A0A522N2Z5_9GAMM NADPH-dependent 7-cyano-7-deazaguanine reductase OS=Rhodanobacter sp.; OX = 1883446 GN=queF PE=3 SV=1
MSTPEHSPLGKDTGYPDRYDPDRLFPIPRADKRAELGLAEILPFHGVDIWNAYELSWLDRRGKPVVALAEFRVPAASPYIIESKSFKLYLNGFAQERVADADALAATLVRDLSAAVGAVVNVQLSAASATAHHLADLDGYLLDDQLLEIDHYGPPRADFLGTDATAQAIEETLVSHLLRSNCPVTGQPDWGSVQIAYRGTPIGHAGLLRYLVSFRNHNEFHEQCVERIFVDLMQRCAPQQLSVYARYTRRGGLDINPFRSSTPITPDNPRSARQ

SEQ ID NO: 49234 - protein, 274 aa, Rhodanobacter spathiphylli
  REGION 1..274: note = tr|I4W7A4|I4W7A4_9GAMM NADPH-dependent 7-cyano-7-deazaguanine reductase OS=Rhodanobacter spathiphylli B39 OX=1163407 GN=queF PE=3 SV=1
MSTPEHSPLGKDTVYADRYDPGLLFPIPRADKRAEIGLGDVLPFHGVDIWNAYELSWLDLRGKPQVALAEFHVPAASPNIIESKSFKLYLNGFAQERIADAASLTDTLLHDLSAAAGAVVSVQLHAAGGASLPVSVLDGQLLDEQDIAIDSYGPPDADFLQADTAATPVAETLVSHLLRSNCPVTGQPDWGSVQIAYRGAPIDHAGLLRYLVSFRTHNEFHEQCVERIFVDLTQRCAPRQLSVYARYTRRGGLDINPFRSSTPATPDNPRTVRQ

SEQ ID NO: 49235 - protein, 274 aa, Rhodanobacter thiooxydans
  REGION 1..274: note = tr|A0A154QFU9|A0A154QFU9_9GAMM NADPH-dependent 7-cyano-7-deazaguanine reductase OS=Rhodanobacter thiooxydans OX=416169 GN=queF PE=3 SV=1
MSSPEHSPLGKDTVYADRYDPSLLFPIPRADKRAELGIAESLPFHGVDIWNAYELSWLDLRGKPQVALAEFRVPAASPHIIESKSFKLYLNGFAQERIADATTLAATLARDLSAAAGAVVGVQLRDVRADALPVVELDGLLLDGQDIAIDHYGPPDAGFLQADRTATPVAETLLSHLLRSNCPVTGQPDWGSVQIAYRGAPIDHAGLLRYLVSFRTHNEFHEQCVERIFVDLIRRCAPQQLSVHARYTRRGGLDINPFRSSAPATPGNPRTVRQ

SEQ ID NO: 49236 - protein, 275 aa, unidentified
  source 1..275: note = Rhodanobacteraceae bacterium
  REGION 1..275: note = tr|A0A2Z6E1N2|A0A2Z6E1N2_9GAMM NADPH-dependent 7-cyano-7-deazaguanine reductase OS=Rhodanobacteraceae bacterium Dysh456 OX=2010829 GN=queF PE=3 SV=1
MSLLDHSPLGKPSVYADRYDPSRLFPIPRAAKRAELGLGEALPFHGVDVWNAYELSWLDARGKPCVAIAELRVPAASPCIIESKSLKLYLNGFAQERIADADALAATLVRDLSAAAGAAVAVTLHAPRVAALPLAELAGSSIDDQRLDIDDYGPPNPGYLRLVAGAAEVEETLVSDLLRSNCPVTGQPDWGSVRIRYRGAPIDRAGLLRYLVSFRTFDEFHEQCVERIFVDVMARCAPRALEVYARYTRRGGLDINPFRSTDPHASPDNLRTPRQ

SEQ ID NO: 49237 - protein, 273 aa, unidentified
  source 1..273: note = Rhodanobacteraceae bacterium
  REGION 1..273: note = tr|A0A522R3N9|A0A522R3N9_9GAMM NADPH-dependent 7-cyano-7-deazaguanine reductase (Fragment); OS = Rhodanobacteraceae bacterium OX=2052182 GN=queF PE=3; SV = 1
ANPLGHVVEYPATIDPAVLFAVPRAEARRAIGLDPDALPFTGADLWNAWEFSWLDARGLPRVAVLRLAVPCTSPNIVESKSLKLYLGAYAMTPFTGPEAVRAQVERDVSGCIGAKLAMTLLDPHDIERSGIAALAGESLDDQRIEANDYGPARPEFLRAQAGVQAVEETLSTRLFRSLCPVTGQPDWASVVLHYRGAAIDRAGLLRYLVSYRRHPDFHEACVERIFSDVMARCAPEGLSVHARFLRRGGIDINPWRTTPRFAAAPGNPREARQ

SEQ ID NO: 49238 - protein, 157 aa, Rhodobacter aestuarii
  REGION 1..157: note = tr|A0A1N7PCB2|A0A1N7PCB2_9RHOB NADPH-dependent 7-cyano-7-deazaguanine reductase OS=Rhodobacter aestuarii; OX = 453582 GN=queF PE=3 SV=1
MERTDTSGLTQLGQSVAAPTSPEEAVLERVPASHPGTDYTVRFTAPEFTSLCPLTGQPDFAHIVIDYIPGDWLVESKSLKLYLASFRNHGVFHETCSVEIALSWWSCSRRNGYASGPIGIRAGAFRLMSFGKPGRRPKVFGSPIRVWPPIAGAVEKA

SEQ ID NO: 49239 - protein, 154 aa, Rhodobacter sp.
  REGION 1..154: note = tr|A0A3D6CN94|A0A3D6CN94_9RHOB NADPH-dependent 7-cyano-7-deazaguanine reductase OS=Rhodobacter sp.; OX = 1062 GN=queF PE=3 SV=1
MTKTDVSGLTQLGQSTTLPDGPENAVLERVPAGHAGTLYVVRFTAPEFTSLCPMTGQPDFAHIVIDYVPQDWLVESKSLKLYLHSFRNHGAFHEDCTLDIGKKLVALLDPVWLRIGAYWFPRGGIPIDVFWQTGAAPEGVWIPDQGVAPYRGRG

SEQ ID NO: 49240 - protein, 144 aa, unidentified
  source 1..144: note = Rhodobacteraceae bacterium
  REGION 1..144: note = tr|A0A3N9QCE6|A0A3N9QCE6_9RHOB NADPH-dependent 7-cyano-7-deazaguanine reductase OS=Rhodobacteraceae bacterium CH30 OX=2490538 GN=queF PE=3 SV=1
MDLHTDLQSLGNKKTDYRYDEPDASLLERFPNPYAQSAINPNGVTGSLNITCPEFTSLCPVTGQPDFATIVIDMVPGDWCVESKSLKLYLGSFRMHGEFHESCICRICNDLVNLLKPRHIVVEGRFTPRGGIPLWPKAEWKSPA

SEQ ID NO: 49241 - protein, 154 aa, unidentified
  source 1..154: note = Rhodobacteraceae bacterium
  REGION 1..154: note = tr|A0A2V2LLU2|A0A2V2LLU2_9RHOB NADPH-dependent 7-cyano-7-deazaguanine reductase OS=Rhodobacteraceae bacterium TG-679 OX=2072018 GN=queF PE=3 SV=1
MSGIYDGLSQLGGPAAPLPESPEAAVLERVANPQADVAYFVRFTAPEFTSLCPITGQPDFAHLVIDYVPGPWLVESKSLKLYLGAFRNHGAFHEDCTISIARRLVDLMAPAWLRIGGYWYPRGGIPIDVFWQTGTPPEGVWIPDQGVPSYRGRG

SEQ ID NO: 49242 - protein, 155 aa, unidentified
  source 1..155: note = Rhodobacterales bacterium
  REGION 1..155: note = tr|A0A1Z8A396|A0A1Z8A396_9RHOB NADPH-dependent 7-cyano-7-deazaguanine reductase OS=Rhodobacterales bacterium 52_120_T64 OX=1856301 GN=queF PE=3 SV=1
MTKEDIYSNLKQLGGATVLPESPEKAELERVPNPQEGTGYCVRFTAPEFTSLCPMTGQPDFAHLVIDYVPGKWLVESKSLKLYLGSFRNHGAFHEDCTVSIGKRLVDLLEPEWLRIGGYWYPRGGIPIDVFFQTGDVPPNVWIPDQGVPTYRGRG

SEQ ID NO: 49243 - protein, 153 aa, unidentified
  source 1..153: note = Rhodobacterales bacterium
  REGION 1..153: note = tr|A0A259M7G0|A0A259M7G0_9RHOB NADPH-dependent 7-cyano-7-deazaguanine reductase OS=Rhodobacterales bacterium 34-62-10 OX=1970561 GN=queF PE=3 SV=1
MTDIYKDLQQLGSATALPQSPEAAVLEKVANPQAGTAYCVRFTAPEFTSLCPMTGQPDFAHLVIDYVPQHWLVESKSLKLYLGSFRNHGAFHEDCTVSIGRRLVDLLAPEWLRIGGYWYPRGGIPIDVFYQTGPLPDNVWFPDQGVPPYRGRG

SEQ ID NO: 49244 - protein, 154 aa, unidentified
  source 1..154: note = Rhodobiaceae bacterium
  REGION 1..154: note = tr|A0A3C1BKK6|A0A3C1BKK6_9RHIZ NADPH-dependent 7-cyano-7-deazaguanine reductase OS=Rhodobiaceae bacterium; OX = 2026785 GN=queF PE=3 SV=1
MSEPSDTTGAHMLGQATDLPASPDEAVLERVPNPHPDTRYVARFSVPEFTSICPVTGQPDFARLVIDYVPDAFLVESKSFKLYMGSFRNHGAFHEDCTIAIAKRLVDTLAPHWLRIGGYWYPRGGIPIDVFWQSGAVPEGLYVPDPGVASYQGR

SEQ ID NO: 49245 - protein, 145 aa, unidentified
  source 1..145: note = Rhodobiaceae bacterium
  REGION 1..145: note = tr|A0A2E2DX46|A0A2E2DX46_9RHIZ NADPH-dependent 7-cyano-7-deazaguanine reductase OS=Rhodobiaceae bacterium; OX = 2026785 GN=queF PE=3 SV=1
  VARIANT 24: note = Xaa can be any naturally occurring amino acid
  VARIANT 29: note = Xaa can be any naturally occurring amino acid
  VARIANT 90: note = Xaa can be any naturally occurring amino acid
  VARIANT 95: note = Xaa can be any naturally occurring amino acid
MKHLGKENKNFTEPSVKILDKVEXKRKEXFLVRFSQPEFTSICPVTSQPDFAHIVIDYVPNKWIVESKSLKLYFQSFRNHQSFHEDVTMXIAKDXTKFLKPKWFRIGTYWYPRGGMPIDVFWQSSLPPKNLWIPDQGVSGYRGRG

SEQ ID NO: 49246 - protein, 153 aa, Rhodoblastus acidophilus
  REGION 1..153: note = tr|A0A212RIL4|A0A212RIL4_RHOAC NADPH-dependent 7-cyano-7-deazaguanine reductase OS=Rhodoblastus acidophilus OX=1074 GN=queF PE=3 SV=1
MVQTHEGAGLLGVQTRAPQSPDEARLDRVPNPHPDALYLARFTQPEFTSLCPVTGQPDFAHLVIDYVPDKYLVESKSLKLYLTSYRNHGAFHEACTIRIAKDLVSALAPRWLRIGGYWYPRGGMPIDVFWQTGEPPKGLWLPDQGAPSYRGRG

SEQ ID NO: 49247 - protein, 153 aa, Rhodoblastus sphagnicola
  REGION 1..153: note = tr|A0A2S6MXZ3|A0A2S6MXZ3_9RHIZ NADPH-dependent 7-cyano-7-deazaguanine reductase OS=Rhodoblastus sphagnicola OX=333368 GN=queF PE=3 SV=1
MVRTHEGAGLLGAQAQTPKNPDEARLDRVPNPHPDAVYLARFTQPEFTSLCPVTGQPDFAHLVIDYAPDRFLVESKSFKLYLTSFRNHGAFHEDCTIRIAKDLVSALEPRWLRIGGYWYPRGGMPIDVFWQTGEPPKGLWLPDQGAPSYRGRG

SEQ ID NO: 49248 - protein, 166 aa, Rhodococcus qingshengii
  REGION 1..166: note = tr|A0A4R6A051|A0A4R6A051_9NOCA NADPH-dependent 7-cyano-7-deazaguanine reductase OS=Rhodococcus qingshengii OX=334542 GN=queF PE=3 SV=1
MSGRSHEEGLKDLTLLGNQNTQYSFEYAPEVLEAVDNLHPERDYFVKFNCPEFTSLCPLTHQPDFATMYISYIPNQKIVESKSLKLYLFSFRNHGDFHEDCVNIIMNDLIKLLDPRYIEVWGKFTPRGGISIDPWCNYGKPGTKFEEMATFRLMNHDLYPEKVDNR

SEQ ID NO: 49249 - protein, 139 aa, Rhodococcus sp.; identical to SEQ ID NO: 46975
  REGION 1..139: note = tr|A0A2S7TTQ5|A0A2S7TTQ5_9NOCA NADPH-dependent 7-cyano-7-deazaguanine reductase OS=Rhodococcus sp. SAORIC-690 OX=1923970 GN=queF PE=3 SV=1

SEQ ID NO: 49250 - protein, 284 aa, unidentified
  source 1..284: note = Rhodocyclaceae bacterium
  REGION 1..284: note = tr|A0A2K9LCG6|A0A2K9LCG6_9RHOO NADPH-dependent 7-cyano-7-deazaguanine reductase OS=Rhodocyclaceae bacterium OX=1898103 GN=queF PE=3 SV=1
MNNSMQTAPHGAESSPLGRAVTYRDTYAPELLFPIDRQLKRDELGIAANALPFIGADLWNAYELSWLNPRGKPVVALGHIEVPADSPRLVESKSLKLYLNAFNQTRFDSAEAVAATVRADLSAAVGAAVNVTVFPLAASTVRSFGLPDGVCVDELDIEIDTYQPTPEFLRTGCRSRVVEETLYSHLLKSNCLVTGQPDWGMVAVRYRGAAIDRAGLLRYIVSFRSHNEFHEQCVERMFCDIMARCAPQALLVWARYTRRGGLDINPWRGTPGSGSPGNFMEVRQ

SEQ ID NO: 49251 - protein, 277 aa, unidentified
  source 1..277: note = Rhodocyclaceae bacterium
  REGION 1..277: note = tr|A0A524B6R5|A0A524B6R5_9RHOO NADPH-dependent 7-cyano-7-deazaguanine reductase OS=Rhodocyclaceae bacterium OX=1898103 GN=queF PE=3 SV=1
MSHDPSLLSPLGKATEYRADYAPELLFPIPRQIKRDELGISSDALPFVGEDLWNAYELSWLTPSGKPAVALASFRFPADSPMLVESKSFKLYLNSFNQTVFSDKTAVLATLVADLSAAAGAPVSAEIAFLSEQPPVVVDYPQGILLDDLDVACDRYQPAPELLGVSDGAEVEETLYSHLLKSNCLVTGQPDWALVVIRYRGRPIDRAGLLRYIVSFRNHNEFHEQCVERIYCDIRLHCQPSALAVHARYTRRGGLDINPFRSSGGFPAPDNTREARQ

SEQ ID NO: 49252 - protein, 143 aa, unidentified
  source 1..143: note = Rhodocyclales bacterium
  REGION 1..143: note = tr|A0A1G3HSB4|A0A1G3HSB4_9RHOO NADPH-dependent 7-cyano-7-deazaguanine reductase OS=Rhodocyclales bacterium RIFCSPLOWO2_02_FULL_63_24 OX=1802018 GN=queF; PE = 3 SV=1
MPKPAIPTRAKALETFPNPAPQRDYQIHMEIPEFTCLCPKTGQPDFAVLTLDYIADKLCVELKSLKLYIWSFRDEGHFHEDVTNRVLDDLVKATRPRFMRLTARFYVRGGIFTNVVAEHRKKGWTPAARIELAEFPAQSNTRG

SEQ ID NO: 49253 - protein, 143 aa, unidentified
  source 1..143: note = Rhodocyclales bacterium
  REGION 1..143: note = tr|A0A1G3H7N5|A0A1G3H7N5_9RHOO NADPH-dependent 7-cyano-7-deazaguanine reductase OS=Rhodocyclales bacterium GWA2_65_20 OX=1802017 GN=queF PE=3 SV=1
MPKPAVQARAKSLETFANPAPHRDYQIHMEIPEFTCLCPKTGQPDFAVLTLDYIADKVCIELKSLKLYVWSFRDEGHFHEDVANRILDDLAQAAKPRFMRLTARFYVRGGIFTNVVAEHRKKGWKPAAKIELAEFSAQSNTRG

SEQ ID NO: 49254 - protein, 281 aa, Rhodoferax antarcticus
  REGION 1..281: note = tr|A0A1Q8YKE9|A0A1Q8YKE9_9BURK NADPH-dependent 7-cyano-7-deazaguanine reductase OS=Rhodoferax antarcticus ANT.BR OX=1111071 GN=queF PE=3 SV=1
MSIIRSSPLGQTTPYADQYDATLLYPIARAPQRDALGLSARLPFLGADLWTAFELSWLNARGKPQVALAHITVPCESANMIESKSLKLYLGSFSNSRFADAAEVLTHLRTDLNEAAWRGAVVQSSVGVKLIAAEQFDREPLYELDGLSLDRLDLDCDAYTPAAQLLSSQTDEAPVSEVLTSNLLKSNCPVTGQPDWASVQINYFGPQIDQAGLLRYIVSFRNHNGFHEDCVERMFMDIQTRCQTHKLSVYARYTRRGGLDINPFRTSFPQALPANVRTGRQ

SEQ ID NO: 49255 - protein, 281 aa, Rhodoferax fermentans
  REGION 1..281: note = tr|A0A1T1AWH4|A0A1T1AWH4_RHOFE NADPH-dependent 7-cyano-7-deazaguanine reductase OS=Rhodoferax fermentans; OX = 28066 GN=queF PE=3 SV=1
MNPIAHSPLGQATQYVDQYDASLLFPIPRVAQREKLGISQRLPFLGADLWTAFELSWLNTRGKPQLALAHITVPCESANIIESKSFKLYLGSFSNTRFADAAEVQARLRADLTEAAWRGAVVLSSVGVKLIAAELFDQEPIHELDGLSLDRLDLDCDRYTPAPEFLSSATEESPVSEVLTSNLLKSNCPVTGQPDWGSVQISYFGPQIDQAGLLRYIVSFRNHNGFHEDCVERIFMDIQARCLPHKLSVYARYTRRGGLDINPFRSSFPQALPSNVRSARQ

SEQ ID NO: 49256 - protein, 289 aa, unidentified
  source 1..289: note = Rhodoferax ferrireducens
  REGION 1..289: note = sp|Q21VW6|QUEF_RHOFT NADPH-dependent 7-cyano-7-deazaguanine reductase OS=Rhodoferax ferrireducens (strain ATCC BAA-621 / DSM 15236 / T118); OX = 338969 GN=queF PE=3 SV= 1
MNTPQNSPLGQATAYLDQYDASLLFPIARATKRAEIGVTGALPFLGADMWTAFELSWLNLRGKPQVALARFTVPCESPNIIESKSFKLYLNSFNNTRFADVDAVKARLRADLSEAVWRDAGKNVSPDAAAPPSIGVTLLLPELFDREPIYELDGLSLDRLDVECTHYTPAPDLLRVVPDEAPVSEVLVSNLLKSNCPVTGQPDWASVQISYSGAPIDQEGLLQYLVSFRNHNEFHEQCVERIFMDLWTRCKPVRLAVYARYTRRGGLDINPFRTSYAQALPANVRNARQ

SEQ ID NO: 49257 - protein, 285 aa, unidentified
  source 1..285: note = Rhodoferax ferrireducens
  REGION 1..285: note = tr|A0A1W9KW60|A0A1W9KW60_9BURK NADPH-dependent 7-cyano-7-deazaguanine reductase OS=Rhodoferax ferrireducens OX=192843 GN=queF PE=3 SV=1
MQPSLSHPAGNPLGQATVYADQYDAALLFPIPRAPQREKLGLSGRLPFLGADLWTAFELSWLNKRGKPQVALVHITVPCESANIIESKSLKLYLGSFSNTRFAEASEVLARLRTDLTEAAWRGAVMQSSVGVKLIAADQFDREPLFELDGLSLDRLDLDCDTYTPAPELLSAATGEAPVSETLTSHLLKSNCPVTGQPDWASLKISYFGPQIDQAGLLRYIVSFRNHTGFHEDCVERMFMDIQTRCQTHKLSVYARYTRRGGLDINPFRTSFPQALPPNVRTGRQ

SEQ ID NO: 49258 - protein, 288 aa, unidentified
  source 1..288: note = Rhodoferax koreense
  REGION 1..288: note = tr|A0A1P8JTI2|A0A1P8JTI2_9BURK NADPH-dependent 7-cyano-7-deazaguanine reductase OS=Rhodoferax koreense; OX = 1842727 GN=queF PE=3 SV=1
MNTPEQSQLGKTSAYIDQYDASLLFPIPRAGKRAEIGLGADASTGQQPVPFFGADLWTAFELSWLNPRGKPQVALAHITVPCETPNIVESKSFKLYLNSFNNTRFADAQAVRDRIRADISEAVWRGSETPSTVGVKLLLPDAFDREPVHEIDGLSLDRLDLECTHYTPAPELLTATFDEAPVTEVLTSNLLKSNCLVTGQPDWGSVQISYSGPQIDQAGLLRFIVSFRNHNEFHEQCVERIFMEIWRRCRPIKLTVYARYTRRGGLDINPFRTSHPAALPANIRMARQ

SEQ ID NO: 49259 - protein, 281 aa, unidentified
  source 1..281: note = Rhodoferax saidenbachensis
  REGION 1..281: note = tr|A0A1P8KCN7|A0A1P8KCN7_9BURK NADPH-dependent 7-cyano-7-deazaguanine reductase OS=Rhodoferax saidenbachensis OX=1484693 GN=queF PE=3 SV=1
MNTPEQSQLGKASAYIDQYDASLLFPIPRAGKRAEIGVTGAAPFFGADMWTAFELSWLNTRGKPQVALAHFTVPCETTHIVESKSFKLYLNSFNNTRFADFAEVQARLRADISEAVWHGGPMQSSVGVTLIAPELFDREPVFELDGMNLDRLDVECTQYQPAPELLTVGQADAPVSEVLVSNLLKSNCLVTGQPDWGSVQISYTGAPIHQEGLLQYLVSFRNHNEFHEQCVERIFMDIWTRCKPTKLTVYARYTRRGGLDINPFRTSHPQALPGNTRTARQ

SEQ ID NO: 49260 - protein, 281 aa, Rhodoferax sp.
  REGION 1..281: note = tr|A0A515DES8|A0A515DES8_9BURK NADPH-dependent 7-cyano-7-deazaguanine reductase OS=Rhodoferax sp. CHu59-6-5 OX=2509614 GN=queF PE=3 SV=1
MNSPEDSLLGKPASYVDHYDASQLFPIARAAKRAEIGVVGAPPFFGADLWTAFELSWLNLRGKPQVALAHIMVPCESPNIVESKSFKLYLGSFSNTKFADAEAVRACIRADINEAVWRGGPVQSSVGVKVLLPEMFDREPVHELDGLSLDRLDVECSQYTPAPELLMAAFDEQPVTEVLTSNLLKSNCLVTGQPDWGSVQISYSGPQIEQGGLLQYLVSFRNHNEFHEQCVERIFMDLWTRCRPTKLAVYARYTRRGGLDINPFRTSYPQTLPPNIRTARQ

SEQ ID NO: 49261 - protein, 288 aa, Rhodoferax sp.
  REGION 1..288: note = tr|A0A515ES48|A0A515ES48_9BURK NADPH-dependent 7-cyano-7-deazaguanine reductase OS=Rhodoferax sp. Gr-4; OX = 2527691 GN=queF PE=3 SV=1
MNTPEQSQLGKSSAYVDQYDASLLFPIPRKGKREEIGIAGAPPFFGADLWTAFELSWLGPKGKPHVALAHFTIPCEAPNIIESKSFKLYLNSFNNSRFADADEVKNLLRTDLTEALWRDTSGSGAAVPAGSIGVKLVLPELFDREPIYEMDGLSLDRLDVECTRYTPAPELLRVVPDEESPVSEVLTSNLLKSNCLVTGQPDWGSVQISYTGLPIDQEGLLQYLVSFRNHNEFHEQCVERIFMDIWRQCKPQKLTVYARYTRRGGLDINPLRTSAPQALPVNTRTARQ

SEQ ID NO: 49262 - protein, 153 aa, unidentified
  source 1..153: note = Rhodomicrobium udaipurense
  REGION 1..153: note = tr|A0A037UW19|A0A037UW19_9RHIZ NADPH-dependent 7-cyano-7-deazaguanine reductase OS=Rhodomicrobium udaipurense JA643 OX=858455 GN=queF PE=3 SV=1
MNDPTVHLTQLGQRADLPASPDAAALETVPNPHTGSLYVVRFTAPEFTSLCPVTGQPDFAHIVIDYVPRDLLVESKSLKLYLGAFRNHGAFHEDCTVAIGKRLDATLNPHWLRIGGYWYPRGGMPIDVFFAVGDLPHGLWVPEQGVAPYRGRG

SEQ ID NO: 49263 - protein, 153 aa, Rhodomicrobium vannielii
  REGION 1..153: note = tr|E3I3W5|E3I3W5_RHOVT NADPH-dependent 7-cyano-7-deazaguanine reductase OS=Rhodomicrobium vannielii (strain ATCC 17100 / ATH 3.1.1 / DSM 162 / LMG 4299) OX=648757 GN =queF PE=3 SV=1
MNDPTVHLTQLGQRADLPASPDAAALETVPNPHPGSLYVVRFTAPEFTSLCPVTGQPDFAHIVIDYVPRDLLVESKSLKLYLGAFRNHGAFHEDCTVAIGKRLDATLNPHWLRIGGYWYPRGGMPIDVFFAVGDLPHGLWVPEQGVAPYRGRG

SEQ ID NO: 49264 - protein, 154 aa, Rhodopila globiformis
  REGION 1..154: note = tr|A0A2S6NI48|A0A2S6NI48_RHOGL NADPH-dependent 7-cyano-7-deazaguanine reductase OS=Rhodopila globiformis; OX = 1071 GN=queF PE=3 SV=1
MTETPYDHLTLLGHHAAQPGSPDAAKLERVANPAPGKAYVIRLTCPEFTSLCPLTGQPDFAHIMIDYIPGDWIVESKSFKLLMASYRNHGAFHEGCTMEIAAKLVDFLNPVWLRIGAYWYPRGGIPIDIFWQTGPAPSDAWLPAQDVPPYRGRG

SEQ ID NO: 49265 - protein, 121 aa, unidentified
  source 1..121: note = Rhodopirellula bahusiensis
  REGION 1..121: note = tr|A0A2G1W2V5|A0A2G1W2V5_9PLAN NADPH-dependent 7-cyano-7-deazaguanine reductase OS=Rhodopirellula bahusiensis OX=2014065 GN=queF PE=3 SV=1
MSDSASFRDTLEVFDNPAPTRNFTIEHFCPEFTSVCPKTGQPDYGTIVFTYVPDRVCVELKSLKMYLQKFRNEGIFYEQVTNRILDDFVAVVQPRKVTVESKWTPRGGLNSNIIVTYPDPA

SEQ ID NO: 49266 - protein, 121 aa, Rhodopirellula baltica
  REGION 1..121: note = tr|L7CC96|L7CC96_RHOBT NADPH-dependent 7-cyano-7-deazaguanine reductase OS=Rhodopirellula baltica SWK14 OX=993516 GN=queF PE=3 SV=1
MSDTASFRDTLEVFENPAPTRNFTIEHHCPEFTSVCPKTGQPDYGTIVFTYVPDRVCVELKSLKMYLQKFRNEGIFYEQVTNRILDDFVAVVQPRKVTVESKWTPRGGLNSNIIVTYPDEA

SEQ ID NO: 49267 - protein, 121 aa, Rhodopirellula baltica; identical to SEQ ID NO: 49266
  REGION 1..121: note = sp|Q7UVG9|QUEF_RHOBA NADPH-dependent 7-cyano-7-deazaguanine reductase OS=Rhodopirellula baltica (strain DSM 10527 / NCIMB 13988 / SH1) OX=243090 GN=queF; PE = 3 SV=1

SEQ ID NO: 49268 - protein, 121 aa, unidentified; identical to SEQ ID NO: 49266
  source 1..121: note = Rhodopirellula europaea
  REGION 1..121: note = tr|M5SQ66|M5SQ66_9PLAN NADPH-dependent 7-cyano-7-deazaguanine reductase OS=Rhodopirellula europaea SH398 OX=1263868 GN=queF PE=3 SV=1

SEQ ID NO: 49269 - protein, 121 aa, unidentified; identical to SEQ ID NO: 49266
  source 1..121: note = Rhodopirellula europaea
  REGION 1..121: note = tr|M2AX69|M2AX69_9PLAN NADPH-dependent 7-cyano-7-deazaguanine reductase OS=Rhodopirellula europaea 6C OX=1263867 GN=queF PE=3 SV=1

SEQ ID NO: 49270 - protein, 121 aa, unidentified
  source 1..121: note = Rhodopirellula islandica
  REGION 1..121: note = tr|A0A0J1B8R8|A0A0J1B8R8_RHOIS NADPH-dependent 7-cyano-7-deazaguanine reductase OS=Rhodopirellula islandica OX=595434 GN=queF PE=3 SV=1
MSDTASFRETLEVFDNPAPTRNFTIEHHCPEFTSVCPKTGQPDYGTIVFTYVPDQVCVELKSLKMYLQKFRNEGIFYEQVTNRILDDFVAVVQPRKVTVESKWTPRGGLNSNIIVNYPDEA

SEQ ID NO: 49271 - protein, 128 aa, unidentified
  source 1..128: note = Rhodopirellula maiorica
  REGION 1..128: note = tr|M5RNG8|M5RNG8_9PLAN NADPH-dependent 7-cyano-7-deazaguanine reductase OS=Rhodopirellula maiorica SM1 OX=1265738 GN=queF PE=3 SV=1
MEKSKLSDSNHFRELLEVFENPSPTRNFTIQHHCPEFTSVCPKTGQPDYGTIIFTYVPDELCVELKSLKMYLQRFRNEGIFYEAVTNRIMDDFLAVVKPRQATVESRWTPRGGLNSNIIVQYPDVPLG

SEQ ID NO: 49272 - protein, 124 aa, unidentified
  source 1..124: note = Rhodopirellula sallentina
  REGION 1..124: note = tr|M5U8S7|M5U8S7_9PLAN NADPH-dependent 7-cyano-7-deazaguanine reductase OS=Rhodopirellula sallentina SM41 OX=1263870 GN=queF PE=3 SV=1
MNSNPSEFRDILEVFDNPAPQRNFTIEHHCPEFTSVCPKTGQPDYGTIVFTYVPDKICVELKSLKMYLQRFRNEGIFYEAVTNRILDDFVAVVQPRRVKVESRWTPRGGLNSNIIVEYPEESSK

SEQ ID NO: 49273 - protein, 121 aa, Rhodopirellula sp.
  REGION 1..121: note = tr|A0A1Z8M964|A0A1Z8M964_9PLAN NADPH-dependent 7-cyano-7-deazaguanine reductase OS=Rhodopirellula sp. TMED11 OX=1986614 GN=queF PE=3 SV=1
MSESDKFSDILEVFENPNTSRDFTIIHHCPEFTSVCPKTGQPDYGKIIFTYVPDQKCVELKSLKMYLQRFRNEGIFYEAITNRIMDDFLAVVQPKSAKVESQWTPRGGLHSNIVVQFPTES

SEQ ID NO: 49274 - protein, 124 aa, Rhodopirellula sp.
  REGION 1..124: note = tr|M5T675|M5T675_9PLAN NADPH-dependent 7-cyano-7-deazaguanine reductase OS=Rhodopirellula sp. SWK7 OX=595460 GN=queF PE=3 SV=1
MNSNPSEFRDILEVFDNPARQRNFTIEHHCPEFTSVCPKTGQPDYGTIVFTYVPDEVCVELKSLKMYLQRFRNEGIFYEAVTNRILDDFVAVVQPRRLKVESRWTPRGGLNSNIIVEYPDQPAK

SEQ ID NO: 49275 - protein, 163 aa, Rhodoplanes elegans
  REGION 1..163: note = tr|A0A327KQW7|A0A327KQW7_9RHIZ NADPH-dependent 7-cyano-7-deazaguanine reductase OS=Rhodoplanes elegans; OX = 29408 GN=queF PE=3 SV=1
MPRTARPRPSPGRRAGAPLQLGTPTPIPDSPETATLDRVPNPHADTPYVARFTFPEFTSLCPVTGQPDFATLVIDYVPAAWLVESKSLKLYLNSFRNHGSFHEDCTVAIGKRLVAALKPRWLRIGGYFYPRGGMPIDVFFQAGKLPAGVWVPDQGVPTYRGRG

SEQ ID NO: 49276 - protein, 158 aa, unidentified
  source 1..158: note = Rhodoplanes piscinae
  REGION 1..158: note = tr|A0A327KDL7|A0A327KDL7_9RHIZ NADPH-dependent 7-cyano-7-deazaguanine reductase OS=Rhodoplanes piscinae; OX = 444923 GN=queF PE=3 SV=1
MARQPSPRPNSRPLQLGRPAAIPASPAEASLDRVPNPHPDTPYVARFTFPEFTSLCPVTGQPDFATLVIDYVPKAFLVESKSLKLYLNSFRNEGSFHEDCTVAIGKRLAAVLKPRWLRIGGYFYPRGGMPIDVFFQMGKLPAGVWVPDQGVPTYRGRG

SEQ ID NO: 49277 - protein, 152 aa, Rhodoplanes roseus
  REGION 1..152: note = tr|A0A327KRN2|A0A327KRN2_9RHIZ NADPH-dependent 7-cyano-7-deazaguanine reductase OS=Rhodoplanes roseus; OX = 29409 GN=queF PE=3 SV=1
MPRTPRPLQLGRPTSLPASPDDAPLDRVPNPHPDTPYVARFTFPEFTSLCPVTGQPDFATLVIDYVPARHLVESKSLKLYLNSFRNHGSFHEDCTVAIGKRLVSVLKPRWIRIGGYFYPRGGMPIDVFFQAGRLPKGVWVPDQGVPTYRGRG

SEQ ID NO: 49278 - protein, 161 aa, Rhodoplanes sp.
  REGION 1..161: note = tr|A0A127EYP3|A0A127EYP3_9RHIZ NADPH-dependent 7-cyano-7-deazaguanine reductase OS=Rhodoplanes sp. Z2-YC6860 OX=674703 GN=queF PE=3 SV=1
MPRSPKSRKAQTSDGPLLLGRPVPQPASPEEAVLDRVPNPHPDTDYVSRFTAPEFTCMCPITGQPDFAHFVIDYAPGKWLLESKSLKLYLASFRNTGAFHEDCTVGIGKRIAGLLKPKWLRIGGYWYPRGGIPIDIYWQTGKLPGGVWVPDQGVPPYRGRG

SEQ ID NO: 49279 - protein, 164 aa, Rhodopseudomonas faecalis
  REGION 1..164: note = tr|A0A318TL15|A0A318TL15_9BRAD NADPH-dependent 7-cyano-7-deazaguanine reductase OS=Rhodopseudomonas faecalis OX=99655 GN=queF PE=3 SV=1
MPKTPRRSPRQPAAAATPELQLGHEVEWPTTPEAARLDRVPNPQRDTDYLARFTAPEFTSLCPVTGQPDFAHLVIDYAPGAWLLESKSLKLYLAAFRNHGAFHEDCTVAIGKRIAQEIKPKWLRIGGYWYPRGGIPIDVFWQTGRIPKGLWVPEQGVQPYRGRG

SEQ ID NO: 49280 - protein, 158 aa, Rhodopseudomonas palustris
  REGION 1..158: note = tr|A0A0D7EVI6|A0A0D7EVI6_RHOPL NADPH-dependent 7-cyano-7-deazaguanine reductase OS=Rhodopseudomonas palustris OX=1076 GN=queF PE=3 SV=1
MSKTPSKTPKPANLQLGRAVEWPATPEAARLDRVPNPQADTNYLVRFTAPEFTSLCPVTGQPDFAHLMIDYVPGAWLLESKSLKLYIASFRNHGAFHEDCTVAIGKRIAAEIKPKWLRIGGYWYPRGGIPIDVFWQTGKLPKGMWIPEQGVAPYRGRG

SEQ ID NO: 49281 - protein, 158 aa, Rhodopseudomonas palustris
  REGION 1..158: note = sp|Q136E4|QUEF_RHOPS NADPH-dependent 7-cyano-7-deazaguanine reductase OS=Rhodopseudomonas palustris (strain BisB5) OX=316057 GN=queF PE=3 SV=1
MSRSPRKTPKSPSLQLGQAVEWPATPDAARLDRVPNPQAGTDYLVRFTAPEFTSLCPVTGQPDFAHLVIDYAPGAWLVESKSLKLYLASFRNHGGFHEDCTVSIGKRIAAEIKPKWLRIGGYWYPRGGIPIDVFWQTGKLPKGMWVPDQGVAPYRGRG

SEQ ID NO: 49282 - protein, 158 aa, unidentified
  source 1..158: note = Rhodopseudomonas pentothenatexigens
  REGION 1..158: note = tr|A0A336JGX7|A0A336JGX7_9BRAD NADPH-dependent 7-cyano-7-deazaguanine reductase OS=Rhodopseudomonas pentothenatexigens OX=999699 GN=queF PE=3 SV=1
MSKTPRKSAASSPLQLGQAVEWPDRPEAAKLDRVPNPQKDTNFLARFTAPEFTSLCPVTGQPDFAHLVIDYVPGPWLLESKSLKLYLASFRNHGAFHEDCTVAIGKRIAAEIKPKWLRIGGYWYPRGGIPIDVFWQTGKLPKDVWVPDQGVQPYRGRG

SEQ ID NO: 49283 - protein, 158 aa, unidentified; identical to SEQ ID NO: 49281
  source 1..158: note = Rhodopseudomonas pseudopalustris
  REGION 1..158: note = tr|A0A1H8T9B6|A0A1H8T9B6_9BRAD NADPH-dependent 7-cyano-7-deazaguanine reductase OS=Rhodopseudomonas pseudopalustris OX=1513892 GN=queF PE=3 SV=1

SEQ ID NO: 49284 - protein, 158 aa, Rhodopseudomonas sp.
  REGION 1..158: note = tr|A0A0N1LSQ0|A0A0N1LSQ0_9BRAD NADPH-dependent 7-cyano-7-deazaguanine reductase OS=Rhodopseudomonas sp. AAP120 OX=1523430 GN=queF PE=3 SV=1
MSKTPRKTSKPAGLQLGRAVEWPTSPETAQLDRVPNPQAGTDYLVRFTAPEFTSLCPVTGQPDFAHLVIDYVPGAWLVESKALKLYLASFRNHGGFHEDCTVSVGKRIVAAIKPKWLRIGGYWYPRGGMPIDVFWQTGRLPKGVWVPDQGVQPYRGRG

SEQ ID NO: 49285 - protein, 152 aa, unidentified
  source 1..152: note = Rhodospirillaceae bacterium
  REGION 1..152: note = tr|A0A0F2RMC7|A0A0F2RMC7_9PROT NADPH-dependent 7-cyano-7-deazaguanine reductase OS=Rhodospirillaceae bacterium BRH_c57 OX=1629718 GN=queF PE=3 SV=1
MTTDTTSLTQLGTLSGLPASPDAAVLETVPNPHPGTLYLARFAVPEFTSLCPVTGQPDFAHLVIDYVPDELLVESKSLKLFLGSFRNHGAFHEDCTVAVGKRLVEALEPTWLRIGGYWYPRGGIPIDVFWQTGTPPDGLWLPDQGVPAYRGR

SEQ ID NO: 49286 - protein, 154 aa, unidentified
  source 1..154: note = Rhodospirillaceae bacterium
  REGION 1..154: note = tr|A0A5J6MDG1|A0A5J6MDG1_9PROT NADPH-dependent 7-cyano-7-deazaguanine reductase OS=Rhodospirillaceae bacterium R5913 OX=2602015 GN=queF PE=4 SV=1
MARKSRPALTQLGHATKPPASPDEAVLERIPNSQPRERYLVRFACPEFTSICPVTGQPDFAHIVIDYVPKAWIVESKSLKLYLGSFRNHGAFHEDCTVTIGKRLVDELKPHWLRIAGYWYPRGGIPIDVFWQTGAPPKNLWLPEQGVAPYRGRG

SEQ ID NO: 49287 - protein, 147 aa, unidentified
  source 1..147: note = Rhodospirillales bacterium
  REGION 1..147: note = tr|A0A1G3IBH8|A0A1G3IBH8_9PROT NADPH-dependent 7-cyano-7-deazaguanine reductase OS=Rhodospirillales bacterium RIFCSPLOWO2_12_FULL_58_28 OX=1802022 GN=queF; PE = 3 SV=1
MTVTQLGSRTEIADGPERAVLETVADPHPDKDYLVRFSCPEFTSLCPVTGQPDFAHIVIDYVPDALIVESKSLKLFLASFRNHGAFHEDCALAVADKIIKAAKPKWLRIGGYWYPRGGIPIDVFYQTGAPPADLWIPDQGVEAYRGR

SEQ ID NO: 49288 - protein, 152 aa, unidentified
  source 1..152: note = Rhodospirillales bacterium
  REGION 1..152: note = tr|A0A259MBP5|A0A259MBP5_9PROT NADPH-dependent 7-cyano-7-deazaguanine reductase OS=Rhodospirillales bacterium 39-66-50 OX=1970570 GN=queF PE=3 SV=1
MAKYAKLRQLGQATALPASPDQAVLETVPNPHPGTLYLARFTQPEFTSLCPVTGQPDFAHLVIDYVPRAKLVESKSLKLYLNSFRNEAAFHEDCTVGIGKRLVKELTPRWLRIAGYWYPRGGMPIDVFWQTAAPPKGLWLPDTGVAPYRGRG

SEQ ID NO: 49289 - protein, 154 aa, Rhodothalassium salexigens
  REGION 1..154: note = tr|A0A4R2PEY1|A0A4R2PEY1_RHOSA NADPH-dependent 7-cyano-7-deazaguanine reductase OS=Rhodothalassium salexigens DSM 2132 OX=1188247 GN=queF PE=3 SV=1
MKETIYSDLTQLGAAAHMPATPDEAVLETVANPHPDTLYLVRFTCPEFTSLCPVTGQPDFAHLVIDYVPGPKLVESKALKLYLHSFRNTAGFHEACTVKIAKRLAAETEAQWLRIGGYWYPRGGIPIDVFYQTGEPPAGLWLPDPGVASYRGRG

SEQ ID NO: 49290 - protein, 178 aa, unidentified
  source 1..178: note = Rhodothermaceae bacterium
  REGION 1..178: note = tr|A0A2E3R1K7|A0A2E3R1K7_9BACT NADPH-dependent 7-cyano-7-deazaguanine reductase OS=Rhodothermaceae bacterium OX=2026787 GN=queF PE=3 SV=1
MADTPTAADRLDDFHQRALDHTKASLAHMARYGIEPEGRVALFLPPDARQQDIHRMPYTHAARQVVTYTTEPGEFTALCPFSGLPDSGTVRIEYVPGSWLLELKSLKYYLMSWRHIGAAQEDITALLFEDLMRHLGDPHRLVVTTDYTVRGGIHTVCAVDSRDQPAGLGAEAGGDGAA

SEQ ID NO: 49291 - protein, 140 aa, unidentified
  source 1..140: note = Rhodothermaeota bacterium
  REGION 1..140: note = tr|A0A2A5WXX6|A0A2A5WXX6_9BACT NADPH-dependent 7-cyano-7-deazaguanine reductase OS=Rhodothermaeota bacterium MED-G19 OX=1986240 GN=CND83_03545 PE=3 SV=1
MDLKSNIVDPYIGQTAEGKKIRFESVESIKKDELKVFKFNSKKQYIKIYTKEFIAVCPFSGLPDVAKIKIEYYPEGSVALELKSLKYYLISFKNVGIYQEEVTKRIYKDLKKVLDTDKIKITTKYNVRGGLYTTCVEGKL

SEQ ID NO: 49292 - protein, 140 aa, unidentified
  source 1..140: note = Rhodothermaeota bacterium
  REGION 1..140: note = tr|A0A2A5XQD6|A0A2A5XQD6_9BACT NADPH-dependent 7-cyano-7-deazaguanine reductase OS=Rhodothermaeota bacterium MED-G16 OX=1986238 GN=queF PE=3 SV=1
MDLKSNIVDPYIGQTAEGKKIEFESTDSIEKEEIKVFKFNSIKQYIKIYTKEFIAVCPFSGLPDVAKIKIEYYPEGKLALELKSLKYYLISFKNVGIYQEEVTKRIYNDLKEVLKTKKIRITTKYNVRGGLYTTCVEGNL

SEQ ID NO: 49293 - protein, 168 aa, Rhodothermus marinus
  REGION 1..168: note = tr|D0MDN3|D0MDN3_RHOM4 NADPH-dependent 7-cyano-7-deazaguanine reductase OS=Rhodothermus marinus (strain ATCC 43812 / DSM 4252 / R-10) OX=518766 GN=queF; PE = 3 SV=1
MTEQERQALAEKLAALREEALAHTEQALAYMARFGVRPEGRIQPFLPPEARQQHIDRLPYEHAVRQVVVYETEPGEFSAVCPFSGLPDYGVLRIEYVPGSWILELKSLKYYIVSWRNIGAAQEDLTAIIYQDLMRHLEDPEYLRVITVYNVRGGIRTTCTIDSREQGR

SEQ ID NO: 49294 - protein, 168 aa, Rhodothermus marinus
  REGION 1..168: note = tr|G2SH23|G2SH23_RHOMG NADPH-dependent 7-cyano-7-deazaguanine reductase OS=Rhodothermus marinus (strain SG0.5JP17-172) OX=762570 GN=queF PE=3 SV=1
MTEQERQALAEKLAALREEALAHTEQALAYMARFGVRPEGRIQPFLPPEARQQHIDRLPYEHAVRQVVVYETEPGEFSAVCPFSGLPDYGVLRIEYVPGSWILELKSLKYYIVSWRNIGAAQEDLTAIIYQDLMRHLEDPEYLRVTTVYNVRGGIRTTCTIDSREQGR

SEQ ID NO: 49295 - protein, 168 aa, Rhodothermus profundi
  REGION 1..168: note = tr|A0A1M6VWK4|A0A1M6VWK4_9BACT NADPH-dependent 7-cyano-7-deazaguanine reductase OS=Rhodothermus profundi; OX = 633813 GN=queF PE=3 SV=1
MTEQERQRLAEKLAALREEALAHTEQALTYMARFGIRPEGRIQPFLPPESRQQHIDRLPYEHRVRQVVVYETEPGEFSAVCPFSGLPDYGVLRIEYVPGSWILELKSLKYYLVSWRNIGAAQEDLTAIIYQDLMRHLEDPEYLRVTTVYNVRGGIRTTCTIDSREQGR

SEQ ID NO: 49296 - protein, 158 aa, Rhodovarius sp.
  REGION 1..158: note = tr|A0A437MMI9|A0A437MMI9_9PROT NADPH-dependent 7-cyano-7-deazaguanine reductase OS=Rhodovarius sp. CCP-6; OX = 1979269 GN=queF PE=3 SV=1
MSKKSTATETEGLTQLGHATSLPASPDQAVLERVPNPHPDQSYCIRFAAPEFTSLCPLTGQPDFAHLVIDYVPRKWIVESKSLKLYLGSFRNHGSFHEACTMDIGLRIKELLSPRWLRIGGYWYPRGGMPIDVFWQTGEPPKGVWIPEQGVPGYRGRG

SEQ ID NO: 49297 - protein, 157 aa, Rhodovulum sp.
  REGION 1..157: note = tr|J6LGQ6|J6LGQ6_9RHOB NADPH-dependent 7-cyano-7-deazaguanine reductase OS=Rhodovulum sp. PH10; OX = 1187851 GN=queF PE=3 SV=1
MPRKVTPRKNETLQLGHAVAIPASPEEATLDRVPNPHLDTPYVARFTFPEFTSLCPVTGQPDFATLVIDYVPKAYLVESKSLKLYLNSFRNHGAFHEDCTVGIGKRLGALLKPHWLRIGGYFYPRGGMPIDVFFQVGRLPAGVWVPDQGVPTYRGRG

SEQ ID NO: 49298 - protein, 154 aa, Rhodovulum sp.
  REGION 1..154: note = tr|A0A095CW91|A0A095CW91_9RHOB NADPH-dependent 7-cyano-7-deazaguanine reductase OS=Rhodovulum sp. NI22; OX = 1469613 GN=queF PE=3 SV=1
MAKTDVSGLSQLGQAVAQPASPEEATLEKVPAGHAGTKYVVRFTAPEFTSLCPMTGQPDFAHIVIDYIPRDWLVESKSLKLFLTSFRNHGAFHEDCTIDITKRLVALLDPEWLRIGAYWYPRGGIPIDVFWQTGPAPDGVWIPDQGVAPYRGRG

SEQ ID NO: 49299 - protein, 136 aa, unidentified
  source 1..136: note = Richelia intracellularis
  REGION 1..136: note = tr|M1WW40|M1WW40_9NOST NADPH-dependent 7-cyano-7-deazaguanine reductase OS=Richelia intracellularis HM01 OX=1165095 GN=queF PE=3 SV=1
MIQETTSTFNQTAKYGERNIVDGKLITFPNPRTGRHYNINISLPEFTCKCPFSGYPDFATIYIIYIPYEKVIELKSLKLYINGYRDKYISHEESANQILDDFVEACDPLEATVKADFSPRGNVHMIVETKYSQNNH

SEQ ID NO: 49300 - protein, 136 aa, unidentified
  source 1..136: note = Richelia intracellularis
  REGION 1..136: note = tr|M1X4M2|M1X4M2_9NOST NADPH-dependent 7-cyano-7-deazaguanine reductase OS=Richelia intracellularis HH01 OX=1165094 GN=queF PE=3 SV=1
MVQETTSTFNQTVKYGERNIVEGKLITFPNPRIGRHYNINISLPEFTCKCPFSGYPDFATIYITYIPYEKVMELKALKLYINGYRDKYISHEESANQILDDFVEACDPLEATVKADFSPRGNVHMIVETKYSQNNH

SEQ ID NO: 49301 - protein, 117 aa, unidentified
  source 1..117: note = Richelia sp.
  REGION 1..117: note = tr|A0A3B9F6I2|A0A3B9F6I2_9NOST NADPH-dependent 7-cyano-7-deazaguanine reductase OS=Richelia sp.; OX = 2053605 GN=queF PE=3 SV=1
MVEGKLITFPNPRIGRHYNINISLPEFTCKCPFSGYPDFATIYITYIPYEKVMELKALKLYINGYRDKYISHEESANQILDDFVEACDPLEATVKADFSPRGNVHMIVETKYSQNNH

SEQ ID NO: 49302 - protein, 273 aa, Rickettsia africae
  REGION 1..273: note = sp|C3PMB3|QUEF_RICAE NADPH-dependent 7-cyano-7-deazaguanine reductase OS=Rickettsia africae (strain ESF-5) OX=347255 GN=queF PE=3 SV=1
MPLSTSLLGKKSTYKDSYDVTLLFKIPRINNRNELGINSNNLPFYGVDVWNTYELSCLNKNGKPWVGVGTFYIPTDSENIVESKSFKLYLNSFNNFVVESVKELERIILQDLSNVTHAKVTGRIFSINTKVEFGVPSGKNIDDLDIVCNNYGAPDNSLIEYEDVLVEEEINSNLLKSNCLVTGQPDWGTIVIKYKGKKLKYDSFLKYLISFRNCNEFAEQCAERIFTDIKNAISPDFLSIYIVYARRGGIDICPYRSTDKSYTLPSDKRFIRQ

SEQ ID NO: 49303 - protein, 273 aa, Rickettsia akari
  REGION 1..273: note = sp|A8GM19|QUEF_RICAH NADPH-dependent 7-cyano-7-deazaguanine reductase OS=Rickettsia akari (strain Hartford) OX=293614 GN=queF PE=3 SV=1
MPLSTSLLGKTSTYKDSYDATLLFKIPRINNRNALGINSNNLPFYGVDIWNTYELSCINKKGKPWVGVGTFYIPTDSENIVESKSFKLYLNSFNNFVVESVEELERIILQDLSNVTHAKVTGRIFPINTKIAFGVPSGKNIDALDIVCNNYGPPDNSLVEYEEVLVEEEINSNLLKSNCLVTGQPDWGSIVIKYKGKKLKHDSFLKYLISFRNYHEFAEQCAERIFTDIKNAIKPDFLSLYIVYTRRGGIDICPYRSTDKSYSLPSDKRLIRQ

SEQ ID NO: 49304 - protein, 273 aa, unidentified
  source 1..273: note = Rickettsia amblyommatis
  REGION 1..273: note = tr|A0A0F3N0M7|A0A0F3N0M7_RICAM NADPH-dependent 7-cyano-7-deazaguanine reductase OS=Rickettsia amblyommatis str. Ac/Pa OX=1359164 GN=queF PE=3 SV=1
MPLSTSLLGKKSTYKDSYDVTLLFKIPRINNRNELGINSNNLPFYGVDVWNTYELSCLNKNGKPWVGVGTFYIPTDSENIVESKSFKLYLNSFNNFVVESVKELERIILQDLSNVTHAKVTGRIFPINTKVEFGVPSGKNIDDLDIVCNNYGAPDNSLIEYEDVLVEEEINSNLLKSNCLVTGQPDWGTIVIKYKGKKLKHDSFLKYLISFRNCNEFAEQCAERIFTDIKNAISPGFLSIYIVYTRRGGIDICPYRSTDKSYTLPSDKRFIRQ

SEQ ID NO: 49305 - protein, 273 aa, unidentified; identical to SEQ ID NO: 49304
  source 1..273: note = Rickettsia amblyommatis
  REGION 1..273: note = tr|H8K439|H8K439_RICAG NADPH-dependent 7-cyano-7-deazaguanine reductase OS=Rickettsia amblyommatis (strain GAT-30V) OX=1105111 GN=queF PE=3 SV=1

SEQ ID NO: 49306 - protein, 273 aa, unidentified
  source 1..273: note = Rickettsia argasii
  REGION 1..273: note = tr|A0A0F3RD55|A0A0F3RD55_9RICK NADPH-dependent 7-cyano-7-deazaguanine reductase OS=Rickettsia argasii T170-B OX=1268837 GN=queF PE=3 SV=1
MPLSTSLLGKKSTYKDSYDVTLLFKIPRINNRNELGINSNNLPFYGVDVWNTYELSCLNKNGKPWVGVGTFYIPTDSENIVESKSFKLYLNSFNNFVVESVKELERIILQDLSNVTHAKVTGRIFPINTRVEFGVPSGKNIDDLDIVCNNYGAPDNSLIEYEDVLVEEEINSNLLKSNCLVTGQPDWGTIVIKYKGKKLKYNSFLKYLISFRNCNEFAEQCAERIFTDIKNAISPDFLSIYIVYTRRGGIDICPYRSTDKSYTLPSDKRFIRQ

SEQ ID NO: 49307 - protein, 273 aa, unidentified
  source 1..273: note = Rickettsia asembonensis
  REGION 1..273: note = tr|A0A0C2MPE1|A0A0C2MPE1_9RICK NADPH-dependent 7-cyano-7-deazaguanine reductase OS=Rickettsia asembonensis OX=1068590 GN=queF PE=3 SV=1
MPLSNSLLGKKSTYKDSYDATLLFKIPRINNRNELGINSNNLPFYGVDIWNTYELSCLNKNGKPWVGVGTFYIPMDSENIVESKSFKLYLNSFNNFVVESLEELKRIILQDLSNVTHAKVTGRIFPINTKIEFGVPSGKNIDDLDIVCNNYGPPDNSLIEYEDVLVEEEINSNLLKSNCLVTGQPDWGTIVIKYKGKKLKYDSFLKYLISFRNCNEFAEQCAECIFTDIKNAINPDFLSIYIVYTRRGGIDICPYRSTNKSYTLPSDKRFIRQ

SEQ ID NO: 49308 - protein, 273 aa, Rickettsia asiatica
  REGION 1..273: note = tr|A0A510G8Y9|A0A510G8Y9_9RICK NADPH-dependent 7-cyano-7-deazaguanine reductase OS=Rickettsia asiatica; OX = 238800 GN=queF PE=3 SV=1
MPLSTSLLGKKSTYKDSYDATLLFKIPRINNRNALGINSNNLPFYGVDVWNTYELSCLNKNGKPWVGVGTFYIPTDSENIVESKSFKLYLNSFNNFVVESIEALERIILQDLSNVTYAKVTGRILPINTKIEFGVPSGKNIDDLDIVCNNYGPPDNSLIEYEDVLVEEEINSNLLKSNCLVTGQPDWGTIVIKYKGKKLKHDYFLKYLISFRNCNEFAEQCAERIFTDIKNAINPDFLSIYIVYTRRGGIDICPCRSTDKSYTLPSDKRLIRQ

SEQ ID NO: 49309 - protein, 273 aa, Rickettsia australis
  REGION 1..273: note = tr|H8K948|H8K948_RICAC NADPH-dependent 7-cyano-7-deazaguanine reductase OS=Rickettsia australis (strain Cutlack) OX=1105110 GN=queF PE=3 SV=1
MTLSTSLLGKKSTYKDSYDATLLFKIPRINNRNELGINSNNLPFYGVDIWNTYELSCLNKKGKPWVGVGTFYIPTDSENIVESKSFKLYLNSFNNFVVESVEELERIILQDLSNVTHAKVTGRIFPINTKIAFGVPSGKNIDDLDIVCNNYGPPDNSLVEYEDVLVEEEINSNLLKSNCLVTGQPDWGSIVIKYKGKKLKHDSFLKYLISFRNCHEFAEQCAERIFTDIKNAIKPDFLSIYIVYTRRGGIDICPYRSTDKSYSVPSDKRLIRQ

SEQ ID NO: 49310 - protein, 273 aa, Rickettsia bellii
  REGION 1..273: note = sp|Q1RGY9|QUEF_RICBR NADPH-dependent 7-cyano-7-deazaguanine reductase OS=Rickettsia bellii (strain RML369-C) OX=336407 GN=queF PE=3 SV=1
MTLSNSALGKKSTYKDTYDPTLLFKIPRIDNRKELGIVNDKLPFHGVDIWNAYELSWLDKKGKPCVAIFTFFVPTTSSHIVESKSVKLYLNSFNNFVVDSMEELKRTILQDLSNNTHAEVTGEIFPINTKIEFGSPTGINIDDIDIECSEYGPPNNSLIKHEDVLVEEELNSNLLKSNCLVTGQPDWGTIIIKYKGKKLKHDALLKYLVSFRNCNEFAEQCAERIFTDIKNAINPEFLSIYIIYTRRGGIDICPYRSTDSNYTLPSSKRLIRQ

SEQ ID NO: 49311 - protein, 273 aa, Rickettsia bellii; identical to SEQ ID NO: 49310
  REGION 1..273: note = tr|A0A0F3QKE7|A0A0F3QKE7_RICBE NADPH-dependent 7-cyano-7-deazaguanine reductase OS=Rickettsia bellii str. RML Mogi OX=1359194 GN=queF PE=3 SV=1

SEQ ID NO: 49312 - protein, 200 aa, unidentified
  source 1..200: note = Rickettsia buchneri
  REGION 1..200: note = tr|A0A067AKT6|A0A067AKT6_9RICK NADPH-dependent 7-cyano-7-deazaguanine reductase OS=Rickettsia buchneri; OX = 1462938 GN=queF PE=4 SV=1
MDSENIVESKSFKLYLNSFNNFVVESVEELERIILQDLSNVTHAKVTGRIFPINTKIEFGVPSGKNIDDLDIVCNNYGPPDNSLIEYEDVLVEEEINSNLLKSNCLVTGQPDWGTIIIKYKGKKLKHDSFLKYLISFRNCNEFAEQCAERIFTDIKNAINPDFLSIYIVYTRRGGIDICPYRSSTDKSYTLPSDKRLIRQ

SEQ ID NO: 49313 - protein, 273 aa, Rickettsia canadensis
  REGION 1..273: note = sp|A8EXD9|QUEF_RICCK NADPH-dependent 7-cyano-7-deazaguanine reductase OS=Rickettsia canadensis (strain McKiel) OX=293613 GN=queF PE=3 SV=1
MPLSASLLGKNSTYKDSYDATLLFKIPRINNRNELGINSNNLPFYGVDIWNTYELSCLNKNGKPWVGVGTFYIPTDSENIVESKSFKLYLNSFNNFVVESIEELERIILQDLSNVTHAKVTGQIFPINTKIEFGLPSGKNIDDLNIECNNYCPPDNSLIEYEDVLVEEEINSNLLKSNCLVTGQPDWGTIVIKYRGKKLKHDSFLKYLISFRNYNEFAEQCAERIFTDINNSINPDFLSIYIVYTRRGGIDICPYRSLDQNYNLPSNKRLIRQ

SEQ ID NO: 49314 - protein, 420 aa, Rickettsia canadensis
  REGION 1..420: note = tr|A8EXE5|A8EXE5_RICCK 7-cyano-7-deazaguanine reductase OS=Rickettsia canadensis (strain McKiel); OX = 293613 GN=queF PE=4 SV=1
MNRSKLVFSSVIANTFEWYDYVLFGYFAPIIGAKFFPNDEANTALLQAFLVFAIGYLARLLGGIFFGVIGDRFGRKVALTSALFCMSAPTVLIGILPTYHTIGITATILMIIVRILQGLSMGGALTGSISFVIEHTSSKHRGFTGSILMSSICSGLLLGAFVSYIVRHILTASQFDNFGWRIPFLLGFFILFAAFYIKKHTDETPNFKNLREQKKILQSPLEKVITNHWFDILISIFINAPGSIIFYLTTIYLVSFLKISRNFTEDEVNSLASVCYVIMIAVTLLSGYLSDIIGRRKIFVINLVIIIVMTPFLLNNFKNGDFTSIIISQFILAVLAASYIGPEPALQAEFYHANIRNTALSISYNTATSIFGGTTPLVFEYLVQKTGHVTSAVYYIILSCIFALIALSFYKNRSLDKMQS

SEQ ID NO: 49315 - protein, 273 aa, Rickettsia conorii
  REGION 1..273: note = sp|Q92JG5|QUEF_RICCN NADPH-dependent 7-cyano-7-deazaguanine reductase OS=Rickettsia conorii (strain ATCC VR-613 / Malish 7) OX=272944 GN=queF PE=3 SV=1
MPLSTSLLGKKSTYKDSYDVTLLFKIPRINNRNELGINSNNLPFYGVDVWNTYELSCLNKNGKPWVGVGTFYIPTDSENIVESKSFKLYLNSFNNFVVESVKELERIILQDLSNVTHAKVTGRIFPINTKVEFGVPSGKNIDDLDIVCNNYGAPDNSLIEYEDVLVEEEINSHLLKSNCLVTGQPDWGTIVIKYKGKKLKYDSFLKYLISFRNCNEFAEQCAERIFTDIKNAISPDFLSIYIVYARRGGIDICPYRSTDKSYTLPSDKRFIRQ

SEQ ID NO: 49316 - protein, 274 aa, unidentified
  source 1..274: note = Rickettsia endosymbiont
  REGION 1..274: note = tr|A0A0F3R6F3|A0A0F3R6F3_9RICK NADPH-dependent 7-cyano-7-deazaguanine reductase OS=Rickettsia endosymbiont of Ixodes pacificus OX=1133329 GN=queF PE=3; SV = 1
MPLSTSLLGKKSTYKDSYDATLLFKIPRINNRNELGINSNNLPFYGVDVWNTYELSCLNKNGKPWVGVGTFYIPTDSENIVESKSFKLYLNSFNNFVVESVEELERIILQDLSNVTHAKVTGRIFPINTKIEFGVPSGKNIDDLDIVCNNYGPPDNSLIEYEDVLVEEEINSNLLKSNCLVTGQPDWGTIVIKYKGKKLKHDSFLKYLISFRNCNEFAEQCAERIFTDIKNAINPDFLSIYIVYTRRGGIDICPYRSSTDKSYTLPSDKRLIRQ

SEQ ID NO: 49317 - protein, 273 aa, unidentified
  source 1..273: note = Rickettsia endosymbiont
  REGION 1..273: note = tr|A0A161PZ77|A0A161PZ77_9RICK NADPH-dependent 7-cyano-7-deazaguanine reductase OS=Rickettsia endosymbiont of Proechinophthirus fluctus OX=1462733; GN = queF PE=3 SV=1
MPLSTSLLGKKSTYKDSYDVTLLFKIPRINNRNELGINSNNLPFYGVDVWNTYELSCLNKNGKPWVGVGTFYIPTDSENIVESKSFKLYLNSFNNFVVESVKELERIILQDLSNVTHAKVTGRIFPINTKVEFGVPSGKNIDDLDIVCNNYGAPDNSLIEYEDVLVEEEINSNLLKSNCLVTSQPDWGTIVIKYKGKKLKYDSFLKYLISFRNCNEFAEQCAERIFTDIKNAISPDFLSIYIVYARRGGIDICPYRSTDKSYTLPSDKRFIRQ

SEQ ID NO: 49318 - protein, 273 aa, Rickettsia felis
  REGION 1..273: note = sp|Q4UNF0|QUEF_RICFE NADPH-dependent 7-cyano-7-deazaguanine reductase OS=Rickettsia felis (strain ATCC VR-1525 / URRWXCal2) OX=315456 GN=queF PE=3; SV = 1
MPLSTSLLGKKSTYKDSYDATLLFKIPRINNRNELGINSNNLPFYGVDIWNTYELSCLNKNGKPWVGVGTFYIPTDSENIVESKSFKLYLNSFNNFVVESVEELERIILQDLSNVTHAKVTGRIFPINTKIEFSIPSGKNIDDLDIVCNNYGPPDNSLIEYEDVLVEEEINSNLLKSNCLVTGQPDWGTIVIKYKGKKLKHDSFLKYLISFRNCNEFAEQCAERIFTDIKNAINPDFLSIYIVYTRRGGIDICPYRFTNKSYTLPSDKRFIRQ

SEQ ID NO: 49319 - protein, 273 aa, Rickettsia felis; identical to SEQ ID NO: 49318
  REGION 1..273: note = tr|A0A0F3MRJ5|A0A0F3MRJ5_RICFI NADPH-dependent 7-cyano-7-deazaguanine reductase OS=Rickettsia felis str. Pedreira OX=1359196 GN=queF PE=3 SV=1

SEQ ID NO: 49320 - protein, 273 aa, Rickettsia heilongjiangensis
  REGION 1..273: note = tr|G0GWN7|G0GWN7_RICH0 NADPH-dependent 7-cyano-7-deazaguanine reductase OS=Rickettsia heilongjiangensis (strain ATCC VR-1524 / 054) OX=1032845; GN = queF PE=3 SV=1
MPLSTSLLGKKSTYKDSYDVTLLFKIPRINHRNELGININNLPFYGVDVWNTYELSCLNKNGKPWVGVGTFYIPTDSENIVESKSFKLYLNSFNNFVVESVKELERIILQDLSNVTHAKVTGRIFPINTRVEFGVPSGKNIDDLDIVCNNYGAPDNSLIEYEDVLVEEEINSNLLKSNCLVTGQPDWGTIVIKYKGKKLKYDSFLKYLISFRNCNEFAEQCAERIFTDIKNAISPDFLSIYIVYTRRGGIDICPYRSTDKSYTLPSDKRFIRQ

SEQ ID NO: 49321 - protein, 273 aa, Rickettsia japonica
  REGION 1..273: note = tr|A0A3B7DDJ7|A0A3B7DDJ7_RICJA NADPH-dependent 7-cyano-7-deazaguanine reductase OS=Rickettsia japonica; OX = 35790 GN=queF PE=3 SV=1
MPLSTSLLGKKSTYKDSYDVTLLFKIPRINHRNELGINSNNLPFYGVDVWNTYELSCLNKNGKPWVGVGTFYIPTDSENIVESKSFKLYLNSFNNFVVESVKELERIILQDLSNVTHAKVTGRIFPINTRVEFGVPSGKNIDDLDIVCNNYGAPDNSLIEYEDVLVEEEINSNLLKSNCLVTGQPDWGTIVIKYKGKKLKYDSFLKYLISFRNCNEFAEQCAERIFTDIKNAISPDFLSIYIVYTRRGGIDICPYRSTDKSYTLPSDKRFIRQ

SEQ ID NO: 49322 - protein, 273 aa, Rickettsia japonica; identical to SEQ ID NO: 49321
  REGION 1..273: note = tr|G4KLZ3|G4KLZ3_RICJY NADPH-dependent 7-cyano-7-deazaguanine reductase OS=Rickettsia japonica (strain ATCC VR-1363 / YH) OX=652620 GN=queF PE=3 SV=1

SEQ ID NO: 49323 - protein, 273 aa, Rickettsia massiliae
  REGION 1..273: note = sp|A8F0H9|QUEF_RICM5 NADPH-dependent 7-cyano-7-deazaguanine reductase OS=Rickettsia massiliae (strain Mtu5) OX=416276 GN=queF PE=3 SV=1
MPLSTSLLGKKSTYKDSYDVTLLFKIPRINNRNELGINSNNLPFYGVDVWNTYELSCLNKNGKPWVGVGTFYIPTDSENIVESKSFKLYLNSFNNFVVESVKELERIILQDLSNVTHAKVTGRIFPINTKVEFGVPSGKNIDDLDIVCNNYGAPDNSLIEYEDVLVEEEINSNLLKSNCLVTGQPDWGTIVIKYKGKKLKHDSFLKYLISFRNCNEFAEQCAERIFTDIKNAISPDFLSISIVYTRRGGIDICPYRSTDKSYTLPSDKRFIRQ

SEQ ID NO: 49324 - protein, 273 aa, Rickettsia massiliae
  REGION 1..273: note = tr|H6QKQ2|H6QKQ2_RICMA NADPH-dependent 7-cyano-7-deazaguanine reductase OS=Rickettsia massiliae str. AZT80 OX=1105112 GN=queF PE=3 SV=1
MPLSTSLLGKKSTYKDSYDVTLLFKIPRINNRNELGINSNNLPFYGVDVWNTYELSCLNKNGKPWVGVGTFYIPTDSENIVESKSFKLYLNSFNNFVVESVKELERIILQDLSNVTHAKVTGRIFPINTKVEFGVPNGKNIDDLDIVCNNYGAPDNSLIEYEDVLVEEEINSNLLKSNCLVTGQPDWGTIVIKYKGKKLKHDSFLKYLISFRNCNEFAEQCAERIFTDIKNAISPDFLSISIVYTRRGGIDICPYRSTDKSYTLPSDKRFIRQ

SEQ ID NO: 49325 - protein, 274 aa, unidentified
  source 1..274: note = Rickettsia monacensis
  REGION 1..274: note = tr|A0A0B7J3M2|A0A0B7J3M2_9RICK NADPH-dependent 7-cyano-7-deazaguanine reductase OS=Rickettsia monacensis; OX = 109232 GN=queF PE=3 SV=1
MPLSTSLLGKKSTYKDSYDATLLFKIPRINNRNELGINSNNLPFYGVDVWNTYELSCLNKNGKPWVGIGTFYIPTDSENIVESKSFKLYLNSFNNFVVESVEELERIILQDLSNVTHAKVTGRIFPINTKIEFGVPSGKNIDDLDIVCNNYGPPDNSLIEYEDVLVEEEINSNLLKSNCLVTGQPDWGTIVIKYKGKKLKHDSFLKYLISFRNCNEFAEQCAERIFTDIKNAINPDFLSIYIVYTRRGGIDICPYRSSTDKSYTLPSDKRLIRQ

SEQ ID NO: 49326 - protein, 273 aa, Rickettsia montanensis
  REGION 1..273: note = tr|H8KBH9|H8KBH9_RICMS NADPH-dependent 7-cyano-7-deazaguanine reductase OS=Rickettsia montanensis (strain OSU 85-930) OX=1105114 GN=queF PE=3 SV=1
MPLSTSLLGKKSTYKDSYDVTLLFKIPRINNRNELGINSNNLPFYGVDVWNTYELSCLNKNSKPWVGVGTFYIPTDSENIVESKSFKLYLNSFNNFVVESVKELERIILQDLSNVTRAKVTGRIFPINTKVEFGVPGGKNIDDLDIVCNNYGAPDNSLIEYEDVLVEEEINSNLLKSNCLVTGQPDWGTIVIKYKGKKLKHDSFLKYLISFRNCNEFAEQCAERIFTDIKNAISPDFLSIYIVYTRRGGIDICPYRSTDKSYTLPSDKRFIRQ

SEQ ID NO: 49327 - protein, 273 aa, Rickettsia parkeri
  REGION 1..273: note = tr|A0A0F3QNI3|A0A0F3QNI3_RICPA NADPH-dependent 7-cyano-7-deazaguanine reductase OS=Rickettsia parkeri str. Grand Bay OX=1359203 GN=queF PE=3 SV=1
MPLSTSLLGKKSTYKDSYDVTLLFKIPRINNRNELGINSNNLPFYGVDVWNTYELSCLNKNGKPWVGVGTFYIPTDSENIVESKSFKLYLNSFNNFVVESVKELERIILQDLSNVTHAKVTGRIFPINTKVEFGVPSGKNIDDLDIVCNNYGAPDNSLIEYEDVLVEEEINSNLLKSNCLVTGQPDWGTIVIKYKGKKLKYDSFLKYLISFRNCNEFAEQCAERIFTDIKNAISPDFLSIYIVYARRGGIDICPYRSTDKSYTLPSDKRFIRQ

SEQ ID NO: 49328 - protein, 273 aa, Rickettsia peacockii; identical to SEQ ID NO: 49317
  REGION 1..273: note = tr|C4K191|C4K191_RICPU NADPH-dependent 7-cyano-7-deazaguanine reductase OS=Rickettsia peacockii (strain Rustic) OX=562019 GN=queF PE=3 SV=1

SEQ ID NO: 49329 - protein, 273 aa, unidentified
  source 1..273: note = Rickettsia philipii
  REGION 1..273: note = tr|H6PVY3|H6PVY3_RICP3 NADPH-dependent 7-cyano-7-deazaguanine reductase OS=Rickettsia philipii (strain 364D) OX=481009 GN=queF PE=3 SV=1
MPLSTSLLGKKSTYKDSYDVTLLFKIPRINNRNELGINSNNLPFYGVDVWNTYELSCLNKNGKPWVGVGTFYIPTDSENIVESKSFKLYLNSFNNFVVESVKELERIILQDLSNVTHAKVTGRIFPINTKVEFGVPSGKNIDDLDIVCNNYGAPDNSLIEYEDVLVEEEINSNLLKSNCLVTSQPDWGTIVIKYKGKKLKYDSFLKYLISFRNCNEFAEQCAERIFTDIQNAISPDFLSIYIVYARRGGIDICPYRSTDKSYTLPSDKRFIRQ

SEQ ID NO: 49330 - protein, 273 aa, Rickettsia prowazekii
  REGION 1..273: note = sp|Q9ZE74|QUEF_RICPR NADPH-dependent 7-cyano-7-deazaguanine reductase OS=Rickettsia prowazekii (strain Madrid E) OX=272947 GN=queF PE=3 SV=1
MPLSTSLLGKKNTYKDSYDATLLFKIPRINNRNVLGIDSNHLPFYGVDIWNTYEISCLNKNGKPLVGIGTFYIPADSENIVESKSFKLYLNSFNNFIIESIEELERIILQDLSNVTYAKVTGRIFPINTKIEFGIPSGKNIDNLDIVCNNYGPPDNSLIEYEDVLVEEEIYSNLFKSNCLVTGQPDWGTIVIKYKGKKLKYDSFLRYLISFRNFNEFAEQCAERIFIDIKNSINLDFLSIYIVYTRRGGIDICPYRSTDKSYTLPNDKRLIRQ

SEQ ID NO: 49331 - protein, 273 aa, Rickettsia prowazekii; identical to SEQ ID NO: 49330
  REGION 1..273: note = tr|D5AVZ5|D5AVZ5_RICPP NADPH-dependent 7-cyano-7-deazaguanine reductase OS=Rickettsia prowazekii (strain Rp22) OX=449216 GN=queF PE=3 SV=1

SEQ ID NO: 49332 - protein, 273 aa, Rickettsia raoultii
  REGION 1..273: note = tr|A0A126E8K9|A0A126E8K9_9RICK NADPH-dependent 7-cyano-7-deazaguanine reductase OS=Rickettsia raoultii; OX = 369822 GN=queF PE=3 SV=1
MPLSTSLLGKKSTYKYSYDVTLLFKIPRINNRNELGINSNNLPFYGVDVWNTYELSCLNKNGKPWVGVGTFYIPTDSENIVESKSFKLYLNSFNNFVVESVKELERIILQDLSNVTHAKVTGHIFPINTKVEFGVPSGKNIDDLDIVCNNYGASDNSLIEYEDVLVEEEINSNLLKSNCLVTGQPDWGTIVIKYKGKKLKHDSFLKYLISFRNCNEFAEQCAERIFTDIKNAISPDFLSIYIVYTRRGGIDICPYRSTDKSYTLPSDKRFIRQ

SEQ ID NO: 49333 - protein, 273 aa, Rickettsia rhipicephali
  REGION 1..273: note = tr|A0A0S2CAU0|A0A0S2CAU0_RICRH NADPH-dependent 7-cyano-7-deazaguanine reductase OS=Rickettsia rhipicephali OX=33992 GN=queF PE=3 SV=1
MPLSTSLLGKKSTYKDSYDVTLLFKIPRINNRNELGINSNNLPFYGVDVWNTYELSCLNKNGKPWVGVGTFYIPTDSENIVESKSFKLYLNSFNNFVVESVKELERIILQDLSNVTHAKVTGRIFPINTKVEFGVPSGKNIDDLDIVCNNYGAPDNSLIEYEDVLVEEEINSNLLKSNCLVTGQPDWGTIVIKYKGKKLKHDSFLKYLISFRNYNEFAEQCAERIFTDIKNAISPDFLSISIVYTRRGGIDICPYRSTDKSYTLPSDKRFIRQ

SEQ ID NO: 49334 - protein, 273 aa, Rickettsia rhipicephali; identical to SEQ ID NO: 49324
  REGION 1..273: note = tr|A0A0F3PGD3|A0A0F3PGD3_RICRH NADPH-dependent 7-cyano-7-deazaguanine reductase OS=Rickettsia rhipicephali str. Ect OX=1359199 GN=queF PE=3 SV=1

SEQ ID NO: 49335 - protein, 273 aa, Rickettsia rickettsii
  REGION 1..273: note = sp|B0BW26|QUEF_RICRO NADPH-dependent 7-cyano-7-deazaguanine reductase OS=Rickettsia rickettsii (strain Iowa) OX=452659 GN=queF PE=3 SV=1
MPLSTSLLGKKSTYKDSYDVTLLFKIPRINNRNELGINSNNLPFYGVDVWNTYELSCLNKNGKPWVGVGTFYIPTDSENIVESKSFKLYLNSFNNFVVESVKELERIILQDLSNVTHAKVTGRIFPINTKVEFGVPSGKNIDDLDIVCNNYGAPDNSLIEYEDVLVEEEINSNLLKSNCLVTSQPDWGTIVIKYKGKKLKYDSFLKYLISFRNCNEFAEQCAERIFTDIQNAISPDFLSIYIVYARRGGIDICPYRSTDKNYTLPSDKRFIRQ

SEQ ID NO: 49336 - protein, 273 aa, Rickettsia rickettsii; identical to SEQ ID NO: 49335
  REGION 1..273: note = sp|A8GQN6|QUEF_RICRS NADPH-dependent 7-cyano-7-deazaguanine reductase OS=Rickettsia rickettsii (strain Sheila Smith) OX=392021 GN=queF PE=3 SV=1

SEQ ID NO: 49337 - protein, 273 aa, Rickettsia sibirica; identical to SEQ ID NO: 49327
  REGION 1..273: note = tr|Q7PAK9|Q7PAK9_RICS2 NADPH-dependent 7-cyano-7-deazaguanine reductase OS=Rickettsia sibirica (strain ATCC VR-151 / 246) OX=272951 GN=queF PE=3 SV=1

SEQ ID NO: 49338 - protein, 273 aa, Rickettsia slovaca; identical to SEQ ID NO: 49327
  REGION 1..273: note = tr|H8LP50|H8LP50_RICSL NADPH-dependent 7-cyano-7-deazaguanine reductase OS=Rickettsia slovaca str. D-CWPP OX=1105109 GN=queF PE=3 SV=1

SEQ ID NO: 49339 - protein, 273 aa, Rickettsia sp.
  REGION 1..273: note = tr|A0A249E1N2|A0A249E1N2_9RICK NADPH-dependent 7-cyano-7-deazaguanine reductase OS=Rickettsia sp. MEAM1 (Bemisia tabaci) OX=1182263 GN=queF PE=3 SV=1
MTLSNSALGKKSTYKDTYDPTLLFKIPRIDNRKELGIVNDKLPFHGVDIWNAYELSWLDKKGKPCVAIFTFFVPTTSSHIVESKSVKLYLNSFNNFAVDSIDELKKIILQDLSNNTHAEVTGEIFPINTKIEFGEPSGINIDDLDIECSDYGPPNNSLIKHEDVLVEEELNSNLLKSNCLVTGQPDWGTIIIKYKGKKLKHDALLKYLVSFRNCNEFAEQCAERIFTDIKNAINPEFLSIYIIYTRRGGIDICPYRSTDSNYTLPSSKRLIRQ

SEQ ID NO: 49340 - protein, 273 aa, Rickettsia sp.; identical to SEQ ID NO: 49339
  REGION 1..273: note = tr|A0A1C3EYI6|A0A1C3EYI6_9RICK NADPH-dependent 7-cyano-7-deazaguanine reductase OS=Rickettsia sp. wb; OX = 1851512 GN=queF PE=3 SV=1

SEQ ID NO: 49341 - protein, 272 aa, Rickettsia typhi
  REGION 1..272: note = sp|Q68XU6|QUEF_RICTY NADPH-dependent 7-cyano-7-deazaguanine reductase OS=Rickettsia typhi (strain ATCC VR-144 / Wilmington) OX=257363 GN=queF PE=3; SV = 1
MPLSTSLLGKKSTYKDSYDATLLFKIPRINNRNVLGINNNLPFYGVDIWNTYEISCLNKNGKPLVGIGTFYIPADSENIVESKSFKLYLNSFNNFIVKSIEELEQIILQDLSNVTCAKVTGRIFPINTKIEFGIPSGKNIDNLDIVCNNYGPPDNSLIEYEDVLVEEEIHSNLLKSNCLVTGQPDWGTIVIKYKGKKLKYDSFLRYLISFRNCNEFAEQCAERIFIDIKNAINLDFLSIYIVYTRRGGIDICPYRSTDKSYALPSNKRFIRQ

SEQ ID NO: 49342 - protein, 254 aa, unidentified
  source 1..254: note = Rickettsiales bacterium
  REGION 1..254: note = tr|A0A2D7A0Y2|A0A2D7A0Y2_9RICK 7-cyano-7-deazaguanine reductase OS=Rickettsiales bacterium OX=2026788 GN=CMP39_06625 PE=4 SV=1
  VARIANT 25..26: note = Xaa can be any naturally occurring amino acid
  VARIANT 31: note = Xaa can be any naturally occurring amino acid
  VARIANT 41: note = Xaa can be any naturally occurring amino acid
  VARIANT 43: note = Xaa can be any naturally occurring amino acid
  VARIANT 56: note = Xaa can be any naturally occurring amino acid
  VARIANT 59: note = Xaa can be any naturally occurring amino acid
  VARIANT 73: note = Xaa can be any naturally occurring amino acid
  VARIANT 91: note = Xaa can be any naturally occurring amino acid
  VARIANT 100: note = Xaa can be any naturally occurring amino acid
  VARIANT 112: note = Xaa can be any naturally occurring amino acid
  VARIANT 114: note = Xaa can be any naturally occurring amino acid
  VARIANT 117..118: note = Xaa can be any naturally occurring amino acid
  VARIANT 138: note = Xaa can be any naturally occurring amino acid
  VARIANT 140: note = Xaa can be any naturally occurring amino acid
  VARIANT 182: note = Xaa can be any naturally occurring amino acid
  VARIANT 214: note = Xaa can be any naturally occurring amino acid
MKNEKNLLLGKKTNYKKQYSQNILXXIKRAXPSNLSKFYGXDXWNCYDFMFLNEKXVPXAGILTFEVPCESNXIIESKSMKLYLGSFYNRXFKDVDDVLXTLKKDLEEVLKXDXHLXXNLNVNENVKFKKIKSSCLEXDXEKIFESNGIQYCHTNSFRSLCPVTGQPDFASIFFEYESGKIXKDDLRKYIYSFSEKSGFHEECIEEIYTHLKKXYDLHSLVVYGNFNRRGGIDINPIRYSEKKYKVKFERQIRQ

SEQ ID NO: 49343 - protein, 153 aa, unidentified
  source 1..153: note = Rickettsiales bacterium
  REGION 1..153: note = tr|A0A2E9XHC9|A0A2E9XHC9_9RICK NADPH-dependent 7-cyano-7-deazaguanine reductase OS=Rickettsiales bacterium OX=2026788 GN=queF PE=3 SV=1
MKKQYTSLKQLGKNAKQPTSPDQALLESVLNTKKVSENYVVRFTCPEFTSICPITEQPDFAHLVIDYIPNKYLLESKSLKLFLNSFRNHGAFHEECTTMIAQKIIKAIKPKWLRIGGYWNPRGGISIDIFYQTKNPPKNIWIPENYKAYTGRS

SEQ ID NO: 49344 - protein, 269 aa, unidentified
  source 1..269: note = Rickettsiales endosymbiont
  REGION 1..269: note = tr|A0A4Q7DI85|A0A4Q7DI85_9RICK NADPH-dependent 7-cyano-7-deazaguanine reductase OS=Rickettsiales endosymbiont of Peranema trichophorum OX=2486577 GN=queF; PE = 3 SV=1
MSLSHSPLGKVTTSPNRYDSSVLFRISREVQRRTLPTCTSPMDGVDILNCYELSWLNASNKPEVRIAEILIPASSEFLIESKSLKMYFNSFNNTVFKDQLTVERHIIEDLSQTSGTSVLVKLKSVSTQYFPEELQGVVIDDTEIDVELDKIATNALATSDEYVEEALISHLFRSTCPVTGQPDWGSILVVYKGNKITRDGLLKYLISFRSHSAFHENCIERIFVDIMNSCEPQILSVYGRFTRRGGIDINPFRTTHNRFKPHNIRLLRQ

SEQ ID NO: 49345 - protein, 271 aa, unidentified
  source 1..271: note = Rickettsiales endosymbiont
  REGION 1..271: note = tr|A0A3Q8T975|A0A3Q8T975_9RICK NADPH-dependent 7-cyano-7-deazaguanine reductase OS=Rickettsiales endosymbiont of Stachyamoeba lipophora OX=2486578 GN=queF; PE = 3 SV=1
MLENSPLGQKTTYQNKYTPALLFPIARIHKRVEIGIDDHHLPFIGYDIWNAYEVSWLNPKGKPIVQLLEIIYPANSKFIIESKSLKLYLNSFNNTSFNSSDEALQTIKQDLEQTLQTRITLNLVDPETKLGIEAPQGTLIDYLEVEITEYFPNPKLLVIKQDITHETVYSNLLKSNCLITSQPDWGTIIIKYHGQQIDHASLLKYIISFRDHNEFHEQCVERIFKDIMDQCDPKILTVYARYTRRGGIDINPVRSNDPQFIIPQNLRLIRQ

SEQ ID NO: 49346 - protein, 151 aa, unidentified
  source 1..151: note = Rikenellaceae bacterium
  REGION 1..151: note = tr|A0A3B8XE58|A0A3B8XE58_9BACT NADPH-dependent 7-cyano-7-deazaguanine reductase OS=Rikenellaceae bacterium OX=2049048 GN=queF PE=3 SV=1
MARNPEELKALGHHTEYSQNYAPEVLETFVNQHQENDYWVRFNCPEFTTLCPITGQPDFAEIRISYVPDVKMVESKSLKLYLFSFRSHGDFHEDCVNTIMKDLVKLMDPKYIEVTGLFTPRGGISIYPYANYGRPGTKWEQLAWERLAKHE

SEQ ID NO: 49347 - protein, 153 aa, unidentified
  source 1..153: note = Rikenellaceae bacterium
  REGION 1..153: note = tr|A0A351NEU1|A0A351NEU1_9BACT NADPH-dependent 7-cyano-7-deazaguanine reductase OS=Rikenellaceae bacterium OX=2049048 GN=queF PE=3 SV=1
MTDERKAEGLHALGSKTKYRDDYAPEVLETFVNKHQDNDYWVRFNCPEFTSLCPITGQPDFAEIRISYIPDVRMVESKSLKLYLFSFRNHGDFHEDCVNKIMKDLIALMDPKYIEVTGLFTPRGGISIYPYANYGRPGTKFEALAEQRFAQHQ

SEQ ID NO: 49348 - protein, 142 aa, unidentified
  source 1..142: note = Rippkaea orientalis
  REGION 1..142: note = tr|B7JWF0|B7JWF0_RIPO1 NADPH-dependent 7-cyano-7-deazaguanine reductase OS=Rippkaea orientalis (strain PCC 8801) OX=41431 GN=queF PE=3 SV=1
MSQVTNTEASNHESDSSTMKYGERIIEEGELITFPNPRIGRRYDINITLPEFTCKCPFSGYPDFATLYLTYIPDEKVVELKALKLYINRYRDRYISHEESINQILDDFVAACDPLEVTLKGDFNPRGNVHTVIEVRHRKGEN

SEQ ID NO: 49349 - protein, 186 aa, Rivibacter subsaxonicus
  REGION 1..186: note = tr|A0A4V2FSB1|A0A4V2FSB1_9BURK NADPH-dependent 7-cyano-7-deazaguanine reductase OS=Rivibacter subsaxonicus OX=457575 GN=queF PE=3 SV=1
MATTRPKKKPATETPGRPKFPDSPSGGRTPQRGGLGGAPRQREMPANPPTAPSKELHVFPNPAPERDYVIQFQIPEFTCHCPLTGQPDFAHFTIDMIADELCIELKSLKMYFWSFRNEGAFHEKVTNDILSKIVAVTKPRYARISARWYVRGGIYTNVVAEHRKKGWKPAPRIDLPAHAEERGLLG

SEQ ID NO: 49350 - protein, 145 aa, unidentified
  source 1..145: note = Rivicola pingtungensis
  REGION 1..145: note = tr|A0A318L324|A0A318L324_9NEIS NADPH-dependent 7-cyano-7-deazaguanine reductase OS=Rivicola pingtungensis; OX = 1054498 GN=queF PE=3 SV=1
MTLHEHLQHLGSGTTYRYDQPDAALLERFPNPFARGELNPAGVTGTLNISCPEFTSLCPVTGQPDFATIVIDMEPDQWCVESKSLKLYLGSFRMHGEFHEACVCRIANDLVALLQPRWLRVEGRFTPRGGIPLWPKVEYRRPDAG

SEQ ID NO: 49351 - protein, 128 aa, Rivularia sp.
  REGION 1..128: note = tr|K9REJ5|K9REJ5_9CYAN NADPH-dependent 7-cyano-7-deazaguanine reductase OS=Rivularia sp. PCC 7116; OX = 373994 GN=queF PE=3 SV=1
MTQTDIEVKYGEREISEGKLITFPNPRVGRRYNISITLPEFTCKCPFSGYPDFATIYVNYVPDEKVVELKAIKLYINSYRDRYISHEESANQILDDIVAACDPLEINVKADFTPRGNVHTVVEVNHKK

SEQ ID NO: 49352 - protein, 276 aa, unidentified
  source 1..276: note = Robbsia andropogonis
  REGION 1..276: note = tr|A0A0F5K5I8|A0A0F5K5I8_9BURK NADPH-dependent 7-cyano-7-deazaguanine reductase OS=Robbsia andropogonis; OX = 28092 GN=queF PE=3 SV=1
MTPEQSSLGKSVGYTDRYDPSLLFPIPRAQGRTMLGIAPGATLPFFGADIWNAYELSWLNGRGKPQIAVLTLIVPADAPCIVESKSLKLYLGSFAQTRQESIEILRDTLRHDIGAVCGASVSVQLTPPHAFGRLTLDELSGTDVDRLDLDCEVYTPDPSFLQARFDEAPVEETLVSNLLRSNCPVTGQPDWGSVQIHYAGPQIDQAGLLRYIVSFREHTGFHEQCVEQIFLDLLRQCRPVKLAVYARYTRRGGLDINPFRTNFNMPVPDNARTARQ

SEQ ID NO: 49353 - protein, 274 aa, unidentified
  source 1..274: note = Robbsia sp.
  REGION 1..274: note = tr|A0A494YFT2|A0A494YFT2_9BURK NADPH-dependent 7-cyano-7-deazaguanine reductase OS=Robbsia sp. DHC34; OX = 2419776 GN=queF PE=3 SV=1
MNPDQSPLGKPAEYLQHYDPTLLFPIERLRGRSAIGLTGALPFFGTDLWNAYELSWLNARGKPQIAIATFAIPAESPHIIESKSFKLYLGSFANTVVESADALAATLRTDLSAVAGAPVKVRLTSPFEFGKLEFDELDGLSLDRLDLDTDVYEPTASLLGANFDEAPVEETLTSNLLKTNCPVTGQPDWGSVQVFYHGPQIDQAGLLRYIISFRNHTGFHEQCVEQMFVDIQRECRPTRLAIYARYTRRGGLDINPFRTNFSMPSPDNARTARQ

SEQ ID NO: 49354 - protein, 157 aa, Robiginitomaculum sp.
  REGION 1..157: note = tr|A0A2G2R1E9|A0A2G2R1E9_9RHOB NADPH-dependent 7-cyano-7-deazaguanine reductase OS=Robiginitomaculum sp.; OX = 2030823 GN=queF PE=3 SV=1
  VARIANT 92: note = Xaa can be any naturally occurring amino acid
MTDTPYDKLGQLGSHTDTPKTPDEAKLERVANPVLNAKGEPYLIRFTCPEFTSLCPVTGQPDFAHLVIDYAPDKWIVESKSLKLFLTSFRNXGDFHEACTVGIGQRIIKEIKPLWLRIGGYWYPRGGIPIDVFYQHGTQPKGLWVPDQGVAPYRGRG

SEQ ID NO: 49355 - protein, 157 aa, Robiginitomaculum sp.
  REGION 1..157: note = tr|A0A2G1YTQ0|A0A2G1YTQ0_9RHOB NADPH-dependent 7-cyano-7-deazaguanine reductase OS=Robiginitomaculum sp.; OX = 2030823 GN=queF PE=3 SV=1
MTDTPYDKLGQLGSHTDTPKTPDEAKLERVANPVLNAKGEPYLIRFTCPEFTSLCPVTGQPDFAHLVIDYAPDKWIVESKSLKLFLTSFRNHGDFHEACTVGIGQRIIKEIKPLWLRIGGYWYPRGGIPIDVFYQHGTQPKGLWVPDQGVAPYRGRG

SEQ ID NO: 49356 - protein, 279 aa, unidentified
  source 1..279: note = Rodentibacter genomosp.
  REGION 1..279: note = tr|A0A1V3J9I1|A0A1V3J9I1_9PAST NADPH-dependent 7-cyano-7-deazaguanine reductase OS=Rodentibacter genomosp. 1 OX=1908264 GN=queF PE=3 SV=1
MNKQNYGLDALKLGQKTDYANEYDRTLLQPVPRALNRDDLGITKAQPFTIGADIWTAYEISWLNEKGVPQVAIADIYLDHQSKNLIESKSFKLYLNSFNQTKFADFSQVAHIMQQDLAECAQGEVKVRLNPLAFYQTQQIDRLQGECIDEQDIEITDYQFNTGWLENCVSDEVVEEYLVSHLLKSNCLITNQPDWGSLQIHYIGKKIDREKLLRYVVSFRQHNEFHEQCVERIFCDLMHYAKPEKLTVYARYTRRGGLDINPFRSNFEPLPENLRLARQ

SEQ ID NO: 49357 - protein, 279 aa, unidentified
  source 1..279: note = Rodentibacter genomosp.
  REGION 1..279: note = tr|A0A1V3JGN5|A0A1V3JGN5_9PAST NADPH-dependent 7-cyano-7-deazaguanine reductase OS=Rodentibacter genomosp. 2 OX=1908266 GN=queF PE=3 SV=1
MNKQDYGLASLKLGQKTDYTNKYDRTLLQAVPRALNRDDLGITQKQPFTIGADIWTAYEISWLNEKGVPQVAIADIYLDHQSQNLIESKSFKLYLNSFNQTKFANFNQVAHIMQQDLAECAQGEVKVRLNPLAFYQTQQIDRLQGECIDEQDIEITDYQFNAGWLENCLSDEVVEEYLVSHLLKSNCLITNQPDWGSLQIHYVGKKINREKLLRYVVSFRQHNEFHEQCVERIFCDLMHYAKPEKLTVYARYTRRGGLDINPFRSNFETLPENLRLARQ

SEQ ID NO: 49358 - protein, 279 aa, unidentified
  source 1..279: note = Rodentibacter heidelbergensis
  REGION 1..279: note = tr|A0A1V3ICI8|A0A1V3ICI8_9PAST NADPH-dependent 7-cyano-7-deazaguanine reductase OS=Rodentibacter heidelbergensis OX=1908258 GN=queF PE=3 SV=1
MNKQDYGLTSLKLGQKTNYANKYDCTLLQAVPRALNRDALGISQSQPFTIGADIWTAYEISWLNEKGVPQVAIADIYLDHQSQNLIESKSFKLYLNSFNQTKFANFNQVAQIMQQDLTECAQGEVKVRLNSLAFYQNQQIDRLQGECIDEQDIEITDYQFNAGWLDNCVSDEVVEEYLVSHLLKSNCLITNQPDWGSLQIHYVGKKIDREKLLRYVVSFRQHNEFHEQCVERIFCDLMHYAKPQKLTVYARYTRRGGLDINPFRSNFENLPENLRLARQ

SEQ ID NO: 49359 - protein, 280 aa, unidentified
  source 1..280: note = Rodentibacter heylii
  REGION 1..280: note = tr|A0A1V3K915|A0A1V3K915_9PAST NADPH-dependent 7-cyano-7-deazaguanine reductase OS=Rodentibacter heylii; OX = 1906744 GN=queF PE=3 SV=1
MTIYQNDILKTLKLGQQTEYTSTYNRALLQPVPRKLNRDNLGITQSQPFDQGADIWTAYELSWLNSKGLPQVAIADVEIDFRSENLIESKSFKLYLNSFNQTKFCTFEEVEQLLQKDLSDCAKGKVKVWLNALENYSQQKINTLNGECLDNQDIEITDYSFNTDWLKNCTTEEVVEETLVSHLLKSNCLITNQPDWGSIQVHYIGRQIDREKLLRYLISFRQHNEFHEQCVERIFCDLMKYAKPKKLTVYARYTRRGGLDINPFRSNFEGVPHNFRLARQ

SEQ ID NO: 49360 - protein, 279 aa, unidentified
  source 1..279: note = Rodentibacter heylii
  REGION 1..279: note = tr|A0A1V3KQZ9|A0A1V3KQZ9_9PAST NADPH-dependent 7-cyano-7-deazaguanine reductase OS=Rodentibacter heylii; OX = 1906744 GN=queF PE=3 SV=1
MNKQDNGLTSLKLGQKTEYVSEYDRTLLQSVPRALNRDDLGITQTQPFTIGADIWTAYEVSWLNEKGVPQVAIADIYLDQQSQNLIESKSFKLYLNSFNQSKFTDFKQVTQVMQQDLTECVQGEVKVRLNPLSFYQTQKIDHLQGDCIDGQDIDITNYEFNPDWLKDCVSNERVEEYLVSHLLKSNCLITNQPDWGTLQIHYIGKKINREKLLRYVVSFRQHNEFHEQCVERIFCDLMRYAKPEKLTVYARYTRRGGLDINPFRSNFETLPENLRLARQ

SEQ ID NO: 49361 - protein, 279 aa, unidentified; identical to SEQ ID NO: 49357
  source 1..279: note = Rodentibacter mrazii
  REGION 1..279: note = tr|A0A1V3IBU5|A0A1V3IBU5_9PAST NADPH-dependent 7-cyano-7-deazaguanine reductase OS=Rodentibacter mrazii; OX = 1908257 GN=queF PE=3 SV=1

SEQ ID NO: 49362 - protein, 279 aa, unidentified
  source 1..279: note = Rodentibacter myodis
  REGION 1..279: note = tr|A0A1V3JNT7|A0A1V3JNT7_9PAST NADPH-dependent 7-cyano-7-deazaguanine reductase OS=Rodentibacter myodis; OX = 1907939 GN=queF PE=3 SV=1
MNYHDNSLKSLKLGHNTEYASKYDRTLLQPVPRALNRDDLGITETQPFTIGADIWTAYEISWLNEKGLPQVAIADIYLDYRSQNLIESKSFKLYLNSFNQSKFANIEQVAQTLQQDLTDCAQGEVKVRLNSLSFYHGQKIDVLAGHCIDESDIEINDYAFNADWLKDCVSNEIVEERLVSHLLKSNCLITHQPDWGTLQIHYVGEKIDREKLLRYVVSFRQHNEFHEQCVERIFCDLMHYAKPEKLTVYARYTRRGGLDINPFRSNFEPVPHNQRLARQ

SEQ ID NO: 49363 - protein, 279 aa, unidentified
  source 1..279: note = Rodentibacter pneumotropicus
  REGION 1..279: note = tr|A0A4V3SQW1|A0A4V3SQW1_9PAST NADPH-dependent 7-cyano-7-deazaguanine reductase OS=Rodentibacter pneumotropicus OX=758 GN=queF PE=3 SV=1
MNKQDYGLASLKLGQKTEYADEYDRTLLQAVPRALNRDELGITKTPPFTIGADIWTAYEISWLNEKGVPQVAIADIYLDHQSQNLIESKSFKLYLNSFNQTKFIDFKQVAQIMQQDLAECAQGEVKVRLNPLAFFQTQQIDLLQGECIDDQDIEITDYQFNAGWLENCVSDEVVEEYLVSHLLKSNCLITNQPDWGSLQIHYVGKKIDQEKLLRYVISFRQHNEFHEQCVERIFCDLMHYAKPEKLTVYARYTRRGGLDINPFRSNFETLPKNLRLARQ

SEQ ID NO: 49364 - protein, 42 aa, unidentified
  source 1..42: note = Rodentibacter pneumotropicus
  REGION 1..42: note = tr|A0A3S4U0H8|A0A3S4U0H8_9PAST NADPH-dependent 7-cyano-7-deazaguanine reductase OS=Rodentibacter pneumotropicus OX=758 GN=queF_1 PE=4 SV=1
MHYAKPEKLTVYARYTRRGGLDINPFRSNFETLPKNLRLARQ

SEQ ID NO: 49365 - protein, 279 aa, unidentified
  source 1..279: note = Rodentibacter rarus
  REGION 1..279: note = tr|A0A1V3IK85|A0A1V3IK85_9PAST NADPH-dependent 7-cyano-7-deazaguanine reductase OS=Rodentibacter rarus; OX = 1908260 GN=queF PE=3 SV=1
MNKQDYGLASLKLGQKTDYANEYDRTLLQAVPRALNRDDLGITQSQPFTIGADIWTAYEISWLNEKGVPQVAIADIYLDHQSQNLIESKSFKLYLNSFNQTKFANFNQVAQIMQQDLTECAQGEVKVRLNSLAFYQNQQIDTLQGECIDEQDIEITDYQFNAGWLDNCVSDEVVEEYLVSHLLKSNCLITNQPDWGSLQIHYVGKKIDREKLLRYVVSFRQHNEFHEQCVERIFCDLMHYAKPQKLTVYARYTRRGGLDINPFRSNFENLPENLRLARQ

SEQ ID NO: 49366 - protein, 279 aa, unidentified
  source 1..279: note = Rodentibacter ratti
  REGION 1..279: note = tr|A0A1V3LBE5|A0A1V3LBE5_9PAST NADPH-dependent 7-cyano-7-deazaguanine reductase OS=Rodentibacter ratti; OX = 1906745 GN=queF PE=3 SV=1
MNKQDYGLSSLKLGKKTDYANEYNRTLLQAVPRALNRDDLGITQKQPFTIGADIWTAYEISWLNEKGVPQVAIADIYLDHQSQNLIESKSFKLYLNSFNQTKFADFNQVAQIMQQDLAECAQGEVKVRLNPLAFYQTQQIDRLQGECIDEQDIEITDYQFNAGWLENCVSDEVVEEYLVSHLLKSNCLITNQPDWGSLQIHYVGKKIDREKLLRYVVSFRQHNEFHEQCVERIFCDLMHCAKPEKLTVYARYTRRGGLDINPFRSNFEDLPENLRLARQ

SEQ ID NO: 49367 - protein, 279 aa, unidentified
  source 1..279: note = Rodentibacter ratti
  REGION 1..279: note = tr|A0A1V3L529|A0A1V3L529_9PAST NADPH-dependent 7-cyano-7-deazaguanine reductase OS=Rodentibacter ratti; OX = 1906745 GN=queF PE=3 SV=1
MNKQDYGLSSLKLGQKTDYADKYDRTLLQAVPRALNRDDLGITQKQPFTIGADIWTAYEISWLNEKGVPQVAIADIYLDHQSQNLIESKSFKLYLNSFNQTKFADFNQVAQIMQQDLAECAQGEVKVQLNSLAFYHSQKIDRLQGECIDEQDLEIIDYQFNAGWLENCVSDEMVEEYLVSHLLKSNCLITNQPDWGSLQIHYVGKKIDREKLLRYVVSFRQHNEFHEQCVERIFCDLIHYAKPAKLTVYARYTRRGGLDINPFRSNFEDLPENLRLARQ

SEQ ID NO: 49368 - protein, 279 aa, unidentified
  source 1..279: note = Rodentibacter sp.
  REGION 1..279: note = tr|A0A1V3JZK9|A0A1V3JZK9_9PAST NADPH-dependent 7-cyano-7-deazaguanine reductase OS=Rodentibacter sp. Ppn85 OX=1908525 GN=queF PE=3 SV=1
MNNQGNGLTSLKLGQKTEYVSEYDRTLLQPVPRALNRDDLGITQTQPFTMGADIWTAYEVSWLNVKGVPQVAIADIYLDQQSQNLIESKSFKLYLNSFNQSKFTDFKQVARVMQQDLTECAQGEVKVRLNPLSFYQAQKIDHLQGDCIDEQDIEITNYEFNPNWLKDCVSDERVEEYLVSHLLKSNCLITNQPDWGTLQIHYIGKKINREKLLRYVVSFRQHNEFHEQCVERIFCDLMRYAKPEKLTVYARYTRRGGLDINPFRSNFEILPENLRLARQ

SEQ ID NO: 49369 - protein, 279 aa, unidentified
  source 1..279: note = Rodentibacter trehalosifermentans
  REGION 1..279: note = tr|A0A1V3IUG5|A0A1V3IUG5_9PAST NADPH-dependent 7-cyano-7-deazaguanine reductase OS=Rodentibacter trehalosifermentans OX=1908263 GN=queF PE=3 SV=1
MMHKDYDLTSLKLGQKTDYACEYDRTLLQAVPRALNRDDLGISQVQPFTIGADIWTAYEISWLNKKGIPQVAIADIYLDHQSQYLIESKSFKLYLNSFNQSKFDDFDQVAQIMRRDLAQCAQGDVKVRLNSLEFYDLQKIERLQGECIDAQDIEITDYQFNANWLKNCISDEIVEEYLVSHLLKSNCLITNQPDWGSLQIHYIGQKIDREKLLRYVVSFRQHNEFHEQCVERIFCDLMHYAKPEKLTVYARYTRRGGLDINPFRSNFETLPENLRLARQ

SEQ ID NO: 49370 - protein, 279 aa, unidentified
  source 1..279: note = Rodentibacter trehalosifermentans
  REGION 1..279: note = tr|A0A1V3J1U6|A0A1V3J1U6_9PAST NADPH-dependent 7-cyano-7-deazaguanine reductase OS=Rodentibacter trehalosifermentans OX=1908263 GN=queF PE=3 SV=1
MMHKDYDLTSLKLGQKTDYACEYDRTLLQAVPRALNRDDLGISQVQPFTIGADIWTAYEISWLNKKGIPQVAIADIYLDHQSQYLIESKSFKLYLNSFNQSKFDDFDQVAQIMRRDLAQCAQGDVKVRLNSLEFYDLQKIERLQGECIDAQDIEITDYQFNANWLKNCISDEIVEEYLVSHLLKSNCLITNQPDWGSLQIHYIGQKIDREKLLRYVVSFRQHNEFHEQCVERIFCDLMHCAKPEKLTVYARYTRRGGLDINPFRSNFETLPENLRLARQ

SEQ ID NO: 49371 - protein, 143 aa, Roseateles aquatilis
  REGION 1..143: note = tr|A0A246IVC5|A0A246IVC5_9BURK NADPH-dependent 7-cyano-7-deazaguanine reductase OS=Roseateles aquatilis; OX = 431061 GN=queF PE=3 SV=1
MPPNPPSRPSKEIHVFPNPAPERDYVIQFQIPEFTCHCPLTGQPDFAHFTIDMIADEYCVELKSLKMYFWSYRDEGAFHEKVTNTILEDIVKVTNPRFIRITAKWYVRGGIYTNVVAEHRKKGWKPLPAVDLPAHGFESGLLR

SEQ ID NO: 49372 - protein, 146 aa, Roseateles depolymerans
  REGION 1..146: note = tr|A0A2W5DI46|A0A2W5DI46_9BURK NADPH-dependent 7-cyano-7-deazaguanine reductase OS=Roseateles depolymerans OX=76731 GN=queF PE=3 SV=1
MREVPKNPPSKPSKDILVFPNPNPERDYVIQFQVPEFTCHCPLTGQPDFAHFTIDMIADELCVELKSLKMYFWSYRNEGAFHEKVTNTILDDIVKVTDPRFIRITAKWYVRGGIYTNVVAEHRKPGWTPAPRVELPAHGFESGMLG

SEQ ID NO: 49373 - protein, 196 aa, Roseateles depolymerans
  REGION 1..196: note = tr|A0A0U3CZM4|A0A0U3CZM4_9BURK NADPH-dependent 7-cyano-7-deazaguanine reductase OS=Roseateles depolymerans OX=76731 GN=queF PE=3 SV=1
MAKTTSAKTSSAAASTDSKPAPKAERNAALKPTASEAKGANKGKPAAQPKMREMPPNPPSAPSKEIHVFPNPAPERDYVIQFQVPEFTCHCPLTGQPDFAHFTIDMIADEYCVELKSLKMYFWSYRNEGAFHEKVTNTILDDIVKVTKPRYIRITAKWYVRGGIYTNVVAEHRKKGWKPLPAVDIPSHSFESGLLR

SEQ ID NO: 49374 - protein, 180 aa, Roseateles sp.
  REGION 1..180: note = tr|A0A1H7MCL9|A0A1H7MCL9_9BURK NADPH-dependent 7-cyano-7-deazaguanine reductase OS=Roseateles sp. YR242; OX = 1855305 GN=queF PE=3 SV=1
MAKTTPAKPLNKSPNTASAKAPRKATAAAAAEPKMRDMPPNPPSKPSKEIHVFPNPAPERDYVIQFQVPEFTCHCPLTGQPDFAHFTIDMIADKYCVELKSLKMYFWSYRNEGAFHEKVTNTILDDIVKVTNPRYIRITAKWYVRGGIYTNVVAEHRKKGWKPLPAVDIPSHSFESGLLR

SEQ ID NO: 49375 - protein, 158 aa, Roseburia sp.
  REGION 1..158: note = tr|A0A1Q6U1C2|A0A1Q6U1C2_9FIRM NADPH-dependent 7-cyano-7-deazaguanine reductase OS=Roseburia sp. CAG:197_41_10 OX=1897018 GN=queF PE=3 SV=1
MAGNITLLGNQKTKYPENYAPDVLETFINKHQENDYFVKFNCPEFTSLCPITGQPDFATVTISYVPDVKMVESKSLKLYLFSFRNHGDFHEDCMNIIMKDLIKLMDPRYIEVWGKFTPRGGISIDPYCNYGKPGTKWEEIACNRMANHDMYPEKVDNR

SEQ ID NO: 49376 - protein, 165 aa, Roseburia sp.; identical to SEQ ID NO: 44648
  REGION 1..165: note = tr|A0A417UV41|A0A417UV41_9FIRM NADPH-dependent 7-cyano-7-deazaguanine reductase OS=Roseburia sp. OM04-10AA OX=2293141 GN=queF PE=3 SV=1

SEQ ID NO: 49377 - protein, 154 aa, unidentified
  source 1..154: note = Roseiarcus fermentans
  REGION 1..154: note = tr|A0A366EQ85|A0A366EQ85_9RHIZ NADPH-dependent 7-cyano-7-deazaguanine reductase OS=Roseiarcus fermentans; OX = 1473586 GN=queF PE=3 SV=1
MTKKPKPEFAHLGKTSTIPDEPDIAILDRAPNPHDDSDFVVRFVTPEFTSICPMTGQPDFAHLVIDYVPDKWIVESKSLKLYLLSFRHHGAFHEDCTVRIGKDLVATLKPRWLRIGGYWYPRGGIPIDVFWQSGKPPAGVWLPDQGVAPYRGRG

SEQ ID NO: 49378 - protein, 137 aa, Roseibacillus sp.
  REGION 1..137: note = tr|A0A424HYQ4|A0A424HYQ4_9BACT NADPH-dependent 7-cyano-7-deazaguanine reductase OS=Roseibacillus sp. TMED18 OX=1986590 GN=queF PE=3 SV=1
MTSGTAEDFSFLGHESSLPASPDEAKLDTFANKSPGRGYTITLDCPEFSSLCPVTGQPDSAHIQISYVPDELCVETKSLKYYLASYRNLPCFNEEIVNRILDDLVAATKPQRMDVVGEFSPRGGISLTASASYPDEW

SEQ ID NO: 49379 - protein, 137 aa, Roseibacillus sp.
  REGION 1..137: note = tr|A0A2E5D9V5|A0A2E5D9V5_9BACT NADPH-dependent 7-cyano-7-deazaguanine reductase OS=Roseibacillus sp.; OX = 2024856 GN=queF PE=3 SV=1
MSSGTADDFSFLGHESSLPASPDEAKLDTFANKSPGRGYTITLDCPEFSSLCPVTGQPDTAHLQISYVPDELCVETKSLKYYLASYRNLPCFNEEIVNRILDDLVAATKPQRMDVVGEFSPRGGISLTASASYPDEW

SEQ ID NO: 49380 - protein, 155 aa, Roseibium hamelinense
  REGION 1..155: note = tr|A0A562SKM7|A0A562SKM7_9RHOB NADPH-dependent 7-cyano-7-deazaguanine reductase OS=Roseibium hamelinense; OX = 150831 GN=queF PE=3 SV=1
MSDKSIYENLTQLGSATDLPLSPEDAVLEKVPNPQAGTGYMVRFVAPEFTSLCPLTGAPDFAHLVIDYVPKDFLVESKSLKLFLGSFRNHGAFHEDCTVSIAKRLIDLLEPQWLRIGGYWYPRGGIPIDVFYQTGAAPEGVWIPEQGVQPYRGRG

SEQ ID NO: 49381 - protein, 155 aa, Roseibium sp.
  REGION 1..155: note = tr|E2CGX6|E2CGX6_9RHOB NADPH-dependent 7-cyano-7-deazaguanine reductase OS=Roseibium sp. TrichSKD4 OX=744980 GN=queF PE=3 SV=1
MSDKTIYENLTQLGTSTELPRRPEDAVLEKVPNPQAGTGYMVRFVAPEFTSLCPITSAPDFAHLVIDYVPRDFLVESKSLKLFLGSFRNHGAFHEDCTVSIGKRLVDLLDPQWLRIGGYWYPRGGIPIDVFYQTGPAPEGVWIPEQGVAPYRGRG

SEQ ID NO: 49382 - protein, 118 aa, unidentified
  source 1..118: note = Roseimaritima ulvae
  REGION 1..118: note = tr|A0A5B9QMX6|A0A5B9QMX6_9PLAN NADPH-dependent 7-cyano-7-deazaguanine reductase OS=Roseimaritima ulvae; OX = 980254 GN=queF PE=3 SV=1
MSDNFRETLETFENPRPERDYWIEIQCPEFTSVCPKTGQPDFGTLTFRYVADQHCIELKSLKLYLQRYRSEGIFYERITNRIMDDFVAVVQPRRCTLESRWTPRGGISSVITVEYPDA

SEQ ID NO: 49383 - protein, 167 aa, unidentified
  source 1..167: note = Roseimicrobium gellanilyticum
  REGION 1..167: note = tr|A0A366HJA1|A0A366HJA1_9BACT NADPH-dependent 7-cyano-7-deazaguanine reductase OS=Roseimicrobium gellanilyticum OX=748857 GN=queF PE=3 SV=1
MAKDKGKDKKKDKSKPTEAKAATLTLLGHSENRLPTSPDEAKLEVFPNRTPGRNYRINLSAPEFSSLCPVTGQPDSAHLEIVYVPDKLCIETKSFKFYLASYRNFPAFNEVIVNRILDDLVKACAPKQMHIRGDFGARGGISLSCEAKFPDWPDDEEAMCEGGCHHH

SEQ ID NO: 49384 - protein, 154 aa, Roseinatronobacter monicus
  REGION 1..154: note = tr|A0A543KBC0|A0A543KBC0_9RHOB NADPH-dependent 7-cyano-7-deazaguanine reductase OS=Roseinatronobacter monicus OX=393481 GN=queF PE=3 SV=1
MTETIYSGLKQLGEATDLPDSPETAELERVQNPQADIAYCVRFVAPEFTSLCPMTGQPDFAHLVIDYVPGDWLVESKSLKLYLGSFRNHGAFHEDCTISIARRLFAFLDPQWLRIGGYWYPRGGIPIDVFWQTGPLPEGVWIPDQGVAPYRGRG

SEQ ID NO: 49385 - protein, 160 aa, Roseinatronobacter thiooxidans
  REGION 1..160: note = tr|A0A2W7Q0G4|A0A2W7Q0G4_9RHOB NADPH-dependent 7-cyano-7-deazaguanine reductase OS=Roseinatronobacter thiooxidans OX=121821 GN=queF PE=3 SV=1
MEKEIFMTETIYSGLKQLGGATDLPASPETAMLERVQNPQADIAYCVRFVAPEFTSLCPMTGQPDFAHLVIDYVPGEWLVESKSLKLYLGAFRNHGAFHEDCTISIARRLVEFLSPQWLRIGGYWYPRGGIPIDVFWQTGPMPDGVWIPDQGVAPYRGRG

SEQ ID NO: 49386 - protein, 154 aa, unidentified
  source 1..154: note = Roseivivax pacificus
  REGION 1..154: note = tr|A0A2T6B7L7|A0A2T6B7L7_9RHOB NADPH-dependent 7-cyano-7-deazaguanine reductase OS=Roseivivax pacificus; OX = 1267769 GN=queF PE=3 SV=1
MSDDIYSGLEQLGRDTPQPQSPEEARLERVPNPQSDVDYCVRFTAPEFTSLCPMTGQPDFAHLVIDYLPGEWLVESKSLKLYLTSFRNHGAFHEDCTISIARRLTSLLAPKWLRIGGYWYPRGGIPIDVFYQTGPAPGGVWIPETGVAPYRGRG

SEQ ID NO: 49387 - protein, 156 aa, unidentified
  source 1..156: note = Roseivivax roseus
  REGION 1..156: note = tr|A0A1H9TRU9|A0A1H9TRU9_9RHOB NADPH-dependent 7-cyano-7-deazaguanine reductase OS=Roseivivax roseus; OX = 641238 GN=queF PE=3 SV=1
MAHGDTPTHGLTQLGQSVGLPASPEEAVLERVANPQAGHRYNVRFTAPEFTSLCPMTGQPDFAHLVIDYVPGDWLVESKSLKLYLTSFRNHGAFHEDCTIGIARRLVDTLDPAWLRIGGYWYPRGGIPIDVFYQTGPMPADVWIPDQGVPPYRGRG

SEQ ID NO: 49388 - protein, 281 aa, unidentified
  source 1..281: note = Rosenbergiella nectarea
  REGION 1..281: note = tr|A0A1H9IVN0|A0A1H9IVN0_9ENTR NADPH-dependent 7-cyano-7-deazaguanine reductase OS=Rosenbergiella nectarea OX=988801 GN=queF PE=3 SV=1
MADYENHPTLSDLTLGKSTAYISDYQPSLLQAVPRSLNRDSLQLDEGQLPFHGEDFWTLYELSWLNENGIPQVAIGDVALPASSQNLIESKSFKLYLNSFNQTRFSDWQSVEQTLVRDLSQCAQGEVRVTLRRLSDFAAQPIDDFAGEVIDEQAITVDDYQFNRDYLRGSTSDESVEETLVSHLLKSNCLITQQPDWGSVMIHYQGKKINREALLRYLLSFRQHNEFHEQCVERIYMDIMALCEPQVLTVYARYTRRGGLDINPWRTNQHFTPHNRRLARQ

SEQ ID NO: 49389 - protein, 154 aa, Roseobacter sp.
  REGION 1..154: note = tr|A3X3Y6|A3X3Y6_9RHOB NADPH-dependent 7-cyano-7-deazaguanine reductase OS=Roseobacter sp. MED193; OX = 314262 GN=queF PE=3 SV=1
MSEDIYSNLKQLGGETRIPTSPEEAELERVPNPQADVAYNVRFTAPEFTSLCPMTGQPDFAHLVIDYVPGPWLIESKSLKLYLTSFRNHGAFHEDCTISIARRLADFLDPQWLRIGGYWYPRGGIPIDVFWQTGPVPEGVWIPDQGVPPYRGRG

SEQ ID NO: 49390 - protein, 154 aa, Roseobacter sp.
  REGION 1..154: note = tr|A4EQD2|A4EQD2_9RHOB NADPH-dependent 7-cyano-7-deazaguanine reductase OS=Roseobacter sp. SK209-2-6 OX=388739 GN=queF PE=3 SV=1
MSDSIYSNLKQLGGDTIVPQNPEEAELERVENPQSDVLYNVRFTAPEFTSLCPMTGQPDFAHLVIDYVPGDWLVESKSLKLFLTSFRNHGAFHEDCTISIARRLAEFLEPKWLRIGGYWYPRGGIPIDVFWQTGEMPAGVWIPDQGVPPYRGRG

SEQ ID NO: 49391 - protein, 155 aa, Roseococcus sp.
  REGION 1..155: note = tr|A0A4R0YI12|A0A4R0YI12_9PROT NADPH-dependent 7-cyano-7-deazaguanine reductase OS=Roseococcus sp. SYP-B2431 OX=2496640 GN=queF PE=3 SV=1
MSTRTETGGLTQLGAHTPLPASPDQAVLERVPNPHADLAYCIRFAAPEFTSLCPLTGQPDFAHLVIDYVPRGWIVESKSLKLFLGSFRNHGAFHEACTVDIARRLVALLDPAWLRIGGYWYPRGGIPIDVFYQTGAPPEGVWIPPQDVPGYRGRG

SEQ ID NO: 49392 - protein, 140 aa, unidentified
  source 1..140: note = Roseofilum reptotaenium
  REGION 1..140: note = tr|A0A1L9QXT3|A0A1L9QXT3_9CYAN NADPH-dependent 7-cyano-7-deazaguanine reductase OS=Roseofilum reptotaenium AO1-A OX=1925591 GN=queF PE=3 SV=1
MLEDRTYGDRAIEEVAHHRLEIWPNPSPNHDYIIHLEHPEFTALCPRSGYPDFGTIVCDYFPGQSVLELKAFKLYINSFRQQRISHETVVNQVADRLMAEVKPKALRIIGDFTRRGGVKTVITAYRGEDMSFPDYQPNLL

SEQ ID NO: 49393 - protein, 155 aa, Roseomonas aestuarii
  REGION 1..155: note = tr|A0A2U1V966|A0A2U1V966_9PROT NADPH-dependent 7-cyano-7-deazaguanine reductase OS=Roseomonas aestuarii; OX = 568898 GN=queF PE=3 SV=1
MTASHDVSGLTMLGQATRQPQSPEEAVLERVPNPHPGRRYCVRFTAPEFTSLCPLTAQPDFAHLVIDYIPGDWLVESKSLKLYLTSFRNHGAFHEACTVGIGVRLAEVLDPVWLRIGGYWYPRGGIPIDVFWQTGAAPEGVWVPAQDVPNYRGRG

SEQ ID NO: 49394 - protein, 155 aa, Roseomonas cervicalis
  REGION 1..155: note = tr|D5RRV9|D5RRV9_9PROT NADPH-dependent 7-cyano-7-deazaguanine reductase OS=Roseomonas cervicalis ATCC 49957 OX=525371 GN=queF PE=3 SV=1
MTASHDVSGLTMLGQAVAQPQSPEEAVLERVPNPHPGQRYTVRFVAPEFTSLCPLTGQPDFAHLVIDYIPGDWLVESKSLKLFLTSFRNHGAFHEACTVGIGLRLVETLSPVWLRIGGYWYPRGGIPIDVFWQTGAAPEGVWIPEQGVPPYKGRG

SEQ ID NO: 49395 - protein, 154 aa, unidentified
  source 1..154: note = Roseomonas deserti
  REGION 1..154: note = tr|A0A1V2GWI3|A0A1V2GWI3_9PROT NADPH-dependent 7-cyano-7-deazaguanine reductase OS=Roseomonas deserti; OX = 1817963 GN=queF PE=3 SV=1
MTIHDVSGLTMLGRQVAAPASPEEAVLERVPSPHPGTRYCVRFVAPEFTSLCPLTGQPDFAHLVIDYVPGDWLVESKSLKLFLTSFRNHGAFHEACTVGIGLKLVELLAPAWLRIGGYWYPRGGIPIDVFWQTGTAPDGVWIPSQDVPPYRGRG

SEQ ID NO: 49396 - protein, 144 aa, Roseomonas gilardii
  REGION 1..144: note = tr|A0A1L7AK84|A0A1L7AK84_9PROT NADPH-dependent 7-cyano-7-deazaguanine reductase OS=Roseomonas gilardii; OX = 257708 GN=queF PE=3 SV=1
MLGQHTAQPASPEEARLERVPNPHPDKRYCVRFTAPEFTSLCPITGQPDFAHLVIDYVPDGWLVESKSLKLYLTSFRNHGAFHEACTVEIGDRLVRELKPHWLRIGGYWYPRGGIPIDVFWQTGAAPEGVWIPPQDVPGYRGRG

SEQ ID NO: 49397 - protein, 178 aa, Roseomonas gilardii
  REGION 1..178: note = tr|A0A379NDB7|A0A379NDB7_9PROT NADPH-dependent 7-cyano-7-deazaguanine reductase OS=Roseomonas gilardii subsp. rosea OX=243956 GN=queF PE=3 SV=1
MSDNDTSSGTTGRPTPGHESAADLPPGSPLAGLTMLGQHTAQPASPEEARLERVPNPHPDKRYCVRFTAPEFTSLCPITGQPDFAHLVIDYVPDGWLVESKSLKLYLTSFRNHGAFHEACTVEIGDRLVRELKPHWLRIGGYWYPRGGIPIDVFWQTGAAPEGVWIPPQDVPGYRGRG

SEQ ID NO: 49398 - protein, 144 aa, Roseomonas mucosa
  REGION 1..144: note = tr|A0A1S8D8F0|A0A1S8D8F0_9PROT NADPH-dependent 7-cyano-7-deazaguanine reductase OS=Roseomonas mucosa; OX = 207340 GN=queF PE=3 SV=1
MLGQHARQPASPEEARLERVPNPHPGKRYCVRFTAPEFTSLCPITGQPDFAHLVIDYVPDGWLVESKSLKLYLTSFRNHGAFHEACTVEIGDRLVRELKPHWLRIGGYWYPRGGIPIDVFWQTGAPPEGVWIPPQDVPGYRGRG

SEQ ID NO: 49399 - protein, 178 aa, Roseomonas mucosa
  REGION 1..178: note = tr|A0A379N1C3|A0A379N1C3_9PROT NADPH-dependent 7-cyano-7-deazaguanine reductase OS=Roseomonas mucosa; OX = 207340 GN=queF PE=3 SV=1
MSDNDTSSGTTGRPTPGHESAADLPRTDPLAGLTMLGQHARQPASPEEARLERVPNPHPGKRYCVRFTAPEFTSLCPITGQPDFAHLVIDYVPDGWLVESKSLKLYLTSFRNHGAFHEACTVEIGDRLVRELKPHWLRIGGYWYPRGGIPIDVFWQTGAPPEGVWIPPQDVPGYRGRG

SEQ ID NO: 49400 - protein, 153 aa, unidentified
  source 1..153: note = Roseomonas nepalensis
  REGION 1..153: note = tr|A0A502FQZ5|A0A502FQZ5_9PROT NADPH-dependent 7-cyano-7-deazaguanine reductase OS=Roseomonas nepalensis; OX = 1854500 GN=queF PE=3 SV=1
MNHDVSGLTQLGQYTTQPNSPDEAVLERVPNPHPGTHYVARFTAPEFTSLCPITAQPDFAHLVIDYIPGEWLVESKSLKLYLTAFRNHGAFHEACTIDIAKRLADLLQPVWLRIGGYWYPRGGIPIDVFWQTGAPPAGAWIPDQGVPPYRGRG

SEQ ID NO: 49401 - protein, 158 aa, unidentified
  source 1..158: note = Roseomonas oryzae
  REGION 1..158: note = tr|A0A5B2TE99|A0A5B2TE99_9PROT NADPH-dependent 7-cyano-7-deazaguanine reductase OS=Roseomonas oryzae; OX = 1608942 GN=queF PE=3 SV=1
MTQPSPGHDVSGLTMLGQNTRQPQSPEEAVLERVPNPHPGQNYCVRFTAPEFTSLCPITGQPDFAHLVIDYVPGDWLVESKSLKLYLTSFRNHGAFHEACTVGIGLKLAGLLSPQWLRIGGYWYPRGGIPIDVFWQTGDAPAGAWVPSQDVPNYRGRG

SEQ ID NO: 49402 - protein, 158 aa, unidentified
  source 1..158: note = Roseomonas rhizosphaerae
  REGION 1..158: note = tr|A0A2C7AF46|A0A2C7AF46_9PROT NADPH-dependent 7-cyano-7-deazaguanine reductase OS=Roseomonas rhizosphaerae OX=1335062 GN=queF PE=3 SV=1
MSSPMGTHDVSGLTMLGQNTRQPASPEEAVLERVPNPHPGSCYCVRFTAPEFTSLCPITGQPDFAHLMIDYVPGDWLVESKSLKLFLTAFRNHGAFHEACTVGIGQRLAETLSPVWLRIGGYWYPRGGIPIDVFWQTGDAPAGVWVPAQDVPNYRGRG

SEQ ID NO: 49403 - protein, 153 aa, unidentified
  source 1..153: note = Roseomonas rosea
  REGION 1..153: note = tr|A0A1M6LVG0|A0A1M6LVG0_9PROT NADPH-dependent 7-cyano-7-deazaguanine reductase OS=Roseomonas rosea; OX = 198092 GN=queF PE=3 SV=1
MSHDVSGLTMLGRSTAQPNSPEEAVLERVPNPHPGTHYVARFTAPEFTSLCPITAQPDFAHLVIDYIPGEWLVESKSLKLYLTSFRNHGAFHEACTIDIAKRLVELLEPAWLRIGGYWYPRGGIPIDVFWQTGAPPAGAWIPDQGVPPYRGRG

SEQ ID NO: 49404 - protein, 178 aa, Roseomonas sp.; identical to SEQ ID NO: 49399
  REGION 1..178: note = tr|A0A1Q2YZW7|A0A1Q2YZW7_9PROT NADPH-dependent 7-cyano-7-deazaguanine reductase OS=Roseomonas sp. TAS13; OX = 1926319 GN=queF PE=3 SV=1

SEQ ID NO: 49405 - protein, 155 aa, Roseomonas sp.
  REGION 1..155: note = tr|A0A317FB68|A0A317FB68_9PROT NADPH-dependent 7-cyano-7-deazaguanine reductase OS=Roseomonas sp. CQN31; OX = 2184016 GN=queF PE=3 SV=1
MTIKTDVSGLTMLGQHVEQPRSPEEAVLERVPNPHPGTRYCVRFVAPEFTSLCPMTGQPDFAHLVIDYVPRDWLVESKSLKLFLTSFRNHGAFHEACTVGIGKRIVELLDPEWLRIGGYWYPRGGIPIDVFYQTGTPPEGVWIPDQGVAPYRGRG

SEQ ID NO: 49406 - protein, 144 aa, Roseomonas stagni
  REGION 1..144: note = tr|A0A1I4CA63|A0A1I4CA63_9PROT NADPH-dependent 7-cyano-7-deazaguanine reductase OS=Roseomonas stagni DSM 19981 OX=1123062 GN=queF PE=3 SV=1
MLGQQTAQPATPEAAVLERVPNPHPGQRYCVRFTAPEFTSLCPMTGQPDFAHLVIDYVPRDWLVESKSLKLYLTAFRNHGAFHEACTVGIARRLVEELDPEWLRIGGYWYPRGGIPIDVFYATGEPPAGVWVPPQDVPGYRGRG

SEQ ID NO: 49407 - protein, 155 aa, Roseovarius aestuarii
  REGION 1..155: note = tr|A0A1X7BNX8|A0A1X7BNX8_9RHOB NADPH-dependent 7-cyano-7-deazaguanine reductase OS=Roseovarius aestuarii; OX = 475083 GN=queF PE=3 SV=1
MADQDIYKNLTQLGGQTELPNSPEEAVLEKVPNPQSGTDYAVRFTAPEFTSLCPMTGQPDFAHIVLDYIPDGWLVESKSLKLFLGSFRNHGAFHEDCTVTIGKRLIELLEPKWLRVGGYWYPRGGIPIDVFYQTGEQPAGVWIPDQGVPTYRGRG

SEQ ID NO: 49408 - protein, 153 aa, unidentified
  source 1..153: note = Roseovarius albus
  REGION 1..153: note = tr|A0A1X6ZHY6|A0A1X6ZHY6_9RHOB NADPH-dependent 7-cyano-7-deazaguanine reductase OS=Roseovarius albus; OX = 1247867 GN=queF PE=3 SV=1
MSDIYKDLKQLGGATIQPQSPEKAELERVQNPQADVSYNVRFTAPEFTSLCPMTGQPDFAHLVIDYVPGQWLVESKSLKLYLTSFRNHGAFHEDCTISIARRLTEFLEPQWLRIGGYWYPRGGIPIDVFWQTGAMPEGVWIPDQGVPPYRGRG

SEQ ID NO: 49409 - protein, 154 aa, unidentified
  source 1..154: note = Roseovarius atlanticus
  REGION 1..154: note = tr|A0A0T5NU44|A0A0T5NU44_9RHOB NADPH-dependent 7-cyano-7-deazaguanine reductase OS=Roseovarius atlanticus; OX = 1641875 GN=queF PE=3 SV=1
MSDDIYSNLKQLGGATKVPQSPEEAELERVENPQADVAYNVRFTAPEFTSLCPMTGQPDFAHLVIDYVPGRWLVESKSLKLYLTSFRNHGAFHEDCTISIARRLVEFLAPQWLRIGGYWYPRGGIPIDVFWQTGEMPQGVWVPDQGVPPYRGRG

SEQ ID NO: 49410 - protein, 154 aa, unidentified
  source 1..154: note = Roseovarius azorensis
  REGION 1..154: note = tr|A0A1H7WJK6|A0A1H7WJK6_9RHOB NADPH-dependent 7-cyano-7-deazaguanine reductase OS=Roseovarius azorensis; OX = 1287727 GN=queF PE=3 SV=1
MAENIYEGLTQLGGSTKVPQSPEEAVLERVANPQADVRYNVRFTAPEFTSLCPMTGQPDFAHLVIDYVPGDWLVESKSLKLYLTSFRNHGAFHEDCTISIARRLVNFLEPEWLRIGGYWYPRGGIPIDVFWQTGACPEDVWIPDQDVPPYRGRG

SEQ ID NO: 49411 - protein, 155 aa, unidentified
  source 1..155: note = Roseovarius gaetbuli
  REGION 1..155: note = tr|A0A1X6YE97|A0A1X6YE97_9RHOB NADPH-dependent 7-cyano-7-deazaguanine reductase OS=Roseovarius gaetbuli; OX = 1356575 GN=queF PE=3 SV=1
MSDETIYSSLKQLGGATIVPQSPEEAVLERVKNPQGDVAYNVRFTAPEFTSLCPMTGQPDFAHLMIDYVPGEWLVESKSLKLFLGSFRNHGAFHEDCTISIARRLVDFLDPQWLRIGGYWYPRGGIPIDVFYQTGPMPEGVWIPDQGVPPYRGRG

SEQ ID NO: 49412 - protein, 154 aa, Roseovarius halotolerans
  REGION 1..154: note = tr|A0A1X6YE29|A0A1X6YE29_9RHOB NADPH-dependent 7-cyano-7-deazaguanine reductase OS=Roseovarius halotolerans OX=505353 GN=queF PE=3 SV=1
MSDDIYKDLKQLGGMAAMPQSPDEAELERVRNPQADVAYNVRFTAPEFTSLCPMTGQPDFAHLVIDYVPGEWLVESKSLKLFLGSFRNHGAFHEDCTVTIARRLADFLEPRWLRIGGYWYPRGGIPIDVFYQTGEMPSDVWIPDQGVAPYRGRG

SEQ ID NO: 49413 - protein, 154 aa, Roseovarius indicus
  REGION 1..154: note = tr|A0A0T5P381|A0A0T5P381_9RHOB NADPH-dependent 7-cyano-7-deazaguanine reductase OS=Roseovarius indicus; OX = 540747 GN=queF PE=3 SV=1
MSDEIYKGLKQLGGATTMPQSPEEAELERVQNPQADVAYNVRFTAPEFTSLCPMTGQPDFAHLVIDYVPGEWLVESKSLKLFLGSFRNHGAFHEDCTVSIARRLVEFLEPQWLRIGGYWYPRGGIPIDVFYQTGEMPAGVWIPDQGVPPYRGRG

SEQ ID NO: 49414 - protein, 154 aa, unidentified
  source 1..154: note = Roseovarius litoreus
  REGION 1..154: note = tr|A0A1M7F416|A0A1M7F416_9RHOB NADPH-dependent 7-cyano-7-deazaguanine reductase OS=Roseovarius litoreus; OX = 1155722 GN=queF PE=3 SV=1
MSDNIYKDLKQLGGATVVPQRPEDAELERVANPQADVAYNVRFVAPEFTSLCPMTGQPDFAHLVIDYVPGAWLVESKSLKLYLGSFRNHGAFHEDCTISIARRLADFLDPQWLRIGGYWYPRGGIPIDVFYQTGPMPEGVWIPDQGVPPYRGRG

SEQ ID NO: 49415 - protein, 155 aa, unidentified
  source 1..155: note = Roseovarius lutimaris
  REGION 1..155: note = tr|A0A1I5FEC1|A0A1I5FEC1_9RHOB NADPH-dependent 7-cyano-7-deazaguanine reductase OS=Roseovarius lutimaris; OX = 1005928 GN=queF PE=3 SV=1
MSDETIYSNLKQLGGATFVPQNPQEAVLERVQNPQGDVAYNVRFTAPEFTSLCPMTGQPDFAHLVIDYVPGDWLVESKSLKLFLGSFRNHGAFHEDCTVSIARRLVDFLDPQWLRIGGYWYPRGGIPIDVFYQTGPMPEGVWIPDQGVPPYRGRG

SEQ ID NO: 49416 - protein, 155 aa, unidentified
  source 1..155: note = Roseovarius marisflavi
  REGION 1..155: note = tr|A0A1M6VNU8|A0A1M6VNU8_9RHOB NADPH-dependent 7-cyano-7-deazaguanine reductase OS=Roseovarius marisflavi; OX = 1054996 GN=queF PE=3 SV=1
MSDETIYSSLKQLGGATVVPQSPEEAILERVKNPQGDVAYNVRFTAPEFTSLCPMTGQPDFAHLMIDYVPGEWLVESKSLKLFLSSFRNHGAFHEDCTVSIARRLVDFLDPQWLRIGGYWYPRGGIPIDVFYQTGPMPVGVWVPDQGVPPYRGRG

SEQ ID NO: 49417 - protein, 154 aa, Roseovarius mucosus
  REGION 1..154: note = tr|A0A1V0RTS9|A0A1V0RTS9_9RHOB NADPH-dependent 7-cyano-7-deazaguanine reductase OS=Roseovarius mucosus; OX = 215743 GN=queF PE=3 SV=1
MSENIYKDLKQLGGAAQIPQTPEEALLERVANPQADVQYNVRFTAPEFTSLCPMTGQPDFAHLVIDYVPGQWLVESKSLKLYLTSFRNHGAFHEDCTISIARRLVGFLEPEWLRIGGYWYPRGGIPIDVFWQTGPMPEGVWIPDQGVPPYRGRG

SEQ ID NO: 49418 - protein, 154 aa, Roseovarius mucosus
  REGION 1..154: note = tr|A0A0A0HMI7|A0A0A0HMI7_9RHOB NADPH-dependent 7-cyano-7-deazaguanine reductase OS=Roseovarius mucosus DSM 17069 OX=1288298 GN=queF PE=3 SV=1
MSENIYKDLKQLGGATVVPQSPEEAVLERVSNPQADVRYNVRFTAPEFTSLCPMTGQPDFAHLVIDYVPGKWLVESKSLKLYLTSFRNHGAFHEDCTISIARRLVEFLEPEWLRIGGYWYPRGGIPIDVFWQTGAMPDGVWIPDQGVPPYRGRG

SEQ ID NO: 49419 - protein, 154 aa, Roseovarius nanhaiticus
  REGION 1..154: note = tr|A0A1N7FP75|A0A1N7FP75_9RHOB NADPH-dependent 7-cyano-7-deazaguanine reductase OS=Roseovarius nanhaiticus OX=573024 GN=queF PE=3 SV=1
MSENIYQDLKQLGANTALPDDPDTAELERVKNPQADVDYNVRFVAPEFTSLCPMTGQPDFAHLVIDYVPGEWLVESKSLKLYLGSFRNHGAFHEDCTITIARRIAEFTEAKWLRIGGYWYPRGGIPIDVFYQTGEMPKGVWIPDQGVPPYRGRG

SEQ ID NO: 49420 - protein, 154 aa, Roseovarius nubinhibens
  REGION 1..154: note = tr|A3SN29|A3SN29_ROSNI NADPH-dependent 7-cyano-7-deazaguanine reductase OS=Roseovarius nubinhibens (strain ATCC BAA-591 / DSM 15170 / ISM); OX = 89187 GN=queF PE=3 SV=1
MSDTIYSDLKQLGGATVLPANPDEAELERVQNPQADTAYNVRFTAPEFTSLCPMTGQPDFAHLVIDYVPGEWLVESKSLKLFLGAFRNHGAFHEDCTVSIGRRLAEFLAPQWLRIGGYWYPRGGIPIDVFWQTGPMPDSVWIPDQGVPPYRGRG

SEQ ID NO: 49421 - protein, 154 aa, Roseovarius nubinhibens; identical to SEQ ID NO: 49420
  REGION 1..154: note = tr|A0A348WIY0|A0A348WIY0_9RHOB NADPH-dependent 7-cyano-7-deazaguanine reductase OS=Roseovarius nubinhibens OX=314263 GN=queF PE=3 SV=1

SEQ ID NO: 49422 - protein, 154 aa, Roseovarius pacificus
  REGION 1..154: note = tr|A0A1M7DGH3|A0A1M7DGH3_9RHOB NADPH-dependent 7-cyano-7-deazaguanine reductase OS=Roseovarius pacificus; OX = 337701 GN=queF PE=3 SV=1
MSENIYEGLKQLGGATEMPQSPEEAMLERVRNPQADVAYNVRFVAPEFTSLCPMTGQPDFAHLVIDYVPGEWLVESKSLKLFLGSFRNHGAFHEDCTVSIARRLAEFLEPQWLRIGGYWYPRGGIPIDVFYQTGPMPEGVWIPDQGVAPYRGRG

SEQ ID NO: 49423 - protein, 155 aa, Roseovarius sp.
  REGION 1..155: note = tr|A0A365TZ79|A0A365TZ79_9RHOB NADPH-dependent 7-cyano-7-deazaguanine reductase OS=Roseovarius sp. TE539; OX = 2249812 GN=queF PE=3 SV=1
MSEENIYSNLKQLGGELRLPQSPDEAELERVPNPQADVAYNVRFIAPEFTSLCPMTGQPDFAHLVIDYVPGDWLVESKSLKLFLGAFRNHGAFHEDCTITIARRLADFLEPAWLRIGGYWYPRGGIPIDVFYQTGPMPEGVWIPDQGVPPYRGRG

SEQ ID NO: 49424 - protein, 154 aa, Roseovarius sp.; identical to SEQ ID NO: 45208
  REGION 1..154: note = tr|A0A246QVI2|A0A246QVI2_9RHOB NADPH-dependent 7-cyano-7-deazaguanine reductase OS=Roseovarius sp. 22II1-1F6A OX=1317112 GN=queF PE=3 SV=1

SEQ ID NO: 49425 - protein, 154 aa, Roseovarius tolerans
  REGION 1..154: note = tr|A0A1H7XSW0|A0A1H7XSW0_9RHOB NADPH-dependent 7-cyano-7-deazaguanine reductase OS=Roseovarius tolerans; OX = 74031 GN=queF PE=3 SV=1
MSDDIYKDLKQLGGTTQVPQHPEEAVLERVSNPQADTVYNVRFTAPEFTSLCPMTGQPDFAHLVIDYVPGAWLVESKSLKLYLTSFRNHGAFHEDCTITIARRLVEFLDPQWLRIGGYWYPRGGIPIDVFWQTGPMPEGVWIPDQGVPPYRGRG

SEQ ID NO: 49426 - protein, 154 aa, Roseovarius tolerans
  REGION 1..154: note = tr|A0A0L6CUL1|A0A0L6CUL1_9RHOB NADPH-dependent 7-cyano-7-deazaguanine reductase OS=Roseovarius tolerans; OX = 74031 GN=queF PE=3 SV=1
MSDNIYKDLKQLGGTTQVPQHPEEAVLERVSNPQSDTVYNVRFTAPEFTSLCPMTGQPDFAHLVIDYVPGAWLVESKSLKLYLTSFRNHGAFHEDCTITIARRLVEFLDPQWLRIGGYWYPRGGIPIDVFWQTGPMPEGVWIPDQGVPPYRGRG

SEQ ID NO: 49427 - protein, 281 aa, unidentified
  source 1..281: note = Rouxiella badensis
  REGION 1..281: note = tr|A0A1X0WEQ7|A0A1X0WEQ7_9GAMM NADPH-dependent 7-cyano-7-deazaguanine reductase OS=Rouxiella badensis; OX = 1646377 GN=queF PE=3 SV=1
MSSYQDNPALSQLTLGKATPYRDQYDATLLQAVPRSMNREPLGLFPDSLPFHGADIWTMYELSWLNAKGLPQVAVGEISLQADSVNLIESKSFKLYLNSFNQTKFQDWDAVKMTLEKDLSACAQGSVTVSLRALHEIEGSPIGRFAGICIDAQDIEITDYGFSTDYLQDATSDKIVDETLVSHLLKSNCLITHQPDWGSVQIQYRGPAIDREALLRYLVSFRNHNEFHEQCVERIFNDLLRFCQPTRLAVYARYTRRGGLDINPWRANFLFEPTTARLVRQ

SEQ ID NO: 49428 - protein, 281 aa, unidentified
  source 1..281: note = Rouxiella silvae
  REGION 1..281: note = tr|A0A1X0W0I7|A0A1X0W0I7_9GAMM NADPH-dependent 7-cyano-7-deazaguanine reductase OS=Rouxiella silvae; OX = 1646373 GN=queF PE=3 SV=1
MSSYQDNPALSQLTLGKATPYRDQYDASLLQAVPRSMNREPLGLYPDSLPFHGADIWTMYEISWLNAKGLPQVAVGEISLQADSINLIESKSFKLYLNSFNQTKFDSWNSVKQTLETDLAACANGSVIVSLQPLHALEGSPIGRFAGVCIDAQDIEISDYAFSTDYLLNSTSDKIVDETLVSHLLKSNCLITHQPDWGSVQIQYRGPAIDREALLRYLVSFRNHNEFHEQCVERIFNDILHFCQPTRLAVYARYTRRGGLDINPWRANFLFEPTTARLARQ

SEQ ID NO: 49429 - protein, 155 aa, Rubellimicrobium mesophilum
  REGION 1..155: note = tr|A0A017HRF7|A0A017HRF7_9RHOB NADPH-dependent 7-cyano-7-deazaguanine reductase OS=Rubellimicrobium mesophilum DSM 19309 OX=442562 GN=queF PE=3 SV=1
MSQDSIYSGLTQLGQSTRIPATPEDAVLERVPNPQADVLYAVRFTAPEFTSLCPMTGQPDFAHLVIDYAPGDWLVESKSLKLFLTSFRNHGAFHEDCTVTIARRLVDLLAPKWLRIGGYWYPRGGIPIDVFYQTGPVPDGLWLPDQGVPSYRGRG

SEQ ID NO: 49430 - protein, 154 aa, unidentified
  source 1..154: note = Rubellimicrobium roseum
  REGION 1..154: note = tr|A0A5C4NQQ3|A0A5C4NQQ3_9RHOB NADPH-dependent 7-cyano-7-deazaguanine reductase OS=Rubellimicrobium roseum OX=687525 GN=queF PE=3 SV=1
MANDIYSGLTQLGSATRLPQNPEEAVLERVENPQKGTAYVVRFTAPEFTSLCPMTGQPDFAHLVIDYVPGDWLVESKSLKLFLGSFRNHGAFHEDCTVSVGKRLVDLLQPQWLRIGGYWYPRGGIPIDVFYQTGPLPEGVWLPDQGVPPYRGRG

SEQ ID NO: 49431 - protein, 155 aa, unidentified
  source 1..155: note = Rubellimicrobium roseum
  REGION 1..155: note = tr|A0A5C4NAP0|A0A5C4NAP0_9RHOB NADPH-dependent 7-cyano-7-deazaguanine reductase OS=Rubellimicrobium roseum OX=687525 GN=queF PE=3 SV=1
MSQDSIYSGLTQLGQATRLPQSPEEAILERVPNPQKDVAYTVRFTAPEFTSLCPMTGQPDFAHLVIDYVPGEWLVESKSLKLFLGSFRNHGAFHEDCTVSVARRLVDLLAPQWLRIGGYWYPRGGIPIDVFYQTGPAPQGVWLPDQGVPPYRGRG

SEQ ID NO: 49432 - protein, 155 aa, Rubellimicrobium sp.
  REGION 1..155: note = tr|A0A5C4MSK8|A0A5C4MSK8_9RHOB NADPH-dependent 7-cyano-7-deazaguanine reductase OS=Rubellimicrobium sp. YIM 131921 OX=2585369 GN=queF PE=3 SV=1
MSHDDIYSGLRQLGAAIKLPQCPEEAVLERVLNPQKGVAYAVRFAAPEFTSLCPMTSQPDFAHLVIDYVPGEWLVDSKSLKLFLGSFRNHGAFHEDCTVTIARRLVDLLAPRWLRIGGYWYPRGGIPIDVFYQTGPVPEGVWIPDQGVPPYRGRG

SEQ ID NO: 49433 - protein, 146 aa, unidentified
  source 1..146: note = Rubidibacter lacunae
  REGION 1..146: note = tr|U5DF58|U5DF58_9CHRO NADPH-dependent 7-cyano-7-deazaguanine reductase OS=Rubidibacter lacunae KORDI 51-2 OX=582515 GN=queF PE=3 SV=1
MTQTPPPASASANPPTEVKYGERAIAEGELLTFPNPRPGRRYTIDISLPEFTCKCPFSGYPDFATIYLSYVPDERVVELKAIKLYINGYRDRHISHEESVNQILDDLVAACDPLEMTVEGDFSPRGNVHTVVKVRHVKPLSDGTGM

SEQ ID NO: 49434 - protein, 128 aa, unidentified
  source 1..128: note = Rubinisphaera brasiliensis
  REGION 1..128: note = tr|F0SLE1|F0SLE1_RUBBR NADPH-dependent 7-cyano-7-deazaguanine reductase OS=Rubinisphaera brasiliensis (strain ATCC 49424 / DSM 5305 / JCM 21570 / NBRC 103401 / IFAM1448) OX=756272 GN=queF PE=3 SV=1
MTEPSRDLLETFPNPHPQRDYVIETVCPEFTSVCPKTGQPDYGTLTITYVPDHVCFELKSLKMYLQQYRNHGAFYEQVTNDILDDLVAVTKPRMLELRAEFTARGGIRTNVIASYPDDAWEEDEAGEE

SEQ ID NO: 49435 - protein, 122 aa, unidentified
  source 1..122: note = Rubinisphaera sp.
  REGION 1..122: note = tr|A0A2E9VS64|A0A2E9VS64_9PLAN NADPH-dependent 7-cyano-7-deazaguanine reductase OS=Rubinisphaera sp.; OX = 2024857 GN=queF PE=3 SV=1
MSEPSRDLLETFENPNPDRDYVIETICPEFTSVCPKTGQPDFGTLTIAYIPDEVCFELKSLKMYLQQYRNHGAFYESVTNKILDDLVAVTQPRSMEIRAEFTPRGGLRTNVIVSYPDENWDE

SEQ ID NO: 49436 - protein, 152 aa, Rubricoccus marinus
  REGION 1..152: note = tr|A0A259U3S3|A0A259U3S3_9BACT NADPH-dependent 7-cyano-7-deazaguanine reductase OS=Rubricoccus marinus; OX = 716817 GN=BSZ36_08175 PE=3 SV=1
MARYGIKPEGRVATFLPPEVRQHEIHRLPYEHAARQRVSYETEPGEFTALCPFSGLPDSGSVHIEYVPGEWLLELKSLKYYLMSWRHIGAAQEDITAFMYEDLARHLAPFDQLVVTTDYTVRGGIHTVCRVDSREQASGEAAASDDATAASS

SEQ ID NO: 49437 - protein, 146 aa, Rubrimonas cliftonensis
  REGION 1..146: note = tr|A0A1H4A4Q2|A0A1H4A4Q2_9RHOB NADPH-dependent 7-cyano-7-deazaguanine reductase OS=Rubrimonas cliftonensis OX=89524 GN=queF PE=3 SV=1
MAQLGREAGVPASPDAARLERVPNPHPDALYVARFTCPEFTSLCPVTGQPDFAHLVIDYVPDAWLVESKSLKLYLTSFRNHGAFHEDCTVGVGLRLVEFLAPRWLRIAGYWYPRGGIPIDVFWQTGAPLEGVWLPETGVAVYRGRG

SEQ ID NO: 49438 - protein, 126 aa, unidentified
  source 1..126: note = Rubripirellula obstinata
  REGION 1..126: note = tr|A0A5B1CIC3|A0A5B1CIC3_9PLAN NADPH-dependent 7-cyano-7-deazaguanine reductase OS=Rubripirellula obstinata OX=406547 GN=queF PE=3 SV=1
MSDGGDGTGGDFRDTLEVFDNPNPARNFTIEHHCPEFTSVCPKTGQPDYGTIVFTYVPDQVCVELKSLKMYLQRFRNEGIFYEAVTNRIMDDFVAVVKPRSATVESRWTPRGGLHSNIIIRHPDES

SEQ ID NO: 49439 - protein, 190 aa, unidentified
  source 1..190: note = Rubrivirga marina
  REGION 1..190: note = tr|A0A271IWC3|A0A271IWC3_9BACT NADPH-dependent 7-cyano-7-deazaguanine reductase OS=Rubrivirga marina; OX = 1196024 GN=BSZ37_01615 PE=3 SV=1
MADTPTAADRLDDFHQRALDHTRASLAHMARYGIEPEGRVALFLPPDARQQEIHRMPYEHAARQVVTYTTEPGEFTALCPFSGLPDSGTVRIEYVPGSWLLELKSLKYYLMSWRHVGAAQEDITALVFEDLMRHLDDPHRLVVTTDYTVRGGIHTVCSVDSRDQPERNSAAVGSVGLGAEAGPAGDGATS

SEQ ID NO: 49440 - protein, 178 aa, unidentified
  source 1..178: note = Rubrivirga sp.
  REGION 1..178: note = tr|A0A271JED7|A0A271JED7_9BACT NADPH-dependent 7-cyano-7-deazaguanine reductase OS=Rubrivirga sp. SAORIC476 OX=1961794 GN=B1759_08030 PE=3 SV=1
MADTPTAADRLDDFHQRALDHTKASLAHMARYGIEPEGRVALFLPPDARQQDIHRMPYTHAARQVVTYTTEPGEFTALCPFSGLPDSGTVRIEYVPGSWLLELKSLKYYLMSWRHIGAAQEDITALLFEDLMRHLGDPHHLVVTTDYTVRGGIHTVCAVDSRDQPAGLGAEAGGDGAA

SEQ ID NO: 49441 - protein, 147 aa, Rubrivivax benzoatilyticus
  REGION 1..147: note = tr|F3LPR9|F3LPR9_9BURK NADPH-dependent 7-cyano-7-deazaguanine reductase OS=Rubrivivax benzoatilyticus JA2 = ATCC BAA-35 OX=987059 GN=queF PE=3; SV = 1
MARTPARQRTAPAVPPTQPSKELQVFPNPAPERDYVIRFDVPEFTCLCPLTGQPDFAHFTIEIVPDQLCVELKSLKLYFWSYRNEGAFHEKVTNTILEDLVKAIQPRFLRIHGNWFVRGGIGTHVTVEHRAKGWKPAAPVVLPAPQA

SEQ ID NO: 49442 - protein, 134 aa, Rubrivivax gelatinosus
  REGION 1..134: note = tr|I0HRW3|I0HRW3_RUBGI NADPH-dependent 7-cyano-7-deazaguanine reductase OS=Rubrivivax gelatinosus (strain NBRC 100245 / IL144) OX=983917 GN=queF PE=3 SV=1
MPPTQPSKELQVFPNPAPERDYVIRFDVPEFTCLCPLTGQPDFAHFTIEIVPDKLCVELKSLKLYFWSYRNEGAFHEKVTNTILEDLVKAIKPRFLRIHGNWFVRGGIGTHVTVEHRAKGWKPAAPVVLPAPQA

SEQ ID NO: 49443 - protein, 147 aa, Rubrivivax gelatinosus
  REGION 1..147: note = tr|A0A4R2MC25|A0A4R2MC25_RUBGE NADPH-dependent 7-cyano-7-deazaguanine reductase OS=Rubrivivax gelatinosus; OX = 28068 GN=queF PE=3 SV=1
MARTPARQRTAPAVPPTQPSKELQVFPNPAPERDYVIRFDVPEFTCLCPLTGQPDFAHFTIEIVADKLCVELKSLKLYFWSYRDEGAFHEKVTNTILEDIVKAIQPRFLRIHGNWFVRGGIGTHVTVEHRAKGWKPAAPVVLPAPQA

SEQ ID NO: 49444 - protein, 147 aa, Rubrivivax sp.
  REGION 1..147: note = tr|A0A1E4IEW3|A0A1E4IEW3_9BURK NADPH-dependent 7-cyano-7-deazaguanine reductase OS=Rubrivivax sp. SCN 71-131 OX=1660138 GN=queF PE=3 SV=1
MPAKTPPQRPAPSRPPSAPSRELQAFPNPAPQRDYVIRFDVPEFTCLCPLTGQPDFAHFRIEIVPDRFCVETKSLKQYFWSYRNEGAFHEKVTNTIVDDLVAAIAPRFIRIHADWFVRGGIRTFVSVEQRKRGWKPQPAVDLSAFPT

SEQ ID NO: 49445 - protein, 172 aa, Rubrivivax sp.
  REGION 1..172: note = tr|A0A519FWE1|A0A519FWE1_9BURK NADPH-dependent 7-cyano-7-deazaguanine reductase OS=Rubrivivax sp.; OX = 50259 GN=queF PE=3 SV=1
MAKKAPSARPVKSAPESAAKDAVAVGKRVKPATPPSAPSRQLDVFPNPAPQRDYVIQFQIPEFTCFCPLTGQPDFAHFTIECIADKLCIELKSLKMYMWSYRNDGAFHEKVTNTILDDFVKAIQPRYLRITAKWYVRGGIYTNVVVEHRQKGWKPLPKVDLPQHSAETGLLG

SEQ ID NO: 49446 - protein, 154 aa, Ruegeria atlantica
  REGION 1..154: note = tr|A0A0P1ECR7|A0A0P1ECR7_9RHOB NADPH-dependent 7-cyano-7-deazaguanine reductase OS=Ruegeria atlantica; OX = 81569 GN=queF PE=3 SV=1
MTESIYSNLTQLGGDTKMPASPEEAVLERVQNPQADVDYNVRFTAPEFTSLCPMTGQPDFAHLVIDYVPDQWLVESKALKLFLGSFRNHGAFHEDCTISIARRLQEFLEPRWLRIGGYWYPRGGIPIDVFWQTGPMPEGVWIPDQGVPPYRGRG

SEQ ID NO: 49447 - protein, 157 aa, Ruegeria atlantica
  REGION 1..157: note = tr|A0A0P1E3K1|A0A0P1E3K1_9RHOB NADPH-dependent 7-cyano-7-deazaguanine reductase OS=Ruegeria atlantica; OX = 81569 GN=queF PE=3 SV=1
MTDSIYSNLTQLGGDTKMPASPEEAVLERVQNPQADVDYSERFTAPEFTSLCPMTGQPDFAHLVIDYVPDQWLVESKALKLFLGSFRNHGAFHEDCTISIARRLQEFLEPRWLRIGGYRYPRGGIPIDVFWQTGPTPEGVWIPDQGVPPYRGRGCPR

SEQ ID NO: 49448 - protein, 153 aa, unidentified
  source 1..153: note = Ruegeria denitrificans
  REGION 1..153: note = tr|A0A0P1IJW9|A0A0P1IJW9_9RHOB NADPH-dependent 7-cyano-7-deazaguanine reductase OS=Ruegeria denitrificans; OX = 1715692 GN=queF PE=3 SV=1
METIYSDLTQLGGKTELPTSPEAAELERVQNPQADIDYCVRFTAPEFTSLCPMTGQPDFAHLVIDYVPDDWLVESKSLKLFLGSFRNHGAFHEDCTVSIARRLVEFLSPRWLRIGGYWYPRGGIPIDVFWQTGATPEQVWIPDQGVPPYRGRG

SEQ ID NO: 49449 - protein, 155 aa, unidentified
  source 1..155: note = Ruegeria intermedia
  REGION 1..155: note = tr|A0A1M5AWE1|A0A1M5AWE1_9RHOB NADPH-dependent 7-cyano-7-deazaguanine reductase OS=Ruegeria intermedia; OX = 996115 GN=queF PE=3 SV=1
MANQDIYANLTQLGSKTDLPNSPEEAVLERVPNPQAGTDYAVRFTAPEFTSLCPLTAQPDFAHIVIDYVPGDWLVESKSLKLFLGAFRNHGAFHEDCSVTIGKRLEEVLEPKWLRVGAYWYPRGGIPIDVFYQTGPELPGVWIPDQGVPTYRGRG

SEQ ID NO: 49450 - protein, 154 aa, unidentified
  source 1..154: note = Ruegeria litorea
  REGION 1..154: note = tr|A0A1Y5TNJ5|A0A1Y5TNJ5_9RHOB NADPH-dependent 7-cyano-7-deazaguanine reductase OS=Ruegeria litorea R37; OX = 1200284 GN=queF PE=3 SV=1
MTDSIYSDLKQLGGATVVPTNPDEAELERVKNPQADVAYNVRFTAPEFTSLCPMTGQPDFAHLVIDYVPGEWLVESKSLKLFLGSFRNHGAFHEDCTVSIGRRLAEFLSPQWLRIGGYWYPRGGIPIDVFWQTGPMPESVWIPDQGVPPYRGRG

SEQ ID NO: 49451 - protein, 155 aa, Ruegeria marina
  REGION 1..155: note = tr|A0A1G7BYB9|A0A1G7BYB9_9RHOB NADPH-dependent 7-cyano-7-deazaguanine reductase OS=Ruegeria marina; OX = 639004 GN=queF PE=3 SV=1
MVNQDIYANLTQLGGKTELPNSPEEAVLEKVPNPQAGTDYAVRFTAPEFTSLCPLTAQPDFAHIVIDYVPGDWLVESKSLKLYLGSFRNHGAFHEDCSVSIGKRLVETLTPKWLRVGAYWYPRGGMPIDVFYQTGPELPGVWIPDQGVPTYRGRG

SEQ ID NO: 49452 - protein, 155 aa, unidentified
  source 1..155: note = Ruegeria marisrubri
  REGION 1..155: note = tr|A0A0X3TQX2|A0A0X3TQX2_9RHOB NADPH-dependent 7-cyano-7-deazaguanine reductase OS=Ruegeria marisrubri; OX = 1685379 GN=queF PE=3 SV=1
MANQDIYANLTQLGSKTDLPNSPEEAVLERVPNPQAGTDYAVRFTAPEFTSLCPLTAQPDFAHIVIDYVPGDWLVESKSLKLFLGSFRNHGAFHEDCSVTIGKRLEEVLEPKWLRVGAYWYPRGGIPIDVFYQTGPELPGVWIPDQGVPTYRGRG

SEQ ID NO: 49453 - protein, 154 aa, unidentified
  source 1..154: note = Ruegeria mediterranea
  REGION 1..154: note = tr|A0A2R8C6J8|A0A2R8C6J8_9RHOB NADPH-dependent 7-cyano-7-deazaguanine reductase OS=Ruegeria mediterranea M17 OX=1200281 GN=queF PE=3 SV=1
MTDSIYSDLKQLGGATVMPTNPDEAELERVKNPQAEVAYNVRFTAPEFTSLCPMTGQPDFAHLVIDYVPGEWLVESKSIKLFLGSFRNHGAFHEDCTVSIGRRLAEFLSPQWLRIGGYWYPRGGIPIDVFWQTGPMPESVWIPDQGVPPYRGRG

SEQ ID NO: 49454 - protein, 155 aa, Ruegeria pomeroyi
  REGION 1..155: note = sp|Q5LM10|QUEF_RUEPO NADPH-dependent 7-cyano-7-deazaguanine reductase OS=Ruegeria pomeroyi (strain ATCC 700808 / DSM 15171 / DSS-3) OX=246200 GN=queF; PE = 3 SV=1
MANQDIYANLTQLGGKTELPNSPEEAVLEKVPNPQAGTDYAVRFTAPEFTSLCPLTAQPDFAHIVIDYVPGDWLVESKSLKLYLGSFRNHGAFHEDCSVSIGKRLVELLAPKWLRVGAYWYPRGGIPIDVFYQTGPELPGVWIPDQGVPTYRGRG

SEQ ID NO: 49455 - protein, 154 aa, Ruegeria sp.
  REGION 1..154: note = tr|A0A366XDF4|A0A366XDF4_9RHOB NADPH-dependent 7-cyano-7-deazaguanine reductase OS=Ruegeria sp. A3M17; OX = 2267229 GN=queF PE=3 SV=1
MTDSIYSNLTQLGGDTRMPASPEEAVLERVQNPQADVDYNVRFTAPEFTSLCPMTGQPDFAHLVIDYVPDQWLVESKALKLFLGSFRNHGAFHEDCTISIARRLQEFLEPRWLRIGGYWYPRGGIPIDVFWQTGPTPEGVWIPDQGVPPYRGRG

SEQ ID NO: 49456 - protein, 154 aa, Ruegeria sp.
  REGION 1..154: note = sp|Q1GEZ0|QUEF_RUEST NADPH-dependent 7-cyano-7-deazaguanine reductase OS=Ruegeria sp. (strain TM1040) OX=292414 GN=queF PE=3 SV=1
MSEDIYQNLKQLGGETRIPASPEEAELERVANPQADVAYNVRFTAPEFTSLCPMTGQPDFAHLVIDYVPGPWLVESKSLKLFLTSFRNHGAFHEDCTISIARRLVDFLDPQWLRIGGYWYPRGGIPIDVFWQSGTIPEGVWIPDQGVPPYRGRG

SEQ ID NO: 49457 - protein, 277 aa, Rugamonas rubra
  REGION 1..277: note = tr|A0A1I4S2I8|A0A1I4S2I8_9GAMM NADPH-dependent 7-cyano-7-deazaguanine reductase OS=Rugamonas rubra; OX = 758825 GN=queF PE=3 SV=1
MTNTVDLSPLGKTSAYRTDYAPELLFPIPRQGKRDELGLSGTLPFFGVDIWNAYEISWLNGRGKPQVAIARITVPADSPNIVESKSFKLYLNSFNQTRLDSAEALKALLQKDLSQGFGAAVHIALSLPEEFERLKMGELDGLLLDRLDIEVEHYHPAPELLKANFDNGPVEEKLVSHLLKSNCLVTGQPDWASVQIHYYGPQIEQESLLRYLIGFREHNEFHEQCVERIFTDILRQCAPQQLAVYARYTRRGGLDINPWRSNFSTATPPPNLRGARQ

SEQ ID NO: 49458 - protein, 148 aa, unidentified
  source 1..148: note = Rugosibacter aromaticivorans
  REGION 1..148: note = tr|A0A0C5J7I9|A0A0C5J7I9_9RHOO NADPH-dependent 7-cyano-7-deazaguanine reductase OS=Rugosibacter aromaticivorans OX=1565605 GN=queF PE=3 SV=1
MTSKPSKKLETFPNPAPHRDYQIHMEIPEFTCLCPKTGQPDFAVLTLDYIADKTCVELKSLKLYMWSFRDEGHFHEDVTNRILDDLASAVKPRYMRLTARFYVRGGVFTTVVAEHRKKGWKPPVKVELADLATLPNANTRGNSLATAA

SEQ ID NO: 49459 - protein, 130 aa, unidentified
  source 1..130: note = Rugosibacter sp.
  REGION 1..130: note = tr|A0A522Y4K3|A0A522Y4K3_9RHOO NADPH-dependent 7-cyano-7-deazaguanine reductase (Fragment); OS = Rugosibacter sp. OX=1914450 GN=queF PE=3 SV=1
MTSKPSKKLETFPNPAPHRDYQIHMEIPEFTCLCPKTGQPDFAVLTLDYIADKTCVELKSLKLYMWSFRDEGHFHEDVTNRILDDLASAVKPRYMRLTARFYVRGGVFTTVVAEHRKKGWKPPVKVELAD

SEQ ID NO: 49460 - protein, 149 aa, unidentified
  source 1..149: note = Rugosibacter sp.
  REGION 1..149: note = tr|A0A521KCW7|A0A521KCW7_9RHOO NADPH-dependent 7-cyano-7-deazaguanine reductase OS=Rugosibacter sp.; OX = 1914450 GN=queF PE=3 SV=1
MNKQAAKQITSQPSKTLETFPNPAAHRDYQIHMEIPEFTCLCPKTGQPDFATLTLDYIADKVCVELKSLKLYMWSFRDEGHFHEDVTNRILDDLASAVKPRYMRLTARFYVRGGVFTTVVAEHRKKGWQPPVKIELANLATLPNANTRG

SEQ ID NO: 49461 - protein, 43 aa, unidentified
  source 1..43: note = Ruminococcaceae bacterium
  REGION 1..43: note = tr|A0A3D0NR40|A0A3D0NR40_9FIRM NADPH-dependent 7-cyano-7-deazaguanine reductase QueF (Fragment); OS = Ruminococcaceae bacterium OX=1898205 GN=DEO95_05615; PE = 4 SV=1
MEKTRENENLTLLGNKNTRYSFDYTPDVLETFENKHKENDYFV

SEQ ID NO: 49462 - protein, 165 aa, unidentified
  source 1..165: note = Ruminococcaceae bacterium
  REGION 1..165: note = tr|A0A1G4W4C7|A0A1G4W4C7_9FIRM NADPH-dependent 7-cyano-7-deazaguanine reductase OS=Ruminococcaceae bacterium P7 OX=1200751 GN=queF PE=3 SV=1
MNGRTKKETESLTLLGNKNVQYATDYAPEVLETFPNKHLGNDYFVKFNCPEFTSLCPITGQPDFATIYISYIPDKLMVESKSLKLYLFSFRNHGDFHEDCVNIIMKDLIALMQPKYIEVWGKFLPRGGLSIDPYCNYGKKDTKWENLAWERLSKHDLNPETVNNR

SEQ ID NO: 49463 - protein, 165 aa, Ruminococcus albus
  REGION 1..165: note = tr|A0A011V0H3|A0A011V0H3_RUMAL NADPH-dependent 7-cyano-7-deazaguanine reductase OS=Ruminococcus albus SY3; OX = 1341156 GN=queF PE=3 SV=1
MAGRTENERGSISLLGNNNTKYSADYAPEVLETFPNKHPDRDYFVKFNCPEFTSLCPITGQPDFATIYISYIPAERMVESKSLKLYLFSFRNHGDFHEDCVNIIMNDLIKLMEPKYIEVWGKFLPRGGISIDPYCNYGIKGTKWEELAWQRLAQHDMYPELVNNR

SEQ ID NO: 49464 - protein, 165 aa, Ruminococcus albus; identical to SEQ ID NO: 49463
  REGION 1..165: note = tr|A0A1H7GLF9|A0A1H7GLF9_RUMAL NADPH-dependent 7-cyano-7-deazaguanine reductase OS=Ruminococcus albus; OX = 1264 GN=queF PE=3 SV=1

SEQ ID NO: 49465 - protein, 165 aa, Ruminococcus callidus
  REGION 1..165: note = tr|U2LNS7|U2LNS7_9FIRM NADPH-dependent 7-cyano-7-deazaguanine reductase OS=Ruminococcus callidus ATCC 27760 OX=411473 GN=queF PE=3 SV=1
MAGRSKEETGDITLLGNQNTKYASDYAPEVLETFPNKHPDRDYFVKFNCPEFTSLCPITGQPDFATLYISYVPREIMVESKSLKLYLFSFRNHGDFHEDCVNIIMNDLIRLMEPAYIEVWGKFLPRGGISIDPYCNYGRPGTKWEQVAWDRLTHHDMFPEKVDNR

SEQ ID NO: 49466 - protein, 165 aa, Ruminococcus flavefaciens
  REGION 1..165: note = tr|A0A315Y2V2|A0A315Y2V2_RUMFL NADPH-dependent 7-cyano-7-deazaguanine reductase OS=Ruminococcus flavefaciens OX=1265 GN=queF PE=3 SV=1
MSGRTENEKGSITLLGNNNTKYSSDYDPSVLETFPNKHPDNDYFVKFNCPEFTSLCPITGQPDFASIYISYIPGERMVESKSLKLYLFSFRNHGDFHEDCVNIIMKDLIKLMEPKYIEVWGKFLPRGGISIDPYCNYGMAGTKWEQLAWDRLAHHDMYPESINNR

SEQ ID NO: 49467 - protein, 165 aa, Ruminococcus flavefaciens
  REGION 1..165: note = tr|A0A1H6L1I1|A0A1H6L1I1_RUMFL NADPH-dependent 7-cyano-7-deazaguanine reductase OS=Ruminococcus flavefaciens OX=1265 GN=queF PE=3 SV=1
MSGRSENEKGSITLLGNNNTKYSSDYDPSVLETFPNKHPDNDYFVKFNCPEFTSLCPITGQPDFAAIYISYIPDKVMVESKSLKLYLFSFRNHGDFHEDCVNIIMKDLIKLMSPKYIEVWGKFLPRGGISIDPYCNYGKPGTKWEELAWDRLSHHDLYPESINNR

SEQ ID NO: 49468 - protein, 160 aa, Ruminococcus lactaris
  REGION 1..160: note = tr|B5CRR1|B5CRR1_9FIRM NADPH-dependent 7-cyano-7-deazaguanine reductase OS=Ruminococcus lactaris ATCC 29176 OX=471875 GN=queF PE=3 SV=1
MREKENLTLLGNQQNNYETDYNPDLLETFVNKHPENDYFVKFNCPEFTSLCPITGQPDFANIIISYVPGERMVESKSLKLYLFSFRNHGDFHEDCVNVIMKDLIKLMEPKYIEVWGKFTPRGGISIDPYCNYGKPGTKWEDVAFNRMANHDMYPEKVDNR

SEQ ID NO: 49469 - protein, 160 aa, Ruminococcus lactaris; identical to SEQ ID NO: 49468
  REGION 1..160: note = tr|A0A3E4LHA1|A0A3E4LHA1_9FIRM NADPH-dependent 7-cyano-7-deazaguanine reductase OS=Ruminococcus lactaris; OX = 46228 GN=queF PE=3 SV=1

SEQ ID NO: 49470 - protein, 164 aa, Ruminococcus sp.
  REGION 1..164: note = tr|A0A417KAR5|A0A417KAR5_9FIRM NADPH-dependent 7-cyano-7-deazaguanine reductase OS=Ruminococcus sp. AM26-12LB OX=2293190 GN=queF PE=3 SV=1
MSRENLEKEGITLLGNQKVKYPDNYAPEVLETFLNKHPDNDYFVKFNCPEFTSLCPITGQPDFATITISYVPGEKMVESKSLKLYLFSFRNHGDFHEDCVNIIMKDLIRLMDPKYIEVWGKFTPRGGISIDPYCNYGKAGTRWEEIAWKRLAEHDMYPEKIDNR

SEQ ID NO: 49471 - protein, 160 aa, Ruminococcus sp.
  REGION 1..160: note = tr|A0A373SN76|A0A373SN76_9FIRM NADPH-dependent 7-cyano-7-deazaguanine reductase OS=Ruminococcus sp. AF25-17 OX=2293164 GN=queF PE=3 SV=1
MREKENLTLLGNQQTKYRMDYDPSVLEAFQNKHPENDYFVKFNCPEFTSLCPITGQPDFATITISYVPDERLVESKSLKLYLFSFRNHGDFHEDVINIIMKDLVKLLEPKYIEVWGKFLPRGGLSIDPYCNYGKPGTNWEQVAWNRMSNHDMFPEKIDNR

SEQ ID NO: 49472 - protein, 160 aa, unidentified
  source 1..160: note = [Ruminococcus] torques
  REGION 1..160: note = tr|D4LZK9|D4LZK9_9FIRM NADPH-dependent 7-cyano-7-deazaguanine reductase OS=[Ruminococcus] torques L2-14 OX=657313 GN=queF PE=3 SV=1
MREKENLTLLGNQQTEYRMDYDPSVLEAFQNKHPENDYFVKFNCPEFTSLCPITGQPDFATITISYVPDERLVESKSLKLYLFSFRNHGDFHEDVINIIMKDLVKLLEPKYIEVWGKFLPRGGLSIDPYCNYGKPGTNWEQVAWNRMSNHDMFPEKIDNR

SEQ ID NO: 49473 - protein, 160 aa, unidentified; identical to SEQ ID NO: 49472
  source 1..160: note = [Ruminococcus] torques
  REGION 1..160: note = tr|A0A174YR88|A0A174YR88_9FIRM NADPH-dependent 7-cyano-7-deazaguanine reductase OS=[Ruminococcus] torques; OX = 33039 GN=queF PE=3 SV=1

SEQ ID NO: 49474 - protein, 166 aa, Rummeliibacillus sp.
  REGION 1..166: note = tr|A0A3N5ZS11|A0A3N5ZS11_9BACL NADPH-dependent 7-cyano-7-deazaguanine reductase OS=Rummeliibacillus sp. TYF005 OX=2058214 GN=queF PE=3 SV=1
MSGRTNEQGLKDLSLLGNQNTKYLYEYAPEVLEAVDNLHTQNDFFVKFNCPEFTSLCPMTGQPDFATIYISFIPDKKLVESKSLKLYLFSFRNHGDFHEDCVNIIMKDLIKLLDPRYIEVWGKFTPRGGLSIDPWCNYGRPGTKYEKMAEHRLLNHDLYPEKVDNR

SEQ ID NO: 49475 - protein, 128 aa, unidentified
  source 1..128: note = Ruthia magnifica
  REGION 1..128: note = sp|A1AWC8|QUEF_RUTMC NADPH-dependent 7-cyano-7-deazaguanine reductase OS=Ruthia magnifica subsp. Calyptogena magnifica OX=413404 GN=queF PE=3 SV=1
MSYQPNKVLEVFDNPKIERDFIIQINMPEFTCLCPKTGQPDFATLHFAYIADKACIELKSLKMYIWLYRNEGAFHEAVTNQILDDLVQVSNPRFIRLKAIFNIRGGVYTTIITEHKQKNWTPKAKVDL

SEQ ID NO: 49476 - protein, 165 aa, Saccharibacillus sp.
  REGION 1..165: note = tr|A0A4Y6UX20|A0A4Y6UX20_9BACL NADPH-dependent 7-cyano-7-deazaguanine reductase OS=Saccharibacillus sp. ATSA2 OX=2583377 GN=queF PE=3 SV=1
MSHSRQDGLEDLTLLGNQGTTYTFEYDPGILESFDNKHEYRDYFVKFNCPEFTSLCPITGQPDFATIYISYIPDVKMVESKSLKLYLFSFRNHGDFHEDCMNIIMNDLIKLMDPRYIEVWGKFTPRGGISIDPYTNYGKPGTKYEEMAWNRLTNHDLYPEKVDNR

SEQ ID NO: 49477 - protein, 165 aa, Saccharibacillus sp.
  REGION 1..165: note = tr|A0A254NSI5|A0A254NSI5_9BACL NADPH-dependent 7-cyano-7-deazaguanine reductase OS=Saccharibacillus sp. O23 OX=2009338 GN=queF PE=3 SV=1
MSHSRQDGLEDLTLLGNQGTKYTFEYDPGILESFDNKHAYRDYFVKFNCPEFTSLCPITGQPDFATIYISYIPDVKMVESKSLKLYLFSFRNHGDFHEDCMNIIMNDLIELMDPRYIEVWGKFTPRGGISIDPYTNYGKPGTKYEEMAFNRLTNHDLYPEKVDNR

SEQ ID NO: 49478 - protein, 162 aa, Saccharibacter sp.; identical to SEQ ID NO: 48220
  REGION 1..162: note = tr|A0A060QB74|A0A060QB74_9PROT NADPH-dependent 7-cyano-7-deazaguanine reductase OS=Saccharibacter sp. AM169 OX=1343158 GN=queF PE=3 SV=1

SEQ ID NO: 49479 - protein, 292 aa, unidentified
  source 1..292: note = Saccharicrinis carchari
  REGION 1..292: note = tr|A0A521B8V2|A0A521B8V2_9BACT 7-cyano-7-deazaguanine reductase OS=Saccharicrinis carchari OX=1168039 GN=SAMN06265379_101776 PE=4 SV=1
MNSIESKVLGKQISHPRAYAPEILVAVPRKLNRQQYHISEQAIPFVGVDAWHAYELGFLTKKGLPVTGILKIVYVCNSQFLVESKSLKLYLNSFNMGRYGDNKKEGITQVLQTIKSDLSQLMQTEIELSFHTEYARHTYDFNDYVLLEDEPEADQIIFDTFKENEKLLISHKASETNELKVATNLLRSNCKITHQPDWGSAFIHIKSQHKINRMALLKYLVSIRDENHFHEEICEMLYKRLLDRFEPEALMVACLYTRRGGIDICPVRANKATYLPQNIIQAKLLTRQAFRQ

SEQ ID NO: 49480 - protein, 292 aa, unidentified
  source 1..292: note = Saccharicrinis fermentans
  REGION 1..292: note = tr|W7YJC9|W7YJC9_9BACT NADPH-dependent 7-cyano-7-deazaguanine reductase OS=Saccharicrinis fermentans DSM 9555 = JCM 21142 OX=869213; GN = JCM21142_93313 PE=4 SV=1
MNPIEGKVLGKQMSHPRNYAPEILVAVPRSLNREQYGMNACELPFVGVDAWHAYELGFLTEKGLPVVGVLKLVYACDNESLVESKSLKLYLNSFNMGRYGENREAGIAQVLKTIRRDLSELLKTTVEVSFHNAHNSGIYDFDGFGLLEEMPEADSALFEKFKEDERLLEAVPTQQSCELKVSTHLLRSNCKITHQPDWGSAFIHLKTKYEIDRISLLRYLVSIRDENHFHEEICEMLYKRLVDKFDPEILMVACLYTRRGGIDICPVRANKKEYLPRNIIQSKIFTSPAFRQ

SEQ ID NO: 49481 - protein, 268 aa, Saccharophagus degradans
  REGION 1..268: note = sp|Q21LJ5|QUEF_SACD2 NADPH-dependent 7-cyano-7-deazaguanine reductase OS=Saccharophagus degradans (strain 2-40 / ATCC 43961 / DSM 17024) OX=203122; GN = queF PE=3 SV=1
MSSIELGKQAEYPEQYSPDCLEPIARSLSRSGLGLNASALPFTGLDVWTGYELSWLDLSGKPQVAIGYFEFDAKTDAIVESKSFKYYLNSFNQTRFESWAAVQTLMQQDLANASGGDVNVRLEPLSAVSPLETPAGQCIDDCPLEAAVYTPDAALLKVEQGEVSEQLFSHLLKSNCPVTGQPDWATVWVSYRGNKITPESLLAYVVSYRQHQDFHENCVEKIFTDIMAQCAPVELSVYARYTRRGGLDINPFRTNCGAALPGWRIVRQ

SEQ ID NO: 49482 - protein, 276 aa, Saccharospirillum sp.
  REGION 1..276: note = tr|A0A2T6E761|A0A2T6E761_9GAMM NADPH-dependent 7-cyano-7-deazaguanine reductase OS=Saccharospirillum sp. MSK14-1 OX=1897632 GN=queF PE=3 SV=1
MSTPEHSPLGKTSAYIAEYDPTLLFPIERQGKRDEIGIDGDELPFAGVDIWNAYELSWLNPKGKPVVALGEFFIPAQSPRLIESKSFKLYLNSFNQSHFASVREVAETMTADLSKAAGADVRVTLVPLGQMGHSADVFGLPGENIDDLDIETDQYQTDPGLLATVPGEPVHEVLNSHLLKSNCLVTGQPDWGSVVIDYRGPKLDRAALLKYLISFRQHNEFHEQCVERIFQDLQRHCGTEQLTVYARYVRRGGLDINPYRSNDPGFEADNRRLARQ

SEQ ID NO: 49483 - protein, 163 aa, unidentified
  source 1..163: note = Salibacterium halotolerans
  REGION 1..163: note = tr|A0A1I5T494|A0A1I5T494_9BACI NADPH-dependent 7-cyano-7-deazaguanine reductase OS=Salibacterium halotolerans OX=1884432 GN=queF PE=3 SV=1
MPERNDIENLSHLGQEETSYTFHYDSSLLETFENGHPNRDYFVKFNCPEFTTLCPKTGQPDFAALYISYIPEVHMVESKSLKLYLFSFRNHGGFHEDAINTIVNDLVELMNPRYLEVLGRFTPRGGISIDPYANYGRPGTKYEQMAETRLLYHDMYPENINNR

SEQ ID NO: 49484 - protein, 163 aa, unidentified
  source 1..163: note = Salibacterium qingdaonense
  REGION 1..163: note = tr|A0A1I4IGI0|A0A1I4IGI0_9BACI NADPH-dependent 7-cyano-7-deazaguanine reductase OS=Salibacterium qingdaonense OX=266892 GN=queF PE=3 SV=1
MPERNDIENLSHLGQEETSYTFHYDPSLLETFENGHPNRDYFVKFNCPEFTTLCPKTGQPDFAALYISYIPDVHMVESKSLKLYLFSFRNHGGFHEDAINTIVNDLVDLMNPRYLEVLGRFTPRGGISIDPYANYGRAGTKYEQMAETRLLYHDMYPENINNR

SEQ ID NO: 49485 - protein, 162 aa, unidentified
  source 1..162: note = Salilacibacter sp.
  REGION 1..162: note = tr|A0A514LL79|A0A514LL79_9ACTN NADPH-dependent 7-cyano-7-deazaguanine reductase OS=Salilacibacter sp. NKC3-5 OX=2502791 GN=queF PE=3 SV=1
MTEEHDSRLSHLGNEGTTYTFEYDPELLETFDNQHPYRDYFVKFNTPEFTTLCPLTGQPDFATLYISYIPDKKMVESKALKLYLFSFRNHGDFHEDVINIIVNDLVEAMAPRYIEIWGKFTPRGGISIDPYVNYGKPDTKYEKMAEQRLLYHDMYPETITNR

SEQ ID NO: 49486 - protein, 163 aa, Salimicrobium flavidum
  REGION 1..163: note = tr|A0A1N7JCM9|A0A1N7JCM9_9BACI NADPH-dependent 7-cyano-7-deazaguanine reductase OS=Salimicrobium flavidum; OX = 570947 GN=queF PE=3 SV=1
MGRENELKDLSLLGSQETHYSFDYNPDVLESFDNKHVHRDYFVKLNCPEFTTLCPKTNQPDFGTVYIKYIPDEKMVESKSLKLYLFSFRNHGDFHEDSMNIIMNDLIELMEPRYIEVLGKFTPRGGISIDPFCNYGKPGTKYEEMADFRMMNHDMYPEKVDNR

SEQ ID NO: 49487 - protein, 163 aa, Salimicrobium halophilum
  REGION 1..163: note = tr|A0A1G8TKD9|A0A1G8TKD9_9BACI NADPH-dependent 7-cyano-7-deazaguanine reductase OS=Salimicrobium halophilum OX=86666 GN=queF PE=3 SV=1
MKRDEELKDLSLLGSQDTAYSFDYTPEVLETFDNKHPNRDYFVKFNCPEFTTLCPKTNQPDFGTVYIKYIPDERMVESKSLKLYLFSFRNHGDFHEDSMNIIMNDLIELMEPRYIEVLGKFTPRGGISIDPFCNYGRPGTKYEEMADYRMMNHDLYPEKVDNR

SEQ ID NO: 49488 - protein, 150 aa, unidentified
  source 1..150: note = Salinarimonadaceae bacterium
  REGION 1..150: note = tr|A0A0P7XRX1|A0A0P7XRX1_9RHIZ NADPH-dependent 7-cyano-7-deazaguanine reductase OS=Salinarimonadaceae bacterium HL-109 OX=1653334 GN=queF1 PE=3 SV=1
MIDNSNLQLGQSADIPATPEEARLDRVPNPHSAGEYVARFTCPEFTSICPVTGQPDFAILVIDYVPGQWLVESKSLKLYLTSFRNHGAFHEDCTVAIGKRLAELLEPVYMRIGGYWYPRGGIPIDVFWQTGEMPKNIWLPDQGVAPYRAR

SEQ ID NO: 49489 - protein, 150 aa, Salinarimonas sp.
  REGION 1..150: note = tr|A0A5B2VDH3|A0A5B2VDH3_9RHIZ NADPH-dependent 7-cyano-7-deazaguanine reductase OS=Salinarimonas sp. BN140002 OX=1638099 GN=queF PE=3 SV=1
MSHLDVSQLGRPTAQPNSPEEAVLERVPNPHADTDYVARFTAPEFTSICPVTGQPDFAILVIDYVPGDWLVESKSLKLYLNSFRNHGAFHEDCTVAIGRKLADLLGPRFLRIGGYWFPRGGIPIDVFWQTGELPRNVFLPDQGVPPYRAR

SEQ ID NO: 49490 - protein, 165 aa, Salinibacillus kushneri
  REGION 1..165: note = tr|A0A1I0GR08|A0A1I0GR08_9BACI NADPH-dependent 7-cyano-7-deazaguanine reductase OS=Salinibacillus kushneri OX=237682 GN=queF PE=3 SV=1
MSGRRDGELTDLSLLGNQHTKYTFDYTPEVLETFDNKHPNRDYFVKFNCPEFTTLCPKTHQPDFGTVYISYIPDEKMVESKSLKLYLFSFRNHGDFHEDSMNIIMNDLIELMNPRYIEVWGKFTPRGGISIDPYCNYGKAGTKYEEMAQHRLMNHDMYPEKVDNR

SEQ ID NO: 49491 - protein, 172 aa, Salinibacter sp.
  REGION 1..172: note = tr|A0A2P6C5E2|A0A2P6C5E2_9BACT NADPH-dependent 7-cyano-7-deazaguanine reductase OS=Salinibacter sp. 10B; OX = 1923971 GN=queF PE=3 SV=1
MPDSHESDNGRSRSRAAREHTEEALEYMAQFGIEPEGQVRPFLPPSARQQTIDRLPYEHEVRQTVVYETEPGEFSAVCPFSGLPDSGTVRVEYVPGDWVVELKSLKYYLISWRDIGITQEDVTAYIYRDVRAELENPDVLMVRTEYTVRGGINTTCTVDSREQGPPSALGDD

SEQ ID NO: 49492 - protein, 178 aa, Salinicoccus alkaliphilus
  REGION 1..178: note = tr|A0A1M7F087|A0A1M7F087_9STAP NADPH-dependent 7-cyano-7-deazaguanine reductase OS=Salinicoccus alkaliphilus DSM 16010 OX=1123231 GN=queF PE=3 SV=1
MCPLRYMVFILKGEMMMTDENTEDLTLLGNRDVEYAFDYDPEVLETFDNKFPDRDYFVKFNCPEFTTLCPITNQPDFATIYISYIPDVKMVESKSLKLYLFSYRDHGGFHESSVNMIMDDLIGLMDPRYIEVWGKFTPRGGISIDPYCNYGRKGTKYEEMADRRLMEHDMNPETITNR

SEQ ID NO: 49493 - protein, 162 aa, Salinicoccus halodurans
  REGION 1..162: note = tr|A0A0F7HI19|A0A0F7HI19_9STAP NADPH-dependent 7-cyano-7-deazaguanine reductase OS=Salinicoccus halodurans OX=407035 GN=queF PE=3 SV=1
MSEEYTENLSLLGSREVKYDFDYNPEVLETFDNKHEGRDYFVKFNCPEFTTLCPITNQPDFATLYISYIPDVKMVESKALKLYLFSFRNHGGFHENSVNMIMDDLIELMDPKYIEIWGKFTPRGGISIDPYCNYGRKGTKYEKMADHRMMNHDMYPEHVDNR

SEQ ID NO: 49494 - protein, 162 aa, unidentified
  source 1..162: note = Salinicoccus kekensis
  REGION 1..162: note = tr|A0A285UV03|A0A285UV03_9STAP NADPH-dependent 7-cyano-7-deazaguanine reductase OS=Salinicoccus kekensis; OX = 714307 GN=queF PE=3 SV=1
MTNENTKDLTLLGNEDVKYAFDYDPEVLETFDNKFPDRDYFVKFNCPEFTTLCPITNQPDFATIYISYIPDVKMVESKSLKLYLFSYRNHGGFHESSVNMIMDDLIELMDPRYIEVWGKFTPRGGISIDPYCNYGRAGTKYEKMADHRLMEHDMNPETITNR

SEQ ID NO: 49495 - protein, 162 aa, Salinicoccus qingdaonensis
  REGION 1..162: note = tr|A0A1G9DKG8|A0A1G9DKG8_9STAP NADPH-dependent 7-cyano-7-deazaguanine reductase OS=Salinicoccus qingdaonensis OX=576118 GN=queF PE=3 SV=1
MSGENTEDLTLLGSQEVKYSFDYDPEVLETFDNKFPGRDYFVKFNCPEFTTLCPITNQPDFATIYISYIPDVKMVESKSLKLYLFSYRNHGGFHESSVNMIMDDLIGLMDPRYIEVWGKFTPRGGISIDPYCNYGRAGTKYEEMADKRLMEHDISPETINNR

SEQ ID NO: 49496 - protein, 162 aa, Salinicoccus roseus
  REGION 1..162: note = tr|A0A265E6N3|A0A265E6N3_9STAP NADPH-dependent 7-cyano-7-deazaguanine reductase OS=Salinicoccus roseus; OX = 45670 GN=queF PE=3 SV=1
MSEENTQDLSLLGNQNVKYDFDYNPDVLETFDNKYPGRDYFVKFNCPEFTTLCPITGQPDFATLYISYIPDVKMVESKALKLYLFSYRNHGGFHESSVNMIMDDLVKLMDPKYIEIWGKFTPRGGISIDPYCNYGRPGTKYEEMADYRMMNHDLYPEKVDNR

SEQ ID NO: 49497 - protein, 162 aa, Salinicoccus roseus
  REGION 1..162: note = tr|A0A0C2E8W4|A0A0C2E8W4_9STAP NADPH-dependent 7-cyano-7-deazaguanine reductase OS=Salinicoccus roseus; OX = 45670 GN=queF PE=3 SV=1
MSKENTQDLSLLGNQNVKYDFDYNPDVLETFDNKYPGRDYFVKFNCPEFTTLCPITGQPDFATLYISYIPDVKMVESKALKLYLFSYRNHGGFHESSVNMIMDDLVNLMDPKYIEIWGKFTPRGGISIDPYCNYGRPGTKYEEMADYRMMNHDMYPEKVDNR

SEQ ID NO: 49498 - protein, 162 aa, unidentified
  source 1..162: note = Salinicoccus sediminis
  REGION 1..162: note = tr|A0A0M2SLL8|A0A0M2SLL8_9STAP NADPH-dependent 7-cyano-7-deazaguanine reductase OS=Salinicoccus sediminis; OX = 1432562 GN=queF PE=3 SV=1
MSEDYTKDLSLLGSQEVKYDFDYNPDVLETFENKHQGRDYFVKFNCPEFTTLCPITNQPDFATLYISYIPDIRMVESKALKLYLFSFRNHGGFHENSVNMIMDDLIELMDPKYIEIWGKFTPRGGISIDPFCNYGRAGTKYERMAEHRMMNHDMYPEHVVNR

SEQ ID NO: 49499 - protein, 162 aa, Salinicoccus sp.
  REGION 1..162: note = tr|A0A558AQY8|A0A558AQY8_9STAP NADPH-dependent 7-cyano-7-deazaguanine reductase OS=Salinicoccus sp. CT19; OX = 2493691 GN=queF PE=3 SV=1
MSGENTQDLSLLGNQNVKYDFDYNPDVLETFDNKYPGRDYFVKFNCPEFTTLCPITSQPDFATLYISYIPDVKMVESKALKLYLFSYRNHGGFHESSVNMIMDDLINLMDPKYIEVWGKFTPRGGISIDPYCNYGRPDTKYAEMADYRMMNHDMYPEKVDNR

SEQ ID NO: 49500 - protein, 279 aa, Salinicola socius
  REGION 1..279: note = tr|A0A1Q8SMM0|A0A1Q8SMM0_9GAMM NADPH-dependent 7-cyano-7-deazaguanine reductase OS=Salinicola socius; OX = 404433 GN=queF PE=3 SV=1
MNQDRPETLVDAPLGQESAYPDRYDASLLFPIERAANRAPLGIEASSLPFVGGDEWWAFELSWLDLRGKPVVAIARFRLPADSPRLIESKSWKLYLNGFNQTTFAGRDAVIDFLQRDLGAAAGAPVTVELFGVDDAALAPRPMPGECIDDIEIDIDRYTPSADLLVCDGNDIVEETLHSHLLKSNCPVTGQPDWGSVLITYRGPRLDRAALLRYIVSYRQHQDFHEHCVEHIFVDLMARCLPHELLVMARYVRRGGLDINPWRATPGWMPELPARLLRQ

SEQ ID NO: 49501 - protein, 279 aa, Salinicola sp.
  REGION 1..279: note = tr|A0A1Q8T1R5|A0A1Q8T1R5_9GAMM NADPH-dependent 7-cyano-7-deazaguanine reductase OS=Salinicola sp. MH3R3-1; OX = 1928762 GN=queF PE=3 SV=1
MTQDRPHTLTDAPLGRESAYPERYDASLLFPIERAANRAPLRIDSTSLPFVGGDEWWAFELSWLDLRGKPVVAVARFRLPADSPQLIESKSWKLYLNSFNQTTFADREAVVEFLQRDLSAAAGAPVTVELYGADDAELAPQPMPGDCLDDIEVDIDRYTPSPDLLACDESDIVEETLHSHLLKSNCPVTGQPDWGSVLIAYRGPRLDRAALLRYVISYRQHQDFHEHCVEHIFVDLMARCRPQELLVMARYVRRGGLDINPWRATPGWTPALPARLLRQ

SEQ ID NO: 49502 - protein, 279 aa, Salinicola sp.
  REGION 1..279: note = tr|A0A1S2DDN0|A0A1S2DDN0_9GAMM NADPH-dependent 7-cyano-7-deazaguanine reductase OS=Salinicola sp. MIT1003; OX = 1882734 GN=queF PE=3 SV=1
MNQDRPQTLIDAPLGEVSSYPERYDASLLFPIERAANRAPLGIEASSLPFVGGDEWWAFELSWLDLRGKPVVAVARFRLPADSPRLIESKSWKLYLNSFNQTTFAGREAVIDFLVRDLSAAAGAPVTVELFGVDDAALAPRAMPGKCIDEIEVDIDRYTPSPELLACDDSDIVEETLHSHLLKSNCPVTGQPDWGSVLIAYRGPRLDRGALLRYIVSYRQHQDFHEHCVEHIFVDLMARCRPQALLVMARYVRRGGLDINPWRATPGWAPELPARLLRQ

SEQ ID NO: 49503 - protein, 279 aa, unidentified
  source 1..279: note = Salinimonas sediminis
  REGION 1..279: note = tr|A0A346NJF0|A0A346NJF0_9ALTE NADPH-dependent 7-cyano-7-deazaguanine reductase OS=Salinimonas sediminis; OX = 2303538 GN=queF PE=3 SV=1
MTNNASSNLPDNLTLGQQVAYDAHYNPELLQGVARSISRDAQHISGPDLPFSGIDTWTGYELSWLNAKGKPQVGIVECHVPVTSANLIESKSFKLYLNSYNQTHFDDLDAVKRTLQADLSRCAGEQVTVAVFLPHQFNRFATAELAGVVIDDIDIEIDQYSPDPNLLRTEHKQVSETLVSHLLKSNCLITSQPDWASVLIKYEGQALNHEQLLRYLIGFRQHNEFHEQCVERIFCDIKALPGIDKLTVLARYTRRGGLDINPFRSNFEAPYPNQRNARQ

SEQ ID NO: 49504 - protein, 279 aa, Salinimonas sp.
  REGION 1..279: note = tr|A0A5B7YF69|A0A5B7YF69_9ALTE NADPH-dependent 7-cyano-7-deazaguanine reductase OS=Salinimonas sp. KX18D6; OX = 2572577 GN=queF PE=3 SV=1
MTNETEARLPEGLSLGREVTYEAHYNPALLQGVPRALSRDLQGISAQALPFSGVDTWTGYELSWLTLKGKPQVGILQCEVPVTSEFLIESKSFKLYLNSFNQTQFESRSDVEKTLRKDLSKCAGEPVSVAIYLPAEFDNFAVTPLPGTNIDDADIEISTYSPDASILQTSATKVSETLNSDLLKSNCLITSQPDWASILIKYEGYALDQSALLKYLVGYRQHNEFHEQCVERIFCDLINLPGMEKLTVLARYTRRGGLDINPFRSNFELPYPNRRTARQ

SEQ ID NO: 49505 - protein, 277 aa, unidentified
  source 1..277: note = Saliniradius amylolyticus
  REGION 1..277: note = tr|A0A2S2E6M7|A0A2S2E6M7_9ALTE NADPH-dependent 7-cyano-7-deazaguanine reductase OS=Saliniradius amylolyticus OX=2183582 GN=queF PE=3 SV=1
MTQDQHPDALKHLSLGQETNYNSGYDPELLQAVPRRLNREDIGLTGVMPFKGVDIWNGYELSWLNTKGKPCVGILEARVPFNSPNLIESKSFKLYLNSLNQYRLPSTEALQQHLERDLSACAQAPVTARIHPLNAPQYQVSSWQGDCLDDLDISMDDYQYDPSLLTCSDDKVSETLISHLLKSNCLITNQPDWGSVMIRYQGSRIKRENLLTYLITFRQHNEFHEQCVERIYCDIMRHCKPEKLTVYARYTRRGGLDINPFRSNFESEPDNQRLTRQ

SEQ ID NO: 49506 - protein, 129 aa, unidentified
  source 1..129: note = Salinisphaera halophila
  REGION 1..129: note = tr|A0A423Q1Q8|A0A423Q1Q8_9GAMM NADPH-dependent 7-cyano-7-deazaguanine reductase OS=Salinisphaera halophila YIM 95161 OX=1051139 GN=queF PE=3 SV=1
MPSQPSRDLQTFDNPTPERDYTIRMRIPEFTCLCPVTGQPDFATIHLEYVPEARCVELKSLKLYIWSYRDEGAFHEAVTNQILADLVAATDPRFMRVRAEFWMRGGIDTSVIAEHRADNWHPGTPVALP

SEQ ID NO: 49507 - protein, 105 aa, Salinisphaera hydrothermalis
  REGION 1..105: note = tr|A0A084IJV8|A0A084IJV8_SALHC NADPH-dependent 7-cyano-7-deazaguanine reductase OS=Salinisphaera hydrothermalis (strain C41B8) OX=1304275 GN=queF PE=3 SV=1
MRIPEFTCLCPVTGQPDFATLHLEYVPEATCVELKSLKLYVWSYRDEGAFHEAVTNKILSDLVAATAPRFMRLTAEFWVRGGIDTTVIAEHRAEGWQPAPRVDLP

SEQ ID NO: 49508 - protein, 129 aa, unidentified; identical to SEQ ID NO: 49506
  source 1..129: note = Salinisphaera orenii
  REGION 1..129: note = tr|A0A423PRW5|A0A423PRW5_9GAMM NADPH-dependent 7-cyano-7-deazaguanine reductase OS=Salinisphaera orenii MK-B5 OX=856730 GN=queF PE=3 SV=1

SEQ ID NO: 49509 - protein, 129 aa, Salinisphaera shabanensis
  REGION 1..129: note = tr|U2EL73|U2EL73_9GAMM NADPH-dependent 7-cyano-7-deazaguanine reductase OS=Salinisphaera shabanensis E1L3A OX=1033802 GN=queF PE=3 SV=1
MSTQPSRDLETFPNPTPERDYTIRMRIPEFTCLCPKTGQPDFATLYLEYVPEASCVELKSLKLYVWSFRDEGAFHEAVTNRILADLVAATQPRFMRLRAEFWMRGGIDTTVIVDHRADNWHPGTPVHLP

SEQ ID NO: 49510 - protein, 129 aa, Salinisphaera sp.
  REGION 1..129: note = tr|A0A2E9ALB8|A0A2E9ALB8_9GAMM NADPH-dependent 7-cyano-7-deazaguanine reductase OS=Salinisphaera sp.; OX = 1914330 GN=queF PE=3 SV=1
MSTQPSRDLETFPNPSPERDYTIRMRIPEFTCLCPKTGQPDFATLYLEYVPEASCVELKSLKLYVWSYRDEGAFHEAVTNQILADLVAATQPRFMRLHAEFWMRGGIDTSVIVDHRADNWHPGTPVHLP

SEQ ID NO: 49511 - protein, 129 aa, Salinisphaera sp.
  REGION 1..129: note = tr|A0A2Z3J8V4|A0A2Z3J8V4_9GAMM NADPH-dependent 7-cyano-7-deazaguanine reductase OS=Salinisphaera sp. LB1; OX = 2183911 GN=queF PE=3 SV=1
MPSSPSRSLETFDNPKPERDYTIRMRIPEFTCLCPVTGQPDFATLHLEYVPEASCVELKSLKLYIWSYRDEGAFHEAVTNRILSDLVAATAPRFMRLTAEFWVRGGIDTTVIAEHRAEGWQPAPRVDLA

SEQ ID NO: 49512 - protein, 129 aa, unidentified
  source 1..129: note = Salinisphaeraceae bacterium
  REGION 1..129: note = tr|A0A2D4SEG8|A0A2D4SEG8_9GAMM NADPH-dependent 7-cyano-7-deazaguanine reductase OS=Salinisphaeraceae bacterium OX=2026789 GN=queF PE=3 SV=1
MSTSPSIDLETFPNPNPGRDYTIRMRMPEFTCLCPKTGQPDFATLYLEYVPDQRCVELKSLKLYLWSFRDRGAFHEAVTNELLEHLATATRPRFMRLRAEFYVRGGIYTDVVVEHRDPEWTTPARVELP

SEQ ID NO: 49513 - protein, 282 aa, unidentified
  source 1..282: note = Salinivibrio kushneri
  REGION 1..282: note = tr|A0A1V3GJN7|A0A1V3GJN7_9GAMM NADPH-dependent 7-cyano-7-deazaguanine reductase OS=Salinivibrio kushneri; OX = 1908198 GN=queF PE=3 SV=1
MSNYQDADALANLSLGEKTDYPTQYDPSQLRAVPRALNRQAIGLDNAPMPFTGYDTWTLYELSWLNQNGLPQVAIGEVRLPASSPNLIESKSFKLYLNSFNQTRFDNWQQVANALQTDLSACAGEEVDVTLSPLSELEGETIAGLAGECIDHQDISIDDYTFNPDWLEGAAQGAVVSETLHSHLLKSNCLITNQPDWGSVRIAYKGNKINREKLLRYLVSFREHNEFHEQCVERIFMDIMRFCQPEKLTVYARYTRRGGLDINPYRTNMGKTPSENNRLARQ

SEQ ID NO: 49514 - protein, 282 aa, unidentified
  source 1..282: note = Salinivibrio kushneri
  REGION 1..282: note = tr|A0A4P8H044|A0A4P8H044_9GAMM NADPH-dependent 7-cyano-7-deazaguanine reductase OS=Salinivibrio kushneri; OX = 1908198 GN=queF PE=3 SV=1
MSNYQDADALANLSLGEKTDYPTQYDPSQLRAVPRALNRQAIGLDNAPMPFTGYDTWTLYELSWLNQNGLPQVAIGEVRLPASSPNLIESKSFKLYLNSFNQTRFDNWQQVANALQTDLSACAGEEVDVTLSPLSELEGETIAGLAGECIDHQDISIDDYTFNPDWLDGAAQGAVVSETLHSHLLKSNCLITNQPDWGSVRIAYKGNKINREKLLRYLVSFREHNEFHEQCVERIFMDIMRFCQPEKLTVYARYTRRGGLDINPYRTNMGKTPSENNRLARQ

SEQ ID NO: 49515 - protein, 282 aa, Salinivibrio sharmensis
  REGION 1..282: note = tr|A0A1V3H447|A0A1V3H447_9GAMM NADPH-dependent 7-cyano-7-deazaguanine reductase OS=Salinivibrio sharmensis OX=390883 GN=queF PE=3 SV=1
MSNYQDADALANLSLGEKTDYPTQYDPSQLRAVPRALNRQAIGLDNAPMPFTGYDIWTLYELSWLNKNGLPQVAIGEVRLPASSPNLIESKSFKLYLNSFNQTSFDNWQQVANALQTDLSACAGEEVDVTLSPLSELEGETIAGLAGECIDHQDISIDDYTFKPDWLDGAAQGAIVSETLHSHLLKSNCLITNQPDWGSVRIAYKGKKINREKLLRYLVSFREHNEFHEQCVERIFMDIMRFCQPEKLTVYARYTRRGGLDINPYRTNMGKTPSENNRLARQ

SEQ ID NO: 49516 - protein, 282 aa, Salinivibrio sp.
  REGION 1..282: note = tr|A0A1V3H8I7|A0A1V3H8I7_9GAMM NADPH-dependent 7-cyano-7-deazaguanine reductase OS=Salinivibrio sp. MA351; OX = 1909453 GN=queF PE=3 SV=1
MSNYQDADALAKLSLGQHTDYPTEYDPSQLRAVPRELNRQAIGLDQASLPFTGYDTWTLYELSWLNKNGLPQVAIGEVRLPASSPNLVESKSFKLYLNSFNQTRFDSWQQVANALQTDLSACAGEAVDVTLSPLSELEGEVIAGLSGECLDHQDISIDDYRFQPEWLEDAAQGAIVSETLHSHLLKSNCLITHQPDWGSVRIAYKGKKINREKLLRYLVSFREHNEFHEQCVERIFMDIMRFCQPEKLTVYARYTRRGGLDINPYRTNMGKTPSENNRLARQ

SEQ ID NO: 49517 - protein, 282 aa, Salinivibrio sp.
  REGION 1..282: note = tr|A0A2A4GKT2|A0A2A4GKT2_9GAMM NADPH-dependent 7-cyano-7-deazaguanine reductase OS=Salinivibrio sp. YCSC6; OX = 2003370 GN=queF PE=3 SV=1
MSNYQDADALAGLSLGQHTDYPTQYDPSQLRAVPRELNRQAIGLSNETVPFTGYDTWTLYELSWLNQNGLPQVAIGEVRLPASSPNLIESKSFKLYLNSLNQTRFESWQKVADALQKDLSACAGEEVDVTLSPLSELEGETIAGMAGECIDHQDISIDDYTFNPDWLDGAAQGAIVSETLHSHLLKSNCLITNQPDWGSVRIAYKGKKINREKLLRYLVSFREHNEFHEQCVERIFMDIMRFCQPEKLTVYARYTRRGGLDINPYRTNMGKTPSENNRLARQ

SEQ ID NO: 49518 - protein, 164 aa, unidentified
  source 1..164: note = Salipaludibacillus aurantiacus
  REGION 1..164: note = tr|A0A1H9X201|A0A1H9X201_9BACI NADPH-dependent 7-cyano-7-deazaguanine reductase OS=Salipaludibacillus aurantiacus OX=1601833 GN=queF PE=3 SV=1
MSHKHSREEEVHLLGNTNVEYKMDYDPSILEAFENRHPHRDYFVKFNCPEFTSLCPKTGQPDFATIYISYIPDKKMVESKSLKLYLFSFRNHGDFHEDCMNTILDDLVKLMDPRYIEVWGKFTPRGGISIDPYVNYGKPGTKWENFAENRLLQHDLYPENINHR

SEQ ID NO: 49519 - protein, 162 aa, unidentified
  source 1..162: note = Salipaludibacillus keqinensis
  REGION 1..162: note = tr|A0A323TQQ5|A0A323TQQ5_9BACI NADPH-dependent 7-cyano-7-deazaguanine reductase OS=Salipaludibacillus keqinensis OX=2045207 GN=queF PE=3 SV=1
MAHNREEEVHLLGNTNVEYKMDYDPSILESFENRHPHRNYFVKFNCPEFTSLCPKTGQPDFATIYISYIPEKNMVESKSLKLYLFSFRNHGDFHEDCMNTILDDLVALMDPRYIEVWGKFTPRGGISIDPYVNYGKTGTKWEDFAEKRLLQHDLYPENIDHR

SEQ ID NO: 49520 - protein, 162 aa, unidentified
  source 1..162: note = Salipaludibacillus neizhouensis
  REGION 1..162: note = tr|A0A3A9KTG8|A0A3A9KTG8_9BACI NADPH-dependent 7-cyano-7-deazaguanine reductase OS=Salipaludibacillus neizhouensis OX=885475 GN=queF PE=3 SV=1
MSHNRENEVNLLGNINVEYKMDYDPTILEAFENRHSYRDYFVKFNCPEFTSLCPITGQPDFATIYISYIPNEKMVESKSLKLYLFSFRNHGDFHEDCMNKMVNDLVELMDPRYIEIWGKFTPRGGISIDPYVNYGKKETKWEAFAEQRLLQHDLYPETINHR

SEQ ID NO: 49521 - protein, 154 aa, unidentified
  source 1..154: note = Salipiger thiooxidans
  REGION 1..154: note = tr|A0A1G7FIN1|A0A1G7FIN1_9RHOB NADPH-dependent 7-cyano-7-deazaguanine reductase OS=Salipiger thiooxidans; OX = 282683 GN=queF PE=3 SV=1
MTDSIYSNLRQLGGETRIPASPEEAELERVANPQADVTYNVRFTAPEFTSLCPMTGQPDFAHLVIDYAPGKWLVESKSLKLYLTSFRNHGAFHEDCTISIARRLVGFLAPQWLRIGGYWYPRGGIPIDVFWQTGPLPEGLWLPDQGVPPYRGRG

SEQ ID NO: 49522 - protein, 135 aa, unidentified
  source 1..135: note = Salisediminibacterium haloalkalitolerans
  REGION 1..135: note = tr|A0A1H9V0P3|A0A1H9V0P3_9BACI NADPH-dependent 7-cyano-7-deazaguanine reductase OS=Salisediminibacterium haloalkalitolerans OX=1464123 GN=queF PE=3 SV=1
MAEDYYLPRSGPMPRPESVEEGQRILAEEAFDAPDVSRITFRALEFTAVCPKTGQPDFGTVEVSYTPRHKCIESKSFKFYLWSYRDHGAFCESLAAQIADDIVSAIEPESVYVTVNQTPRGGIELTTEAERHAGS

SEQ ID NO: 49523 - protein, 282 aa, unidentified
  source 1..282: note = Salmonella abony
  REGION 1..282: note = tr|A0A5H6T7J4|A0A5H6T7J4_SALAB NADPH-dependent 7-cyano-7-deazaguanine reductase QueF OS=Salmonella abony; OX = 29482 GN=queF PE=4 SV=1
MSSYEKHQALDGLTLGKSTDYRDNYDASLLQGVPRSLNRDPLGLTADNLPFHGADIWTLYELSWLNSQGLPQVAVGHVELDYTSVNLIESKSFKLYLNSFNQTRFDTWETVRQTLERDLRACAQGNVSVKLHRLDELEGQPVAHFHGTCIDDQDISIDNYQFTTDYLQHAVSGEKQVEETLVSHLLKSNCLITHQPDWGSIQIQYRGRKIDREKLLRYLVSFRHHNEFHEQCVERIFNDILRFCQPETLSVYARYTRRGGLDINPWRSNTDFLPATGRLARQ

SEQ ID NO: 49524 - protein, 282 aa, unidentified
  source 1..282: note = Salmonella abony
  REGION 1..282: note = tr|A0A5J0DXQ1|A0A5J0DXQ1_SALAB NADPH-dependent 7-cyano-7-deazaguanine reductase QueF OS=Salmonella abony; OX = 29482 GN=queF PE=4 SV=1
MSSYENHQALDGLTLGKSTDYRDNYDASLLQGVPRSLNRDPLGLTADNLPFHGADIWTLYELSWLNSQGLPQVAVGHVELDYTSVNLIESKSFKLYLNSFNQTRFDTWETVRQTLERDLRACAQGNVSVKLHRLDELEGQPVAHFHGTCIDDQDISIDNYQFTTDYLQHAVSGEKQVEETLVSHLLKSNCLITHQPDWGSIQIQYRGRKIDREKLLRYLVSFRHHNEFHEQCVERIFNDILRFCQPETLSVYARYTRRGGLDINPWRSNTDFLPATGRLARQ

SEQ ID NO: 49525 - protein, 282 aa, unidentified
  source 1..282: note = Salmonella agona
  REGION 1..282: note = sp|B5F4R2|QUEF_SALA4 NADPH-dependent 7-cyano-7-deazaguanine reductase OS=Salmonella agona (strain SL483) OX=454166 GN=queF PE=3 SV=1
MSSYENHQALDGLTLGKSTDYRDNYDASLLQGVPRSLNRDPLGLTADNLPFHGADIWTLYELSWLNSQGLPQVAVGHVELDYTSVNLIESKSFKLYLNSFNQTRFDTWETVRQTLERDLRACAQGNVSVRLHRLDELEGQPVAHFHGTCIDDQDISIDNYQFTTDYLQHAVSGEKQVEETLVSHLLKSNCLITHQPDWGSIQIQYRGRKIDREKLLRYLVSFRHHNEFHEQCVERIFNDILRFCQPETLSVYARYTRRGGLDINPWRSNTDFVPATGRLARQ

SEQ ID NO: 49526 - protein, 282 aa, unidentified
  source 1..282: note = Salmonella anatum
  REGION 1..282: note = tr|A0A3Y5SEJ0|A0A3Y5SEJ0_SALAN NADPH-dependent 7-cyano-7-deazaguanine reductase OS=Salmonella anatum; OX = 58712 GN=queF PE=3 SV=1
MSSYENHQALDGLTLGKSTDYRDNYDASLLQGVPRSLNRDPLGLTADNLPFHGADIWTLYELSWLNSRGLPQVAVGHVELDYTSVNLIESKSFKLYLNSFNQTRFDTWETVRQTLERDLRACAQGNVSVRLHRLDELEGQPVAHFHGTCIDDQDISIDNYQFTTDYLQHAVSGEKQVEETLVSHLLKSNCLITHQPDWGSIQIQYRGRKIDREKLLRYLVSFRHHNEFHEQCVERIFNDILRFCQPETLSVYARYTRRGGLDINPWRSNADFVPATGRLARQ

SEQ ID NO: 49527 - protein, 282 aa, unidentified
  source 1..282: note = Salmonella anatum
  REGION 1..282: note = tr|A0A2T8MKS4|A0A2T8MKS4_SALAN NADPH-dependent 7-cyano-7-deazaguanine reductase OS=Salmonella anatum; OX = 58712 GN=queF PE=3 SV=1
MSSYEKHQALDGLTLGKSTDYRDNYDASLLQGVPRSLNRDPLGLTADNLPFHGADIWTLYELSWLNSQGLPQVAVGHVELDYTSVNLIESKSFKLYLNSFNQTRFDTWETVRQTLERDLRACAQGNVSVRLHRLDELEGQPVAHFHGTCIDDQDISIDNYQFTTDYLQHAVSGEKQVEETLVSHLLKSNCLITHQPDWGSIQIQYRGRKIDREKLLRYLVSFRHHNEFHEQCVERIFNDILRFCQPETLSVYARYTRRGGLDINPWRSNTDFVPATGRLARQ

SEQ ID NO: 49528 - protein, 282 aa, unidentified
  source 1..282: note = Salmonella arizonae
  REGION 1..282: note = sp|A9MSB5|QUEF_SALAR NADPH-dependent 7-cyano-7-deazaguanine reductase OS=Salmonella arizonae (strain ATCC BAA-731 / CDC346-86 / RSK2980) OX=41514; GN = queF PE=3 SV=1
MSSYENHRALDGLTLGKSTDYRDNYDASLLQGVPRSLNRDPLGLTADNLPFHGADIWTLYELSWLNSHGLPQIAIGHVELDYTSVNLIESKSFKLYLNSFNQTRFDTWETVRQTLERDLRACAQGNVSVKLHRLDELEGLPVAHFHGACIDDQDISIDNYQFTASYLQHAVSGEKRVEETLVSHLLKSNCLITHQPDWGSIQIQYRGRKIDREKLLRYLVSFRHHNEFHEQCVERIFNDLLRFCQPETLSVYARYTRRGGLDINPWRSNTDFVPATGRLARQ

SEQ ID NO: 49529 - protein, 282 aa, unidentified; identical to SEQ ID NO: 49525
  source 1..282: note = Salmonella berta
  REGION 1..282: note = tr|A0A3V6R177|A0A3V6R177_SALBE NADPH-dependent 7-cyano-7-deazaguanine reductase OS=Salmonella berta; OX = 28142 GN=queF PE=3 SV=1

SEQ ID NO: 49530 - protein, 282 aa, unidentified
  source 1..282: note = Salmonella berta
  REGION 1..282: note = tr|A0A3U8PA40|A0A3U8PA40_SALBE NADPH-dependent 7-cyano-7-deazaguanine reductase OS=Salmonella berta; OX = 28142 GN=queF PE=3 SV=1
MSSYEKHQALDGLTLGKSTDYRDNYDASLLQGVPRSLNRDPLGLTADNLPFHGADIWTLYELSWLNSQGLPQVAVGHVELDYTSVNLIESKSFKLYLNSFNQTRFDTWETVRQTLERDLRACAQGNVSVKLHRLDELEGQPVAHFHGTCIDDQDISIDNYQFTTDYLQHAVSGEKQVEETLVSHLLKSNCLITHQPDWGSIQIQYRGRKIDREKLLRYLVSFRHHNEFHEQCVERIFNDILRFCQPETLSVYARYTRRGGLDINPWRSNTDFVPATGRLARQ

SEQ ID NO: 49531 - protein, 282 aa, unidentified
  source 1..282: note = Salmonella blockley
  REGION 1..282: note = tr|A0A5H8H7P0|A0A5H8H7P0_SALBL NADPH-dependent 7-cyano-7-deazaguanine reductase QueF OS=Salmonella blockley OX=57741 GN=queF PE=4 SV=1
MSSYENHQALDGLTLGKSTDYRDNYDASLLQGVPRSLNRDPLGLTADSLPFHGADIWTLYELSWLNSQGLPQVAVGHVELDYTSVNLIESKSFKLYLNSFNQTRFDTWETVRQTLERDLRACAQGNVSVRLHRLDELEGQPVAHFHGTCIDDQDISIDNYQFTTDYLQHAVSGEKQVEETLVSHLLKSNCLITHQPDWGSIQIQYRGRKIDREKLLRYLVSFRHHNEFHEQCVERIFNDILRFCQPETLSVYARYTRRGGLDINPWRSNTDFVPATGRLARQ

SEQ ID NO: 49532 - protein, 225 aa, Salmonella bongori
  REGION 1..225: note = tr|A0A3S4G855|A0A3S4G855_SALBN NADPH-dependent 7-cyano-7-deazaguanine reductase OS=Salmonella bongori; OX = 54736 GN=queF_2 PE=3 SV=1
MSSYENHQALDGLTLGKSTNYRDNYDASLLQGVPRSLNRDPLGLKADSLPFHGADIWTLYELSWLNSHGLPQVAVGHVELDYTSVNLIESKSFKLYLNSLNQTRFDTWETVRQTLERDLRACAQGNVSVKLYRLDELEGQPVAHFQGTCIDNQDISIDSYQFTTDYLQHAANGEGRVEETLVSHLLKSNCLITHQPDWGSIQIQYRGRKIDREKTAALSGLLPSS

SEQ ID NO: 49533 - protein, 282 aa, Salmonella bongori
  REGION 1..282: note = tr|A0A5I6MW10|A0A5I6MW10_SALBN NADPH-dependent 7-cyano-7-deazaguanine reductase QueF OS=Salmonella bongori CFSAN000510 OX=1299282 GN=queF PE=4 SV=1
MSSYENHQALDGLTLGKSTNYRDNYDASLLQGVPRSLNRDPLGLKADSLPFHGADIWTLYELSWLNSHGLPQVAVGHVELDYTSVNLIESKSFKLYLNSLNQTRFDTWETVRQTLERDLRACAQGNVSVKLYRLDELEGQPVAHFQGTCIDNQDISIDSYQFTTDYLQHAANGEGRVEETLVSHLLKSNCLITHQPDWGSIQIQYRGRKIDREKLLRYLVSFRHHNEFHEQCVERIFNDILRFCQPETLSVYARYTRRGGLDINPWRSNTDFVPATGRLARQ

SEQ ID NO: 49534 - protein, 282 aa, unidentified; identical to SEQ ID NO: 49525
  source 1..282: note = Salmonella choleraesuis
  REGION 1..282: note = sp|Q57KE9|QUEF_SALCH NADPH-dependent 7-cyano-7-deazaguanine reductase OS=Salmonella choleraesuis (strain SC-B67) OX=321314 GN=queF PE=3 SV=1

SEQ ID NO: 49535 - protein, 282 aa, unidentified
  source 1..282: note = Salmonella derby
  REGION 1..282: note = tr|A0A4Z8TQW8|A0A4Z8TQW8_SALDE NADPH-dependent 7-cyano-7-deazaguanine reductase OS=Salmonella derby; OX = 28144 GN=queF PE=3 SV=1
MSSYENHQALDGLTLGKSTDYRDNYDASLLQGVPRSLNRDPLGLTADNLPFHGADIWTLYELSWLNSQGLPQVAVGHVELDYTSVNLIESKSFKLYLNSFNQTRFDTWETVRQTLERDLRACAQGNVSVRLHRLDELEGQPVAHFHGACIDDQDISIDNYQFTTDYLQHAVSGEKQVEETLVSHLLKSNCLITHQPDWGSIQIQYRGRKIDREKLLRYLVSFRHHNEFHEQCVERIFNDILRFCQPETLSVYARYTRRGGLDINPWRSNTDFVPATGRLARQ

SEQ ID NO: 49536 - protein, 282 aa, unidentified; identical to SEQ ID NO: 49525
  source 1..282: note = Salmonella derby
  REGION 1..282: note = tr|A0A3V7EU45|A0A3V7EU45_SALDE NADPH-dependent 7-cyano-7-deazaguanine reductase OS=Salmonella derby; OX = 28144 GN=queF PE=3 SV=1

SEQ ID NO: 49537 - protein, 282 aa, unidentified
  source 1..282: note = Salmonella diarizonae
  REGION 1..282: note = tr|A0A3U4W350|A0A3U4W350_SALDZ NADPH-dependent 7-cyano-7-deazaguanine reductase OS=Salmonella diarizonae; OX = 59204 GN=queF PE=3 SV=1
MSSYENHQALDGLTLGKSTDYRDNYDASLLQGVPRSLNRDPLGLKADNLPFHGADIWTLYELSWLNSHGLPQVAVGHVELDYTSVNLIESKSFKLYLNSFNQTRFDTRETVRQTLERDLRACAQGNVSVRLHRLNELEGQPVAHFHGACIDDQDISIDNYQFTTDYLQHAVSGEKRVEETLVSHLLKSNCLITHQPDWGSIQIQYRGRKIDREKLLRYLVSFRHHNEFHEQCVERIFNDILHFCQPETLSVYARYTRRGGLDINPWRSNTDFVPATGRLARQ

SEQ ID NO: 49538 - protein, 282 aa, unidentified
  source 1..282: note = Salmonella diarizonae
  REGION 1..282: note = tr|A0A379TTY6|A0A379TTY6_SALDZ NADPH-dependent 7-cyano-7-deazaguanine reductase OS=Salmonella diarizonae; OX = 59204 GN=queF PE=3 SV=1
MSSYENHQALDGLTLGKSTDYRDNYDASLLQGVPRSLNRDPLGLKADNLPFHGADIWTLYELSWLNSHGLPQVAVGHVELDYTSVNLIESKSFKLYLNSFNQTRFDTWETVRQTLERDLRACAQGDVSVRLHRLNELEGQPVAHFHGACIDDQDISIDNYQLTTDYLQHAVSGEKRVEETLVSHLLKSNCLITHQPDWGSIQIQYRGRKIDREKLLRYLVSFRHHNEFHEQCVERIFNDILHFCQPETLSVYARYTRRGGLDINPWRSNTDFVPATGRLARQ

SEQ ID NO: 49539 - protein, 282 aa, unidentified; identical to SEQ ID NO: 49525
  source 1..282: note = Salmonella dublin
  REGION 1..282: note = sp|B5FTX0|QUEF_SALDC NADPH-dependent 7-cyano-7-deazaguanine reductase OS=Salmonella dublin (strain CT_02021853) OX=439851 GN=queF PE=3 SV=1

SEQ ID NO: 49540 - protein, 282 aa, unidentified; identical to SEQ ID NO: 49525
  source 1..282: note = Salmonella dublin
  REGION 1..282: note = tr|A0A3T3IFN4|A0A3T3IFN4_SALDU NADPH-dependent 7-cyano-7-deazaguanine reductase OS=Salmonella dublin; OX = 98360 GN=queF PE=3 SV=1

SEQ ID NO: 49541 - protein, 123 aa, Salmonella enterica
  REGION 1..123: note = tr|G5QNW9|G5QNW9_SALRU NADPH dependent preQ0 reductase (Fragment) OS=Salmonella enterica subsp. enterica serovar Rubislaw str. A4-653 OX=913081; GN = LTSERUB_4672 PE=4SV=1
MSSYENHQALDGLTLGKSTDYRDNYDASLLQGVPRSLNRDPLGLTADNLPFHGADIWTLYELSWLNSRGLPQVAVGHVELDYTSVNLIESKSFKLYLNSFNQTRFDTWETVRQTLERDLRACA

SEQ ID NO: 49542 - protein, 282 aa, Salmonella enterica
  REGION 1..282: note = tr|A0A3K8WJN0|A0A3K8WJN0_SALER NADPH-dependent 7-cyano-7-deazaguanine reductase OS=Salmonella enterica; OX = 28901 GN=queF PE=3 SV=1
MSSYENHQALDGLTLGKSTDYRDNYDTSLLQGVPRSLNRDPLGLTADNLPFHGADIWTLYELSWLNSRGLPQVAVGHVELDYTSVNLIESKSFKLYLNSFNQTRFDTWETVRQTLERDLRACAQGNVSVRLHRLDELEGQPVAHFHGTCIDDQDISIDNYQFTTDYLQHAVSGEKQVEETLVSHLLKSNCLITHQPDWGSIQIQYRGRKIDREKLLRYLVSFRHHNEFHEQCVERIFNDILRFCQPETLSVYARYTRRGGLDINPWRSNADFVPATGRLARQ

SEQ ID NO: 49543 - protein, 282 aa, unidentified; identical to SEQ ID NO: 49525
  source 1..282: note = Salmonella enteritidis
  REGION 1..282: note = sp|B5QWQ2|QUEF_SALEP NADPH-dependent 7-cyano-7-deazaguanine reductase OS=Salmonella enteritidis PT4 (strain P125109) OX=550537 GN=queF PE=3 SV=1

SEQ ID NO: 49544 - protein, 282 aa, unidentified
  source 1..282: note = Salmonella enteritidis
  REGION 1..282: note = tr|A0A3R0Q7Z4|A0A3R0Q7Z4_SALEN NADPH-dependent 7-cyano-7-deazaguanine reductase OS=Salmonella enteritidis; OX = 149539 GN=queF PE=3 SV=1
MSSYENHQALDGLTLGKSTDYRDNYDASLLQGVPRSLNRDPLGLKADNLPFHGADIWTLYELSWLNSHGLPQVAVGHVELDYTSVNLIESKSFKLYLNSFNQTRFDTWETVRQTLERDLRACAQGNVSVRLHRLNELEGQPVAHFHGACIDDQDISIDNYQFTTDYLQHAVSGEKRVEETLVSHLLKSNCLITHQPDWGSIQIQYRGRKIDREKLLRYLVSFRHHNEFHEQCVERIFNDILHFCQPETLSVYARYTRRGGLDINPWRSNTDFVPATGRLARQ

SEQ ID NO: 49545 - protein, 282 aa, unidentified; identical to SEQ ID NO: 49525
  source 1..282: note = Salmonella gallinarum
  REGION 1..282: note = sp|B5RDU6|QUEF_SALG2 NADPH-dependent 7-cyano-7-deazaguanine reductase OS=Salmonella gallinarum (strain 287/91 / NCTC 13346) OX=550538 GN=queF PE=3 SV=1

SEQ ID NO: 49546 - protein, 282 aa, unidentified; identical to SEQ ID NO: 49525
  source 1..282: note = Salmonella gallinarum
  REGION 1..282: note = tr|A0A3V9NIU2|A0A3V9NIU2_SALGL NADPH-dependent 7-cyano-7-deazaguanine reductase OS=Salmonella gallinarum; OX = 594 GN=queF PE=3 SV=1

SEQ ID NO: 49547 - protein, 282 aa, unidentified; identical to SEQ ID NO: 49525
  source 1..282: note = Salmonella hadar
  REGION 1..282: note = tr|A0A4Q8S355|A0A4Q8S355_SALHA NADPH-dependent 7-cyano-7-deazaguanine reductase OS=Salmonella hadar; OX = 149385 GN=queF PE=3 SV=1

SEQ ID NO: 49548 - protein, 282 aa, unidentified; identical to SEQ ID NO: 49535
  source 1..282: note = Salmonella heidelberg
  REGION 1..282: note = sp|B4TG16|QUEF_SALHS NADPH-dependent 7-cyano-7-deazaguanine reductase OS=Salmonella heidelberg (strain SL476) OX=454169 GN=queF PE=3 SV=1

SEQ ID NO: 49549 - protein, 282 aa, unidentified
  source 1..282: note = Salmonella houtenae
  REGION 1..282: note = tr|A0A1J6ZL27|A0A1J6ZL27_SALHO NADPH-dependent 7-cyano-7-deazaguanine reductase OS=Salmonella houtenae; OX = 59205 GN=queF PE=3 SV=1
MSSYENHQALAGLTLGKTTDYRDNYDASLLQGVPRSLNRDPLGLKADNLPFHGTDIWTLYELSWLNSHGLPQVAVGHVELDYTSVNLIESKSFKLYLNSFNQTRFDTWERVRQTLERDLRACAQGNVSVRLHRLDELEGQPVAHFHGACIDDQDIRIDNYQFTTDYLRHAVSGEKQVEETLVSHLLKSNCLITHQPDWGSIQIQYRGRRIDREKLLRYLVSFRHHNEFHEQCVERIFNDLLRFCQPETLSVYARYTRRGGLDINPWRSNTDFVPATGRLARQ

SEQ ID NO: 49550 - protein, 282 aa, unidentified
  source 1..282: note = Salmonella houtenae
  REGION 1..282: note = tr|A0A3Y1WTY5|A0A3Y1WTY5_SALHO NADPH-dependent 7-cyano-7-deazaguanine reductase OS=Salmonella houtenae; OX = 59205 GN=queF PE=3 SV=1
MSSYENHQALAGLTLGKTTDYRDNYDASLLQGVPRSLNRDPLGLKADNLPFHGTDIWTLYELSWLNSHGLPQVAVGHVELDYTSVNLIESKSFKLYLNSFNQTRFDTWERVRQTLERDLRACAQGNVSVRLHRLDELEGQPVAHFHGACIDDQDIRIDNYQFTTDYLRHAVSGEKRVEETLVSHLLKSNCLITHQPDWGSIQIQYRGRRIDREKLLRYLVSFRHHNEFHEQCVERIFNDILRFCQPETLSVYARYTRRGGLDINPWRSNTDFVPATGRLARQ

SEQ ID NO: 49551 - protein, 282 aa, unidentified; identical to SEQ ID NO: 49525
  source 1..282: note = Salmonella infantis
  REGION 1..282: note = tr|A0A3W0HNZ6|A0A3W0HNZ6_SALIN NADPH-dependent 7-cyano-7-deazaguanine reductase OS=Salmonella infantis; OX = 595 GN=queF PE=3 SV=1

SEQ ID NO: 49552 - protein, 282 aa, unidentified; identical to SEQ ID NO: 49523
  source 1..282: note = Salmonella infantis
  REGION 1..282: note = tr|A0A402RC87|A0A402RC87_SALIN NADPH-dependent 7-cyano-7-deazaguanine reductase OS=Salmonella infantis; OX = 595 GN=queF PE=3 SV=1

SEQ ID NO: 49553 - protein, 282 aa, unidentified
  source 1..282: note = Salmonella montevideo
  REGION 1..282: note = tr|A0A3V8XHU3|A0A3V8XHU3_SALMO NADPH-dependent 7-cyano-7-deazaguanine reductase OS=Salmonella montevideo; OX = 115981 GN=queF PE=3 SV=1
MSSYENHQALDGLTLGKSTDYRDNYDTSLLQGVPRSLNRDPLGLTADNLPFHGADIWTLYELSWLNSRGLPQVAVGHVELDYTSVNLIESKSFKLYLNSFNQTRFDTWETVRQTLERDLRACAQGNVSVRLHRLDELEGQPVAHFHGTCIDDQDISIDNYQFTTDYLQHAVSGEKQVEETLVSHLLKSNCLITHQPDWGSIQIQYRGRKIDREKLLRYLVSFRHHNEFHEQCVERIFNDILRFCQPETLSVYARYTRRGGLDINPWRSNANFVPATGRLARQ

SEQ ID NO: 49554 - protein, 282 aa, unidentified; identical to SEQ ID NO: 49526
  source 1..282: note = Salmonella montevideo
  REGION 1..282: note = tr|A0A3V6QBI8|A0A3V6QBI8_SALMO NADPH-dependent 7-cyano-7-deazaguanine reductase OS=Salmonella montevideo; OX = 115981 GN=queF PE=3 SV=1

SEQ ID NO: 49555 - protein, 282 aa, unidentified; identical to SEQ ID NO: 49525
  source 1..282: note = Salmonella moscow
  REGION 1..282: note = tr|A0A5H7LCN5|A0A5H7LCN5_SALMC NADPH-dependent 7-cyano-7-deazaguanine reductase QueF OS=Salmonella moscow; OX = 28146 GN=queF PE=4 SV=1

SEQ ID NO: 49556 - protein, 282 aa, unidentified; identical to SEQ ID NO: 49525
  source 1..282: note = Salmonella muenchen
  REGION 1..282: note = tr|A0A3T3EP61|A0A3T3EP61_SALMU NADPH-dependent 7-cyano-7-deazaguanine reductase OS=Salmonella muenchen; OX = 596 GN=queF PE=3 SV=1

SEQ ID NO: 49557 - protein, 282 aa, unidentified
  source 1..282: note = Salmonella muenster
  REGION 1..282: note = tr|A0A5J1ART6|A0A5J1ART6_SALMS NADPH-dependent 7-cyano-7-deazaguanine reductase QueF OS=Salmonella muenster OX=82689 GN=queF PE=4 SV=1
MSSYENHQALDGLTLGKSTDYRDNYDASLLQGVPRSLNRDPLGLTADNLPFHGADIWTLYELSWLNSQGLPQVAVGHVELDYTSVNLIESKSFKLYLNSFNQTRFDTWETVRQTLERDLRACAQGNVSVKLHRLDELEGQPVAHFHGACIDDQDISIDNYQFTTDYLQHAVSGEKQVEETLVSHLLKSNCLITHQPDWGSIQIQYRGRKIDREKLLRYLVSFRHHNEFHEQCVERIFNDILRFCQPETLSVYARYTRRGGLDINPWRSNTDFVPATGRLARQ

SEQ ID NO: 49558 - protein, 282 aa, unidentified; identical to SEQ ID NO: 49526
  source 1..282: note = Salmonella muenster
  REGION 1..282: note = tr|A0A5H9DTT6|A0A5H9DTT6_SALMS NADPH-dependent 7-cyano-7-deazaguanine reductase QueF OS=Salmonella muenster OX=82689 GN=queF PE=4 SV=1

SEQ ID NO: 49559 - protein, 282 aa, unidentified; identical to SEQ ID NO: 49535
  source 1..282: note = Salmonella newport
  REGION 1..282: note = sp|B4T4W1|QUEF_SALNS NADPH-dependent 7-cyano-7-deazaguanine reductase OS=Salmonella newport (strain SL254) OX=423368 GN=queF PE=3 SV=1

SEQ ID NO: 49560 - protein, 282 aa, unidentified
  source 1..282: note = Salmonella newport
  REGION 1..282: note = tr|A0A3V9X3Y4|A0A3V9X3Y4_SALNE NADPH-dependent 7-cyano-7-deazaguanine reductase OS=Salmonella newport; OX = 108619 GN=queF PE=3 SV=1
MSSYENHQALDGLTLGKSTDYRDNYDASLLQGVPRSLNRDPLGLTADNLPFHGADIWTLYELSWLNSQGLPQVAVGHVELDYTSVNLIESKSFKLYLNSFNQTRFDTWETVRQTLERDLRACAQGNVSVKLHRLDELEGQPVAHFHGTCIDDQDISIDNYQFTTDYLQHAVSGEKQVEETLVSHLLKSNCLITHQPDWGSIQIQYRGRKIDREKLLRYLVSFRHHNEFHEQCVERIFNDILRFCQPETLSVYARYTRRGGLDINPWRSNTDFVPATGRLARQ

SEQ ID NO: 49561 - protein, 282 aa, unidentified; identical to SEQ ID NO: 49557
  source 1..282: note = Salmonella oranienberg
  REGION 1..282: note = tr|A0A3Z0YHX8|A0A3Z0YHX8_SALON NADPH-dependent 7-cyano-7-deazaguanine reductase OS=Salmonella oranienberg; OX = 28147 GN=queF PE=3 SV=1

SEQ ID NO: 49562 - protein, 282 aa, unidentified; identical to SEQ ID NO: 49526
  source 1..282: note = Salmonella oranienberg
  REGION 1..282: note = tr|A0A3V8KTF3|A0A3V8KTF3_SALON NADPH-dependent 7-cyano-7-deazaguanine reductase OS=Salmonella oranienberg; OX = 28147 GN=queF PE=3 SV=1

SEQ ID NO: 49563 - protein, 282 aa, unidentified
  source 1..282: note = Salmonella paratyphi
  REGION 1..282: note = sp|Q5PEK0|QUEF_SALPA NADPH-dependent 7-cyano-7-deazaguanine reductase OS=Salmonella paratyphi A (strain ATCC 9150 / SARB42) OX=295319 GN=queF PE=3 SV=1
MSSYENHQALDGLTLGKSTDYRDNYDVSLLQGVPRSLNRDPLGLTADNLPFHGADIWTLYELSWLNSQGLPQVAVGHVELDYTSVNLIESKSFKLYLNSFNQTRFDTWETVRQTLERDLRACAQGNVSVRLHRLDELEGQPVAHFHGACIDDQDISIDNYQFTTDYLQHAVSGEKQVEETLVSHLLKSNCLITHQPDWGSIQIQYRGRKIDREKLLRYLVSFRHHNEFHEQCVERIFNDILRFCQPETLSIYARYTRRGGLDINPWRSNTDFVPATGRLARQ

SEQ ID NO: 49564 - protein, 282 aa, unidentified; identical to SEQ ID NO: 49563
  source 1..282: note = Salmonella paratyphi
  REGION 1..282: note = tr|A0A5J1G6V7|A0A5J1G6V7_SALPT NADPH-dependent 7-cyano-7-deazaguanine reductase QueF OS=Salmonella paratyphi A OX=54388 GN=queF PE=3 SV=1

SEQ ID NO: 49565 - protein, 282 aa, unidentified; identical to SEQ ID NO: 49525
  source 1..282: note = Salmonella potsdam
  REGION 1..282: note = tr|A0A5I2XB99|A0A5I2XB99_SALPO NADPH-dependent 7-cyano-7-deazaguanine reductase QueF OS=Salmonella potsdam OX=597 GN=queF PE=4 SV=1

SEQ ID NO: 49566 - protein, 282 aa, unidentified; identical to SEQ ID NO: 49526
  source 1..282: note = Salmonella rubislaw
  REGION 1..282: note = tr|A0A3V7ILN0|A0A3V7ILN0_SALRU NADPH-dependent 7-cyano-7-deazaguanine reductase OS=Salmonella rubislaw; OX = 598 GN=queF PE=3 SV=1

SEQ ID NO: 49567 - protein, 282 aa, unidentified; identical to SEQ ID NO: 49526
  source 1..282: note = Salmonella schwarzengrund
  REGION 1..282: note = sp|B4TUI7|QUEF_SALSV NADPH-dependent 7-cyano-7-deazaguanine reductase OS=Salmonella schwarzengrund (strain CVM19633) OX=439843 GN=queF PE=3; SV = 1

SEQ ID NO: 49568 - protein, 282 aa, unidentified
  source 1..282: note = Salmonella senftenberg
  REGION 1..282: note = tr|A0A401AQ78|A0A401AQ78_SALSE NADPH-dependent 7-cyano-7-deazaguanine reductase OS=Salmonella senftenberg; OX = 28150 GN=queF PE=3 SV=1
MSSYENHQALDGLTLGKSTDYRDNYDASLLQGVPRSLNRDPLGLTADNLPFHGADIWTLYELSWLNSQGLPQVAVGHVELDYTSVNLIESKSFKLYLNSFNQTRFDTWETVRQTLERDLRACAQGNVSVKLHRLDELEGQPVTHFHGACIDDQDISIDNYQFTTDYLQHAVSGEKQVEETLVSHLLKSNCLITHQPDWGSIQIQYRGRKIDREKLLRYLVSFRHHNEFHEQCVERIFNDILRFCQPETLSVYARYTRRGGLDINPWRSNTDFVPATGRLARQ

SEQ ID NO: 49569 - protein, 282 aa, unidentified; identical to SEQ ID NO: 49525
  source 1..282: note = Salmonella senftenberg
  REGION 1..282: note = tr|A0A3V9FHB5|A0A3V9FHB5_SALSE NADPH-dependent 7-cyano-7-deazaguanine reductase OS=Salmonella senftenberg; OX = 28150 GN=queF PE=3 SV=1

SEQ ID NO: 49570 - protein, 282 aa, Salmonella sp.; identical to SEQ ID NO: 49535
  REGION 1..282: note = tr|A0A509BM52|A0A509BM52_9ENTR NADPH-dependent 7-cyano-7-deazaguanine reductase OS=Salmonella sp. NCTC 6947 OX=2583581 GN=queF PE=3 SV=1

SEQ ID NO: 49571 - protein, 282 aa, Salmonella sp.
  REGION 1..282: note = tr|A0A1F2J8B6|A0A1F2J8B6_9ENTR NADPH-dependent 7-cyano-7-deazaguanine reductase OS=Salmonella sp. HMSC13B08 OX=1581094 GN=queF PE=3 SV=1
MSSYENHQALDGLTLGKSTDYRDNYDASLLQGVPRSLNRDPLDLKADNLPFHGADIWTLYELSWLNAKGVPQVAVGHVELDYTSVNLIESKSFKLYLNSFNQTRFDSWDAVRQTLENDLRACAQGEVSVALYRLDELEGQPVAHFHGTCIDDQDITIDNYQFSTDYLENAASGEKVVEETLVSHLLKSNCLITHQPDWGSIQICYRGRKIDREKLLRYLVSFRHHNEFHEQCVERIFNDLLRFCQPEKLSVYARYTRRGGLDINPWRSNTDFVPATGRLVRQ

SEQ ID NO: 49572 - protein, 282 aa, unidentified
  source 1..282: note = Salmonella thompson
  REGION 1..282: note = tr|A0A3V4QAP5|A0A3V4QAP5_SALTH NADPH-dependent 7-cyano-7-deazaguanine reductase OS=Salmonella thompson; OX = 600 GN=queF PE=3 SV=1
MSSYENHQALDGLTLGKSTDYRDNYDVSLLQGVPRSLNRDPLGLTADNLPFHGADIWTLYELSWLNSQGLPQVAVGHVELDYTSVNLIESKSFKLYLNSFNQTRFDTWETVRQTLERDLRACAQGNVSVRLHRLDELEGQPVAHFHGACIDDQDISIDNYQFTTDYLQHAVSGEKQVEETLVSHLLKSNCLITHQPDWGSIQIQYRGRKIDREKLLRYLVSFRHHNEFHEQCVERIFNDILRFCQPETLSVYARYTRRGGLDINPWRSNTDFLPATGRLARQ

SEQ ID NO: 49573 - protein, 282 aa, unidentified; identical to SEQ ID NO: 49530
  source 1..282: note = Salmonella thompson
  REGION 1..282: note = tr|A0A3Y9ZNU8|A0A3Y9ZNU8_SALTH NADPH-dependent 7-cyano-7-deazaguanine reductase OS=Salmonella thompson; OX = 600 GN=queF PE=3 SV=1

SEQ ID NO: 49574 - protein, 282 aa, unidentified; identical to SEQ ID NO: 49525
  source 1..282: note = Salmonella typhi
  REGION 1..282: note = sp|Q8Z437|QUEF_SALTI NADPH-dependent 7-cyano-7-deazaguanine reductase OS=Salmonella typhi; OX = 90370 GN=queF PE=3 SV=1

SEQ ID NO: 49575 - protein, 282 aa, unidentified; identical to SEQ ID NO: 49525
  source 1..282: note = Salmonella typhi
  REGION 1..282: note = tr|A0A4U8NJR7|A0A4U8NJR7_SALTI NADPH-dependent 7-cyano-7-deazaguanine reductase OS=Salmonella typhi; OX = 90370 GN=queF PE=3 SV=1

SEQ ID NO: 49576 - protein, 282 aa, unidentified
  source 1..282: note = Salmonella typhimurium
  REGION 1..282: note = sp|Q8ZMD3|QUEF_SALTY NADPH-dependent 7-cyano-7-deazaguanine reductase OS=Salmonella typhimurium (strain LT2 / SGSC1412 / ATCC 700720) OX=99287 GN=queF; PE = 3 SV=1
MSSYENHQALDGLTLGKSTDYRDNYDVSLLQGVPRSLNRDPLGLTADNLPFHGADIWTLYELSWLNSQGLPQVAVGHVELDYTSVNLIESKSFKLYLNSFNQTRFDTWETVRQTLERDLRACAQGNVSVRLHRLDELEGQPVAHFHGTCIDDQDISIDNYQFTTDYLQHAVSGEKQVEETLVSHLLKSNCLITHQPDWGSIQIQYRGRKIDREKLLRYLVSFRHHNEFHEQCVERIFNDILRFCQPETLSVYARYTRRGGLDINPWRSNTDFVPATGRLARQ

SEQ ID NO: 49577 - protein, 282 aa, unidentified; identical to SEQ ID NO: 49576
  source 1..282: note = Salmonella typhimurium
  REGION 1..282: note = tr|A0A3Z2F4M9|A0A3Z2F4M9_SALTU NADPH-dependent 7-cyano-7-deazaguanine reductase OS=Salmonella typhimurium (strain ATCC 68169 / UK-1) OX=990282 GN=queF PE=3 SV=1

SEQ ID NO: 49578 - protein, 282 aa, unidentified; identical to SEQ ID NO: 49530
  source 1..282: note = Salmonella virchow
  REGION 1..282: note = tr|A0A5J0U5N5|A0A5J0U5N5_SALVI NADPH-dependent 7-cyano-7-deazaguanine reductase QueF OS=Salmonella virchow OX=48409 GN=queF PE=4 SV=1

SEQ ID NO: 49579 - protein, 282 aa, unidentified
  source 1..282: note = Salmonella virchow
  REGION 1..282: note = tr|A0A5I1KRC6|A0A5I1KRC6_SALVI NADPH-dependent 7-cyano-7-deazaguanine reductase QueF OS=Salmonella virchow OX=48409 GN=queF PE=4 SV=1
MSSYENHQALDGLTLGKSTDYRDNYDASLLQGVPRSLNRDPLGLTADNLPFHGADIWTLYELSWLNSQGLPQVAVGHVELDYTSVNLIESKSFKLYLNSFNQTRFDTWETVRQTLERDLRACAQGNVSVKLHRLDELEGQPVAHFHGACIDDQDISIDNYQFTTDYLQHAVSGEKQVEETLVSHLLKSNCLITHQPDWGSIQIQYRGRKIDREKLLRYLVSFRHHNEFHEQCVERIFYDILRFCQPETLSVYARYTRRGGLDINPWRSNTDFVPATGRLARQ

SEQ ID NO: 49580 - protein, 165 aa, Salsuginibacillus halophilus
  REGION 1..165: note = tr|A0A2P8HLB7|A0A2P8HLB7_9BACI NADPH-dependent 7-cyano-7-deazaguanine reductase OS=Salsuginibacillus halophilus OX=517424 GN=queF PE=3 SV=1
MSGRKDDELPSVSHLGSEQTTYTFDYDPSLLETFENNHPNRDYVVKFNCPEFTTLCPKTGQPDFATIYIRYIPEVNMVESKSLKLYLFSFRNHGGFHEDAINTIMNDLIDLMDPRFIEVWGKFTPRGGISIDPYANYGRPETKYEQMAEQRLLYHDLYPEAVDNR

SEQ ID NO: 49581 - protein, 282 aa, Samsonia erythrinae
  REGION 1..282: note = tr|A0A4R3VNR4|A0A4R3VNR4_9GAMM NADPH-dependent 7-cyano-7-deazaguanine reductase OS=Samsonia erythrinae; OX = 160434 GN=queF PE=3 SV=1
MSVYDKHQALSDLTLGKPTPYHDHYNAALLQPVPRSLNREPLGLHPDSLPFHGADIWTLYELSWLNARGVPQVAVGEVRLNAESLNLIESKSFKLYLNSFNQTTFGSWESVRATLARDLSHCAQGDVSVTLFKLSELESQPLAAFAGECIDEQDIQIDNYDFNADYLAANVQDAPVVEETLVSHLLKSNCLITHQPDWGSVQIHYRGKRINREALLRYIVSFRHHNEFHEQCVERIFNDLTRYYQPEKLSVYARYTRRGGLDINPWRSNSPFNPPNGRLPRQ

SEQ ID NO: 49582 - protein, 150 aa, Sandaracinobacter sp.
  REGION 1..150: note = tr|A0A501XDM3|A0A501XDM3_9SPHN NADPH-dependent 7-cyano-7-deazaguanine reductase OS=Sandaracinobacter sp. PAMC 28131 OX=1715348 GN=queF PE=3 SV=1
MSFEPTHLGQSSGLPASPDAAVLDYPPNPHPDALYLIRFVAPEFTSLCPVTGQPDFAHLVIDYAPGETIVESKSLKLFLGSFRNHAGFHEACTVGIGRRLFDEMKPKWLRIGGYWYPRGGIPIDVFWQSGPPPEGLWLPDQGVPPYRGRG

SEQ ID NO: 49583 - protein, 149 aa, unidentified
  source 1..149: note = Sandarakinorhabdus cyanobacteriorum
  REGION 1..149: note = tr|A0A255Y4T6|A0A255Y4T6_9SPHN NADPH-dependent 7-cyano-7-deazaguanine reductase OS=Sandarakinorhabdus cyanobacteriorum OX=1981098 GN=queF PE=3 SV=1
MVDVLHLGQTSALPASPEAAVLDYPPNPRPGAMFLVRFTCPEFTSLCPVTGAPDFAHIVIDYVPDQTIVESKALKLFLGSFRNHAGFHEDVTVGIGQRLVAEMQPRWLRIGGYWYPRGGIPIDVFWQSGPVPDGLWLPDQGVPTYRGRG

SEQ ID NO: 49584 - protein, 149 aa, Sandarakinorhabdus sp.
  REGION 1..149: note = tr|A0A552UIU7|A0A552UIU7_9SPHN NADPH-dependent 7-cyano-7-deazaguanine reductase OS=Sandarakinorhabdus sp. LB1R16 OX=2593303 GN=queF PE=3 SV=1
MTDLTHLGRASALPATPADAVLDYPANPRPGTDYLVRFAVPEFTSLCPVTGQPDFAHLVIEYVPAATIVESKSLKLFLGSFRNHAGFHEDCTVGIGQRLFDEMAPKWLRIGGYWYPRGGIPIDVFWQSGPPPAGVWLPDQGVAPYRGRG

SEQ ID NO: 49585 - protein, 291 aa, unidentified
  source 1..291: note = Sanguibacteroides justesenii
  REGION 1..291: note = tr|A0A0C3R6W0|A0A0C3R6W0_9PORP 7-cyano-7-deazaguanine reductase OS=Sanguibacteroides justesenii OX=1547597 GN=BA92_04975 PE=4 SV=1
MEIEAKVLGQQVAYPTDYCPSILVPVPRSLNREMYDIRQPEELFCGYDTWHAYEAGFITRKGLPVCGVLKIVYPSTSKKLVESKSLKLYLNSFNMARLGENVSEGIRLFTQTVQSDLQELLNTSVQVCFHEKLPDRIPFDFEGYTLLEEIPLNQETEFTEYNEAPALLRQTIQPGGEIKVYSNLLRSNCKITKQPDWGTLYVWIKAQQLPSPVSLLKYIVSLRNENHFHEEICEMTYKRLWDLFHPEILSVSCLYTRRGGIDICPSRANRKEYLPSYLHTPEILTRRNLRQ

SEQ ID NO: 49586 - protein, 278 aa, unidentified
  source 1..278: note = Sapientia aquatica
  REGION 1..278: note = tr|A0A4V3AUM1|A0A4V3AUM1_9BURK NADPH-dependent 7-cyano-7-deazaguanine reductase OS=Sapientia aquatica; OX = 1549640 GN=queF PE=3 SV=1
MQENTPDNSALGKTSTYVTQYDASLLFPIPRAAKRAEIGLGASLPFFGMDIWNAYEVSWLNLRGKPQIAIATFMVPADSHNIIESKSFKLYLNSFNQTKLADSDALLTLLKQDISAGFGAPVQIKLTLPEQFSQYQFGELSGLLLDRLDIDVDQYSPNTALLKSDSEAAPIEETLVSHLLKSNCLVTGQPDWASVQIHYVGAPIEQEGLLKYLIGFRNHNEFHEQCVERIFNDILVACKPQKLAVYARYTRRGGLDINPWRSNFSSNQTPSNLRNSRQ

SEQ ID NO: 49587 - protein, 154 aa, unidentified
  source 1..154: note = Unknown
  REGION 1..154: note = tr|A0A2A5YA86|A0A2A5YA86_9PROT NADPH-dependent 7-cyano-7-deazaguanine reductase OS=SAR116 cluster bacterium MED-G05 OX=1986234 GN=queF PE=3 SV=1
MSADQPTELSALGKTTPLPSEPSIDTLEKVPSPHPDDHFVVRFTQPEFTSLCPVTAQPDFAHLVIDYIPDQWMVESKSLKLYLNSFRNHQAFHEACTVNIGKDLITLLSPRWLRIGGYWYPRGGMPIDIFWQTGNVPDNVWLPEQGVATYRGRG

SEQ ID NO: 49588 - protein, 250 aa, unidentified
  source 1..250: note = Unknown
  REGION 1..250: note = tr|A0A2E0JYT4|A0A2E0JYT4_9PROT GTP cyclohydrolase; OS = SAR116 cluster bacterium OX=2024888 GN=CMN49_04590 PE=4; SV = 1
MAGVLGQTVAAPSDYAPHVLERIDRRRGRKGIEQPSPNIVNGHDVWHCYELSWMLPDGTMTFTTGALIIPADSSFTVESKSLKLYLNSLNAHVFNDDEVAIACIEKDLSELTQSQVRLVRVDPGELQATSSKLDDDAVRVGDLEGTVAFRSTGFRSLCPVTAQPDWASLCIEVSASHYDESSIMAAIESLRNHQGFHEQCVEDLYSRIENALNPSELHVVGFFQRRGGIDITPWRSSDQSAPRITRLFEQ

SEQ ID NO: 49589 - protein, 138 aa, unidentified
  source 1..138: note = Unknown
  REGION 1..138: note = tr|A0A2N0LIM3|A0A2N0LIM3_9CHLR NADPH-dependent 7-cyano-7-deazaguanine reductase OS=SAR202 cluster bacterium Io17-Chloro-G5 OX=1926614 GN=queF PE=3 SV=1
MKEQYDGLDQELPSKGEEAVDPACLLTFQYEYPSQKSQVEIDTDEFTAVCPWTGLPDYGDLLISYVPGDLCIELKSLKYYLLSYRDVGIVQEHAANRILNDLVAICQPQSMKIVLDYKVRGGLHTAVTVEYSQEQRGN

SEQ ID NO: 49590 - protein, 129 aa, unidentified
  source 1..129: note = Unknown
  REGION 1..129: note = tr|A0A2N0KIK3|A0A2N0KIK3_9CHLR NADPH-dependent 7-cyano-7-deazaguanine reductase OS=SAR202 cluster bacterium Casp-Chloro-G3 OX=1926605 GN=queF PE=3 SV=1
MDQQLTWKDEATIDSQCLLAFQYEFPEQESEVSIDTDEFTAVCPWTGLPDYGVLYISYVPSQSCIELKSLKFYLLSYRDVGIVQEHAANRILKDLVALCHPHRMKVTLDYKVRGGIHTAVSAEFKTAQD

SEQ ID NO: 49591 - protein, 128 aa, unidentified
  source 1..128: note = Unknown
  REGION 1..128: note = tr|A0A2A4T7C0|A0A2A4T7C0_9DELT NADPH-dependent 7-cyano-7-deazaguanine reductase OS=SAR324 cluster bacterium OX=2024889 GN=queF PE=3 SV=1
MAVAEGKIFEFVGPEAIRADFLETFEFDSPNQYIETKTNEFGAVCPFSGLPDFGELIIEYYPEGGKCIELKSLKYYVISYRNVGLFQEGVTKRIYEDMKAVLETSRIKVTTIYQPRGGFYTTCVEGQL

SEQ ID NO: 49592 - protein, 136 aa, unidentified
  source 1..136: note = Unknown
  REGION 1..136: note = tr|A0A432GP71|A0A432GP71_9DELT NADPH-dependent 7-cyano-7-deazaguanine reductase OS=SAR324 cluster bacterium OX=2024889 GN=queF PE=3 SV=1
MDTSSIDYAEGRVFTFEDESAIRPGFLETIEYSGPRQHVSYQMNEFAAVCPFSGLPDTGIVWVDYVPKQKLVELKALKYYFLSFRNVGIFQEAVTARIFKDLYPLLEPEELLIKTRYNTRGGIDTTCTIDSNEQKN

SEQ ID NO: 49593 - protein, 220 aa, unidentified
  source 1..220: note = Unknown
  REGION 1..220: note = tr|J5KFG3|J5KFG3_9GAMM NADPH-dependent 7-cyano-7-deazaguanine reductase OS=SAR86 cluster bacterium SAR86A OX=1123866 GN=NT01SARS_0559 PE=4 SV=1
MDPIKRQKDNIKYGIDIWNVYDFMYLNHNKIPQLVVLEIVIPYESDLIIESKSLKLYLNEFYKKSFSNKEVLIKKIKSQLELTIKHPIKIKVLKKFRPEPKYLDLNNTKLKKTKPNTIIKFNGFRSICPVTSQPDFANIYLYLDKSIDVGYLNKYLMSYKEHGGFHEKCIDKIFIDLYSKLKPDHIEVCGRFQRRGGIDINPIRGTKKKILFNNFREFNQ

SEQ ID NO: 49594 - protein, 270 aa, unidentified
  source 1..270: note = Unknown
  REGION 1..270: note = tr|A0A2A5C809|A0A2A5C809_9GAMM NADPH-dependent 7-cyano-7-deazaguanine reductase OS=SAR86 cluster bacterium OX=2030880 GN=queF PE=3 SV=1
MAENPMGKTSGYPDSFDPELLVALPRSTNREIIGVGDPLPFTGEDVWHAYELSWLNKQGLPTAVIGRFSFSCNSPCLVESKSFKLFLNSLNQEKFNDKKDVISLLTEHLSKCSGDKVGIELIELDASADQTKTPEGLCIDGLNVEIKDYHPNSSLLSCDENNVIEEHLYSDLFKSNCPVTNQPDWASMSIYYKGSAISHESLLAYLVSYRLHSDYHENCVEKIFVDLQKKCKPQVLTVQANFLRRGGLDINPVRSTHGEYIKTPFRFIRQ

SEQ ID NO: 49595 - protein, 277 aa, unidentified
  source 1..277: note = Unknown
  REGION 1..277: note = tr|A0A0R2W3T8|A0A0R2W3T8_9GAMM NADPH-dependent 7-cyano-7-deazaguanine reductase OS=SAR92 bacterium BACL16 MAG-120619-bin48 OX=1655625 GN=queF PE=3 SV=1
MADYSNTELGKETQYKDQYDPTLLWPIARAEAREQLSSESLGPLPAFLGADIWTAFEISWLNSDGLPQVAIAEFIFPCTSPNIIESKSFKLYLNSFNQTKFASTQAVSEVMRADLAAVSGADIDIIFYELAEYNGFKPIAEPEGHCLDQQAVAIDSYSPDASYLRVNDSRRTDETLYSHLLRTNCPVTDQPDWASVYISYQGSAIDREGLLKYLVSYRQHQDFHEQCVEKIFSDIMQRCKPEHLDVYARYMRRGGLDINPYRSTRYRLPGAHRQVRQ

SEQ ID NO: 49596 - protein, 273 aa, unidentified
  source 1..273: note = Unknown
  REGION 1..273: note = tr|A0A0R2U288|A0A0R2U288_9GAMM NADPH-dependent 7-cyano-7-deazaguanine reductase OS=SAR92 bacterium BACL26 MAG-121220-bin70 OX=1655626 GN=queF PE=3 SV=1
MVDYSDTELGQETRYTDQYDPSLLCSIPRSKARQKSKQGALPFMGADLWTAFEISWLNSDGLPQVAIGEFFFPCISDSIIESKSFKLYLNSVIQTQYETKQALQNVLLKDLSAASGSQVEIVLYELSEYAGFNPISESEGVCVDQQSVVIDTYQPDASLLNADQQELVTETLYSHLLKTNCPVTNQPDWASIYISYQGPRIDRTGLLKYIVSYRMHQDFHEQCVEQIFADLMALCQPTELSVYARYMRRGGLDINPYRSTTFTRPPSMRQVRQ

SEQ ID NO: 49597 - protein, 273 aa, unidentified
  source 1..273: note = Unknown
  REGION 1..273: note = tr|A0A520MCW8|A0A520MCW8_9GAMM NADPH-dependent 7-cyano-7-deazaguanine reductase OS=SAR92 clade bacterium; OX = 2315479 GN=queF PE=3 SV=1
MANYSDTGLGKHTAYSEQYDASLLQPISRSKARQQESGGELPFVGSDFWTAFEISWLNSDGLPQVAIGEFSFPCTSDSIIESKSFKLYLNSLIQTKYPSKQAVTDLLTVDLSHACGEDVGVVLYDLAEYAGFHAISEPQGICLDQRGVSIDTYEPDNKFLIANKREVITETLYSHLLKTNCPVTDQPDWASVYVSYSGPRIDKDGLLKYIVSYRQHQDFHEQCVEQIFTDIMQCCSPFELSVYARYMRRGGLDINPFRSTTSTVPPVWRQVRQ

SEQ ID NO: 49598 - protein, 167 aa, Schlegelella thermodepolymerans
  REGION 1..167: note = tr|A0A2S5T6G7|A0A2S5T6G7_9BURK NADPH-dependent 7-cyano-7-deazaguanine reductase OS=Schlegelella thermodepolymerans OX=215580 GN=queF PE=3 SV=1
MPKTVSRTASRPAATKAAAPKQRPVPATPPSAPSKELHVFPNPAPKRDYVIQFQIPEFTCHCPLTGQPDFAHFTIDYIADKLCVELKSLKMYMWSYRNEGAFHEKVTNDILDDIVKAIDPRYIRITAKWYVRGGIYTNVVAEHRKKGWKPQPRIELPQHAHETGLLG

SEQ ID NO: 49599 - protein, 164 aa, Schwartzia succinivorans
  REGION 1..164: note = tr|A0A1M4SWE6|A0A1M4SWE6_9FIRM NADPH-dependent 7-cyano-7-deazaguanine reductase OS=Schwartzia succinivorans DSM 10502 OX=1123243 GN=queF PE=3 SV=1
MSRMKDEENLTKLGSNGTKYPQDYAPEMLETFVNKHQENDYWVKFNCPEFTTLCPITGQPDFATLYISYVPDVKMVESKSLKLYLFSFRNHGDFHEDVVNIIMKDLIKLLDPRYIEVWGKFLPRGGISIDPYANYGRPGTKYEKLAEMRFSRHDIECLDKVDNR

SEQ ID NO: 49600 - protein, 166 aa, unidentified
  source 1..166: note = Scopulibacillus darangshiensis
  REGION 1..166: note = tr|A0A4R2NPX5|A0A4R2NPX5_9BACL NADPH-dependent 7-cyano-7-deazaguanine reductase OS=Scopulibacillus darangshiensis OX=442528 GN=queF PE=3 SV=1
MSGRNHEEGLKDLTLLGNQHTQYAMTYAPEVLEAVDNLHADRDYFVKFNCPEFTSLCPLTHQPDFATMYISYIPDKKIVESKSLKLYLFSFRNHGDFHEDCVNIIMNDLIKLLDPRYIEVWGKFTPRGGISIDPWCNYGRPGTKYEEMANVRLMNHDLYPEKVDNR

SEQ ID NO: 49601 - protein, 125 aa, Scytonema hofmannii
  REGION 1..125: note = tr|A0A139WVQ6|A0A139WVQ6_9CYAN NADPH-dependent 7-cyano-7-deazaguanine reductase OS=Scytonema hofmannii PCC 7110 OX=128403 GN=queF PE=3 SV=1
MEMKYGERNIAEGQLITFPNPRVGRRYNIDITLPEFTCKCPFSGYPDFATIYITYIPDERVVELKALKLYINNYRDRYISHEETANQILDDFVAACDPLEVVVKADFAPRGNVHMIVEVRHQKHT

SEQ ID NO: 49602 - protein, 125 aa, unidentified
  source 1..125: note = Scytonema millei
  REGION 1..125: note = tr|A0A1D2P4E9|A0A1D2P4E9_9CYAN NADPH-dependent 7-cyano-7-deazaguanine reductase OS=Scytonema millei VB511283 OX=1245923 GN=queF PE=3 SV=1
MEMKYGERNIAEGQLITFPNPRIGRRYDINITLPEFTCKCPFSGYPDFATIHITYIPNERVVELKALKLYINSYRDRYISHEETANQILDDFVAACDPIDVTVKADFTPRGNVHTVISVRHQKNA

SEQ ID NO: 49603 - protein, 131 aa, unidentified
  source 1..131: note = Scytonema millei
  REGION 1..131: note = tr|A0A4R4ILU7|A0A4R4ILU7_9CYAN NADPH-dependent 7-cyano-7-deazaguanine reductase OS=Scytonema millei VB511283 OX=1245923 GN=queF PE=3 SV=1
MSVEEIKYGERQIAEGKLITFPNPRIGRRYEIHITLPEFTCKCPFSGYPDFATIHITYVPDQRVVELKAIKLYINSYRDRYISHEESVNQILDDFVAACDPLEAHIKGDFAPRGNVHTVVEVHHHQTPEAF

SEQ ID NO: 49604 - protein, 125 aa, Scytonema sp.
  REGION 1..125: note = tr|A0A1Z4J4T7|A0A1Z4J4T7_9CYAN NADPH-dependent 7-cyano-7-deazaguanine reductase OS=Scytonema sp. HK-05; OX = 1137095 GN=queF PE=3 SV=1
MEMKYGERNIAEGQLITFPNPRVGRRYDINITLPEFTCKCPFSGYPDFATIHVSYIPDERVVELKALKLYINSYRDRYISHEETANQILDDFVAACDPLDVTVKADFTPRGNVHTVITARHQKNA

SEQ ID NO: 49605 - protein, 125 aa, Scytonema sp.
  REGION 1..125: note = tr|A0A1Z4PZ43|A0A1Z4PZ43_9CYAN NADPH-dependent 7-cyano-7-deazaguanine reductase OS=Scytonema sp. NIES-4073 OX=2005464 GN=queF PE=3 SV=1
MEMKYGERNIAEGQLITFPNPRVGRRYDINITLPEFTCKCPFSGYPDFATIHVSYIPDERVVELKALKLYINSYRDRYISHEETANQILDDFVAACDPLDVTVKADFTPRGNVHTVISVRHQKNA

SEQ ID NO: 49606 - protein, 127 aa, Scytonema tolypothrichoides
  REGION 1..127: note = tr|A0A0C2R377|A0A0C2R377_9CYAN NADPH-dependent 7-cyano-7-deazaguanine reductase OS=Scytonema tolypothrichoides VB-61278 OX=1233231 GN=queF PE=3 SV=1
MTMEMKYGERNIAEGQLITFPNPRVGRRYNIDITLPEFTCKCPFSGYPDFATIHISYIPDERVVELKALKLYINNYRDRYISHEETANQILDDFVAACDPMDVTVKADFTPRGNVHTVVEVRHQKNA

SEQ ID NO: 49607 - protein, 309 aa, unidentified
  source 1..309: note = Unknown
  REGION 1..309: note = tr|J3VT94|J3VT94_9ENTR NADPH-dependent 7-cyano-7-deazaguanine reductase OS=secondary endosymbiont of Ctenarytaina eucalypti OX=1199245 GN=queF PE=3 SV=1
MHHVLFMHVIFEILPNSCLSNPQVNPMTYNYQHHTFLASLMLGKPTLYNDHRYDPALLKGIPRSLNRSSLGLQAKRLPFHGADIWTLYELSWLNDAGLPQVAIGEITLNATSENLIESKSFKLYLNSFNQTRLPSSDAVRICLIKDLSRCAVGEVKITLRKLEEFTGSPVLNFEGECIDDQSISIKDYTFHNCWLKGSTGSAMVSETLVSHLLKSNCLITHQPDWGSVQIRYVGARIDREALLRYLVSFRKHNEFHEQCVERIFCDLMTFCHPHTLSVYARYTRRGGLDINPWRSNTHFSPVIGRLARQ

SEQ ID NO: 49608 - protein, 279 aa, unidentified
  source 1..279: note = Unknown
  REGION 1..279: note = tr|J3TGS4|J3TGS4_9ENTR NADPH-dependent 7-cyano-7-deazaguanine reductase OS=secondary endosymbiont of Heteropsylla cubana OX=134287 GN=queF PE=3 SV=1
MKMKKNIFKKLPLGKKTSYIQKYSPALLKGIPRNLNYNKLDLSRDKQFFHGKDIWTLYELSWLNKNGIPQIAIGDVQFNCKNKNIAESKSVKLYLNSFNQSIFNDWNEVKYIIKNDLSKISKGNVDVALYKIEELEKKAIGTLLGFCIDDQDIIIRNFEFNNKYLLHSTRDVLVEETLVSHILKSNCLITNQPDWGSVQIKYSGKKIDHAALLRYLVSFRQHNEFHEQCVERIFHDIMQYCNPKKLSVYARYTRRGGIDINPWRSNTHFIPTKERLSRQ

SEQ ID NO: 49609 - protein, 166 aa, Sedimentibacter sp.
  REGION 1..166: note = tr|A0A252CMX6|A0A252CMX6_9FIRM NADPH-dependent 7-cyano-7-deazaguanine reductase OS=Sedimentibacter sp. SX930 OX=1955060 GN=queF PE=3 SV=1
MTAGRNEADLNGITQLGNQQTKYPQDYDPKVLETFPNKHPDNDYFVKFNCPEFTSLCPMTGQPDFATIYISYVPGEIMVESKSLKLYLFSFRNHGDFHEDCMNIIMKDLIALMAPKYIEVWGKFTPRGGISIDPYCNYGKPETRWADVAWQRLAQHDLYPEKVDNR

SEQ ID NO: 49610 - protein, 129 aa, Sedimenticola selenatireducens
  REGION 1..129: note = tr|A0A558E249|A0A558E249_9GAMM NADPH-dependent 7-cyano-7-deazaguanine reductase OS=Sedimenticola selenatireducens OX=191960 GN=queF PE=3 SV=1
MSSQPSKSLETFDNPQPDRDYTIRIEVPEFTCLCPKTGQPDFAELTIEYIADQLCVELKSLKMYAWSFRDEGAFHEAVTNQILSDLVSATQPRFMRLTANFNVRGGIYTSVVAEHRAENWQPPIPVNLP

SEQ ID NO: 49611 - protein, 129 aa, Sedimenticola selenatireducens
  REGION 1..129: note = tr|A0A2N6CYP2|A0A2N6CYP2_9GAMM NADPH-dependent 7-cyano-7-deazaguanine reductase OS=Sedimenticola selenatireducens OX=191960 GN=queF PE=3 SV=1
MPSQPSKTLETFDNPQPERDYTIRIEVPEFTCLCPKTGQPDFAELTIEYIADKLCVELKSLKMYAWSFRDEGAFHEAVTNRILSDLVAATQPRFMRLTADFNVRGGIYTTVVAEHRAENWQPPVPVTLP

SEQ ID NO: 49612 - protein, 129 aa, Sedimenticola sp.
  REGION 1..129: note = tr|A0A2N6G9G5|A0A2N6G9G5_9GAMM NADPH-dependent 7-cyano-7-deazaguanine reductase OS=Sedimenticola sp.; OX = 1940285 GN=queF PE=3 SV=1
MPSQPSKNLETFDNPQPQRDYTIRIRVPEFTCLCPKTGQPDFAELTLEYVADKLCVELKALKMYVWSFRDTGAFHEAVTNRILSDLVTAIQPRFMRLTADFNVRGGIYTTVVAEHRDENWQPPVAVTLP

SEQ ID NO: 49613 - protein, 89 aa, unidentified
  source 1..89: note = Sedimenticola thiotaurini
  REGION 1..89: note = tr|A0A558CNU5|A0A558CNU5_9GAMM NADPH-dependent 7-cyano-7-deazaguanine reductase (Fragment); OS = Sedimenticola thiotaurini OX=1543721 GN=queF PE=3 SV=1
DFAELTIEYIADKLCVELKSLKMYAWSFRDEGAFHEAVTNQILSDLVSATQPRFMRLTANFNVRGGIYTSVVAEHRAENWQPPVPVNLP

SEQ ID NO: 49614 - protein, 129 aa, unidentified
  source 1..129: note = Sedimenticola thiotaurini
  REGION 1..129: note = tr|A0A0F7JXM8|A0A0F7JXM8_9GAMM NADPH-dependent 7-cyano-7-deazaguanine reductase OS=Sedimenticola thiotaurini OX=1543721 GN=queF PE=3 SV=1
MPSQPSKTLETFDNPQPERDYTIRIEVPEFTCLCPKTGQPDFAELTIEYIADKLCVELKSLKMYAWSFRDEGAFHEAVTNQILTDLVNATQPRFMRLTANFNVRGGIYTTVVAEHRAENWQPPVPVTLP

SEQ ID NO: 49615 - protein, 122 aa, unidentified
  source 1..122: note = Sedimentisphaera cyanobacteriorum
  REGION 1..122: note = tr|A0A1Q2HQB2|A0A1Q2HQB2_9BACT NADPH-dependent 7-cyano-7-deazaguanine reductase OS=Sedimentisphaera cyanobacteriorum OX=1940790 GN=queF PE=3 SV=1
MASETKIDLFDNPRPGRDYVISTEVPEFTSVCPVTGQPDFGTISIDYCPDKYCIELKSLKFYMQSFRNRGIYYESAANEILDYLVECCKPKWMKITASFTPRGGISTEVVCEYVSKTCNEQS

SEQ ID NO: 49616 - protein, 122 aa, unidentified
  source 1..122: note = Sedimentisphaera salicampi
  REGION 1..122: note = tr|A0A1W6LNE3|A0A1W6LNE3_9BACT NADPH-dependent 7-cyano-7-deazaguanine reductase OS=Sedimentisphaera salicampi OX=1941349 GN=queF PE=3 SV=1
MASETKIDLFDNPRPGRDYVISTDVPEFTSVCPVTGQPDFGTVSIDYCPDKYCIELKSLKFYMQSFRNRGIYYESAANEILDYLVECCKPRWMKITASFTPRGGISTEVVCDYVSKNYHGQS

SEQ ID NO: 49617 - protein, 155 aa, unidentified
  source 1..155: note = Sedimentitalea sp.
  REGION 1..155: note = tr|A0A3T0N205|A0A3T0N205_9RHOB NADPH-dependent 7-cyano-7-deazaguanine reductase OS=Sedimentitalea sp. W43; OX = 2483033 GN=queF PE=3 SV=1
MANEDIYANLTQLGGKTELPNSPEEAVLERVPNPQAGTDYAVRFTAPEFTSLCPMTGQPDFAHIVLDFVPGDWLVESKSLKLFLGSFRNHGAFHEDCTVTIGKRLVELLQPKWLRVGGYWYPRGGIPIDIFYQTGEQPSTVWIPDQGVPTYRGRG

SEQ ID NO: 49618 - protein, 164 aa, Sediminibacillus albus
  REGION 1..164: note = tr|A0A1G8WV59|A0A1G8WV59_9BACI NADPH-dependent 7-cyano-7-deazaguanine reductase OS=Sediminibacillus albus; OX = 407036 GN=queF PE=3 SV=1
MARRDEDLTDLTLLGSQGTAYAFDYTPEVLESFDNKHPNRDYFVKFNCPEFTTLCPKTGQPDFGTVYISYIPDQKMVESKSLKLYLFSFRNHGDFHEDSMNIIMNDLIDLMDPRYIEVWGKFTPRGGISIDPYCNYGKPGTKFEQMADHRLMNHDLYPEKIDNR

SEQ ID NO: 49619 - protein, 165 aa, Sediminibacillus halophilus
  REGION 1..165: note = tr|A0A1G9NXG0|A0A1G9NXG0_9BACI NADPH-dependent 7-cyano-7-deazaguanine reductase OS=Sediminibacillus halophilus OX=482461 GN=queF PE=3 SV=1
MAGRRDEELTDITLLGSQGTTYQFDYTPEVLETFDNKHPGRDYFVKFNCPEFTTLCPKTGQPDFGTVYISYIPDEKMVESKSLKLYLFSFRNHGDFHEDSMNIIMNDLINLMDPRYIEVWGKFTPRGGISIDPFCNYGKPNTKFVQMADHRMMNHDLYPEKIDNR

SEQ ID NO: 49620 - protein, 160 aa, Seinonella peptonophila
  REGION 1..160: note = tr|A0A1M4XJ77|A0A1M4XJ77_9BACL NADPH-dependent 7-cyano-7-deazaguanine reductase OS=Seinonella peptonophila OX=112248 GN=queF PE=3 SV=1
MEQSIKGLTKLGQDTEYSFQYDPSVLEAFPNQHPDLDYFVKFNCPEFTSLCPMTGQPDFATLYISYVPNLRLVESKSLKLYLFRFRNHGDFHENCVVTIMKDLQQLLEPKYIEVLGKFLPRGGISIDPYVNYGMEGTKWADMAAYRLHRHDLNPENIDNR

SEQ ID NO: 49621 - protein, 163 aa, Selenomonas artemidis
  REGION 1..163: note = tr|E7N049|E7N049_9FIRM NADPH-dependent 7-cyano-7-deazaguanine reductase OS=Selenomonas artemidis F0399 OX=749551 GN=queF PE=3 SV=1
MAREKTQEGLTLLGEQRTDYGYDYAPEALETFANKHTDHDYWVRFNCPEFTTLCPITGQPDYGTIYISYMPAERMVESKSLKLYLVSFRNHGDFHEDVVNVIMRDLIAIMAPKYIEVQGKFLPRGGISIDPYANYGIPGTKYEALAWERLSQHDRVPERVDNR

SEQ ID NO: 49622 - protein, 163 aa, Selenomonas flueggei
  REGION 1..163: note = tr|C4V3B1|C4V3B1_9FIRM NADPH-dependent 7-cyano-7-deazaguanine reductase OS=Selenomonas flueggei ATCC 43531 OX=638302 GN=queF PE=3 SV=1
MAREKNQDGLTSLGAQRTDYGYDYAPEALETFQNQHADHDYWVRFNCPEFTTLCPITGQPDYGTIYISYMPAERMVESKSLKLYLVSFRNHGDFHEDVVNVIMRDLIQLMAPKYIEVQGKFLPRGGISIDPYANYGIPGTKYETLAWERLSQHDCVPERVDNR

SEQ ID NO: 49623 - protein, 163 aa, Selenomonas infelix
  REGION 1..163: note = tr|G5GLI8|G5GLI8_9FIRM NADPH-dependent 7-cyano-7-deazaguanine reductase OS=Selenomonas infelix ATCC 43532 OX=679201 GN=queF PE=3 SV=1
MAREKTAEGLTLLGEQRTDYGYDYAPEALETFQNRHTDLDYWVRFNCPEFTTLCPITGQPDYGTIYISYMPAERMVESKSLKLYLVSFRNHGDFHEDVVNVIMRDLIRLMQPKYIEVQGKFLPRGGISIDPYANYGISGTKYETLAWERLSMHDRVPERVDNR

SEQ ID NO: 49624 - protein, 163 aa, Selenomonas noxia
  REGION 1..163: note = tr|D4S7V9|D4S7V9_9FIRM NADPH-dependent 7-cyano-7-deazaguanine reductase OS=Selenomonas noxia ATCC 43541 OX=585503 GN=queF PE=3 SV=1
MAREKTGEGLTLLGEQRTNYGYDYAPEALETFRNKHTDYDYWVRFNCPEFTTLCPITGQPDYGTIYISYMPAERMVESKSLKLYLVSFRNHGDFHEDVVNIIMKDLIQLMAPKYIEVQGKFLPRGGISIDPYANYGIPGTKYEELAWTRLSMHDRVPERVDNR

SEQ ID NO: 49625 - protein, 163 aa, Selenomonas noxia; identical to SEQ ID NO: 49624
  REGION 1..163: note = tr|G5H289|G5H289_9FIRM NADPH-dependent 7-cyano-7-deazaguanine reductase OS=Selenomonas noxia F0398 OX=702437 GN=queF PE=3 SV=1

SEQ ID NO: 49626 - protein, 164 aa, Selenomonas ruminantium
  REGION 1..164: note = tr|I0GN91|I0GN91_SELRL NADPH-dependent 7-cyano-7-deazaguanine reductase OS=Selenomonas ruminantium subsp. lactilytica (strain NBRC 103574 / TAM6421) OX=927704 GN=que F PE=3 SV=1
MSRDKEQEDITLLGKKKVKYHYDYCPEILETFQNKHPENDYWVKFNCPEFTALCPITGQPDYATIYISYVPNEKMVESKSLKLYLVSFRNHGDFHEDVVNVIMKDLIKLMEPKYIEVWGKFLPRGGISIDPYANYGQPGTKFEELAWRRFAEHDMVAMDKVDNR

SEQ ID NO: 49627 - protein, 164 aa, Selenomonas ruminantium
  REGION 1..164: note = tr|A0A1G7RG68|A0A1G7RG68_SELRU NADPH-dependent 7-cyano-7-deazaguanine reductase OS=Selenomonas ruminantium OX=971 GN=queF PE=3 SV=1
MSRDKVAEEITLLGKKKVNYHYDYCPEILETFQNKHPENDYWVKFNCPEFTALCPITGQPDYATIYISYVPQEKMVESKSLKLYLVSFRNHGDFHEDVVNVIMKDLIKLMDPKYIEVWGKFLPRGGISIDPYANYGKPGTKYEELAWRRFAEHDMVAMDKVDNR

SEQ ID NO: 49628 - protein, 163 aa, Selenomonas sp.
  REGION 1..163: note = tr|L1NFD6|L1NFD6_9FIRM NADPH-dependent 7-cyano-7-deazaguanine reductase OS=Selenomonas sp. oral taxon 138 str. F0429 OX=1127695 GN=queF PE=3 SV=1
MARVKTEEGLSLLGEQRTDYGYDYAPEALETFQNKHTDHDYWVRFNCPEFTTLCPITGQPDYGTIYISYMPAERMVESKSLKLYLVSFRNHGDFHEDVVNVIMRDLIRLMEPKYIEVQGKFLPRGGISIDPYVNYGLPGTKYEELAWERLSMHDRVPERVDNR

SEQ ID NO: 49629 - protein, 163 aa, Selenomonas sp.
  REGION 1..163: note = tr|A0A109WCM6|A0A109WCM6_9FIRM NADPH-dependent 7-cyano-7-deazaguanine reductase OS=Selenomonas sp. oral taxon 136 OX=713030 GN=queF PE=3 SV=1
MGREKAEEGLTSLGAQRTDYGYDYAPEALETFQNQHTDHDYWVRFNCPEFTTLCPITGQPDYGTIYISYMPAERMVESKSLKLYLVSFRNHGDFHEDVVNAIMRDLIHLMAPKYIEVQGKFLPRGGISIDPYANYGIPGTRYEALAWERLAQHDRVLERVDNR

SEQ ID NO: 49630 - protein, 158 aa, Selenomonas sputigena
  REGION 1..158: note = tr|C9LT21|C9LT21_SELS3 NADPH-dependent 7-cyano-7-deazaguanine reductase OS=Selenomonas sputigena (strain ATCC 35185 / DSM 20758 / VPI D19B-28) OX=546271; GN = queF PE=3SV=1
MKGVTHLGEKNTQYAADYAPELLETFENKHPDKDYWVKFNCPEFTSLCPITGQPDFATITISYVPERRMVESKSLKLYLFSFRNHGDFHEDVVNIILKDLVRLMEPRYIEVWGKFLPRGGISIDPYTNYGRPGTKYEALAEKRFAEHDLYAMDKVDNR

SEQ ID NO: 49631 - protein, 165 aa, Selenomonas sputigena
  REGION 1..165: note = tr|F4EV48|F4EV48_SELS3 NADPH-dependent 7-cyano-7-deazaguanine reductase OS=Selenomonas sputigena (strain ATCC 35185 / DSM 20758 / VPI D19B-28) OX=546271; GN = queF PE=3SV=1
MSRTSDEMKGVTHLGEKNTQYAADYAPELLETFENKHPDKDYWVKFNCPEFTSLCPITGQPDFATITISYVPERRMVESKSLKLYLFSFRNHGDFHEDVVNIILKDLVRLMEPRYIEVWGKFLPRGGISIDPYTNYGRPGTKYEALAEKRFAEHDLYAMDKVDNR

SEQ ID NO: 49632 - protein, 167 aa, unidentified
  source 1..167: note = Senegalimassilia anaerobia
  REGION 1..167: note = tr|A0A369LEV5|A0A369LEV5_9ACTN NADPH-dependent 7-cyano-7-deazaguanine reductase OS=Senegalimassilia anaerobia OX=1473216 GN=queF PE=3 SV=1
MTNEKPARVGIDDLSLLGNQGVQYPQTYDPGVLETFDNKHPGNDYFVKFNCPEFTALCPITGQPDFATIYISYVPDVRMVESKSLKLYLFSFRNHGDFHEDCVNVIMKDLIALMDPKYIEVWGKFLPRGGISIDPYCNYGKPGTRWEQVAWDRLANHDLHPEAVNNR

SEQ ID NO: 49633 - protein, 167 aa, unidentified
  source 1..167: note = Senegalimassilia sp.
  REGION 1..167: note = tr|A0A4V1QTT2|A0A4V1QTT2_9ACTN NADPH-dependent 7-cyano-7-deazaguanine reductase OS=Senegalimassilia sp. KGMB04484 OX=2509433 GN=queF PE=3 SV=1
MTNEKPTREGADDLSLLGNQGVRYPQTYDPSVLETFENKHPGNDYFVKFNCPEFTALCPITGQPDFATIYISYVPNIRMVESKSLKLYLFSFRNHGDFHEDCVNVIMKDLIALMDPKYIEVWGKFLPRGGISIDPYCNYGKPGTRWEQVAWDRLANHDLHPEAVNNR

SEQ ID NO: 49634 - protein, 302 aa, unidentified
  source 1..302: note = Serpentinomonas mccroryi
  REGION 1..302: note = tr|A0A060NMV2|A0A060NMV2_9BURK NADPH-dependent 7-cyano-7-deazaguanine reductase OS=Serpentinomonas mccroryi OX=1458426 GN=queF PE=3 SV=1
MPPSSHTHSPIQPMSSTCPPPDQSPQPLLLGQPTAYPERYDPTLLCPLPRAPKRAELGVGATLPFLGADLWTAYELSWLNARGKPQLAIVHFTVPCETPQLIESKSFKLYLNSYNQSVFDSAEAVQQRLRQDLTEALWRGSERSGGVGVRLLRPAQFGQERLQALEGLSLDRLDEECSDYEPAPQHLQADTSQAVVQEVLTSDLLKSNCPVTGQPDWASVQIAYSGAPIDQAGLLRYLVSFRQHTGFHEQCVERIYLDIWQRCRPLKLSVYARYTRRGGLDINPWRCSHPQQPPEPVRTARQ

SEQ ID NO: 49635 - protein, 283 aa, unidentified
  source 1..283: note = Serpentinomonas raichei
  REGION 1..283: note = tr|A0A060NHK4|A0A060NHK4_9BURK NADPH-dependent 7-cyano-7-deazaguanine reductase OS=Serpentinomonas raichei OX=1458425 GN=queF PE=3 SV=1
MHTPPPAPLLLGQPTAYPERYDPALLHPVPRAPKRAELGIGATLPFLGADLWTAYELSWLNARGKPQVALAHFTVPCETPHLIESKSFKLYLNSYNQSVYPSFEAVQQQLRQDLAEALWRGSERSGGVGVRLLRPSQFAQERLGVLEGLSLDRLDLECSDYQPAPQHLQADASQAVVQEVLCSELLKSNCPVTGQPDWASVQIAYSGAPIDQAGLLRYLVSFRQHSGFHEQCVERIYQDIWQRCRPAKLSVYARYTRRGGLDINPWRSSHPQQPPEPVRTARQ

SEQ ID NO: 49636 - protein, 280 aa, Serratia ficaria
  REGION 1..280: note = tr|A0A240CB00|A0A240CB00_SERFI NADPH-dependent 7-cyano-7-deazaguanine reductase OS=Serratia ficaria; OX = 61651 GN=queF_2 PE=3 SV=1
MHIKKQDKITHLGANSDYPDQYAPELLEALPRARGRDLIGVDENNLPFGGFDLWTAFELSWLNAKGKPVVGIGEFTLPHSSTNLIESKSFKLYLNSFNQTRFDSVEQVSAAMRQDLSQAANGQVGVKLYPGLDGYSAQIDRLPGVNIDDLDIAVDDFAFKPEYLDGAAADQGEWVTETLSSNLLKSNCLVTNQPDWGSVVIHYEGRKIDRERLLRYLISFRQHNEFHEQCVERIFNDLKQSCRPEKLSVFARYTRRGGLDINPFRSDFETAPTLGRLIRQ

SEQ ID NO: 49637 - protein, 281 aa, Serratia ficaria
  REGION 1..281: note = tr|A0A240C9E2|A0A240C9E2_SERFI NADPH-dependent 7-cyano-7-deazaguanine reductase OS=Serratia ficaria; OX = 61651 GN=queF_1 PE=3 SV=1
MSSYQDHQALSELTLGKPTAYRDSYDAALLQAVPRSMNREPLGLSADSLPFHGADIWTLYELSWLNANGLPQVAVGEISLNADSLNLIESKSFKLYLNSFNQTPFADRESVRATLQRDLSACAQGEVSVTLFSVEQLEGSAIARLEGECIDHQDIRIDNYEFNADYLQNAAGAEVVEERLVSHLLKSNCLITHQPDWGSVQIHYRGGKLDREALLRYLVSFRHHNEFHEQCVERIFNDLMRYCRPQSLTVYARYTRRGGLDINPWRSNVDFSPAHGRLARQ

SEQ ID NO: 49638 - protein, 281 aa, Serratia fonticola
  REGION 1..281: note = tr|A0A0F7H6R5|A0A0F7H6R5_SERFO NADPH-dependent 7-cyano-7-deazaguanine reductase OS=Serratia fonticola; OX = 47917 GN=queF PE=3 SV=1
MSSYQDHQALAALTLGKPTAYRDYYDASLLQAVPRSMNREPLGLYPDSLPFHGADIWTLYELSWLNAKGLPQVAVGEISLNANSINLIESKSFKLYLNSFNQTHFPDWEAVRSTLQRDLAACAQGDVSVSLFSVDRLEGSPIARLEGECLDQQDISIDNYEFDTGYLEGAAGSQIVEETLVSHLLKSNCLITNQPDWGSVQIRYRGPQINREALLRYLVSFRHHNEFHEQCVERIFNDLLRFCQPQQLSVYARYTRRGGLDINPWRSNVAFEPSHGRLARQ

SEQ ID NO: 49639 - protein, 175 aa, Serratia fonticola
  REGION 1..175: note = tr|A0A4U9V0K2|A0A4U9V0K2_SERFO NADPH-dependent 7-cyano-7-deazaguanine reductase OS=Serratia fonticola; OX = 47917 GN=queF PE=4 SV=1
MNREPLGLYPDSLPFHGADIWTLYELSWLNAKGLPQVAVGEISLNANSINLIESKSFKLYLNSFNQTHFPDWEAVRSTLQRDLAACAQGDVSVSLFSVDRLEGSPIARLEGECLDQQDISIDNYEFDTGYLEGAAGSQIVEETLVSHLLKSNCLITNQPDWGSVQIRYRGPQINP

SEQ ID NO: 49640 - protein, 280 aa, Serratia liquefaciens
  REGION 1..280: note = tr|A0A515D4H4|A0A515D4H4_SERLI NADPH-dependent 7-cyano-7-deazaguanine reductase OS=Serratia liquefaciens; OX = 614 GN=queF PE=3 SV=1
MHIKKQDKITHLGANSDYPDQYAPELLEALPRSRGRDLIGVDEQNLPFSGFDLWTAFELSWLNAKGKPVVGIGEFTLPHSSTNLIESKSFKLYLNSFNQTRFDSVEQVSAAMQKDLSQAANGQVGVKLYPGLDGYSPQIDSLPGINIDDLDIAVDDFDFKPEYLHGAADQHGDIVTETLSSNLLKSNCLVTNQPDWGSVVIHYQGRKIDRERLLRYLISFRQHNEFHEQCVERIFNDIKQSCQPEKLSVFARYTRRGGLDINPFRSDFETAPTLGRLIRQ

SEQ ID NO: 49641 - protein, 281 aa, Serratia liquefaciens; identical to SEQ ID NO: 46644
  REGION 1..281: note = tr|A0A484XYB2|A0A484XYB2_SERLI NADPH-dependent 7-cyano-7-deazaguanine reductase OS=Serratia liquefaciens; OX = 614 GN=queF PE=3 SV=1

SEQ ID NO: 49642 - protein, 281 aa, Serratia marcescens
  REGION 1..281: note = tr|A0A379YUS0|A0A379YUS0_SERMA NADPH-dependent 7-cyano-7-deazaguanine reductase OS=Serratia marcescens; OX = 615 GN=queF_2 PE=3 SV=1
MSSYQDHQALSGLTLGKPTAYRDRYDATLLQAVPRSMNREPLGLYPDNLPFHGADIWTLYELSWLNANGLPQVAVGEISLNADSLNLIESKSFKLYLNSFNQTPFADWETVRSTLQRDLSACAQGEVSVTLFSVEQLEDTPIARLAGDCIDQQDIRIDNYEFSADYLLNAAGEEVVEEQLVSHLLKSNCLITHQPDWGSVQISYRGGKIDREALLRYLVSFRHHNEFHEQCVERIFNDLMRYCRPQSLTVYARYTRRGGLDINPWRSNVAFAPAHGRLARQ

SEQ ID NO: 49643 - protein, 279 aa, Serratia marcescens
  REGION 1..279: note = tr|A0A421HRV8|A0A421HRV8_SERMA NADPH-dependent 7-cyano-7-deazaguanine reductase OS=Serratia marcescens; OX = 615 GN=queF PE=3 SV=1
MHIQKQDKITHLGANSDYPDQYAPALLEALPRARGRDLIGVDERQLPFSGFDLWTAFELSWLNAKGKPVVGIGEFTFPHSSSNLIESKSFKLYLNSFNQTRFDSVEQVSAAMQQDLSQAANGQVTVKLYPGLEGYPAQIDRLPGINIDDLDIAVDDFAFKPEYLSGAAERGEPVSETLSSNLLKSNCLVTNQPDWGSVVIRYEGRKIDRESLLRYLISFRQHNEFHEQCVERIFNDIKQSCRPEKLSVFARYTRRGGLDINPFRSDFETAPALGRLIRQ

SEQ ID NO: 49644 - protein, 279 aa, Serratia nematodiphila
  REGION 1..279: note = tr|A0A5C7CV27|A0A5C7CV27_9GAMM NADPH-dependent 7-cyano-7-deazaguanine reductase OS=Serratia nematodiphila; OX = 458197 GN=queF PE=3 SV=1
MHIQKQDKITHLGANSDYPDQYAPALLEALPRARGRDLIGVDERQLPFSGFDLWTAFELSWLNAKGKPVVGIGEFTFPHSSSNLIESKSFKLYLNSFNQTRFDSVEQVSAAMQKDLSQAANGQVTVKLYPGLEGYPAQIDRLPGINIDDLDIAVDDFAFKPEYLSGAAERGEHVAETLSSNLLKSNCLVTNQPDWGSVVIRYEGRQIDRESLLRYLISFRQHNEFHEQCVERIFNDIKQSCRPEKLSVFARYTRRGGLDINPFRSDFETAPTLGRLIRQ

SEQ ID NO: 49645 - protein, 281 aa, Serratia nematodiphila
  REGION 1..281: note = tr|A0A5C7CNF0|A0A5C7CNF0_9GAMM NADPH-dependent 7-cyano-7-deazaguanine reductase OS=Serratia nematodiphila; OX = 458197 GN=queF PE=3 SV=1
MSSYQDHQALSGLTLGKPTAYRDRYDATLLQAVPRSMNREPLGLYPDNLPFHGADIWTLYELSWLNANGLPQVAVGEISLNADSLNLIESKSFKLYLNSFNQTPFADWETVRSTLQRDLSACAQGEVSVTLFSVEQLEGTPIARLAGDCIDQQDIRIDNYEFNADYLLNAAGEEVVEEQLVSHLLKSNCLITHQPDWGSVQISYRGGKIDREALLRYLVSFRHHNEFHEQCVERIFNDLMRYCRPQSLTVYARYTRRGGLDINPWRSNVVFAPAHGRLARQ

SEQ ID NO: 49646 - protein, 281 aa, Serratia odorifera
  REGION 1..281: note = tr|A0A447KSE1|A0A447KSE1_SEROD NADPH-dependent 7-cyano-7-deazaguanine reductase OS=Serratia odorifera; OX = 618 GN=queF_2 PE=3 SV=1
MSSHQDHQALSGLTLGKPTAYHDHYDAALLQPVPRSMNREPLGLYPDNLPFHGADIWTLYELSWLNNNGLPQVAVGEISLDAASVNLIESKSFKLYLNSFNQTRFADWETVRNTLQRDLAACAQGGIEVALYPLDRLEGQPIAGLRGECIDRQNITIDNYQFNADYLQNAAGTQTVEETLVSHLLKSNCLITNQPDWGSVQICYRGPQIDREALLRYLVSFRHHNEFHEQCVERIFNDIMRFCQPQQLSVYARYTRRGGLDINPWRSNGQFSPSHGRLARQ

SEQ ID NO: 49647 - protein, 280 aa, Serratia odorifera
  REGION 1..280: note = tr|D4E0V7|D4E0V7_SEROD NADPH-dependent 7-cyano-7-deazaguanine reductase OS=Serratia odorifera DSM 4582 OX=667129 GN=queF PE=3 SV=1
MHIKPQDKITHLGTHSAYPDRYDPSLLEALPRARGRDLVGLDANALPFSGVDIWTAFELSWLNAKGKPVVGIGEFAIPFSSTNLIESKSFKLYLNSFNQTRFASADDVLAALEHDLSAAADGQVGVKLFPGLAGYSHQIDTLPGDNIDDLDIEVTDFAFDPQYLEHAVSAQAEYVSETLSSNLLKSNCLVTHQPDWGSVVIRYAGRKIDREALLRYLISFRQHNEFHEQCVERIFNDITRYCQPEKLSVFARYTRRGGLDINPFRSNFEAAPTLGRLVRQ

SEQ ID NO: 49648 - protein, 281 aa, unidentified
  source 1..281: note = Serratia oryzae
  REGION 1..281: note = tr|A0A1S8CH45|A0A1S8CH45_9GAMM NADPH-dependent 7-cyano-7-deazaguanine reductase OS=Serratia oryzae; OX = 2034155 GN=queF PE=3 SV=1
MSSYQNHQALSALTLGKPTAYQDHYDAALLQAVPRSMNREPLGLYPENLPFHGADIWTLYELSWLNAKGLPQVAVGEISLDAGSISLIESKSFKLYLNSFNQTRFPDWETVRNTLQRDLSACAQGEVSVTLCHVDQIAGSSIAHFAGECIDAQDINIDDYEFNAGYLQNATGEQQVEETLVSHLLKSNCLITHQPDWGSVQIRYRGPQINREALLRYLVSFRHHNEFHEQCVERIFNDLLRFCQPQQLSVYARYTRRGGLDINPWRSNVPFEPARGRLARQ

SEQ ID NO: 49649 - protein, 281 aa, Serratia plymuthica
  REGION 1..281: note = tr|A0A1B1KVF9|A0A1B1KVF9_SERPL NADPH-dependent 7-cyano-7-deazaguanine reductase OS=Serratia plymuthica PRI-2C OX=1154756 GN=queF_1 PE=3 SV=1
MSSYQDHHALSELTLGKPTAYRDRYDAQLLQAVPRSMNREPLGLYPDSLPFHGADIWTLYELSWLNDNGLPQVAVGEISLNANSLNLIESKSFKLYLNSFNQTPFTDWETVRSTLQRDLSACAQGDVSVALFSLAQVEGSPIARLDGECIDHQDIRIDNYEFNADYLLNATGTRQVEEQLVSHLLKSNCLITNQPDWGSVQIQYRGAQIDREALLRYLVSFRHHNEFHEQCVERIFNDLMRYCRPESLSVYARYTRRGGLDINPWRSNLDFVPSHGRLARQ

SEQ ID NO: 49650 - protein, 281 aa, Serratia plymuthica
  REGION 1..281: note = tr|S4YMU6|S4YMU6_SERPL NADPH-dependent 7-cyano-7-deazaguanine reductase OS=Serratia plymuthica S13 OX=1348660 GN=queF PE=3 SV=1
MSSYQDHHALSALTLGKPTAYRDRYDAQLLQAVPRSMNREPLGLYPDSLPFHGADIWTLYELSWLNGNGLPQVAVGEISLNANSINLIESKSFKLYLNSFNQTQFTDWETVRSTLQRDLSACAQGDVSVALFSIDQVEGSPIARLEGECIDHQDIRIDNYEFNADYLLNATGPRQVEEQLVSHLLKSNCLITNQPDWGSVQIQYRGAQIDREALLRYLVSFRHHNEFHEQCVERIFNDLMRYCRPESLSVYARYTRRGGLDINPWRSNLDFVPSHGRLARQ

SEQ ID NO: 49651 - protein, 280 aa, Serratia proteamaculans
  REGION 1..280: note = tr|A0A1W5DRD9|A0A1W5DRD9_9GAMM NADPH-dependent 7-cyano-7-deazaguanine reductase OS=Serratia proteamaculans OX=28151 GN=queF PE=3 SV=1
MHIKKQDKITHLGANSDYPDQYAPELLEALPRARGRDLIGVDEQQLPFHGYDLWTAFELSWLNAKGKPVVGIGEFTLPHSSTNLIESKSFKLYLNSFNQTRFDSVEQVSAAMQKDLSQTANGQVGVKLYPGLDGYSSQIDSLPGINIDGLDIAVDDFDFKPEYLDGAASEQAETVTETLSSNLLKSNCLVTNQPDWGSVVIHYQGRKIDRERLLRYLISFRQHNEFHEQCVERIFNDIKQSCRPEKLSVFARYTRRGGLDINPFRSDFETAPTLGRLIRQ

SEQ ID NO: 49652 - protein, 280 aa, Serratia proteamaculans
  REGION 1..280: note = tr|A8GJK1|A8GJK1_SERP5 NADPH-dependent 7-cyano-7-deazaguanine reductase OS=Serratia proteamaculans (strain 568) OX=399741 GN=queF PE=3 SV=1
MHIKKQDKITHLGANSDYPDQYAPELLEALPRARGRDLIGVDERKLPFSGFDLWTAFELSWLNAKGKPVVGIGEFTLPHSSTNLIESKSFKLYLNSFNQTRFDSVEQVSAAMQKDLSQAANGQVGVKLYPGLDGYSAQIDALPGINIDDLDIAVDDFDFKPEYLIGATSEQAEIVTETLSSNLLKSNCLVTNQPDWGSVVIHYQGRKIDRERLLRYLISFRQHNEFHEQCVERIFNDIKQSCQPEKLSVFARYTRRGGLDINPFRSDFETAPTLGRLIRQ

SEQ ID NO: 49653 - protein, 280 aa, Serratia quinivorans; identical to SEQ ID NO: 49652
  REGION 1..280: note = tr|A0A2X2HVL5|A0A2X2HVL5_9GAMM NADPH-dependent 7-cyano-7-deazaguanine reductase OS=Serratia quinivorans; OX = 137545 GN=queF_1 PE=3 SV=1

SEQ ID NO: 49654 - protein, 280 aa, Serratia quinivorans
  REGION 1..280: note = tr|A0A4Q8DB28|A0A4Q8DB28_9GAMM NADPH-dependent 7-cyano-7-deazaguanine reductase OS=Serratia quinivorans; OX = 137545 GN=queF PE=3 SV=1
MHIKKQDKITHLGANSDYPDQYAPELLEALPRARGRDLIGVDEQNLPFSGFDLWTAFELSWLNAKGKPVVGIGEFTLPHSSTNLIESKSFKLYLNSFNQTRFDSVEQVSAAMQKDLSQAANGQVGVKLYPGLDGYSSQIDRLPGINIDDLDIAVDDFDFKPEYLDGATHEQAETVTETLSSNLLKSNCLVTNQPDWGSVVIHYQGRKIDRERLLRYLISFRQHNEFHEQCVERIFNDIKKSCQPEKLSVFARYTRRGGLDINPFRSDFEAAPTLGRLIRQ

SEQ ID NO: 49655 - protein, 282 aa, Serratia rubidaea
  REGION 1..282: note = tr|A0A2X5AEF5|A0A2X5AEF5_SERRU NADPH-dependent 7-cyano-7-deazaguanine reductase OS=Serratia rubidaea; OX = 61652 GN=queF PE=3 SV=1
MSSYQNHQALSGLALGKPTAYHDQYDATLLQPVPRSMNREPLGLYPDSLPFHGADIWTLYELSWLNAKGLPQVAVGEISLDAFSLNLIESKSFKLYLNSFNQTRFENWEAVRCTLLRDLAACAQGEVEVKLFRLDEIEGRPIAQLQGECLDQQDISIDDYQFSADYLQDAAAGSPVVEETLVSHLLKSNCLITNQPDWGSVQIAYRGAQINREALLRYLVSFRHHNEFHEQCVERIFNDIMRFCQPERLSVYARYTRRGGLDINPWRSNVAFAPAHGRLARQ

SEQ ID NO: 49656 - protein, 282 aa, Serratia rubidaea
  REGION 1..282: note = tr|A0A126VG15|A0A126VG15_SERRU NADPH-dependent 7-cyano-7-deazaguanine reductase OS=Serratia rubidaea; OX = 61652 GN=queF PE=3 SV=1
MSSYQNHQALSGLTLGKPTAYHDQYDAALLQPVPRSMNREPLGLYPDSLPFHGADIWTLYELSWLNAKGLPQVAVGEISLDAFSLNLIESKSFKLYLNSFNQTRFENWEAVRCTLMRDLAACAQGEVTVKLFRLDEIEGRPIAQLQGENLDQQDISIDDYQFNADYLQDAAAGSPVVEETLVSHLLKSNCLITNQPDWGSVQIAYRGAQINREALLRYLVSFRHHNEFHEQCVERIFNDIMRFCQPERLSVYARYTRRGGLDINPWRSNTDFAPTHGRLARQ

SEQ ID NO: 49657 - protein, 281 aa, Serratia sp.
  REGION 1..281: note = tr|A0A2G8A376|A0A2G8A376_9GAMM NADPH-dependent 7-cyano-7-deazaguanine reductase OS=Serratia sp. OLAL2; OX = 1931999 GN=queF PE=3 SV=1
MSSYQDHQALSGLTLGKPTAYRDRYDATLLQAVPRSMNREPLGLYPDNLPFHGADIWTLYELSWLNANGLPQVAVGEISLNADSLNLIESKSFKLYLNSFNQTPFADGETVRSTLQRDLSACAQGEVSVTLFSVEQLEGLPIARLAGDCIDQQDIRIDNYEFNADYLLNAAGEEVVEEQLVSHLLKSNCLITHQPDWGSVQISYRGAKIDREALLRYLVSFRHHNEFHEQCVERIFNDLMRYCRPQSLTVYARYTRRGGLDINPWRSNVAFTPEHGRLARQ

SEQ ID NO: 49658 - protein, 281 aa, Serratia sp.; identical to SEQ ID NO: 45892
  REGION 1..281: note = tr|A0A4R6EKS3|A0A4R6EKS3_9GAMM NADPH-dependent 7-cyano-7-deazaguanine reductase OS=Serratia sp. BIGb0156; OX = 2485132 GN=queF PE=3 SV=1

SEQ ID NO: 49659 - protein, 280 aa, Serratia symbiotica
  REGION 1..280: note = tr|E9CLN6|E9CLN6_9GAMM NADPH-dependent 7-cyano-7-deazaguanine reductase OS=Serratia symbiotica str. Tucson OX=914128 GN=queF PE=3 SV=1
MHIKKQDKITHLGSNSDYPDHYAPALLEALPRARGRDLIGVNEHNLPFSGFDLWTAFELSWLNAKGKPVVGIGEFTLPHSSTNLIESKSFKLYLNSFNQTRFDSVEAVNTVMQKDLSQAANGMVGVKLYPGLDGYSTQIDHLPGVNIDDLDIAIDDYAFKSECLHGAASEQAEWVTETLSSHLLKSNCPVTHQPDWGSVVIHYQGRKIDRERLLRYLISFRQHNEFHEQCVERIFNDFKQYCQPEKLSVFARYTRRGGLDINPFRSDFEAVPVLGRLVRQ

SEQ ID NO: 49660 - protein, 280 aa, Serratia symbiotica
  REGION 1..280: note = tr|A0A068RF19|A0A068RF19_9GAMM NADPH-dependent 7-cyano-7-deazaguanine reductase OS=Serratia symbiotica SCt-VLC OX=1347341 GN=queF PE=3 SV=1
MHIKKQDKITHLGSNSDYPDHYAPALLEALPRARGRDLIGVNEHNLPFSGFDLWTAFELSWLNAKGKPVVGIGEFTLPHSSTNLIESKSFKLYLNSFNQTRFDSVEAVNTVMQKDLSQAANGLVGVKLYPGLDGYSTQIDHLPGVNIDDLDIAIDDYAFKSECLHGAASEQAEWVTETLSSHLLKSNCLVTHQPDWGSVVIHYQGRKIDRKRLLRYLISFRQHNEFHEQCVERIFNDIKQYYQPEKLSVFARYTRRGGLDINPFRSDFEAVPVLGRLVRQ

SEQ ID NO: 49661 - protein, 279 aa, Serratia ureilytica
  REGION 1..279: note = tr|A0A5C7BZS6|A0A5C7BZS6_9GAMM NADPH-dependent 7-cyano-7-deazaguanine reductase OS=Serratia ureilytica; OX = 300181 GN=queF PE=3 SV=1
MHIQKQDKITHLGANSDYPDQYAPALLEALPRARGRDLIGVDERRLPFSGFDLWTAFELSWLNGKGKPVVGIGEFTFPHSSSNLIESKSFKLYLNSFNQTRFDSVEQVSAAMQKDLSQAANGQVTVKLYPGLEGYPAQIDRLPGINIDDLDIAVDDFAFKPEYLSGAADQGEHVAETLSSNLLKSNCLVTNQPDWGSVVIRYEGRKIDRESLLRYLISFRQHNEFHEQCVERIFNDIKQSCRPEKLSVFARYTRRGGLDINPFRSDFETAPTLGRLIRQ

SEQ ID NO: 49662 - protein, 281 aa, Serratia ureilytica
  REGION 1..281: note = tr|A0A5C7C5S9|A0A5C7C5S9_9GAMM NADPH-dependent 7-cyano-7-deazaguanine reductase OS=Serratia ureilytica; OX = 300181 GN=queF PE=3 SV=1
MSSYQDHQALSGLTLGKPTAYRDRYDATLLQAVPRSMNREPLGLYPDNLPFHGADIWTLYELSWLNANGLPQVAVGEISLNADSLNLIESKSFKLYLNSFNQTPFADWETVRSTLQRDLSACAQGEVSVTLFSVDQLEGSPIARLAGDCIDQQDIRIDNYEFNADYLQNAAGEEVVEEQLVSHLLKSNCLITHQPDWGSVQISYRGGKIDREALLRYVVSFRHHNEFHEQCVERIFNDLMRYCRPQSLTVYARYTRRGGLDINPWRSNVAFAPEHGRLARQ

SEQ ID NO: 49663 - protein, 296 aa, Shewanella algae
  REGION 1..296: note = tr|A0A1S2TEN6|A0A1S2TEN6_9GAMM NADPH-dependent 7-cyano-7-deazaguanine reductase OS=Shewanella algae; OX = 38313 GN=queF PE=3 SV=1
MVTYFDTETRLMTQNHDPYRNAEALSGLTLGQQTDYQEHYAPELLQGVPRKLNRDAINLSAPLPFQGADIWTGYELSWLNAKGKPMVAIAEFQLDLNSEHLIESKSFKLYLNSFNQTRFDSTEAVEQTLTQDLSRCANGEVKVRVIEPKHFNSQRVVELPGHCIDDLDIEVNVYEFNPKWLEDSTDDKQIVAETLNSNLLKSNCLITSQPDWGSVMIRYQGPKIDREKLLRYLISFRQHNEFHEQCVERIFTDLKRFCHCSKLTVYARYTRRGGLDINPFRSDFEHVPESQRLARQ

SEQ ID NO: 49664 - protein, 285 aa, Shewanella algae
  REGION 1..285: note = tr|A0A2T3H2C6|A0A2T3H2C6_9GAMM NADPH-dependent 7-cyano-7-deazaguanine reductase OS=Shewanella algae; OX = 38313 GN=queF PE=3 SV=1
MTQNHDPYRNAEALSGLTLGQQTDYQEHYAPELLQGVPRKLNRDAINLSAPLPFQGADIWTGYELSWLNAKGKPMVAIAEFQLDLNSEHLIESKSFKLYLNSFNQTRFDSTEAVEQTLTQDLSRCANGEVKVRVIEPKHFNSQRVVELPGHCIDDLDIEVSDYEFNPKWLEDSTDDKQIVAETLNSNLLKSNCLITSQPDWGSVMIRYQGPKIDREKLLRYLISFRQHNEFHEQCVERIFTDLKRFCHCSKLTVYARYTRRGGLDINPFRSDFEHVPESQRLARQ

SEQ ID NO: 49665 - protein, 296 aa, Shewanella amazonensis
  REGION 1..296: note = tr|A1S4M1|A1S4M1_SHEAM NADPH-dependent 7-cyano-7-deazaguanine reductase OS=Shewanella amazonensis (strain ATCC BAA-1098 / SB2B) OX=326297 GN=queF PE=3 SV=1
MCPYFDTERCLMTRNHDPYSGAAELEGLTLGQTTEYQAEYAPSLLQGVPRKLNRDAIALTGTLPFHGTDLWTGYELSWLNAKGKPMVAILDVQLDVNSENLIESKSFKLYLNSFNQTRFDSVEAVSRTLEKDLAQCANGEVKVKVIEPKYFGLARIVELPGTCIDDLDIEVDNYDFNPDYLENSTDDKQLVAETLNSNLLKSNCLITSQPDWGSVMIRYQGPKIDREKLLRYLISFRQHNEFHEQCVERIFTDLKHYCGCSKLTVFARYTRRGGLDINPFRSDFEHLPENNRLARQ

SEQ ID NO: 49666 - protein, 290 aa, Shewanella atlantica
  REGION 1..290: note = tr|A0A3S0KR88|A0A3S0KR88_9GAMM NADPH-dependent 7-cyano-7-deazaguanine reductase OS=Shewanella atlantica; OX = 271099 GN=queF PE=3 SV=1
MENLLMTQVHDPYTGAEALSELTLGKATGYQAEYDASLLQGVPRKLNRDAIGLNETLPFHGTDIWTGYELSWLNAKGKPMVAIAEFYLSFDSQNLIESKSFKLYLNTFNQTKFDSVEQVQSTLADDLSQCAQGEVLVKVLEPKQFSTQRVVELPGTCIDDLDIEVNDYSFNPDYLQDSTDDKAVVAETLSSNLLKSNCLITSQPDWGSVMIRYQGPKIDREKLLRYLISFRQHNEFHEQCIERIFVDLKRFCNCAKLTVYARYTRRGGLDINPYRSDFENPPESHRLARQ

SEQ ID NO: 49667 - protein, 285 aa, Shewanella baltica
  REGION 1..285: note = sp|B8E7T7|QUEF_SHEB2 NADPH-dependent 7-cyano-7-deazaguanine reductase OS=Shewanella baltica (strain OS223) OX=407976 GN=queF PE=3 SV=1
MTQNHDPYSDAQALVGLTLGKATDYQAEYDASLLQGVPRSLNRNAIALTGTLPFHGADIWTGYELSWLNAKGKPMVAIAEFHLSYESLNLIESKSFKLYLNSFNQTKFDSIDSLQKTLVADLSQCAQGDISVKIIEPKSFGIQRIIELPGTCIDDLDIEVSDYSFNPDYLENSTDDKQTVAETLNSNLLKSNCLITSQPDWGSVMIRYQGPKIDREKLLRYLISFRQHNEFHEQCVERIFVDLKRFCHCTKLTVYARYTRRGGLDINPYRSDFEQPGESHRLARQ

SEQ ID NO: 49668 - protein, 296 aa, Shewanella baltica
  REGION 1..296: note = tr|A9KUI5|A9KUI5_SHEB9 NADPH-dependent 7-cyano-7-deazaguanine reductase OS=Shewanella baltica (strain OS195) OX=399599 GN=queF PE=3 SV=1
MCAYFDMETVLMTQNHDPYSDAQALVGLTLGKATDYQAEYDASLLQGVPRSLNRNAIALTGTLPFHGADIWTGYELSWLNAKGKPMVAIAEFHLSYESLNLIESKSFKLYLNSFNQTKFDSIDSLQKTLVADLSQCAQGDISVKIIEPKSFGIQRIIELPGTCIDDLDIEVSDYSFNPDYLENSTDDKQTVAETLNSNLLKSNCLITSQPDWGSVMIRYQGPKIDREKLLRYLISFRQHNEFHEQCVERIFVDLKRFCHCTKLTVYARYTRRGGLDINPYRSDFEQPGESHRLARQ

SEQ ID NO: 49669 - protein, 290 aa, Shewanella benthica
  REGION 1..290: note = tr|A9DDC5|A9DDC5_9GAMM NADPH-dependent 7-cyano-7-deazaguanine reductase OS=Shewanella benthica KT99 OX=314608 GN=queF PE=3 SV=1
MEYLLMTQVHDPYTDAEALSGLTLGKATGYQAEYDASLLQGVPRKLNRDAIELNESLPFHGTDIWTGYELSWLNAKGKPVVAIAEFQLSFDSDNLIESKSFKLYLNSFNQTKFDDIEQVQATLTQDLSKCAVGDVSVKVFEPKQFASQRIVELPGTCIDDLDIEVDDYNFNPQYLENSTDEKAVVAETLNSNLLKSNCLITSQPDWGSVMIRYQGPKIDREKLLRYIISFRQHNEFHEQCIERIFVDLKRFCHCAKLTVYARYTRRGGLDINPYRSDFETPPENHRLARQ

SEQ ID NO: 49670 - protein, 285 aa, Shewanella benthica
  REGION 1..285: note = tr|A0A330M1E5|A0A330M1E5_9GAMM NADPH-dependent 7-cyano-7-deazaguanine reductase OS=Shewanella benthica; OX = 43661 GN=queF PE=3 SV=1
MTQVHDPYTDAEALSGLTLGKATGYQAEYDASLLQGVPRKLNRDAIELNENLPFHGTDIWTGYELSWLNAKGKPVVAIAEFQLSFDSDNLIESKSFKLYLNSFNQTKFDDIEQVQATLTQDLSKCAVGDVSVKVFEPKQFASQRIVELPGTCIDDLDIEVDDYNFNPQYLENSTDDKAVVAETLNSNLLKSNCLITSQPDWGSVMIRYQGPKIDREKLLRYIISFRQHNEFHEQCIERIFVDLKRFCHCEKLTVYARYTRRGGLDINPYRSDFETPPENHRLARQ

SEQ ID NO: 49671 - protein, 286 aa, unidentified
  source 1..286: note = Shewanella bicestrii
  REGION 1..286: note = tr|A0A220UKQ5|A0A220UKQ5_9GAMM NADPH-dependent 7-cyano-7-deazaguanine reductase OS=Shewanella bicestrii; OX = 2018305 GN=queF PE=3 SV=1
MTHNHDPYSDAKELAGLTLGKATDYQAEYDASLLQGVPRSLNRNAINLTAESLPFHGADIWTAYELSWLNAKGKPMVAIADIQLSHESQNLIESKSFKLYLNSFNQTKFDNIEAVQKTLVQDLSECAQGQVTVKIIEPKSFGIQRVVELPGTCIDDLDIEVSDYDFNPDYLENSTDDKQIVAETLNSNLLKSNCLITSQPDWGSVMIRYQGPKIDREKLLRYLISFRQHNEFHEQCVERIFVDLKHYCHCTKLTVYARYTRRGGLDINPYRSDFEHPGESHRLARQ

SEQ ID NO: 49672 - protein, 290 aa, Shewanella canadensis
  REGION 1..290: note = tr|A0A3S0KV62|A0A3S0KV62_9GAMM NADPH-dependent 7-cyano-7-deazaguanine reductase OS=Shewanella canadensis; OX = 271096 GN=queF PE=3 SV=1
MENLLMTQVHDPYTGAEALSELTLGKATGYQAEYDASLLQGVPRKLNRDAIGLNETLPFHGTDIWTGYELSWLNAKGKPMVAIAEFHLSYDSQNLIESKSFKLYLNTFNQTKFDSIDQLQTTLADDLSRCAEGEVLVRVLEPKQFSTQRVVELPGTCIDDLDIEVNDYSFNPEYLHDSTDDKAVVAETLNSNLLKSNCLITSQPDWGSVMIRYQGPKIDREKLLRYLISFRQHNEFHEQCIERIFVDLKRFCNCAKLTVYARYTRRGGLDINPYRSDFENPPENHRLARQ

SEQ ID NO: 49673 - protein, 296 aa, Shewanella chilikensis
  REGION 1..296: note = tr|A0A2V4VZI1|A0A2V4VZI1_9GAMM NADPH-dependent 7-cyano-7-deazaguanine reductase OS=Shewanella chilikensis; OX = 558541 GN=queF PE=3 SV=1
MVAYFDTETRLMTQNHDPYRNAEALSGLTLGQQTDYQEHYAPELLQGVPRKLNRDAINLSTPLPFQGADIWTGYELSWLNAKGKPMVAIAEFQLDLNSEHLIESKSFKLYLNSFNQTRFDSTEAVEQTLTQDLSRCANGEVKVRVIEPKHFNSQRVVELPGHCIDDLDIEVSDYEFNPKWLEDSTDDKQIVAETLNSNLLKSNCLITSQPDWGSVMIRYQGPKIDKEKLLRYLISFRQHNEFHEQCVERIFTDLKRFCHCSKLTVYARYTRRGGLDINPFRSDFEHVPESQRLARQ

SEQ ID NO: 49674 - protein, 290 aa, Shewanella colwelliana
  REGION 1..290: note = tr|A0A1E5IX60|A0A1E5IX60_SHECO NADPH-dependent 7-cyano-7-deazaguanine reductase OS=Shewanella colwelliana; OX = 23 GN=queF PE=3 SV=1
MEKRLMTPVHDPYSNAPALSELTLGKSTGYQAEYDASLLQGVPRKLNRDAIALSAELPFHGADIWTGYELSWLNAKGKPMVAIAEFILDYQSANLIESKSFKLYLNSYNQTRFESVEQVQQTLAKDLTACAEGEVVVKILEPKQFGAQRVVELPGTCIDDLDIEVDNYAFTSDYLIDSTDDKSVVAETLSSNLLKSNCLITSQPDWGSVMIRYQGPKIDREKLLRYLISFRQHNEFHEQCVERIFVDLKQFCHCAKLTVYARYTRRGGLDINPYRSDFENPPESHRLARQ

SEQ ID NO: 49675 - protein, 286 aa, Shewanella decolorationis
  REGION 1..286: note = tr|A0A5B8QYY3|A0A5B8QYY3_9GAMM NADPH-dependent 7-cyano-7-deazaguanine reductase OS=Shewanella decolorationis OX=256839 GN=queF PE=3 SV=1
MTHNHDPYSDAKELAGLTLGKATDYQAEYDASLLQGVPRSLNRNAINLSAESLPFHGADIWTAYELSWLNAKGKPMVAIADIQLSHESQNLIESKSFKLYLNSFNQTKFDNIEAVQKTLVRDLSECAQGQVTVKIIEPKSFGIQRVVELPGTCIDDLDIEVSDYDFNPDYLENSTDDKQIVAETLNSNLLKSNCLITSQPDWGSVMIRYQGPKIDREKLLRYLISFRQHNEFHEQCVERIFVDLKHYCHCAKLTVYARYTRRGGLDINPYRSDFEHPGESHRLARQ

SEQ ID NO: 49676 - protein, 351 aa, Shewanella decolorationis
  REGION 1..351: note = tr|V1DI85|V1DI85_9GAMM NADPH-dependent 7-cyano-7-deazaguanine reductase OS=Shewanella decolorationis S12 OX=1353536 GN=queF PE=3 SV=1
MIHQTHLEYTKIAHPAGNIAVIRLKLIGKTDDSFAKIYREQADKTLKHNPISGIMCAYFDMETVLMTHNHDPYSDAKELAGLTLGKATDYQAEYDASLLQGVPRSLNRNAINLSAESLPFHGADIWTAYELSWLNAKGKPMVAIADIQLSHESQNLIESKSFKLYLNSFNQTKFDNIETVQKTLVRDLSECAQGQVTVKIIEPKSFGIQRVVELPGTCIDDLDIEVSDYDFNPDYLENSTDDKQIVAETLNSNLLKSNCLITSQPDWGSVMIRYQGPKIDREKLLRYLISFRQHNEFHEQCVERIFVDLKHYCHCAKLTVYARYTRRGGLDINPYRSDFEHPGESHRLARQ

SEQ ID NO: 49677 - protein, 284 aa, Shewanella denitrificans
  REGION 1..284: note = sp|Q12P28|QUEF_SHEDO NADPH-dependent 7-cyano-7-deazaguanine reductase OS=Shewanella denitrificans (strain OS217 / ATCC BAA-1090 / DSM 15013); OX = 318161 GN=queF PE=3 S V=1
MTHNHDPYSDAQALKGLTLGQATQYQAEYDPSLLQGVPRKLNRDAIELTTELPFHGTDIWTGYELSWLNGKGKPVVAILQVHLDIHSVNLIESKSFKLYLNSLNQTRFNNLDAVKDTLTTDLSQCAQGEVTVKIIEPKHFTIERISELPGNCIDDLDIEIFDYQFNPEYLLDSTEEKNVAETLTSNLLKSNCLITSQPDWGSVMIRYQGPKIDREKLLRYLISFRQHNEFHEQCVERIFMDLKQYCHCAKLTVYARYTRRGGLDINPFRSDFEQAPDSHRLARQ

SEQ ID NO: 49678 - protein, 285 aa, Shewanella fodinae
  REGION 1..285: note = tr|A0A4R2FKD1|A0A4R2FKD1_9GAMM NADPH-dependent 7-cyano-7-deazaguanine reductase OS=Shewanella fodinae; OX = 552357 GN=queF PE=3 SV=1
MTQNQPPYDNAEALVNLTLGKATQYQAHYSPTLLQPVPRKLNRDALSLTEPMPFKGVDIWTAYELSWLNSKGKPMVAIAEVQLDANSRNLVESKSFKLYLNSFNQTKIESIEKLQQLLEADLSRCAEGNVEVHIIEPKQFASLRIKELPGTCIDEQDIEVVEYSFNSDWLRNSTDSKQMVAETLTSNLLKSNCLITSQPDWGSVMIRYQGPKIDREKLLRYLISFRQHNEFHEQCVERIFNDLKRYCKCSKLTVYARYTRRGGLDINPFRSDFEHAPENQRLARQ

SEQ ID NO: 49679 - protein, 285 aa, Shewanella frigidimarina
  REGION 1..285: note = sp|Q085G4|QUEF_SHEFN NADPH-dependent 7-cyano-7-deazaguanine reductase OS=Shewanella frigidimarina (strain NCIMB 400) OX=318167 GN=queF PE=3; SV = 1
MTHNHDPYSDAAALKGLTLGQATAYQAEYDASLLQGVPRKLNRDAIQLSGELPFHGTDIWTGYELSWLNAKGKPVVAILEVQLDINSVNLIESKSFKLYLNSFNQTKFDSVEAVQETLSRDLAACAEGEVTVKVIEPKHFNLERIIDLPGTCIDDLDIEVTEYEFNPDHLIGGTDPDKNVAETLNSNLLKSNCLITSQPDWGSVMVRYQGPKIDREKLLRYLISFRQHNEFHEQCVERIFVDLKKYCQCTKLTVYARYTRRGGLDINPYRSDFENPPESNRLARQ

SEQ ID NO: 49680 - protein, 285 aa, Shewanella frigidimarina
  REGION 1..285: note = tr|A0A106BWN4|A0A106BWN4_SHEFR NADPH-dependent 7-cyano-7-deazaguanine reductase OS=Shewanella frigidimarina OX=56812 GN=queF PE=3 SV=1
MTHNHDPYSDAAALKGLTLGQATAYQAEYDASLLQGVPRKLNRDAIELSGELPFHGTDIWTGYELSWLNAKGKPVVAILEVQLDINSVNLIESKSFKLYLNSFNQTKFDSVEAVQETLSRDLAACAEGEVTVKVIEPKHFNLERIIDLPGTCIDDLDIEVTEYEFNPDHLIGGTDPDKNVAETLNSNLLKSNCLITSQPDWGSVMVRYQGPKIDREKLLRYLISFRQHNEFHEQCVERIFVDLKKYCQCTKLTVYARYTRRGGLDINPYRSDFENPPESNRLARQ

SEQ ID NO: 49681 - protein, 290 aa, Shewanella halifaxensis
  REGION 1..290: note = tr|B0TPA1|B0TPA1_SHEHH NADPH-dependent 7-cyano-7-deazaguanine reductase OS=Shewanella halifaxensis (strain HAW-EB4) OX=458817 GN=queF PE=3 SV=1
METVLMTQHHDPYSNAPELSELTLGKSTGYQEQYDASLLQGVPRKLNRDAIALTQELPFHGCDIWTGYELSWLNAKGKPMVAIAEFSLSFDSKYLIESKSFKLYLNSYNQTRFDSLQAVQERLTQDLSACADGEVTVKVIEPKQFSHQRIIELPGTCIDDLDIEVDDYRFNPDYLVDSVDNKAIVAETLTSNLLKSNCLITSQPDWGTVMIRYQGPKIDREKLLRYLISFRQHNEFHEQCVERIFVDLKRFCQCSKLTVYARYTRRGGLDINPYRSDFEHPAENQRLARQ

SEQ ID NO: 49682 - protein, 290 aa, Shewanella hanedai
  REGION 1..290: note = tr|A0A553JPF2|A0A553JPF2_SHEHA NADPH-dependent 7-cyano-7-deazaguanine reductase OS=Shewanella hanedai; OX = 25 GN=queF PE=3 SV=1
MEKPLMTQVHDPYSDAKALSELTLGKATGYQSEYDASLLQGVPRKLNRDAIELIDTLPFHGTDIWTGYELSWLNAKGKPMVAIAEFHLSFDSEHLIESKSFKLYLNSFNQTKFDSIELVQSTLADDLSRCANGEVLVKVIEPKHFTHQRIVELPGTCIDDLDIEIEDYNFNPDYLLDSTDDKSMVAETLNSNLLKSNCLITSQPDWGSVMIRYQGPKIDREKLLRYLISFRQHNEFHEQCIERIFVDLKRFCHCAKLTVYARYTRRGGLDINPYRSDFEQPSESHRLARQ

SEQ ID NO: 49683 - protein, 285 aa, Shewanella livingstonensis
  REGION 1..285: note = tr|A0A3G8LVK2|A0A3G8LVK2_9GAMM NADPH-dependent 7-cyano-7-deazaguanine reductase OS=Shewanella livingstonensis OX=150120 GN=queF PE=3 SV=1
MTHNHDPYSDADALKGLTLGRATAYQAEYDASLLQGVPRKLNRDAIELSGGLPFHGTDIWTGYELSWLNAKGKPIVAILEVQLDINSVNLIESKSFKLYLNSFNQTKFDSVEAVQETLSQDLGICAQGELTVKVIEPKYFNLERIIDLPGTCIDELDIEVDEYAFNPDHLINSTDPDKNVAETLNSNLLKSNCLITSQPDWGSVMIRYQGPKIDREKLLRYLISFRQHNEFHEQCVERIFVDLKKYCQCTKLTVYARYTRRGGLDINPYRSDFENPPESNRLARQ

SEQ ID NO: 49684 - protein, 296 aa, Shewanella loihica
  REGION 1..296: note = tr|A3QGC2|A3QGC2_SHELP NADPH-dependent 7-cyano-7-deazaguanine reductase OS=Shewanella loihica (strain ATCC BAA-1088 / PV-4) OX=323850 GN=queF PE=3 SV=1
MCAYFDMEKRLMTQVHDPYRDAPALSKLTLGKSTGYQAQYDASLLQGVPRQLNRDAIALGDTLPFHGADIWTGYELSWLNAKGKPMVAIAEFILDFNSDNLIESKSFKLYLNSFNQTRFDSIEQVQQTLAKDLSACAGGEVVVKIIEPKQFAHQRVVELPGTCIDDLDIEIDSYEFSSDYLIDSTDDKSVVAETLTSNLLKSNCLITSQPDWGSVMIRYQGPKIDREKLLRYLISFRQHNEFHEQCVERIFVDLKRLCHCAKLTVYARYTRRGGLDINPYRSDFENPPENHRLARQ

SEQ ID NO: 49685 - protein, 287 aa, unidentified
  source 1..287: note = Shewanella mangrovi
  REGION 1..287: note = tr|A0A094JBA1|A0A094JBA1_9GAMM NADPH-dependent 7-cyano-7-deazaguanine reductase OS=Shewanella mangrovi; OX = 1515746 GN=queF PE=3 SV=1
MSQNPHSDPYQQAPELAELTLGKSVSYQQHYAPELLQPVPRKLNRDAIALAEPLPFHGTDLWTAYELSWLNHKGKPMVALAEVEIDAFSQNLIESKSFKLYLNSLNQTQFESVEALQHVLSKDLSRCADGQVKVTIIEPKQFSNQRVGELPGHCIDDLDIEVSDYAFSRDWLLDSTDDKQIVAETLNSNLLKSNCLITSQPDWGSVMIRYQGPKINRESLLRYLISFRQHNEFHEQCVERIFTDLKQLCHCTKLTVYARYTRRGGLDINPFRSDFEQLQEKHRLARQ

SEQ ID NO: 49686 - protein, 290 aa, Shewanella marisflavi
  REGION 1..290: note = tr|A0A4Y6IZ05|A0A4Y6IZ05_9GAMM NADPH-dependent 7-cyano-7-deazaguanine reductase OS=Shewanella marisflavi; OX = 260364 GN=queF PE=3 SV=1
MEKRLMTQVHDPYHDAPALSQLTLGKSTGYQANYDASLLQGVPRKLNRDAIALGDTLPFHGSDIWTGYELSWLNAKGKPMVAIAEFILDFNSDNLIESKSFKLYLNSFNQTRFESIEAVQQTLAKDLSACAGGEVVVKIIEPKQFAHQRVVELPGTCIDDLDIEVDDYDFSSDYLIDSTDDKSIVAETLTSNLLKSNCLITSQPDWGSVMIRYQGPKIDREKLLRYLISFRQHNEFHEQCVERIFVDLKRLCHCAKLTVYARYTRRGGLDINPYRSDFENPPENHRLARQ

SEQ ID NO: 49687 - protein, 285 aa, Shewanella morhuae
  REGION 1..285: note = tr|A0A1N6TP75|A0A1N6TP75_9GAMM NADPH-dependent 7-cyano-7-deazaguanine reductase OS=Shewanella morhuae; OX = 365591 GN=queF PE=3 SV=1
MTQNHDPYSDAQALAGLTLGKATDYQAEYDASLLQGVPRSLNRNAIALTETLPFHGADIWTGYELSWLNTKGKPMVAIVEVYLSYESLNLIESKSFKLYLNSFNQTKFDNIDSLQKTLTQDLGQCAQGDVNIKIIEPKNFAIQRIIELPGTCIDDLDIEVSDYTFNPDYLENSTDEKQIVAETLNSNLLKSNCLITSQPDWGSVMIRYQGPKIDREKLLRYLISFRQHNEFHEQCVERIFVDLKRFCHCTKLTVYARYTRRGGLDINPYRSDFEQPGENHRLARQ

SEQ ID NO: 49688 - protein, 286 aa, Shewanella oneidensis
  REGION 1..286: note = sp|Q8EGJ4|QUEF_SHEON NADPH-dependent 7-cyano-7-deazaguanine reductase OS=Shewanella oneidensis (strain MR-1) OX=211586 GN=queF PE=3 SV=2
MTQNHDPYSDAKELAGLTLGKATDYQAEYDASLLQGVPRSLNRNAINLTAESLPFHGADIWTAYELSWLNAKGKPMVAIADIQLSHASQNLIESKSFKLYLNSFNQTKFDNLDAVQKTLVKDLSECAQGDVTVKIIEPKSFGIQRVVELPGTCIDDLDIEVSDYDFNPEYLENSTDEKQIVAETLNSNLLKSNCLITSQPDWGSVMIRYQGPKIDREKLLRYLISFRQHNEFHEQCVERIFVDLKHYCHCAKLTVYARYTRRGGLDINPYRSDFEHPGESHRLARQ

SEQ ID NO: 49689 - protein, 286 aa, Shewanella oneidensis
  REGION 1..286: note = tr|A0A2W5DQY3|A0A2W5DQY3_SHEOE NADPH-dependent 7-cyano-7-deazaguanine reductase OS=Shewanella oneidensis; OX = 70863 GN=queF PE=3 SV=1
MTQNHDPYSDAKELASLTLGKATDYQAEYDASLLQGVPRSLNRNAINLTAESLPFHGADIWTAYELSWLNAKGKPMVAIADIQLSHASQNLIESKSFKLYLNSFNQTKFDNLDAVQKTLVKDLSECAQGDVNVKIIEPKSFGIQRVVELPGTCIDDLDIEVSDYDFNPDYLESSTDEKQIVAETLNSNLLKSNCLITSQPDWGSVMIRYQGPKIDREKLLRYLISFRQHNEFHEQCVERIFVDLKHYCHCAKLTVYARYTRRGGLDINPYRSDFEHPGESHRLARQ

SEQ ID NO: 49690 - protein, 290 aa, Shewanella pealeana
  REGION 1..290: note = tr|A8H6N3|A8H6N3_SHEPA NADPH-dependent 7-cyano-7-deazaguanine reductase OS=Shewanella pealeana (strain ATCC 700345 / ANG-SQ1) OX=398579 GN=queF PE=3 SV=1
METVLMTQHHDPYSNAPELSELTLGKSTGYQEQYDASLLQGVPRKLNRDAIGLTQELPFHGCDIWTGYELSWLNAKGKPMVAIAEFSLSFDSKNLIESKSFKLYLNSYNQTRFENAQAVQERLVQDLSACAMGDVTVKVIEPKQFSHQRIVELPGTCIDDLDIEVDDYSFNPDYLVESVDNKAIVAETLTSNLLKSNCLITSQPDWGTVMIRYQGPKIDREKLLRYLISFRQHNEFHEQCVERIFVDLKRFCQCAKLTVYARYTRRGGLDINPYRSDFEHPAENQRLARQ

SEQ ID NO: 49691 - protein, 286 aa, Shewanella piezotolerans
  REGION 1..286: note = tr|B8CQA5|B8CQA5_SHEPW NADPH-dependent 7-cyano-7-deazaguanine reductase OS=Shewanella piezotolerans (strain WP3 / JCM 13877) OX=225849 GN=queF; PE = 3 SV=1
MMTKHHDPYSDAAELSELTLGKSTGYQEQYDASLLQGVPRKLNRDAIGLNDDLPFHGCDIWTGYELSWLNAKGKPMVAIAEFSLDYQSANLIESKSFKLYLNSFNQTKFDDVQTVQATLSRDLCECAQGDVSVKVIEPKQFSHQRIVELPGTCIDALDIEVDDYSFNPDYLVDSVDDKVMVAETLTSNLLKSNCLITSQPDWGTVMIRYQGPKIDREKLLRYLISFRQHNEFHEQCVERIFVDLKRFCQCAKLTVYARYTRRGGLDINPYRSDFENPADNHRLARQ

SEQ ID NO: 49692 - protein, 285 aa, Shewanella psychrophila
  REGION 1..285: note = tr|A0A1S6HP81|A0A1S6HP81_9GAMM NADPH-dependent 7-cyano-7-deazaguanine reductase OS=Shewanella psychrophila OX=225848 GN=queF PE=3 SV=1
MTQVHDPYTDAEALSGLTLGKATGYQSEYEASLLQGVPRKLNRDAIELNESLPFHGTDIWTGYELSWLNAKGKPVVAIAEFQLSFDSENLIESKSFKLYLNSFNQTKFDNLEQVQATLTQDLSNCAVGNVSVKVFEPKQFASQRIVELPGTCIDDLDIEVDDYKFNPQYLENSTDEKAVVAETLNSNLLKSNCLITSQPDWGSVMIRYQGPKIDREKLLRYLISFRQHNEFHEQCIERIFVDLKRFCHCAKLTVYARYTRRGGLDINPYRSDFETPPENHRLARQ

SEQ ID NO: 49693 - protein, 296 aa, Shewanella putrefaciens
  REGION 1..296: note = tr|A4Y524|A4Y524_SHEPC NADPH-dependent 7-cyano-7-deazaguanine reductase OS=Shewanella putrefaciens (strain CN-32 / ATCC BAA-453) OX=319224; GN = queF PE=3 SV=1
MCAYFDMETVLMTKNHDPYSDAKALTGLTLGKATDYQAEYDASLLQGVPRSLNRNAINLTEALPFHGADIWTGYELSWLNTKGKPMVAIAEIHLSYQSLNLIESKSFKLYLNSFNQTKFSNIDAVQKTLVQDLSHCAQGDVTVRIIEPRSFGSQRIVELPGTCIDDLDIEVSDYSFNPDYLENSTDDKQIVAETLNSNLLKSNCLITSQPDWGSIMIRYQGPKIDREKLLRYLISFRQHNEFHEQCVERIFVDLKRYCHCAKLTVYARYTRRGGLDINPYRSDFEQPGEGHRLARQ

SEQ ID NO: 49694 - protein, 285 aa, Shewanella putrefaciens; identical to SEQ ID NO: 49667
  REGION 1..285: note = tr|A0A448ENP1|A0A448ENP1_SHEPU NADPH-dependent 7-cyano-7-deazaguanine reductase OS=Shewanella putrefaciens OX=24 GN=queF PE=3 SV=1

SEQ ID NO: 49695 - protein, 290 aa, Shewanella sediminis
  REGION 1..290: note = tr|A8FY60|A8FY60_SHESH NADPH-dependent 7-cyano-7-deazaguanine reductase OS=Shewanella sediminis (strain HAW-EB3) OX=425104 GN=queF PE=3 SV=1
MENLLMTQVHDPYTGAEALSELTLGKATGYQAEYDASLLQGVPRKLNRDAIGLNETLPFHGTDIWTGYELSWLNAKGKPMVAIAEFYLSFDSQNLIESKSFKLYLNTFNQTKFDSVEQVQSTLADDLSQCAEGEVLVRVLEPKQFSTQRVVELPGTCIDDLDIEVNDYSFNPDYLQDSTDDKAVVAETLNSNLLKSNCLITSQPDWGSVMIRYQGPKIDREKLLRYLISFRQHNEFHEQCIERIFVDLKRFCNCSKLTVYARYTRRGGLDINPYRSDFENPPESHRLARQ

SEQ ID NO: 49696 - protein, 286 aa, Shewanella sp.
  REGION 1..286: note = sp|Q0HT42|QUEF_SHESR NADPH-dependent 7-cyano-7-deazaguanine reductase OS=Shewanella sp. (strain MR-7) OX=60481 GN=queF PE=3 SV=1
MTHNHDPYSDAKELAGLTLGKATDYQAEYDASLLQGVPRSLNRNAINLTAESLPFHGADIWTAYELSWLNAKGKPMVAIADIQLSHESQNLIESKSFKLYLNSFNQTKFDNIDAVQKTLVQDLGECAQGQVTVKIIEPKSFGIQRVVELPGTCIDDLDIEVSDYDFNPDYLENSTDDKQIVAETLNSNLLKSNCLITSQPDWGSVMIRYQGPKIDREKLLRYLISFRQHNEFHEQCVERIFVDLKHYCHCTKLTVYARYTRRGGLDINPYRSDFEHPGESHRLARQ

SEQ ID NO: 49697 - protein, 285 aa, Shewanella sp.
  REGION 1..285: note = tr|A0A2K9A0W5|A0A2K9A0W5_9GAMM NADPH-dependent 7-cyano-7-deazaguanine reductase OS=Shewanella sp. Pdp11; OX = 2059264 GN=queF PE=3 SV=1
MTQNHDPYSDAQALVGLTLGKATDYQAEYDASLLQGVPRSLNRNAIALTGTLPFHGADIWTGYELSWLNAKGKPMVAIAEFHLSYESLNLIESKSFKLYLNSFNQTKFDSLDSLQKTLVADLSQCAQGDVSVKIIEPKSFGIQRIIELPGTCIDDLDIEVSDYSFNPDYLENSTDDKQTVAETLNSNLLKSNCLITSQPDWGSVMIRYQGPKIDREKLLRYLISFRQHNEFHEQCVERIFVDLKRFCHCTKLTVYARYTRRGGLDINPYRSDFEQPGESHRLARQ

SEQ ID NO: 49698 - protein, 285 aa, Shewanella violacea
  REGION 1..285: note = tr|D4ZHN3|D4ZHN3_SHEVD NADPH-dependent 7-cyano-7-deazaguanine reductase OS=Shewanella violacea (strain JCM 10179 / CIP 106290 / LMG 19151 / DSS12); OX = 637905 GN=queFPE=3 SV=1
MTQVHDPYTDAEALRDLTLGKATGYQAEYDASLLQGVPRKLNRDAIKLNESLPFHGTDIWTGYELSWLNAKGKPVVAIAEFHLSFDSENLIESKSFKLYLNSFNQTKFDNIEQVKTTLTQDLSKCAVGEISVKIFEPKQFASQRIVELPGTCIDDLDIEVDDYNFNPLYLENSTDEKAVVAETLNSNLLKSNCLITSQPDWGSVMIRYQGPKIDREKLLRYLISFRQHNEFHEQCIERIFVDLKRFCNCTKLTVYARYTRRGGLDINPYRSDFENPPESHRLARQ

SEQ ID NO: 49699 - protein, 296 aa, Shewanella woodyi
  REGION 1..296: note = tr|B1KNW1|B1KNW1_SHEWM NADPH-dependent 7-cyano-7-deazaguanine reductase OS=Shewanella woodyi (strain ATCC 51908 / MS32) OX=392500 GN=queF PE=3 SV=1
MITYFAMEKPLMTQVHDPYSNAQALSELTLGKATGYQSEYDASLLQGVPRKLNRDAIGLSNTLPFHGSDIWTGYELSWLNAKGKPMVAIAEFLLSFDSENLIESKSFKLYLNSFNQTKFENLEQVQTTLATDLSQCAKGEVLVKVIEPKQFIHQRVVELPGTCIDDLDIEVEDYSFNPEYLIDSTDEKAMVAETLNSNLLKSNCLITSQPDWGSVMIRYQGPKIDREKLLRYLISFRQHNEFHEQCIERIFVDLKRFCHCAKLTVYARYTRRGGLDINPYRSDFEHPPESHRLARQ

SEQ ID NO: 49700 - protein, 340 aa, Shewanella xiamenensis
  REGION 1..340: note = tr|A0A073L2F4|A0A073L2F4_9GAMM NADPH-dependent 7-cyano-7-deazaguanine reductase OS=Shewanella xiamenensis; OX = 332186 GN=queF PE=3 SV=1
MAHLAGNIAVIRLKLIGKTDDSFAKIYREQADKTLKHNPISGIMCAYFDMETVLMTQNHDPYSDAKELASLTLGKATDYQAEYDASLLQGVPRSLNRNAINLTAESLPFHGADIWTAYELSWLNAKGKPMVAIADIQLSHASQNLIESKSFKLYLNSFNQTKFDNLDAVQKTLVKDLSECAQGDVNVKIIEPKSFGIQRVVELPGTCIDDLDIEVSDYDFNPDYLENSTDEKQIVAETLNSNLLKSNCLITSQPDWGSVMIRYQGPKIDREKLLRYLISFRQHNEFHEQCVERIFVDLKHYCHCAKLTVYARYTRRGGLDINPYRSDFEHPGESHRLARQ

SEQ ID NO: 49701 - protein, 286 aa, Shewanella xiamenensis
  REGION 1..286: note = tr|A0A1E3V132|A0A1E3V132_9GAMM NADPH-dependent 7-cyano-7-deazaguanine reductase OS=Shewanella xiamenensis; OX = 332186 GN=queF PE=3 SV=1
MTQNHDPYSDAKELASLTLGKATDYQAEYDASLLQGVPRSLNRNAINLTAESLPFHGADIWTAYELSWLNAKGKPMVAIADIQLSHASQNLIESKSFKLYLNSFNQTKFDNLDAVQKTLVKDLSECAQGDVNVKIIEPKSFGIQRVVELPGTCIDDLDIEVSDYDFNPDYLENSTDEKQIVAETLNSNLLKSNCLITSQPDWGSVMIRYQGPKIDREKLLRYLISFRQHNEFHEQCVERIFVDLKHYCHCAKLTVYARYTRRGGLDINPYRSDFEHPGESHRLARQ

SEQ ID NO: 49702 - protein, 282 aa, Shigella boydii; identical to SEQ ID NO: 45963
  REGION 1..282: note = sp|B2TZD9|QUEF_SHIB3 NADPH-dependent 7-cyano-7-deazaguanine reductase OS=Shigella boydii serotype 18 (strain CDC 3083-94 / BS512) OX=344609 GN=queF; PE = 3 SV=1

SEQ ID NO: 49703 - protein, 282 aa, Shigella boydii
  REGION 1..282: note = tr|I6D4E2|I6D4E2_SHIBO NADPH-dependent 7-cyano-7-deazaguanine reductase OS=Shigella boydii 965-58; OX = 766138 GN=queF PE=3 SV=1
MSSYANHQALAGLTLGKSTDYRDTYDASLLQGVPRNLNRDPLGLKADNLPFHGTDIWTLYELSWLNAKGLPQVAVGHVELDYTSVNLIESKSFKLYLNSFNQTRFNNWDEVRQTLERDLSTCAQGKISVALYRLDELEGQPIGHFNGTCIDDQDITIDNYEFTTDYLENATSGEKVVEETLVSHLLKSNCLITHQPDWGSIQIQYRGRQIDREKLLRYLVSFRHHNEFHEQCVERIFNDLLRFCQPEKLSVYARYTRRGGLDINPWRSNSDFVPSTTRLVRQ

SEQ ID NO: 49704 - protein, 282 aa, Shigella dysenteriae
  REGION 1..282: note = sp|Q32CC4|QUEF_SHIDS NADPH-dependent 7-cyano-7-deazaguanine reductase OS=Shigella dysenteriae serotype 1 (strain Sd197) OX=300267 GN=queF PE=3 SV=1
MSSYANHQALAGLTLGKSTDYRDTYDASLLQGVPRSLNRDPLGLKADNLPFHGADIWTLYELSWLNAKGLPQVAVGHVELDYTSVNLIESKSFKLYLNSFNQTSFNNWDEVLKTLERDLSTCAQGKVSVALYRLDELEGQPIGHFNGTCIDDQDITIDNYEFTTDYLENATCGEKVVEETLVSHLLKSNCLITHQPDWGSIQIQYRGRQIDREKLLRYLVSFRHHNEFHEQCVERIFNDLLRFCQPEKLSVYARYTRRGGLDINPWRSNSDFVPSTTRLVRQ

SEQ ID NO: 49705 - protein, 282 aa, Shigella dysenteriae; identical to SEQ ID NO: 49704
  REGION 1..282: note = tr|E2X9F6|E2X9F6_SHIDY NADPH-dependent 7-cyano-7-deazaguanine reductase OS=Shigella dysenteriae 1617 OX=754093 GN=queF PE=3 SV=1

SEQ ID NO: 49706 - protein, 282 aa, Shigella flexneri
  REGION 1..282: note = sp|Q0T1R0|QUEF_SHIF8 NADPH-dependent 7-cyano-7-deazaguanine reductase OS=Shigella flexneri serotype 5b (strain 8401) OX=373384 GN=queF PE=3 SV=1
MSSYANHQALAGLTLGKSTDYRDTYDASLLQGVPRSLNRDPLGLKADNLPFHGTDIWTLYELSWLNAKGLPQVAVGHVELDYTSVNLIESKSFKLYLNSFNQTRFNNWDEVRQTLERDLSTCAQGKISVALYRLDELEGQPIGHFNGTCIDDQDITIDNYEFTTDYLENATSGEKVVEETLVSHLLKSNCLITHQPDWGSIQIQYRGRQIDREKLLRYLVSFRHHNEFHEQCVERIFNDLLRFCQPEKLSVYARYTRRGGLDINPWRSNSDFVPSTTRLVRQ

SEQ ID NO: 49707 - protein, 282 aa, Shigella flexneri; identical to SEQ ID NO: 49706
  REGION 1..282: note = tr|A0A380AV79|A0A380AV79_SHIFL NADPH-dependent 7-cyano-7-deazaguanine reductase OS=Shigella flexneri; OX = 623 GN=queF PE=3 SV=1

SEQ ID NO: 49708 - protein, 282 aa, Shigella sonnei; identical to SEQ ID NO: 45963
  REGION 1..282: note = sp|Q3YY62|QUEF_SHISS NADPH-dependent 7-cyano-7-deazaguanine reductase OS=Shigella sonnei (strain Ss046) OX=300269 GN=queF PE=3 SV=1

SEQ ID NO: 49709 - protein, 282 aa, Shigella sonnei
  REGION 1..282: note = tr|A0A236JB34|A0A236JB34_SHISO NADPH-dependent 7-cyano-7-deazaguanine reductase OS=Shigella sonnei OX=624; GN = queF PE=3 SV=1
MSSYANHQALAGLTLGKSTDYRDTYDASLLQGVPRSLNRDPLGLKADNLPFHGTDIWTLYELSWLNAKGLPQVAVGHVELDYTSANLIESKSFKLYLNSFNQTRFNNWDEVRQTLERDLSTCAQGKVSVALYRLDELEGQPIGHFNGTCIDDQDITIDNYEFTTDYLENATSGEKVVEETLVSHLLKSNCLITHQPDWGSIQIQYRGRQIDREKLLRYLVSFRHHNEFHEQCVERIFNDLLRFCQPEKLSVYARYTRRGGLDINPWRSNSDFVPSTTRLVRQ

SEQ ID NO: 49710 - protein, 281 aa, Shigella sp.
  REGION 1..281: note = tr|A0A1D3DKM5|A0A1D3DKM5_9ENTR NADPH-dependent 7-cyano-7-deazaguanine reductase OS=Shigella sp. FC1655; OX = 1898038 GN=queF PE=3 SV=1
MSLYQGDKSLEALSLGKETQYHDQYDAGLLQGVPRSLNRDSLSLTAENLPFHGGDIWTMYELSWLNNRGLPQVAIGHVELDATTENLIESKSFKLYLNSFNQTRFESWDAVEKTLLNDLTTCAKGNVNLTIYPLSHFTSQPIVDFAGECIDEQDIEIDNYQFDTQWLNESTTDTLVEETLVSHLLKSNCLITNQPDWGSVAIQYKGKKINREKLLRYLVSFRQHNEFHEQCVERIFHDIMQLCAPETLTVYARYTRRGGLDINPWRSNCEFVPEINRLARQ

SEQ ID NO: 49711 - protein, 282 aa, Shigella sp.
  REGION 1..282: note = tr|A0A1E3MVJ8|A0A1E3MVJ8_9ENTR NADPH-dependent 7-cyano-7-deazaguanine reductase OS=Shigella sp. FC569; OX = 1892897 GN=queF PE=3 SV=1
MSSYANHQALAGLTLGKSTDYRDTYDASLLQGVPRSLNRDPLGLKADNLPFHGTDIWTLYELSWLNAKGLPQVAVGHVELDYTSVNLIESKSFKLYLNSFNQTRFNNWDEVRQTLERDLSTCAQGKVSVALYRLDELEGQPIGHFNGTCIDDQDITIDNYEFTTDYLENATSGEKVVEETLVSHLLKSNCLITHQPDWGSIQIQYRGRQIDREKLLRYLVSFRHHNEFHEQCVERIFNDLLRFCQPEKLSVYARYTRRGGLDINPWRSNNDFVPSTTRLVRQ

SEQ ID NO: 49712 - protein, 154 aa, Shimia marina
  REGION 1..154: note = tr|A0A0N7LS26|A0A0N7LS26_9RHOB NADPH-dependent 7-cyano-7-deazaguanine reductase OS=Shimia marina; OX = 321267 GN=queF PE=3 SV=1
MSEDIYSNLKQLGGATVMPTSPEEAELERVENPQADVAYNVRFTAPEFTSLCPMTGQPDFAHLVIDYVPGKWLVESKSLKLFLGSFRNHGAFHEDCTVSIARRLADFLEPQWLRIGGYWYPRGGIPIDVFWQTGAMPESVWIPDQGVPPYRGRG

SEQ ID NO: 49713 - protein, 282 aa, Shimwellia blattae
  REGION 1..282: note = tr|I2B5Z6|I2B5Z6_SHIBC NADPH-dependent 7-cyano-7-deazaguanine reductase OS=Shimwellia blattae (strain ATCC 29907 / DSM 4481 / JCM 1650 / NBRC 105725 / CDC 9005-74) O X=630626 GN=queF PE=3 SV=1
MPSYENHQALSNLTLGKKTAYKDTYDASLLQPVPRSLNRDPLGLRADALPFHGRDIWTLYELSWLNANGLPQVAVGHVELSADSLNLVESKSFKLYLNSFNQTRFPDRDAVCQTLQRDLQHCAGGDVSVALYPLDAIEGQPIGAFAGECIDDQPGLVIDNYTFSAEYLQGAAGTQQVEETLVSHLLKSNCLITHQPDWGSVQIQYRGGQIDREKLLRYLVSFRHHNEFHEQCVERIFNDIMRFCRPEQLSVYARYTRRGGLDINPWRSNTTFTPALARLVRQ

SEQ ID NO: 49714 - protein, 154 aa, Shinella granuli
  REGION 1..154: note = tr|A0A4V2RJI3|A0A4V2RJI3_9RHIZ NADPH-dependent 7-cyano-7-deazaguanine reductase OS=Shinella granuli; OX = 323621 GN=queF PE=3 SV=1
MSKTDVSGLSQLGQAVDLPAGPETAVLEKVPSNHAGTDFVVRFTAPEFTSLCPMTGQPDFAHIVIDYIPDGWLVESKSLKLYLHSFRNHGAFHEDCTIDIAKRLVGLLEPKWLRIGAYWYPRGGIPIDVFWQTGDAPKGVWIPDQGVQPYRGRG

SEQ ID NO: 49715 - protein, 154 aa, Shinella sp.
  REGION 1..154: note = tr|A0A5F0IPM9|A0A5F0IPM9_9RHIZ NADPH-dependent 7-cyano-7-deazaguanine reductase OS=Shinella sp. MEC089; OX = 1967500 GN=queF PE=3 SV=1
MSKTDVSGLSQLGQKVDLPADPDAAVLERVPSSHAGTDFVVRFTAPEFTSLCPMTGQPDFAHIVIDYIPNGWLVESKSLKLYLHSFRNHGAFHEDCTIDIAKRLVDLLEPKWLRIGAYWYPRGGIPIDVFWQTGDAPQGVWIPEQGVQPYRGRG

SEQ ID NO: 49716 - protein, 154 aa, Shinella sp.; identical to SEQ ID NO: 49715
  REGION 1..154: note = tr|A0A4Y8QPK8|A0A4Y8QPK8_9RHIZ NADPH-dependent 7-cyano-7-deazaguanine reductase OS=Shinella sp. MEC087; OX = 1967501 GN=queF PE=3 SV=1

SEQ ID NO: 49717 - protein, 281 aa, unidentified
  source 1..281: note = Siccibacter turicensis
  REGION 1..281: note = tr|A0A2P8VNL4|A0A2P8VNL4_9ENTR NADPH-dependent 7-cyano-7-deazaguanine reductase OS=Siccibacter turicensis; OX = 357233 GN=queF PE=3 SV=1
MSSYENHQALQGLTLGKSTDYRDVYDAALLQAVPRSMNRLPLGLHDDALPFHGGDIWTLYELSWLNARGLPQVAVGLVELNATSVNLVESKSFKLYLNSFNQTRFDSWEQVRATLERDLSACAQGAVTVKLMRLDDVEGAPLARFEGECIDDQDIAIDSYAFNADYLSGAAGDEMVDETLVSHLLKSNCLITNQPDWGSVQIRYCGPKIDREKLLRYLVSFRHHNEFHEQCVERIFNDVQRFCQPQALSVYARYTRRGGLDINPWRSNVPFIPATGRLVRQ

SEQ ID NO: 49718 - protein, 153 aa, unidentified
  source 1..153: note = Siculibacillus lacustris
  REGION 1..153: note = tr|A0A4Q9VSS4|A0A4Q9VSS4_9RHIZ NADPH-dependent 7-cyano-7-deazaguanine reductase OS=Siculibacillus lacustris OX=1549641 GN=queF PE=3 SV=1
MTDFDTTALQLGHAVARPTDPASARLDRVPDPQADTRYMVRFTVPEFTSLCPVTGQPDFAHLVIDYVPDAWLVESKSLKLYLGSFRDHGAFHEDCTVRIGRRLVDLLAPHWLRIGGYWYPRGGIPIDVFWSTGPQPADLWIPDQGVAPYRGRG

SEQ ID NO: 49719 - protein, 139 aa, unidentified
  source 1..139: note = Sideroxydans lithotrophicus
  REGION 1..139: note = tr|D5CRW2|D5CRW2_SIDLE NADPH-dependent 7-cyano-7-deazaguanine reductase OS=Sideroxydans lithotrophicus (strain ES-1) OX=580332 GN=queF PE=3 SV=1
MTTQPTKTLETFPNPQPGRDYHIHMEIPEFTCLCPKTGQPDFATLILDYIADEKCVELKSLKLYIWSFRNEGHFHEDVTNRVLDDLVTATQPRFMRLTAKFYVRGGIFTNVVAEHRKAGWQPVPLVDLSQFQTQSNTRD

SEQ ID NO: 49720 - protein, 139 aa, unidentified
  source 1..139: note = Sideroxydans sp.
  REGION 1..139: note = tr|A0A1G3JFA2|A0A1G3JFA2_9PROT NADPH-dependent 7-cyano-7-deazaguanine reductase OS=Sideroxydans sp. RIFOXYD2_FULL_59_7 OX=1802156 GN=queF PE=3 SV=1
MTTKPGKTLETFPNPQPARDYHIHMEIPEFTCLCPKTGQPDFATLILDYIADQQCVELKSLKLYMWSFREEGHFHEDVTNRILDDLVAATQPRFMRLTAKFYVRGGIFTNVVAEHRKQGWQPAPRVELSSFHGQSNMRG

SEQ ID NO: 49721 - protein, 139 aa, unidentified
  source 1..139: note = Sideroxydans sp.
  REGION 1..139: note = tr|A0A1G3IKQ3|A0A1G3IKQ3_9PROT NADPH-dependent 7-cyano-7-deazaguanine reductase OS=Sideroxydans sp. GWF2_59_14 OX=1802154 GN=queF PE=3 SV=1
MTTQATKTLETFPNPQPKRDYHIHMEIPEFTCLCPKTGQPDFATLILDYIADEQCVELKSLKLYIWSFRNEGHFHEDVTNRVLDDLVAATQPRFMRLTAKFYVRGGIFTNVVAEHRKPGWQPAPLVDLTQFSTQSNTRG

SEQ ID NO: 49722 - protein, 154 aa, unidentified; identical to SEQ ID NO: 45905
  source 1..154: note = Silicibacter sp.
  REGION 1..154: note = tr|C9D361|C9D361_9RHOB NADPH-dependent 7-cyano-7-deazaguanine reductase OS=Silicibacter sp. TrichCH4B OX=644076 GN=queF PE=3 SV=1

SEQ ID NO: 49723 - protein, 279 aa, Simiduia agarivorans
  REGION 1..279: note = tr|K4KG14|K4KG14_SIMAS NADPH-dependent 7-cyano-7-deazaguanine reductase OS=Simiduia agarivorans (strain DSM 21679 / JCM 13881 / BCRC 17597 / SA1); OX = 1117647 GN=queFPE=3 SV=1
MSGVIENHGPSHLGKSSDYKDSYDASLLDPIPRALARQALELEGDLLPFKGADRWTAYELSWLDDRGKPCVAMAEFEFPCTSEFIVESKSFKLYLNSFNQSRFSSMQTVAKLMEKDLTDACGAPVMVRCLSMKQGLSMGMGHFAAESIDELAVDCDVYQPDAGLLARVENAPTVQEALCSDLLKSNCPVTGQPDWASLYVHYTGPAIDRTSLLRYIVSYRQHRDFHEHCVERIFLDILRRCTPEKLTVYARYTRRGGLDINPWRSNCGEQPEVLRLVRQ

SEQ ID NO: 49724 - protein, 156 aa, Simonsiella muelleri
  REGION 1..156: note = tr|V9H5Y3|V9H5Y3_9NEIS NADPH-dependent 7-cyano-7-deazaguanine reductase OS=Simonsiella muelleri ATCC 29453 OX=641147 GN=queF PE=3 SV=1
MRTESELNGITLLGNQKTEYRSDYAPEVLESFDNKHQGNDYFVKFVCPEFTSLCPMTGQPDFATIIIRYIPDVKMVESKSLKLYLFSFRNHGDFHEDCVNIVMKDLIQLMNPKYIEVFGEFTPRGGIAIHPFANFGRAGTPFEQMARERLFHHDMQ

SEQ ID NO: 49725 - protein, 283 aa, Simplicispira metamorpha
  REGION 1..283: note = tr|A0A4R2NEH3|A0A4R2NEH3_9BURK NADPH-dependent 7-cyano-7-deazaguanine reductase OS=Simplicispira metamorpha OX=80881 GN=queF PE=3 SV=1
MTPHTPEQSQLGKASAYADQYDASLLFPLARAGKRAEIGITAAPAFFGADLWTAFELSWLNLRGKPQVALAHITVPCETPNIIESKSFKLYLNSFNNTRFADAAEVQARIRADVSEAAWRGAAHPATVGVKLLLPDMFDREPVHELDGLNLDRLDVECTQYQPAPELLTAQFNEAPVNEVLVSHLLKSNCLVTGQPDWGSVQIAYSGPQIDQEGLLQYIVSFRNHNEFHEQCVERIFMDIWTRCKPIKLTVYARYTRRGGLDINPLRTSHPQALPRNIRTARQ

SEQ ID NO: 49726 - protein, 281 aa, Simplicispira sp.
  REGION 1..281: note = tr|A0A2U1C7E0|A0A2U1C7E0_9BURK NADPH-dependent 7-cyano-7-deazaguanine reductase OS=Simplicispira sp. 125; OX = 2135643 GN=queF PE=3 SV=1
MSSADQSPLGKASAYIDQYDASLLFPLPRAGKRAEIGITGNPPFMGADLWTAFELSWLNERGKPQVALAHITVPCETPNIIESKSFKLYLNSFNNTRFSGVEAVQARLRADLTEAAWRGAPQSASLGVRVLLPELFDREPVHELDGLNLDRLDLECKHYQPAPQLLRAAFDEAPVSEVLVSHLLKSNCLVTGQPDWGSVRIAYTGPQIEQEGLLQYIVSFRNHNEFHEQCVERIFMDLWTRCKPIKLEVYARYTRRGGLDINPWRTSHPMAPPPNVRTARQ

SEQ ID NO: 49727 - protein, 281 aa, Simplicispira sp.
  REGION 1..281: note = tr|A0A398C5A4|A0A398C5A4_9BURK NADPH-dependent 7-cyano-7-deazaguanine reductase OS=Simplicispira sp. NY-02 OX=2315688 GN=queF PE=3 SV=1
MNTPEQSPLGKTSARPEHYDPALLFPIARAAKRAEIGVGAQPQFFGADLWTAYELSWLNPRGKPQVALAHLTVPCESPNLIESKSLKLYLGSYANTPFASPQDVAARMRTDLSEAAWRGSALGGSVGVRLLLPEAFDREPIHELDGLNLDRLDLECSRYTPAPDLLHAAFDEAPVSEVLTSNLLKSNCLVTGQPDWGSVRIAYSGPQIDQEGLLQYIVSFRNHNEFHEQCIERIFMDLWARCQPIKLEVYGRYTRRGGLDINPWRTSHPMAIPPNVRTARQ

SEQ ID NO: 49728 - protein, 281 aa, unidentified
  source 1..281: note = Simplicispira suum
  REGION 1..281: note = tr|A0A2S0N1K5|A0A2S0N1K5_9BURK NADPH-dependent 7-cyano-7-deazaguanine reductase OS=Simplicispira suum; OX = 2109915 GN=queF PE=3 SV=1
MNTPEQSPLGKDSATPEHYDPALLFPIARAAKRAEIGVGAQPRFFGADLWTAFELSWLNARGKPQVALAHLTVPCESPNIIESKSLKLYLGSFANTPFASPQDVAAHIRSDLSEAAWAGSERNGSVGVRLLLPELFEREAVQELDGLSLDRLDIECTRYTPAPDLLRAAHDEAPVSEVLTSNLLKSNCLVTGQPDWGSIRIAYSGAQMDQESLLQYLVSFRNHNEFHEQCVERIFMDLWTHCQPVKLEVYARYTRRGGLDINPWRTSHPMAPPPNVRTARQ

SEQ ID NO: 49729 - protein, 118 aa, Singulisphaera acidiphila
  REGION 1..118: note = tr|L0DN30|L0DN30_SINAD NADPH-dependent 7-cyano-7-deazaguanine reductase OS=Singulisphaera acidiphila (strain ATCC BAA-1392 / DSM 18658 / VKM B-2454 / MOB10) OX=88629 3 GN=queF PE=3 SV=1
MATLETFPNQFPDREYEIEITCPEFTAVCPKTGQPDFGTIVISYVPGATCIELKSLKLYLFSFRDRGIFYEHSINTMLDDLVGACQPRRMRVVGNFTPRGGISSRITAHYETQSPPKA

SEQ ID NO: 49730 - protein, 118 aa, Singulisphaera sp.
  REGION 1..118: note = tr|A0A1N6H4J2|A0A1N6H4J2_9BACT NADPH-dependent 7-cyano-7-deazaguanine reductase OS=Singulisphaera sp. GP187 OX=1882752 GN=queF PE=3 SV=1
MATLESFPNQFPDREYEIEITCPEFTAVCPITGQPDFGTIIVTYVPAATCIELKSLKLYLFSFRNRGIFYEHSINTMLDDLVAACQPRRMRVVGNFTPRGGISSRITAQYEAQSPSKA

SEQ ID NO: 49731 - protein, 140 aa, unidentified
  source 1..140: note = Sinimarinibacterium flocculans
  REGION 1..140: note = tr|A0A318EHE7|A0A318EHE7_9GAMM NADPH-dependent 7-cyano-7-deazaguanine reductase OS=Sinimarinibacterium flocculans OX=985250 GN=queF PE=3 SV=1
MSTQPSKSLETFPNPAPQRDFAIRMRIPEFTCLCPKTGQPDFGTLYLEYVADRLCVELKALKLYVWSFRDEGKFHEAVTNEILDDLVAATQPRFMRLTAVFNVRGGIYTHVSVEHRQPGWSGSLPPPAWHVDPTGAGATP

SEQ ID NO: 49732 - protein, 140 aa, unidentified
  source 1..140: note = Sinimarinibacterium sp.
  REGION 1..140: note = tr|A0A4U0GTK1|A0A4U0GTK1_9GAMM NADPH-dependent 7-cyano-7-deazaguanine reductase OS=Sinimarinibacterium sp. CAU 1509 OX=2562283 GN=queF PE=3 SV=1
MSTQPTKTLETFPNPAPGRDFAIRMRMPEFTCLCPKTGQPDFGTLYLEYVADKQCIELKSLKLYLWSFRDEGCFHEAVTNQILDDLVAATKPRFMRLTAVFNVRGGIYTHVSVEHRKKAWKGELPPSAWHVDPTGAGFTP

SEQ ID NO: 49733 - protein, 165 aa, Sinobaca qinghaiensis
  REGION 1..165: note = tr|A0A419V6V8|A0A419V6V8_9BACL NADPH-dependent 7-cyano-7-deazaguanine reductase OS=Sinobaca qinghaiensis; OX = 342944 GN=queF PE=3 SV=1
MSERKTGMDDLTLLGNQQQEGQQFEYDPALLESFDNNHPGTDYFVKFNCPEFTTLCPMTGQPDFATLYISYVPDVKMVESKSLKLYLFSYRNHGGFHEDAINTIVNDLVELMDPRYLEIWGKFTPRGGISIDPYVNYGKKGTKFEEMAYHRLMNHDMNPETITNR

SEQ ID NO: 49734 - protein, 140 aa, unidentified
  source 1..140: note = Sinobacteraceae bacterium
  REGION 1..140: note = tr|A0A2T5MHJ7|A0A2T5MHJ7_9GAMM NADPH-dependent 7-cyano-7-deazaguanine reductase OS=Sinobacteraceae bacterium GT1R17 OX=2029166 GN=queF PE=3 SV=1
MTSKPSKTLETFPNPAPQRDFTIRMRMPEFTCLCPKTGQPDFGTLYLEYVADKSCVELKALKMYLWSFRNEGCFHEAVTNQILDELVKATKPRYMRLTAVFNVRGGIYTHVTAEHTKKGWKGTLPPSAWHVDPTGAGETP

SEQ ID NO: 49735 - protein, 141 aa, unidentified
  source 1..141: note = Sinobacteraceae bacterium
  REGION 1..141: note = tr|A0A522KU31|A0A522KU31_9GAMM NADPH-dependent 7-cyano-7-deazaguanine reductase OS=Sinobacteraceae bacterium OX=1969813 GN=queF PE=3 SV=1
MSTQPSKSLETFPNPNPARDFLIRMRMPEFTCLCPKTGQPDFATFYLEYIPGELCVELKSLKLYMWSYRNEGAFHEAVTNSILDDLVAATQPKFMRLTADWYVRGGIYTHVTVEHRQPGYAPAFADPSGLPPAKWEGYQNH

SEQ ID NO: 49736 - protein, 276 aa, unidentified
  source 1..276: note = Sinobacterium caligoides
  REGION 1..276: note = tr|A0A3N2DYS4|A0A3N2DYS4_9GAMM NADPH-dependent 7-cyano-7-deazaguanine reductase OS=Sinobacterium caligoides OX=933926 GN=queF PE=3 SV=1
MSDEYLSEHTQLGKTTENIYTYTPSLLCPIPRAMARKELGFEAETLPFNGSDIWTGYEISWLAESGKPEIAIAEFRIPAMSPNIIESKSFKMYLNSFNLSKFEGWGVVEELMTKDISAAAGAPVQVTLLTPQQMLRAGIESPKGTCIDAHDITLEAYLPEASLLQVSEQQVREDVYSDLFRSNCPVTGQPDWATIAISYSGNQIDHASLLRYLVSFRDQAEFHEQCAERIFRDISEQCAPQELTVFARFLRRGGLDINPWRSNVREAPRFQRLSRQ

SEQ ID NO: 49737 - protein, 154 aa, Sinorhizobium americanum
  REGION 1..154: note = tr|A0A1L3LPF2|A0A1L3LPF2_9RHIZ NADPH-dependent 7-cyano-7-deazaguanine reductase OS=Sinorhizobium americanum OX=194963 GN=queF PE=3 SV=1
MPKTDVSGLSQLGAKVDLPQSPEEAVLERVPSGHEGTDFVVRFTAPEFTSLCPMTGQPDFAHIVIDYVPNGWLVESKSLKLFLHSFRNHGAFHEDCTIDIAKRLVSLLSPKWLRIGAYWYPRGGIPIDVFWQTGNPPERVWLPDQGVPTYRGRG

SEQ ID NO: 49738 - protein, 154 aa, Sinorhizobium americanum; identical to SEQ ID NO: 49737
  REGION 1..154: note = tr|A0A1L3L5H2|A0A1L3L5H2_9RHIZ NADPH-dependent 7-cyano-7-deazaguanine reductase OS=Sinorhizobium americanum CCGM7 OX=1408224 GN=queF PE=3 SV=1

SEQ ID NO: 49739 - protein, 154 aa, unidentified; identical to SEQ ID NO: 49166
  source 1..154: note = Sinorhizobium fredii
  REGION 1..154: note = tr|A0A2U8G3U2|A0A2U8G3U2_RHIFR NADPH-dependent 7-cyano-7-deazaguanine reductase OS=Sinorhizobium fredii CCBAU 45436 OX=1128331 GN=queF PE=3 SV=1

SEQ ID NO: 49740 - protein, 154 aa, unidentified
  source 1..154: note = Sinorhizobium fredii
  REGION 1..154: note = sp|C3MFQ1|QUEF_SINFN NADPH-dependent 7-cyano-7-deazaguanine reductase OS=Sinorhizobium fredii (strain NBRC 101917 / NGR234) OX=394 GN=queF PE=3 SV=1
MPKTDVSGLSQLGTKVDLPQSPEEAVLERVPSGHEGTDFVVRFTAPEFTSLCPMTGQPDFAHIVIDYVPDGWLVESKSLKLFLHSFRNHGAFHEDCTVDIAKRLVSLLSPKWLRIGAYWYPRGGIPIDVFWQTGNPPEGVWLPDQGVPTYRGRG

SEQ ID NO: 49741 - protein, 154 aa, unidentified
  source 1..154: note = Sinorhizobium medicae
  REGION 1..154: note = tr|A0A508X0S2|A0A508X0S2_9RHIZ NADPH-dependent 7-cyano-7-deazaguanine reductase OS=Sinorhizobium medicae; OX = 110321 GN=queF PE=3 SV=1
MTKTDVSGLSQLGTKVDLPQNPEEAVLERVPSGHGGTDFVVRFTAPEFTSLCPMTGQPDFAHLVIDYVPDGWLVESKSLKLFLHSFRNHGAFHEDCTIDIAKRLVSLLSPKWLRIGAYWYPRGGIPIDVFWQTGSPPEGVWLPDQGVPTYRGRG

SEQ ID NO: 49742 - protein, 154 aa, unidentified; identical to SEQ ID NO: 49741
  source 1..154: note = Sinorhizobium medicae
  REGION 1..154: note = sp|A6UBU5|QUEF_SINMW NADPH-dependent 7-cyano-7-deazaguanine reductase OS=Sinorhizobium medicae (strain WSM419) OX=366394 GN=queF PE=3 SV=1

SEQ ID NO: 49743 - protein, 154 aa, unidentified
  source 1..154: note = Sinorhizobium meliloti
  REGION 1..154: note = tr|H0G7M6|H0G7M6_RHIML NADPH-dependent 7-cyano-7-deazaguanine reductase OS=Sinorhizobium meliloti CCNWSX0020 OX=1107881 GN=queF PE=3 SV=1
MTKTDVSALSQLGAKVDLPQSPEEAVLERVPSGHGGTDFVVRFTAPEFTSLCPMTGQPDFAHIVIDYVPDGWLVESKSLKLFLHSFRNHGAFHEDCTIEIAKRLVSLLSPKWLRIGAYWYPRGGIPIDVFWQTGNPPEGVWLPDQGVPTYRGRG

SEQ ID NO: 49744 - protein, 154 aa, unidentified; identical to SEQ ID NO: 49187
  source 1..154: note = Sinorhizobium meliloti
  REGION 1..154: note = tr|A0A0E0UEM6|A0A0E0UEM6_SINMB NADPH-dependent 7-cyano-7-deazaguanine reductase OS=Sinorhizobium meliloti (strain BL225C) OX=698936 GN=queF PE=3 SV=1

SEQ ID NO: 49745 - protein, 154 aa, unidentified
  source 1..154: note = Sinorhizobium saheli
  REGION 1..154: note = tr|A0A178YII4|A0A178YII4_SINSA NADPH-dependent 7-cyano-7-deazaguanine reductase OS=Sinorhizobium saheli; OX = 36856 GN=queF PE=3 SV=1
MTKTDLTGLSQLGAKVDLPQSPEEAVLERVPSGHAGTDFVVRFTAPEFTSLCPMTGQPDFAHIVIDYVPDGWLVESKSLKLFLHSFRNHGAFHEDCTIDIAKRLVSLLSPKWLRIGAYWYPRGGIPIDVFWQTGNPPEGVWLPDQGVPTYRGRG

SEQ ID NO: 49746 - protein, 143 aa, Sinorhizobium sp.
  REGION 1..143: note = tr|A0A0T6YU64|A0A0T6YU64_9RHIZ NADPH-dependent 7-cyano-7-deazaguanine reductase OS=Sinorhizobium sp. Sb3; OX = 1358417 GN=queF PE=3 SV=1
MGAKVDLPQSPEEAVLERVPSGNKGKDYLVRFTAPEFTSLCPMTGQPDFAHIVIDYVPDEWLVESKSLKLFLHSFRNHGAFHEDCTIEIAQRLVSLLSPRWLRIGAYWYPRGGIPIDVFWQTGKPPEGLWLPDQGVPTYRGRG

SEQ ID NO: 49747 - protein, 154 aa, Sinorhizobium sp.; identical to SEQ ID NO: 49167
  REGION 1..154: note = tr|A0A2A6MHT2|A0A2A6MHT2_9RHIZ NADPH-dependent 7-cyano-7-deazaguanine reductase OS=Sinorhizobium sp. NG07B OX=1538174 GN=queF PE=3 SV=1

SEQ ID NO: 49748 - protein, 154 aa, Skermanella aerolata
  REGION 1..154: note = tr|A0A512DQC7|A0A512DQC7_9PROT NADPH-dependent 7-cyano-7-deazaguanine reductase OS=Skermanella aerolata; OX = 393310 GN=queF PE=3 SV=1
MSQSIYDGLTQLGGNTAQPASPEEAVLERVPNPHPGTGYLVRFAAPEFTSLCPITGQPDFAHLVIDYVPGDWLVESKSLKLYLTSFRNHGAFHEACTVSIAKRLVDELKPVWLRIGGYWYPRGGIPIDVFYQTGPAPDGVWVPDQGVAPYRGRG

SEQ ID NO: 49749 - protein, 154 aa, Skermanella aerolata; identical to SEQ ID NO: 49748
  REGION 1..154: note = tr|A0A0D2WHG7|A0A0D2WHG7_9PROT NADPH-dependent 7-cyano-7-deazaguanine reductase OS=Skermanella aerolata KACC 11604 OX=1385368 GN=queF PE=3 SV=1

SEQ ID NO: 49750 - protein, 154 aa, Skermanella stibiiresistens
  REGION 1..154: note = tr|W9GXS9|W9GXS9_9PROT NADPH-dependent 7-cyano-7-deazaguanine reductase OS=Skermanella stibiiresistens SB22 OX=1385369 GN=queF PE=3 SV=1
MSRSIYEGLTQLGGATVQPASPEEAVLERVPNPHPGTGYLVRFAAPEFTSLCPITGQPDFAHLVIDYVPGDWLVESKSLKLYLTSFRDHGAFHEACTVGIAKRLETELKPVWLRIGGYWYPRGGIPIDVFYQTGPVPDGVWVPDQGVAAYRGRG

SEQ ID NO: 49751 - protein, 173 aa, Slackia exigua
  REGION 1..173: note = tr|D0WE36|D0WE36_SLAES NADPH-dependent 7-cyano-7-deazaguanine reductase OS=Slackia exigua (strain ATCC 700122 / DSM 15923 / CIP 105133 / JCM 11022 / KCTC 5966 / S-7)OX=649764 GN=queF PE=3 SV=1
MTPTEAAAKTREHEAEGITLLGNQRASYPNDYDPSVLETFENAHQDRDYMVTFRCPEFTTLCPITGQPDFATLYINYIPSVRMVESKSLKLYLFSFRNHGDFHEDVTNIIMNDLAKLMDPKYIEVRGMFYPRGGISIYPFANWANPKFGYQDVAASRMFAQLSDLDRGDDARA

SEQ ID NO: 49752 - protein, 166 aa, Slackia heliotrinireducens
  REGION 1..166: note = tr|C7N133|C7N133_SLAHD NADPH-dependent 7-cyano-7-deazaguanine reductase OS=Slackia heliotrinireducens (strain ATCC 29202 / DSM 20476 / NCTC 11029 / RHS 1) OX=471855GN=queF PE=3 SV=1
MANTDNRTKEGLTLLGNQGTRYSQDYDPTLLETFENKHQDHDYMVTFRCPEFTTLCPITGQPDFATLYINYIPNVRMVESKSLKLYLFSFRNHGDFHEDVCNIIMNDLVKLMEPKYIEVRGMFYPRGGISIYPFANWANPDFGYGDIAASRMFSQLSDLDKGDGAR

SEQ ID NO: 49753 - protein, 173 aa, Slackia sp.
  REGION 1..173: note = tr|J6ILX9|J6ILX9_9ACTN NADPH-dependent 7-cyano-7-deazaguanine reductase OS=Slackia sp. CM382; OX = 1111137 GN=queF PE=3 SV=1
MTPTEAAAKTREHEAEGITLLGNQHASYPNDYDPSVLETFENAHQDRDYMVTFRCPEFTTLCPITGQPDFATLYINYIPSVRMVESKSLKLYLFSFRNHGDFHEDVTNIIMNDLAKLMDPKYIEVRGMFYPRGGISIYPFANWANPKFGYQDVAVSRMFAQLSDLDRGDGARA

SEQ ID NO: 49754 - protein, 134 aa, Smithella sp.
  REGION 1..134: note = tr|A0A1V5DQW6|A0A1V5DQW6_9DELT NADPH-dependent 7-cyano-7-deazaguanine reductase OS=Smithella sp. PtaU1.Bin162 OX=1811697 GN=queF PE=3 SV=1
MAKDAKKNDLTGLTLLGKTAEPVKKLETFPNHHPGRHYTVTLQTEEFTCVCPMTGQPDFAKIKIQYVPDRKIVESKSLKLYLWSFRNEGVFHEHVTNVILDDLVAALKPHWCKVSAEFSIRGGIGITVEAEYKK

SEQ ID NO: 49755 - protein, 134 aa, Smithella sp.
  REGION 1..134: note = tr|A0A348W461|A0A348W461_9DELT NADPH-dependent 7-cyano-7-deazaguanine reductase OS=Smithella sp.; OX = 2053614 GN=queF PE=3 SV=1
MPKNTKKNDLAGLTLLGKPARPTRKLETFPNHNDSRDYMVTLQTEEFTCVCPKTGQPDFAKIKIQYIPDKKIIESKSLKLYLWSFRDEGVFHEHVTNIILDDLIAALKPRWCKVSAEFAVRGGIGITVDAEYKK

SEQ ID NO: 49756 - protein, 154 aa, Sneathiella sp.
  REGION 1..154: note = tr|A0A2E2QLY3|A0A2E2QLY3_9PROT NADPH-dependent 7-cyano-7-deazaguanine reductase OS=Sneathiella sp.; OX = 1964365 GN=queF PE=3 SV=1
MAGTDVSGLTQLGKAVEQPQSPEQAILERVPNGQADVNYLVRFTAPEFTSLCPMTGQPDFAHLVIDYVPDQWLVESKSLKLFLTSFRNHGAFHEDCTVMIGKRIADLLKPRWLRIGGYWYPRGGIPIDVFWQTDAPLADVWLPDQGVATYRGRG

SEQ ID NO: 49757 - protein, 156 aa, unidentified
  source 1..156: note = Snodgrassella alvi
  REGION 1..156: note = tr|X2H8C7|X2H8C7_9NEIS NADPH-dependent 7-cyano-7-deazaguanine reductase OS=Snodgrassella alvi wkB2 OX=1196094 GN=queF PE=3 SV=1
MRAQNNLGTVSLLGNQHTEYRSDYAPELLEAFDNQHPDNDYFVKFICPEFTSLCPKTGQPDFATIYINYLPRLRMVESKSLKLYLFSFRNHGDFHEDCVNIIMKDLIALMQPKYIEVYGEFTPRGGIAIHPYANYGEPDTRYSDMAAQRLLQFQVK

SEQ ID NO: 49758 - protein, 156 aa, unidentified
  source 1..156: note = Snodgrassella alvi
  REGION 1..156: note = tr|A0A066TDT6|A0A066TDT6_9NEIS NADPH-dependent 7-cyano-7-deazaguanine reductase OS=Snodgrassella alvi; OX = 1196083 GN=queF PE=3 SV=1
MRAQNDLGTVSLLGNQHTEYRSDYAPELLEAFDNQHPDNDYFVKFICPEFTSLCPKTGQPDFATIYINYLPHLRMVESKSLKLYLFSFRNHGDFHEDCVNIIMKDLIALMQPKYIEVYGEFTPRGGIAIHPYANYGKADTRYSDMAVQRLLQFQVK

SEQ ID NO: 49759 - protein, 156 aa, unidentified
  source 1..156: note = Snodgrassella sp.
  REGION 1..156: note = tr|A0A1C4C8Q0|A0A1C4C8Q0_9NEIS NADPH-dependent 7-cyano-7-deazaguanine reductase OS=Snodgrassella sp. R-53583 OX=1798181 GN=queF PE=3 SV=1
MRVQNDLGTVSLLGNQHTEYRSDYAPELLEAFDNQHPNNDYFVKFICPEFTSLCPKTGQPDFATIYINYLPHLRMVESKSLKLYLFSFRNHGDFHEDCVNIIMKDLIALMQPKYIEVYGEFTPRGGIAIHPYANYGKADTRYSDMAVQRLLQFQVK

SEQ ID NO: 49760 - protein, 143 aa, unidentified
  source 1..143: note = Snowella sp.
  REGION 1..143: note = tr|A0A2W7B7X6|A0A2W7B7X6_9CYAN NADPH-dependent 7-cyano-7-deazaguanine reductase OS=Snowella sp.; OX = 2164131 GN=queF PE=3 SV=1
MSQVSQSDTILSEKPENTPESIKYGERIIEEGQLITFPNPRPGRRYDVQITLPEFTCKCPFSGYPDFATFYINYCPDEKVVELKALKLYANSFRDRYISHEEVVNVILDDFIAACDPLFVKIRADFNPRGNVHMVVEVEHEKP

SEQ ID NO: 49761 - protein, 281 aa, Sodalis glossinidius
  REGION 1..281: note = sp|Q2NRK0|QUEF_SODGM NADPH-dependent 7-cyano-7-deazaguanine reductase OS=Sodalis glossinidius (strain morsitans) OX=343509 GN=queF PE=3 SV=1
MTNYDQHHALQSLTLGKPTPYRERYDPSLLQAVPRALNRDLLGLQATALPFHGADIWTLYELSWLNDAGIPQVAIGEIALNATSTNLIESKSFKLYLNSLNQTSFPSREAVRVRLAEDLSRCADGEVQVVLRALSDFTSSPLLDFDGECIDDQPIHIDDYTFTNRYLEGAAGGSVVSETLVSHLLKSNCLITHQPDWGSVQIRYRGARIDREALLRYLVSFRQHNEFHEQCVERIFCDVMQFCRPETLTVYARYTRRGGLDINPWRSNTHFSPATGRLARQ

SEQ ID NO: 49762 - protein, 281 aa, Sodalis glossinidius; identical to SEQ ID NO: 49761
  REGION 1..281: note = tr|A0A193QM21|A0A193QM21_SODGM NADPH-dependent 7-cyano-7-deazaguanine reductase OS=Sodalis glossinidius (strain morsitans) OX=343509 GN=queF PE=3 SV=1

SEQ ID NO: 49763 - protein, 281 aa, unidentified
  source 1..281: note = Sodalis praecaptivus
  REGION 1..281: note = tr|W0HQ63|W0HQ63_9GAMM NADPH-dependent 7-cyano-7-deazaguanine reductase OS=Sodalis praecaptivus; OX = 1239307 GN=queF PE=3 SV=1
MTHYDQHHALQSLTLGKPTPYRERYDPSLLQAVPRALNRDPLGLQAAALPFHGADIWTLYELSWLNDAGLPQVAIGEVALNATSVNLIESKSFKLYLNSFNQTRFPSREAVRDLLAEDLSRCADGEVAVTLRALDEFTGSPVLGFDGECIDDQPIRIDDYTFSNRWLEGAAGGPWVSETLVSHLLKSNCLITHQPDWGSVQIRYRGARIDREALLRYLVSFRQHNEFHEQCVERIFCDLMQFCRPDTLSVYARYTRRGGLDINPWRSNTHFSPATGRLARQ

SEQ ID NO: 49764 - protein, 196 aa, Sodalis sp.
  REGION 1..196: note = tr|A0A1J7CYH4|A0A1J7CYH4_9GAMM NADPH-dependent 7-cyano-7-deazaguanine reductase QueF (Fragment); OS = Sodalis sp. TME1 OX=1912097 GN=queF PE=4 SV=1
MTHYDQHHALQSLTLGKPTPYRERYDPSLLQAVPRALNRDPLGLQAAALPFHGADIWTLYELSWLNDAGLPQVAIGEVALNATSVNLIESKSFKLYLNSFNQTRFPSREAVRDRLADDLSRCADGEVAVTLRAIDEFTGSPVLGFDGECIDDQPIRIDDYTFSNRWLEGAAGGPWVSETLVSHLLKSNCLITHQPD

SEQ ID NO: 49765 - protein, 287 aa, Sodalis sp.
  REGION 1..287: note = tr|A0A4R1NAX9|A0A4R1NAX9_9GAMM NADPH-dependent 7-cyano-7-deazaguanine reductase OS=Sodalis sp. 159R; OX = 2529856 GN=queF PE=3 SV=1
MSAYNMSDYENQPALGSLTLGKPTPYSDRYDAALLQGVPRALNREPLGLAPHTLGFHGADIWTLYELSWLNDKGVPQVAIGEMRLDAASRNLIESKSFKLYLNSFNQTRFAHWDQVRDVLIRDLARCAAGDVNVDLFRLGDIAGRCIADFAGECIDEQDILIDDYTFSNEWLRHAADDNAQVSETLVSHLLKSNCLITHQPDWGSVQITYRGPRINREALLRYLVSFRHHNEFHEQCVERIFTDLMHFCHPEQLSVYARYTRRGGLDINPWRSNTPFIPSAGRLARQ

SEQ ID NO: 49766 - protein, 280 aa, unidentified
  source 1..280: note = Unknown
  REGION 1..280: note = tr|A0A151UME6|A0A151UME6_9GAMM NADPH-dependent 7-cyano-7-deazaguanine reductase OS=Sodalis-like endosymbiont of Proechinophthirus fluctus OX=1462730; GN = queF PE=3 SV= 1
  VARIANT 160..162: note = Xaa can be any naturally occurring amino acid
MTHYDQHHTLQSLTLGKPTPYCECYDPSLLQAVPRALNRDPLGLQAAALPFHGADIWTLYELSWLNNAGLPQVAIGEIALNANSTNLIESKSFKLYLNSFNQTHFPSREAVRSRLAEDLSHCADGEVAVTLRTLDEFTGSPVLGFDGECIDDQPIRIDDXXXSRWLEGAAGGPSVGETLVSHLLKSNCIITHQPDWGSVQISYRGARLDREALLRYLLSFRQHDEFHEHCVERIFCDLMQFCRPNTLSVYARYTRRGGLDINPWRSNTHFSPATGRLARQ

SEQ ID NO: 49767 - protein, 129 aa, unidentified
  source 1..129: note = Solemya elarraichensis
  REGION 1..129: note = tr|A0A1T2L764|A0A1T2L764_9GAMM NADPH-dependent 7-cyano-7-deazaguanine reductase OS=Solemya elarraichensis gill symbiont OX=1918949 GN=queF PE=3 SV=1
MSTKPGKELETFDNPNPERDYTIRIRMPEFTCLCPKTGQPDFAELLLEYVPDQLCVELKSLKLYIWAFREQGAFHEAVTNEMLADLVAATNPRFMRLTADFKVRGGIYTLVTVEHRDENWVAPQKVELP

SEQ ID NO: 49768 - protein, 129 aa, unidentified
  source 1..129: note = Solemya pervernicosa
  REGION 1..129: note = tr|A0A1T2L1Y9|A0A1T2L1Y9_9GAMM NADPH-dependent 7-cyano-7-deazaguanine reductase OS=Solemya pervernicosa gill symbiont OX=642797 GN=queF PE=3 SV=1
MPSQPSKELETFDNPMPERDYTIRIDIPEFTCLCPKTGQPDFATIHIAYVADKACIELKSLKMYMWAYREEGAFHEKVTNTMLDDFVAACNPRFMRVTGKFNVRGGIYTTVIAEHRAADWNPPQPVTLP

SEQ ID NO: 49769 - protein, 129 aa, unidentified
  source 1..129: note = Solemya velesiana
  REGION 1..129: note = tr|A0A1T2KVV1|A0A1T2KVV1_9GAMM NADPH-dependent 7-cyano-7-deazaguanine reductase OS=Solemya velesiana gill symbiont OX=1918948 GN=queF PE=3 SV=1
MPSQPSKTLETFENPQQDRDFTIRIRVPEFTCLCPKTGQPDFAELTLEYIADKLCVELKSLKMYVWSYRDEGAFHEAVTNQILNDLVAVTQPRFMRLTADFNVRGGIYTTVVAEHRAEGWEPAPAVNLP

SEQ ID NO: 49770 - protein, 129 aa, Solemya velum
  REGION 1..129: note = tr|A0A0B0HF40|A0A0B0HF40_SOVGS NADPH-dependent 7-cyano-7-deazaguanine reductase OS=Solemya velum gill symbiont OX=2340 GN=queF PE=3 SV=1
MSTKPSKELETFDNPNPERDYTIRIRMPEFTCLCPKTGQPDFAELLLEYVPDQLCVELKSLKLYIWAFREQGAFHEAVTNEMLADLVAATNPRFMRLTADFKVRGGIYTVVTAEHRDENWVAPQKVELP

SEQ ID NO: 49771 - protein, 166 aa, Solibacillus sp.
  REGION 1..166: note = tr|A0A2D1SYS2|A0A2D1SYS2_9BACL NADPH-dependent 7-cyano-7-deazaguanine reductase OS=Solibacillus sp. R5-41; OX = 2048654 GN=queF PE=3 SV=1
MTGRKPTEGLNDLTLLGNQNTQYATDYAPEVLESVESLHSNRDYFVKFNCPEFTSLCPITGQPDFATIYISYIPEKKLVESKSLKLYLFSFRNHGDFHEDCVNIIMNDLIKLLDPRYIEVWGKFTPRGGISIDPWCNYGRPETKYEEIANYRLMNHDLNPEKIDNR

SEQ ID NO: 49772 - protein, 136 aa, unidentified
  source 1..136: note = Solibacter usitatus
  REGION 1..136: note = tr|Q01UV4|Q01UV4_SOLUE NADPH-dependent 7-cyano-7-deazaguanine reductase OS=Solibacter usitatus (strain Ellin6076) OX=234267 GN=queF PE=3 SV=1
MKRGYTDDHARGGIDAPLPEIETWPNQYADYEIEIINPEFTSVCPKTGLPDFGKVVLRYVPDKLCLELKSYKMYMLAYRDLGIFQENVVNRILQDVVKAAKPVSATVIGDFTPRGGLGTLVTASWSRARRKPRGKR

SEQ ID NO: 49773 - protein, 278 aa, unidentified
  source 1..278: note = Solimicrobium silvestre
  REGION 1..278: note = tr|A0A2S9H1Q4|A0A2S9H1Q4_9BURK NADPH-dependent 7-cyano-7-deazaguanine reductase OS=Solimicrobium silvestre OX=2099400 GN=queF PE=3 SV=1
MQSNTPENSTLGKTAAYVTQYDASLLFPIPRAQKRAEIGLTSTLPFFGLDIWNAYEISWLNLRGKPQIVIATFMVPADSPNIIESKSFKLYLNSFNQTRLADTDALLALLKQDISAGFGASVQIKLTLPAEFSHQRFAELDGLLLDRLDIEVENYHPDVTLLSCDLNASPVEETLVSHLLKSNCLVTGQPDWGSVQIHYVGAPIDQAGLLKYLIGFRNHNEFHEQCVERIFTDILSGCKPQKLAVYARYTRRGGLDINPWRSNFSSNQLPSNLRNARQ

SEQ ID NO: 49774 - protein, 141 aa, Solimonas aquatica
  REGION 1..141: note = tr|A0A1H9I226|A0A1H9I226_9GAMM NADPH-dependent 7-cyano-7-deazaguanine reductase OS=Solimonas aquatica; OX = 489703 GN=queF PE=3 SV=1
MSTQPSKNLETFPNPNPDRDYVIRMRMPEFTCLCPKTGQPDFATLYLEYVPEALCVELKSLKLYLWSFRNEGAFHEAVTNRILGDLAGLISPRFMRLTADWYVRGGIYTHVVSEHRAPGWQPKFDPPVVLPPARWEGFQGH

SEQ ID NO: 49775 - protein, 140 aa, unidentified
  source 1..140: note = Solimonas fluminis
  REGION 1..140: note = tr|A0A2S5TDA9|A0A2S5TDA9_9GAMM NADPH-dependent 7-cyano-7-deazaguanine reductase OS=Solimonas fluminis; OX = 2086571 GN=queF PE=3 SV=1
MPSLPSKTLETFPNPAPQRDFTIRMRIPEFTCLCPKTGQPDFGTLYLEYVADKACVELKALKMYIWSFRDEGCFHEAVTNQILDDLVKATKPRYMRLTAVFNVRGGIYTHVTAEHRKKGWNGSLPPPAWHVDPTGAGQTP

SEQ ID NO: 49776 - protein, 140 aa, Solimonas sp.
  REGION 1..140: note = tr|A0A346N0Y0|A0A346N0Y0_9GAMM NADPH-dependent 7-cyano-7-deazaguanine reductase OS=Solimonas sp. K1W22B-7; OX = 2303331 GN=queF PE=3 SV=1
MPSLPSKTLETFPNPAPQRDFTIRMRIPEFTCLCPKTGQPDFGTLYLEYVADKACVELKALKMYIWSFRDEGCFHEAVTNQILDDLVKATKPRFMRLTAVFNVRGGIYTHVTAEHRKKGWNGSLPPSAWHVDPTGAGQTP

SEQ ID NO: 49777 - protein, 144 aa, unidentified
  source 1..144: note = Spartobacteria bacterium
  REGION 1..144: note = tr|A0A2A2XV80|A0A2A2XV80_9BACT NADPH-dependent 7-cyano-7-deazaguanine reductase OS=Spartobacteria bacterium AMD-G4 OX=1982325 GN=queF PE=3 SV=1
MSKKSVNEKPSKSLRLLGSASSLPQVPSVEILETFPNSHPARGYVVRVDTEDFSSLCPVTGQPDYAEIVIEYVPAARCVETKSLKYYLASFRNTPSFNEQIVNRILDDLVAVCAPESMTVCGAFAARGGLALTVTATHTAKKRK

SEQ ID NO: 49778 - protein, 127 aa, unidentified
  source 1..127: note = Spartobacteria bacterium
  REGION 1..127: note = tr|A0A3C0R478|A0A3C0R478_9BACT NADPH-dependent 7-cyano-7-deazaguanine reductase OS=Spartobacteria bacterium OX=2052183 GN=queF PE=3 SV=1
MPASPAEARLETFPNPARRNYRIHFETDDFTSLCPVTGQADFATIDIDYVPDRLCVESKSLKFYLASYRNERAFNEAVTNRILDDFVRACAPREAIVTAQFSARGGIALTVRAEYAHESAKAPRDGR

SEQ ID NO: 49779 - protein, 118 aa, Sphaerobacter thermophilus
  REGION 1..118: note = tr|D1C5F2|D1C5F2_SPHTD NADPH-dependent 7-cyano-7-deazaguanine reductase OS=Sphaerobacter thermophilus (strain DSM 20745 / S 6022) OX=479434 GN=queF; PE = 3 SV=1
MPTQPSKNLETVPNPKPERDYEIEISTPEFTCVCPVTGQPDFATITIRYVPDQKIVELKSLKLYLWSYRNEGAFHEKVTNQILDDLVAAVDPRRATVIGDFNIRGGLHTVVKAEYTRE

SEQ ID NO: 49780 - protein, 138 aa, unidentified
  source 1..138: note = Sphaerospermopsis kisseleviana
  REGION 1..138: note = tr|A0A1Z4UQF2|A0A1Z4UQF2_9CYAN NADPH-dependent 7-cyano-7-deazaguanine reductase OS=Sphaerospermopsis kisseleviana NIES-73 OX=1973480 GN=queF PE=3 SV=1
MSNSLSETVPPSKPEMKYGEREIEEGKLITFPNPRIGREYNIDITLPEFTCKCPFSGYPDFATIYISYVPDEKVVELKALKLYINSYRDRYISHEETANQILDDVVAACDPLKMTVKADFTPRGNVHTVVEVKHKKRK

SEQ ID NO: 49781 - protein, 138 aa, unidentified; identical to SEQ ID NO: 49780
  source 1..138: note = Sphaerospermopsis reniformis
  REGION 1..138: note = tr|A0A479ZZN6|A0A479ZZN6_9CYAN NADPH-dependent 7-cyano-7-deazaguanine reductase OS=Sphaerospermopsis reniformis OX=531300 GN=queF PE=3 SV=1

SEQ ID NO: 49782 - protein, 297 aa, Sphaerotilus hippei
  REGION 1..297: note = tr|A0A318HB42|A0A318HB42_9BURK NADPH-dependent 7-cyano-7-deazaguanine reductase OS=Sphaerotilus hippei; OX = 744406 GN=queF PE=3 SV=1
MTTSPDTTPARVAPVAPAQAAPAEDASASPLGQVAAYRDQYDPSLLFPITRDTKRAELGLGGTLPFLGCDLWTAYELSWLNPRGKPQIALATITVPCESPAIIESKSFKLYLNSFNMSRFESADVVRDRLVADLSAACGLRVGVRLVLPEQFEAQRVIELEGTSLDRLDLDCDQYEPDPGLLGVDTSQADTEETLHSRLLKSNCLVTGQPDWGSVQIRYSGAPIDHAGLLRYLVSFRNHNEFHEQCVERIYTDIMARCHPVRLMVYARYTRRGGLDINPWRSSHPEMVPANVRTARQ

SEQ ID NO: 49783 - protein, 292 aa, Sphaerotilus natans
  REGION 1..292: note = tr|A0A059KL50|A0A059KL50_9BURK NADPH-dependent 7-cyano-7-deazaguanine reductase OS=Sphaerotilus natans subsp. natans DSM 6575 OX=1286631 GN=queF PE=3 SV=1
MSDTPSSPSPARDPSGSLLGKTASYRATYAPELLYPISRTPKREEIGLTAERIAAGRLPFMGADLWTAYELSWLTPRGKPQVAIATFTVPCDSPCIIESKSFKLYLNSFNMTRVESPEVLREMLVRDLSAAAGARVGVRLVLPEDFDAQPIHELSGVLLDRMDIDCGHYGPPSPELLTAAFDEQPVTETLTSHLLKSNCLVTGQPDWGSVQISYTGPQIDQEGLLRYLISFREHDEFHEQCVERIFTDLLERCQPVRLQVYARYTRRGGLDISPWRTSHPATLPANVRTARQ

SEQ ID NO: 49784 - protein, 292 aa, Sphaerotilus natans
  REGION 1..292: note = tr|A0A5C1PXJ6|A0A5C1PXJ6_9BURK NADPH-dependent 7-cyano-7-deazaguanine reductase OS=Sphaerotilus natans subsp. sulfidivorans OX=639200 GN=queF PE=3 SV=1
MSDTPSSPSPARDPSGSLLGKTASYRATYAPELLYPISRTPKREEIGLSAERIAAGRLPFMGADLWTAYELSWLTPRGKPQVAIATITVPCDSPCIIESKSFKLYLNSFNMTRVESPERLREMLVHDLSAAAGARVGVRLVLPEAFDAQPIHELSGVLLDRMDIDCDRYGPPAPELLTAALDEQPVTETLTSHLLKSNCLVTGQPDWGSVQISYTGPQIDQEGLLRYLISFREHDEFHEQCVERIFTDILERCQPVRLQVYARYTRRGGLDISPWRTSHPATLPANVRTARQ

SEQ ID NO: 49785 - protein, 153 aa, unidentified
  source 1..153: note = Sphingobium algicola
  REGION 1..153: note = tr|A0A5J5H4L4|A0A5J5H4L4_9SPHN NADPH-dependent 7-cyano-7-deazaguanine reductase QueF OS=Sphingobium algicola OX=2048546 GN=queF PE=4 SV=1
MTDLSTTPLHLGQTSALPASPEQAVLDYVPNPRPGKPYLVRFTAPEFTSLCPVTGQPDFAHLVIDYAPAETIVESKSLKLFLGSFRNHAAFHEDCTVGIGLRLFDEMKPIWLRIGGYWYPRGGIPIDVFWQSDVPPAGLWLPAQDVPGYRGRG

SEQ ID NO: 49786 - protein, 152 aa, unidentified
  source 1..152: note = Sphingobium algorifonticola
  REGION 1..152: note = tr|A0A437JCC9|A0A437JCC9_9SPHN NADPH-dependent 7-cyano-7-deazaguanine reductase OS=Sphingobium algorifonticola OX=2008318 GN=queF PE=3 SV=1
MTLPQPPLHLGQTSALPATPQAAVLDYVPNPRAGALYLVRFAVPEFTSLCPVTGQPDFAHLVIDYAPGATIVESKSLKLFLGSFRNHAAFHEDCTVGIGQRLFDEMAPQWLRIGGYWYPRGGIPIDVFWQSGAPPAGLWLPSQDVPGYRGRG

SEQ ID NO: 49787 - protein, 153 aa, Sphingobium amiense
  REGION 1..153: note = tr|A0A494WDN9|A0A494WDN9_9SPHN NADPH-dependent 7-cyano-7-deazaguanine reductase OS=Sphingobium amiense; OX = 135719 GN=queF PE=3 SV=1
MTDLSKPPLHLGQTSALPASPEAAVLDYVPNPRPGKPYLVRFTAPEFTSLCPVTGQPDFAHLVIDYAPGETIVESKSLKLFLGAFRNHAAFHEDCTVGIGERLFAEMNPVWLRIGGYWYPRGGIPIDVFWQSGEPPAGLWLPPQDVPGYRGRG

SEQ ID NO: 49788 - protein, 152 aa, unidentified
  source 1..152: note = Sphingobium baderi
  REGION 1..152: note = tr|T0HV31|T0HV31_9SPHN NADPH-dependent 7-cyano-7-deazaguanine reductase OS=Sphingobium baderi LL03 OX=1114964 GN=queF PE=3 SV=1
MTDTPHPIHLGRTSALPQRPEEAVLDYVPNPRPGKPYLVRFTAPEFTSLCPVTGQPDFAHLVIDYAPAATIVESKSLKLFLGAFRNHAAFHEDCTVGIGERLFTEMKPLWLRIGGYWYPRGGIPIDVFWQSGEPPAGMWLPPQDVPGYRGRG

SEQ ID NO: 49789 - protein, 152 aa, unidentified
  source 1..152: note = Sphingobium baderi
  REGION 1..152: note = tr|A0A0S3F1R1|A0A0S3F1R1_9SPHN NADPH-dependent 7-cyano-7-deazaguanine reductase OS=Sphingobium baderi; OX = 1332080 GN=queF PE=3 SV=1
MTDTPQPIHLGQTSALPQRPEEAVLDYVPNPRPGKPYLVRFTAPEFTSLCPVTGQPDFAHLVIDYAPAATIVESKSLKLFLGAFRNHAAFHEDCTVGIGERLFTEMKPLWLRIGGYWYPRGGIPIDVFWQSGDPPAGMWLPPQDVPGYRGRG

SEQ ID NO: 49790 - protein, 164 aa, unidentified
  source 1..164: note = Sphingobium barthaii
  REGION 1..164: note = tr|A0A4R6FH53|A0A4R6FH53_9SPHN NADPH-dependent 7-cyano-7-deazaguanine reductase OS=Sphingobium barthaii; OX = 1054037 GN=queF PE=3 SV=1
MTSAVQWRRWPAMTDMPTPLHLGRTSALPARPEEAVLDYVPNPRPGKPYLVRFTAPEFTSLCPVTGQPDFAHLVIDYAPAATIVESKSLKLFLSAFRNHAAFHEDCTVGIGERLFAEMNPIWLRIGGYWYPRGGIPIDVFWQSGEPPAGLWLPPQDVPGYRGRG

SEQ ID NO: 49791 - protein, 162 aa, Sphingobium chinhatense
  REGION 1..162: note = tr|W1KNX0|W1KNX0_9SPHN NADPH-dependent 7-cyano-7-deazaguanine reductase OS=Sphingobium chinhatense IP26 OX=1346790 GN=queF PE=3 SV=1
MACNGVDGLPMTDMPSPIHLGQTSALPTRPEEAVLDYVPNPRPGKPYLVRFAVPEFTSLCPVTGQPDFAHLVIDYAPAATIVESKSLKLFLGSFRNHAAFHEDCTVGIGERLFAEMNPFWLRIGGYWYPRGGIPIDVFWQSSEPPAGLWLPPQDVPGYRGRG

SEQ ID NO: 49792 - protein, 152 aa, Sphingobium chlorophenolicum
  REGION 1..152: note = tr|A0A081RDT6|A0A081RDT6_SPHCR NADPH-dependent 7-cyano-7-deazaguanine reductase OS=Sphingobium chlorophenolicum OX=46429 GN=queF PE=3 SV=1
MTDMPTPIHLGQTSALPTRPEEAVLDYVPNPRPGKPYLVRFAAPEFTSLCPVTGQPDFAHLVIDYAPAATIVESKSLKLFLGSFRNHAAFHEDCTVGIGERLFAEMNPVWLRIGGYWYPRGGIPIDVFWQSGEPPAGLWLPPQDVPGYRGRG

SEQ ID NO: 49793 - protein, 162 aa, Sphingobium chlorophenolicum
  REGION 1..162: note = tr|F6EYS7|F6EYS7_SPHCR NADPH-dependent 7-cyano-7-deazaguanine reductase OS=Sphingobium chlorophenolicum L-1 OX=690566 GN=queF PE=3 SV=1
MPCNGVDGLPMTDMPTPIHLGQTSALPTRPEEAVLDYVPNPRPGKPYLVRFAAPEFTSLCPVTGQPDFAHLVIDYAPSATIVESKSLKLFLGSFRNHAAFHEDCTVGIGERLFAEMNPVWLRIGGYWYPRGGIPIDVFWQSGEPPAGLWLPPQDVPGYRGRG

SEQ ID NO: 49794 - protein, 152 aa, Sphingobium chungbukense
  REGION 1..152: note = tr|A0A0M3B036|A0A0M3B036_9SPHN NADPH-dependent 7-cyano-7-deazaguanine reductase OS=Sphingobium chungbukense OX=56193 GN=queF PE=3 SV=1
MTDTPIPLHLGQTSALPSRPEDAVLDYVPNPRPGKPYLVRFTAPEFTSLCPVTGQPDFAHLVIDYAPAATIVESKSLKLFLGSFRNHAAFHEDCTVGIGERLFAEMNPVWLRIGGYWYPRGGIPIDVFWQSGEPPAGLWLPAQDVPGYRGRG

SEQ ID NO: 49795 - protein, 152 aa, Sphingobium cloacae
  REGION 1..152: note = tr|A0A1E1F688|A0A1E1F688_9SPHN NADPH-dependent 7-cyano-7-deazaguanine reductase OS=Sphingobium cloacae; OX = 120107 GN=queF PE=3 SV=1
MTDMPPPIHLGQTSALPQRPEEAVLDYVPNPRPGKPYLVRFTAPEFTSLCPVTGQPDFAHLVIDYAPAATIVESKSLKLFLGAFRNHAAFHEDCTVGIGERLFTEMEPLWLRIGGYWYPRGGIPIDVFWQSGDPPAGLWLPPQDVPGYRGRG

SEQ ID NO: 49796 - protein, 153 aa, unidentified
  source 1..153: note = Sphingobium cupriresistens
  REGION 1..153: note = tr|A0A4Q4JRG0|A0A4Q4JRG0_9SPHN NADPH-dependent 7-cyano-7-deazaguanine reductase OS=Sphingobium cupriresistens OX=1132417 GN=queF PE=3 SV=1
MTDLPTAPLHLGQSSALPASPEAAVLDYVPNPRPGKPYLVRFTAPEFTSLCPVTGQPDFAHLVIDYAPGATIVESKSLKLFLGAFRNHAAFHEDCTVGIGERLFAEMDPVWLRIGGYWYPRGGIPIDVFWQSGEPPAGLWLPAQDVPGYRGRG

SEQ ID NO: 49797 - protein, 153 aa, unidentified; identical to SEQ ID NO: 49796
  source 1..153: note = Sphingobium czechense
  REGION 1..153: note = tr|A0A0J7XSM2|A0A0J7XSM2_9SPHN NADPH-dependent 7-cyano-7-deazaguanine reductase OS=Sphingobium czechense LL01 OX=1420583 GN=queF PE=3 SV=1

SEQ ID NO: 49798 - protein, 152 aa, Sphingobium faniae
  REGION 1..152: note = tr|A0A1G4SZ90|A0A1G4SZ90_9SPHN NADPH-dependent 7-cyano-7-deazaguanine reductase OS=Sphingobium faniae; OX = 570446 GN=queF PE=3 SV=1
MTDTSPPIHLGQASALPRRPEEAVLDYVPNPRPGKPYLVRFTAPEFTSLCPVTGQPDFAHLVIDYAPAATIVESKSLKLFLGSFRNHAAFHEDCTVGIAERLFTEMQPLWLRIGGYWYPRGGIPIDVFWQSDDPPAGLWLPSQDVPGYRGRG

SEQ ID NO: 49799 - protein, 154 aa, Sphingobium francense
  REGION 1..154: note = tr|A0A4Q4J7Q6|A0A4Q4J7Q6_9SPHN NADPH-dependent 7-cyano-7-deazaguanine reductase OS=Sphingobium francense; OX = 332057 GN=queF PE=3 SV=1
MPTPLQPSPIHLGQTSALPARPEDAVLDYVPNPRPGKPYLVRFTAPEFTSLCPVTGQPDFAHLVIDYAPAATIVESKSLKLFLGAFRNHAAFHEDCTVGIGERLFAEMNPVWLRIGGYWYPRGGIPIDVFWQSGEPPAGLWLPPQDVPGYRGRG

SEQ ID NO: 49800 - protein, 152 aa, Sphingobium fuliginis
  REGION 1..152: note = tr|A0A4Q4J137|A0A4Q4J137_SPHSA NADPH-dependent 7-cyano-7-deazaguanine reductase OS=Sphingobium fuliginis (strain ATCC 27551) OX=336203 GN=queF PE=3 SV=1
MTDMPTPLHLGQASALPARPEDAVLDYVPNPRPGNPYLVRFTAPEFTSLCPVTGQPDFAHLVIDYAPAATIVESKSLKLFLGSFRNHAAFHEDCTVGIGERLFAEMNPIWLRIGGYWYPRGGIPIDVFWQSGEPPAGLWLPSQDVPGYRGRG

SEQ ID NO: 49801 - protein, 152 aa, Sphingobium fuliginis
  REGION 1..152: note = tr|A0A5B8CM63|A0A5B8CM63_SPHSA NADPH-dependent 7-cyano-7-deazaguanine reductase OS=Sphingobium fuliginis ATCC 27551 OX=1208342 GN=queF PE=3 SV=1
MTDMPTPLHLGQASALPARPEDAVLDYVPNPRPGKPYLVRFTAPEFTSLCPVTGQPDFAHLVIDYAPAATIVESKSLKLFLGSFRNHAAFHEDCTVGIGERLFAEMNPIWLRIGGYWYPRGGIPIDVFWQSGEPPAGLWLPSQDVPGYRGRG

SEQ ID NO: 49802 - protein, 172 aa, Sphingobium herbicidovorans
  REGION 1..172: note = tr|A0A086PA18|A0A086PA18_SPHHM NADPH-dependent 7-cyano-7-deazaguanine reductase OS=Sphingobium herbicidovorans (strain ATCC 700291 / DSM 11019 / NBRC 16415 / MH) OX= 1219045 GN=queF PE=3 SV=1
MGGAAVTLGVQSRRWPVMTDTPEPVKPIHLGQSSALPASPEDAVLDYVPNPRPGKPYLVRFTAPEFTSLCPVTGQPDFAHLVIDYAPAATIVESKSLKLFLGAFRNHAAFHEDCTVGIGERLFAEMQPLWLRIGGYWYPRGGIPIDVFWQSGEPPAGLWLPAQDVPGYRGRG

SEQ ID NO: 49803 - protein, 153 aa, unidentified
  source 1..153: note = Sphingobium hydrophobicum
  REGION 1..153: note = tr|A0A249MSB2|A0A249MSB2_9SPHN NADPH-dependent 7-cyano-7-deazaguanine reductase OS=Sphingobium hydrophobicum OX=1673076 GN=queF PE=3 SV=1
MTDPALTPLHLGQTSALPARPEEAVLDYVPNPRPGRNYLVRFAAPEFTSLCPVTGQPDFAHLVIDYAPGDTIVESKSLKLFLGSFRNHAAFHEDCTVGIGERLFTEMKPVWLRIGGYWYPRGGIPIDVFWQSGAPPQDLWLPAQDVPGYRGRG

SEQ ID NO: 49804 - protein, 154 aa, Sphingobium indicum; identical to SEQ ID NO: 49799
  REGION 1..154: note = tr|A0A1L5BPS8|A0A1L5BPS8_SPHIB NADPH-dependent 7-cyano-7-deazaguanine reductase OS=Sphingobium indicum (strain DSM 16412 / CCM 7286 / MTCC 6364 / B90A) OX=861109; GN = queF PE=3 SV=1

SEQ ID NO: 49805 - protein, 157 aa, Sphingobium japonicum
  REGION 1..157: note = tr|D4YYU4|D4YYU4_SPHJU NADPH-dependent 7-cyano-7-deazaguanine reductase OS=Sphingobium japonicum (strain DSM 16413 / CCM 7287 / MTCC 6362 / UT26 / NBRC 101211 / UT26 S) OX=452662 GN=ykvM PE=3 SV=1
MTDMPTPLQPSPIHLGQTSALPARPEDAVLDYVPNPRPGKPYLVRFTAPEFTSLCPVTGQPDFAHLVIDYAPAATIVESKSLKLFLGAFRNHAAFHEDCTVGIGERLFAEMNPIWLRIGGYWYPRGGIPIDVFWQSGEPPAGLWLPPQDVPGYRGRG

SEQ ID NO: 49806 - protein, 153 aa, Sphingobium japonicum
  REGION 1..153: note = tr|N1MSF8|N1MSF8_9SPHN NADPH-dependent 7-cyano-7-deazaguanine reductase OS=Sphingobium japonicum BiD32 OX=1301087 GN=queF PE=3 SV=1
MTDPAMTPLHLGQTSALPTRPEEAVLDYVPNPRPGRTYLVRFAVPEFTSLCPVTGQPDFAHLVIDYAPGDTIVESKSLKLFLGSFRNHAAFHEDCTVGIGERLFTEMKPVWLRIGGYWYPRGGIPIDVFWQSGAPPQDLWLPSQDVPGYRGRG

SEQ ID NO: 49807 - protein, 153 aa, Sphingobium lactosutens
  REGION 1..153: note = tr|T0HN69|T0HN69_9SPHN NADPH-dependent 7-cyano-7-deazaguanine reductase OS=Sphingobium lactosutens DS20 OX=1331060 GN=queF PE=3 SV=1
MTDLPTTPIHLGQTSALPASPQDAVLDYVPNPRPGRPYLVRFTAPEFTSLCPVTGQPDFAHLVIDYAPGDTIVESKSLKLFLGAFRNHAGFHEDCTVGIGERLFAEMRPVWLRIGGYWYPRGGIPIDVFWQSGEPPAGMWLPPQDVPGYRGRG

SEQ ID NO: 49808 - protein, 153 aa, unidentified
  source 1..153: note = Sphingobium limneticum
  REGION 1..153: note = tr|A0A5J5HIL6|A0A5J5HIL6_9SPHN NADPH-dependent 7-cyano-7-deazaguanine reductase QueF OS=Sphingobium limneticum OX=1007511 GN=queF PE=4 SV=1
MTDLSTTPLHLGQTSALPASPEQAVLDYVPNPRPGKPYLVRFTAPEFTSLCPVTGQPDFAHLVIDYAPADTIVESKSLKLFLGSFRNHAAFHEDCTVGIGQRLFDEMKPIWLRIGGYWYPRGGIPIDVFWQSDVPPAGLWLPAQDVPGYRGRG

SEQ ID NO: 49809 - protein, 153 aa, unidentified; identical to SEQ ID NO: 49785
  source 1..153: note = Sphingobium paulinellae
  REGION 1..153: note = tr|A0A5J5HZY1|A0A5J5HZY1_9SPHN NADPH-dependent 7-cyano-7-deazaguanine reductase QueF OS=Sphingobium paulinellae OX=2048545 GN=queF PE=4 SV=1

SEQ ID NO: 49810 - protein, 129 aa, Sphingobium quisquiliarum
  REGION 1..129: note = tr|T0HNL3|T0HNL3_9SPHN NADPH-dependent 7-cyano-7-deazaguanine reductase OS=Sphingobium quisquiliarum P25 OX=1329909 GN=queF PE=3 SV=1
MLDYVLNPRPGKPYLVRFTAPEFTSLCPVTGQPDFAHLVIDYAPAATIVESKSLKLFLGSFRNHAAFHEDCTVGIGERLFAEMQPLWLRIGGYWYPRGGIPIDVFWQSGEPPAGLWLPPQDVPGYRGRG

SEQ ID NO: 49811 - protein, 157 aa, Sphingobium sp.
  REGION 1..157: note = tr|A0A196M9L8|A0A196M9L8_9SPHN NADPH-dependent 7-cyano-7-deazaguanine reductase OS=Sphingobium sp. TCM1; OX = 453246 GN=queF PE=3 SV=1
MTDLPTQPPHLTLHLGQTSALPARPEDAVLDYVPNPRPGKPYLVRFTAPEFTSLCPVTGQPDFAHLVIDYAPGATIVESKSLKLFLGAFRNHAAFHEDCTVGIGERLFEEMQPLWLRIGGYWYPRGGIPIDVFWQSGEPPAGLWLPPQDVPGYRGRG

SEQ ID NO: 49812 - protein, 152 aa, Sphingobium sp.; identical to SEQ ID NO: 49801
  REGION 1..152: note = tr|A0A197BYZ5|A0A197BYZ5_9SPHN NADPH-dependent 7-cyano-7-deazaguanine reductase OS=Sphingobium sp. 20006FA OX=2056888 GN=queF PE=3 SV=1

SEQ ID NO: 49813 - protein, 152 aa, Sphingobium ummariense
  REGION 1..152: note = tr|T0K7M0|T0K7M0_9SPHN NADPH-dependent 7-cyano-7-deazaguanine reductase OS=Sphingobium ummariense RL-3 OX=1346791 GN=queF PE=3 SV=1
MTDIPQPLHLGRASALPQRPEDAVLDYVPNPRPGKPYLVRFTAPEFTSLCPVTGQPDFAHLVIDYAPAATIVESKSLKLFLGAFRNHAAFHEDCTVGIGERLFDEMQPHWLRIGGYWYPRGGIPIDVFWQSGEPPAGLWLPPQDVPGYRGRG

SEQ ID NO: 49814 - protein, 164 aa, Sphingobium wenxiniae
  REGION 1..164: note = tr|A0A562KCW6|A0A562KCW6_SPHWJ NADPH-dependent 7-cyano-7-deazaguanine reductase OS=Sphingobium wenxiniae (strain DSM 21828 / JZ-1) OX=595605 GN=queF PE=3 SV=1
MTLCVQSRRWAAMTDTPHPIHLGRTSALPQRPEEAVLDYVPNPRPGKPYLVRFTAPEFTSLCPVTGQPDFAHLVIDYAPAATIVESKSLKLFLGAFRNHAAFHEDCTVGIGERLFTEMKPLWLRIGGYWYPRGGIPIDVFWQSGEPPAGMWLPPQDVPGYRGRG

SEQ ID NO: 49815 - protein, 153 aa, Sphingobium xenophagum
  REGION 1..153: note = tr|A0A401IXH5|A0A401IXH5_SPHXE NADPH-dependent 7-cyano-7-deazaguanine reductase OS=Sphingobium xenophagum; OX = 121428 GN=queF PE=3 SV=1
MTDPALTPLHLGQTSALPARPEEAVLDYVPNPRPGRNYLVRFAAPEFTSLCPVTGQPDFAHLVIDYAPGDTIVESKSLKLFLSSFRNHAAFHEDCTVGIGERLFTEMKPVWLRIGGYWYPRGGIPIDVFWQSGAPPQDLWLPAQDVPGYRGRG

SEQ ID NO: 49816 - protein, 150 aa, Sphingobium yanoikuyae
  REGION 1..150: note = tr|K9DCI9|K9DCI9_SPHYA NADPH-dependent 7-cyano-7-deazaguanine reductase OS=Sphingobium yanoikuyae ATCC 51230 OX=883163 GN=queF PE=3 SV=1
MTDTPLHLGRASTLPQRPEDAVLDYVPNPRPGKPYLVRFTAPEFTSLCPVTGQPDFAHLVIDYAPGATIVESKALKLFLGSFRNHAGFHEDCTVGIGERLFTEMQPIWLRIGGYWYPRGGIPIDVFWQSGEPPAGLWLPPQDVPGYRGRG

SEQ ID NO: 49817 - protein, 150 aa, Sphingobium yanoikuyae; identical to SEQ ID NO: 49816
  REGION 1..150: note = tr|A0A085KBT2|A0A085KBT2_SPHYA NADPH-dependent 7-cyano-7-deazaguanine reductase OS=Sphingobium yanoikuyae; OX = 13690 GN=queF PE=3 SV=1

SEQ ID NO: 49818 - protein, 152 aa, unidentified
  source 1..152: note = Sphingomonadaceae bacterium
  REGION 1..152: note = tr|A0A257DI80|A0A257DI80_9SPHN NADPH-dependent 7-cyano-7-deazaguanine reductase OS=Sphingomonadaceae bacterium PASS1 OX=2015579 GN=queF PE=3 SV=1
MTDELKPMYLGAQSALPQTPEEAELDYVPNPRPDTLYLARFAVPEFTSLCPVTAQPDFAHLVIDYAPDKSIVESKSLKLFLGSFRNHAAFHEDCTVGIGQRLFSEMKPHWLRIGGYWYPRGGIPIDVFWQSGEPPKGLWLPDQGVAPYRGRG

SEQ ID NO: 49819 - protein, 152 aa, unidentified
  source 1..152: note = Sphingomonadaceae bacterium
  REGION 1..152: note = tr|A0A2D6KP45|A0A2D6KP45_9SPHN NADPH-dependent 7-cyano-7-deazaguanine reductase OS=Sphingomonadaceae bacterium OX=1930536 GN=queF PE=3 SV=1
MSDTPAPKFLGANTALPASPEEAELDYVPNPRAGQLYMVRFAAPEFTSLCPVTGQPDFAHLVIDYAPGETIVESKSLKLFLGSFRNHCGFHEDVTVGIGQRLFDEMQPQWLRIGGYWYPRGGIPIDVFWQSGAPPAALWLPDQGVSSYRGRG

SEQ ID NO: 49820 - protein, 149 aa, unidentified
  source 1..149: note = Sphingomonadales bacterium
  REGION 1..149: note = tr|A0A258JB69|A0A258JB69_9SPHN NADPH-dependent 7-cyano-7-deazaguanine reductase OS=Sphingomonadales bacterium 32-65-25 OX=1970594 GN=queF PE=3 SV=1
MVDVLHLGQSSALPASPEAAVLDYPPNPRPGAIFLVRFTCPEFTSLCPVTGQPDFAHIVIDYVPHETIVESKALKLFLGAFRNHAGFHEDVTVGIGQRLVAEMKPKWLRIGGYWYPRGGIPIDVFWQSGPVPDGLWLPDQGVPTYRGRG

SEQ ID NO: 49821 - protein, 152 aa, unidentified
  source 1..152: note = Sphingomonadales bacterium
  REGION 1..152: note = tr|A0A1G3JSQ8|A0A1G3JSQ8_9SPHN NADPH-dependent 7-cyano-7-deazaguanine reductase OS=Sphingomonadales bacterium RIFCSPHIGHO2_01_FULL_65_20 OX=1802169 GN=queF; PE = 3 SV=1
MTDQPQTRFLGKDSPMPTSPEEAVLDYVPNPRPGRPYLVRFTAPEFTSLCPVTGQPDFAHLVIDYAPDKVMVESKSLKLFLGSFRNHQAFHEDCTVGIAERLFEEMQPHWLRIGGYWYPRGGIPIDVFWQSGEPPAGLWLPPQDVPGYRGRG

SEQ ID NO: 49822 - protein, 148 aa, Sphingomonas adhaesiva
  REGION 1..148: note = tr|A0A2A4I790|A0A2A4I790_9SPHN NADPH-dependent 7-cyano-7-deazaguanine reductase OS=Sphingomonas adhaesiva; OX = 28212 GN=queF PE=3 SV=1
MTPKFLGQASTLPASPEEAALDYVPNPRPGTAYLVRFVQPEFTSLCPVTGQPDFAHLVIDYVPGDTIVESKSLKLFLGSFRNHAAFHEDCTVGIGDRLFREMAPRWLRIGGYWYPRGGMPIDVFWQSGPPPEGVWLPDQGVAPYRGRG

SEQ ID NO: 49823 - protein, 152 aa, Sphingomonas aerolata
  REGION 1..152: note = tr|A0A2T4YPE2|A0A2T4YPE2_9SPHN NADPH-dependent 7-cyano-7-deazaguanine reductase OS=Sphingomonas aerolata; OX = 185951 GN=queF PE=3 SV=1
MTAPTNPLYLGQNSALPASPEEAVLDYVPNPRVGRTYLVRFAVPEFTSLCPVTGQPDFAHLVIDYVPGETIVESKSLKLFLGSFRNHAGFHEDCTVGIGERLFDEMKPVWLRIGGYWYPRGGIPIDVFWQSSAPPADLWLPDQGVAPYRGRG

SEQ ID NO: 49824 - protein, 148 aa, Sphingomonas aquatilis
  REGION 1..148: note = tr|A0A511Q6Y6|A0A511Q6Y6_9SPHN NADPH-dependent 7-cyano-7-deazaguanine reductase OS=Sphingomonas aquatilis NBRC 16722 OX=1219039 GN=queF PE=3 SV=1
MTPMHLGQTSQLPASPEEAVLDYVPNPRLGTTYLVRFAVPEFTSLCPVTGQPDFAHLVLDYVPGDTIVESKSLKLFLGSFRNHAAFHEDCTVGIGRRLFDEMKPQWLRIGGYWYPRGGIPIDVFWQSSAPPADLWLPDQGVASYRGRG

SEQ ID NO: 49825 - protein, 158 aa, Sphingomonas aurantiaca
  REGION 1..158: note = tr|A0A2T5GTH4|A0A2T5GTH4_9SPHN NADPH-dependent 7-cyano-7-deazaguanine reductase OS=Sphingomonas aurantiaca OX=185949 GN=queF PE=3 SV=1
MTASQNPHNPQNPLHLGQNSALPASPEEAVLDYVPNPRPGRTYLVRFAAPEFTSLCPVTGQPDFAHLVIDYVPGETIVESKSLKLFLSSFRNHAGFHEDCTVGIGERLFDEMKPVWLRIGGYWYPRGGIPIDVFWQSSAPPQDLWLPDQGVASYRGRG

SEQ ID NO: 49826 - protein, 148 aa, unidentified
  source 1..148: note = Sphingomonas bacterium
  REGION 1..148: note = tr|A0A3D0WB85|A0A3D0WB85_9SPHN NADPH-dependent 7-cyano-7-deazaguanine reductase OS=Sphingomonas bacterium; OX = 1895847 GN=queF PE=3 SV=1
MTPKHLGQTSALPASPDEAVLDYVPNPRPGSLYCVRFAAPEFTSLCPVTAQPDFAHLVIDYAPAETIVESKSLKLFLGSFRNHAAFHEDCTVGIGERLFREMSPRWLRIGGYWYPRGGIPIDVFWQSGPSPEGLWVPDQGVAGYRGRG

SEQ ID NO: 49827 - protein, 151 aa, unidentified
  source 1..151: note = Sphingomonas carotinifaciens
  REGION 1..151: note = tr|A0A1G7FNY2|A0A1G7FNY2_9SPHN NADPH-dependent 7-cyano-7-deazaguanine reductase OS=Sphingomonas carotinifaciens OX=1166323 GN=queF PE=3 SV=1
MASMNPMHLGQTSTLPASPDEAVLDYVPNPRPGRTYLVRFAAPEFTSLCPVTGQPDFAHLVIDYVPGETIVESKSLKLFLGSFRNHAGFHEDCTVGIGERLFNEMKPVWLRIGGYWYPRGGIPIDVFWQSAAPPAALWLPDQGVSGYRGRG

SEQ ID NO: 49828 - protein, 148 aa, Sphingomonas changbaiensis
  REGION 1..148: note = tr|A0A0E9MS70|A0A0E9MS70_9SPHN NADPH-dependent 7-cyano-7-deazaguanine reductase OS=Sphingomonas changbaiensis NBRC 104936 OX=1219043 GN=queF PE=3 SV=1
MNITHLGQQSSLPARPEDAVLDYVPNPRPGRPYLVRFTAPEFTSLCPVTGQPDFAHLVIDYAPQATIVESKSLKLFLSSFRNHAAFHEDCTVGIGERLFAEMQPHWLRIGGYWYPRGGIPIDVFWQSGHPPAGLWLPSQDVPGYRGRG

SEQ ID NO: 49829 - protein, 148 aa, Sphingomonas desiccabilis
  REGION 1..148: note = tr|A0A4Q2ISC9|A0A4Q2ISC9_9SPHN NADPH-dependent 7-cyano-7-deazaguanine reductase OS=Sphingomonas desiccabilis OX=429134 GN=queF PE=3 SV=1
MTPKHLGQSSGLPASPEQAELDYVPNPREGSRYCVRFTVPEFTSLCPVTGQPDFAHLVLDYVPDATIVESKSLKLFLGSFRNHAAFHEDCTVGIGERLFAEMKPLWLRIGGYWYPRGGIPIDVFWQSGEPPAGVWIPSQDVPGYRGRG

SEQ ID NO: 49830 - protein, 147 aa, Sphingomonas dokdonensis
  REGION 1..147: note = tr|A0A245ZMW5|A0A245ZMW5_9SPHN NADPH-dependent 7-cyano-7-deazaguanine reductase OS=Sphingomonas dokdonensis OX=344880 GN=queF PE=3 SV=1
MTLHLGQNSPLPASPEEAVLDYVPNPRPGRQYLVRFVSPEFTSLCPVTGQPDFAHLVIDYVPGDTIVESKSLKLFLGSFRNHAAFHEDCTVGIGERLAEEMKPEWLRIGGYWYPRGGIPIDVFWQTGAPPADLWLPDQGVPSYRGRG

SEQ ID NO: 49831 - protein, 150 aa, unidentified
  source 1..150: note = Sphingomonas edaphi
  REGION 1..150: note = tr|A0A418Q2V1|A0A418Q2V1_9SPHN NADPH-dependent 7-cyano-7-deazaguanine reductase OS=Sphingomonas edaphi; OX = 2315689 GN=queF PE=3 SV=1
MNLTPKHLGQTSALPTSPDKAELDYVPNPRGGELYLVRFAATEFTSLCPVTGQPDFAHLVIDYAPGDTIVESKSLKLFLGAFRNHAAFHEDCTVGIGKRLFDEMKPTWLRIGGYWYPRGGIPIDVFWQSGEPPKGLWLPDQGVAPYRGRG

SEQ ID NO: 49832 - protein, 151 aa, unidentified
  source 1..151: note = Sphingomonas elodea
  REGION 1..151: note = tr|A0A495EYP3|A0A495EYP3_SPHEL NADPH-dependent 7-cyano-7-deazaguanine reductase OS=Sphingomonas elodea; OX = 179878 GN=queF PE=3 SV=1
MAAMDAKHLGKQSALPASPEEAELDYVPNPRAGTRYLVRFAAPEFTSLCPITGAPDFAHLVIDYVPGEKIVESKSLKLFLGSFRNHGAFHEDCTVGIGERLFREMQPLWLRIGGYWYPRGGIPIDVFWQSGKPPEDVWIPDQGVPGYRGRG

SEQ ID NO: 49833 - protein, 148 aa, unidentified
  source 1..148: note = Sphingomonas endophytica
  REGION 1..148: note = tr|A0A147I6D9|A0A147I6D9_9SPHN NADPH-dependent 7-cyano-7-deazaguanine reductase OS=Sphingomonas endophytica OX=869719 GN=queF PE=3 SV=1
MTPMHLGQTSTLPTSPEEAVLDYVPNPRAGTIYLVRFTQPEFTSLCPVTGQPDFAHLVIDYAPAETIVESKSLKLFLGSFRNHAAFHEDCTVGIGERLFREMHPQWLRIGGYWYPRGGMPIDVFWQSGAAPAGLWLPDQGVAPYRGRG

SEQ ID NO: 49834 - protein, 152 aa, Sphingomonas faeni
  REGION 1..152: note = tr|A0A2T5U371|A0A2T5U371_9SPHN NADPH-dependent 7-cyano-7-deazaguanine reductase OS=Sphingomonas faeni; OX = 185950 GN=queF PE=3 SV=1
MTAPQNPLHLGQNSALPASPEEAVLDYVPNPRPGRTYLVRFAAPEFTSLCPVTGQPDFAHLVIDYVPGETIVESKSLKLFLSSFRNHAGFHEDCTVGIGERLFDEMKPVWLRIGGYWYPRGGIPIDVFWQSSAPPHDLWLPDQGVAPYRGRG

SEQ ID NO: 49835 - protein, 148 aa, Sphingomonas fennica
  REGION 1..148: note = tr|A0A2T4HT89|A0A2T4HT89_9SPHN NADPH-dependent 7-cyano-7-deazaguanine reductase OS=Sphingomonas fennica; OX = 114404 GN=queF PE=3 SV=1
MNPIHLGQASALPASPEEAVLDYVPNPRVGSLYMVRFAAPEFTSLCPVTGQPDFAHLVIDYAPGETIVESKSLKLFLGSFRNHRAFHEDCTVGIGQRLFDEMKPEWLRIGGYWYPRGGIPIDVFWQSGPPPAGLWLPDQGVAPYRGRG

SEQ ID NO: 49836 - protein, 148 aa, unidentified
  source 1..148: note = Sphingomonas gei
  REGION 1..148: note = tr|A0A4S1XBD5|A0A4S1XBD5_9SPHN NADPH-dependent 7-cyano-7-deazaguanine reductase OS=Sphingomonas gei; OX = 1395960 GN=queF PE=3 SV=1
MEPKHLGQTSALPATPEEAVLDYVANPRPGSRYMIRFAAPEFTSLCPITGQPDFAHLVIDYVPGDTIVESKSLKLFLGSFRNHGAFHEDCTVGIGERLFEEMKPKWLRIGGYWYPRGGIPIDIFWQSGLAPSGVWIPPQDVPGYRGRG

SEQ ID NO: 49837 - protein, 148 aa, Sphingomonas ginsenosidimutans
  REGION 1..148: note = tr|A0A2A4HXP1|A0A2A4HXP1_9SPHN NADPH-dependent 7-cyano-7-deazaguanine reductase OS=Sphingomonas ginsenosidimutans OX=862134 GN=queF PE=3 SV=1
MTPKFLGQASTLPASPEEAALDYVPNPRPGTHYLVRFVQPEFTSLCPVTGQPDFAHLVIDYVPGDTIVESKSLKLFLGSFRNHAAFHEDCTVGIGDRLFREMAPRWLRIGGYWYPRGGMPIDVFWQSGPPPEGVWLPDQGVAPYRGRG

SEQ ID NO: 49838 - protein, 148 aa, unidentified
  source 1..148: note = Sphingomonas ginsenosidivorax
  REGION 1..148: note = tr|A0A5C6UHH2|A0A5C6UHH2_9SPHN NADPH-dependent 7-cyano-7-deazaguanine reductase OS=Sphingomonas ginsenosidivorax OX=862135 GN=queF PE=3 SV=1
MTPTHLGQTSTLPATPEEAILDYVPNPRRGQTYLVRFAVPEFTSLCPVTGQPDFAHLVIDYVPGETIVESKSLKLFLGSFRNHAAFHEDCTVGIGMRLFDEMEPAWLRIGGYWYPRGGIPIDVFWQSSAPPAGLWLPDQGVSAYRGRG

SEQ ID NO: 49839 - protein, 148 aa, Sphingomonas glacialis
  REGION 1..148: note = tr|A0A502FKY3|A0A502FKY3_9SPHN NADPH-dependent 7-cyano-7-deazaguanine reductase OS=Sphingomonas glacialis; OX = 658225 GN=queF PE=3 SV=1
MTPTHLGQTSTLPASPEEAVLDYVPNPRPGRLYLVRFAVPEFTSLCPVTAQPDFAHLVIDYAPAATIVESKSLKLFLGSFRNHQAFHEDCTVGIGERLFTEMQPAWLRIGGYWYPRGGIPIDVFWQSGAPPEGLWLPSQDVPGYRGRG

SEQ ID NO: 49840 - protein, 148 aa, unidentified
  source 1..148: note = Sphingomonas guangdongensis
  REGION 1..148: note = tr|A0A285QI70|A0A285QI70_9SPHN NADPH-dependent 7-cyano-7-deazaguanine reductase OS=Sphingomonas guangdongensis OX=1141890 GN=queF PE=3 SV=1
MTPLHLGQASSLPASPEEAVLDYVPNPRSGTRYLVRFAVPEFTSLCPVTGQPDFAHLVIDYVPAATIVESKSLKLFLGAFRNHAAFHEDCTVGIGERLTAEMQPHWLRIGGYWYPRGGIPIDVFWQSGPPPADVWVPDQGVASYRGRG

SEQ ID NO: 49841 - protein, 148 aa, Sphingomonas haloaromaticamans
  REGION 1..148: note = tr|A0A1S1HKB4|A0A1S1HKB4_9SPHN NADPH-dependent 7-cyano-7-deazaguanine reductase OS=Sphingomonas haloaromaticamans OX=653954 GN=queF PE=3 SV=1
MNPIHLGQASALPASPEEAVLDYVPNPRVGSLYLVRFAAPEFTSLCPVTGQPDFAHLVIDYAPGETIVESKSLKLFLGSFRNHRAFHEDCTVGIGQRLFDEMKPEWLRIGGYWYPRGGIPIDVFWQSGPPPAGLWLPDQGVAPYRGRG

SEQ ID NO: 49842 - protein, 147 aa, unidentified
  source 1..147: note = Sphingomonas hengshuiensis
  REGION 1..147: note = tr|A0A2W4ZHQ3|A0A2W4ZHQ3_9SPHN NADPH-dependent 7-cyano-7-deazaguanine reductase OS=Sphingomonas hengshuiensis OX=1609977 GN=queF PE=3 SV=1
MDPKFLGQASPLPATPEAAELDYVPNPRTSPYLVRFTAPEFTSLCPVTGQPDFAHLVIDYVPGATIVESKSLKLFLGSFRNHAAFHEDCTVGIAERLVAEMQPAWLRIGGYWYPRGGIPIDVFWQSGEPPRTVWIPDQGVPGYRGRG

SEQ ID NO: 49843 - protein, 148 aa, unidentified
  source 1..148: note = Sphingomonas hengshuiensis
  REGION 1..148: note = tr|A0A2W5BPE0|A0A2W5BPE0_9SPHN NADPH-dependent 7-cyano-7-deazaguanine reductase OS=Sphingomonas hengshuiensis OX=1609977 GN=queF PE=3 SV=1
MTPKYLGQASPLPTSPDAAILDYVPNPRAGQRYLVRFAAPEFTSLCPVTAQPDFAHLVIDYVPGATIVESKSLKLFLGSFRNHQSFHEDCTVGIGMRLSEEMQPVWLRIGGYWYPRGGIPIDVFWQSGPPPEGVWIPAQDVPPYRGRG

SEQ ID NO: 49844 - protein, 150 aa, Sphingomonas histidinilytica
  REGION 1..150: note = tr|A0A1T5AUU7|A0A1T5AUU7_9SPHN NADPH-dependent 7-cyano-7-deazaguanine reductase OS=Sphingomonas histidinilytica OX=439228 GN=queF PE=3 SV=1
MSASTLHLGKTSTLPASPEQAVLDYVPNPRPGTLYLIRFAAPEFTSLCPVTGQPDFAHLVIDYAPGETIVESKSLKLFLASFRNHAGFHEDCTVGIGQRLAEEMRPVWLRIGGYWYPRGGIPIDVFWQSGPAPEGLWVPDQGVPGYRGRG

SEQ ID NO: 49845 - protein, 175 aa, unidentified
  source 1..175: note = Sphingomonas indica
  REGION 1..175: note = tr|A0A1X7FZ99|A0A1X7FZ99_9SPHN NADPH-dependent 7-cyano-7-deazaguanine reductase OS=Sphingomonas indica; OX = 941907 GN=queF PE=3 SV=1
MVRNGAASAAFAGMASGPRANALSDAAMSITHLGQTSSLPASPDAATLDYVPNPRTGRAYLVRFTAPEFTSLCPVTGQPDFAHIVIDYAPGETIVESKSLKLFLGSFRNHAGFHEDVTVGIAERLVQEMAPQWLRIGGYWYPRGGIPIDVFWQSGEPPVGLWVPPQDVPGYRGRG

SEQ ID NO: 49846 - protein, 151 aa, unidentified
  source 1..151: note = Sphingomonas jatrophae
  REGION 1..151: note = tr|A0A1I6LCN8|A0A1I6LCN8_9SPHN NADPH-dependent 7-cyano-7-deazaguanine reductase OS=Sphingomonas jatrophae; OX = 1166337 GN=queF PE=3 SV=1
MAAMEPLHLGRSTPLPASPHEAVLDYVPNPRAGTLYLVRFAAPEFTSLCPVTGQPDFAHLVIDYAPGETIVESKSLKLFLGSFRNHCGFHEDVTVGIGQRLFDEMKPRWLRIGGYWYPRGGIPIDVFWQSDAPPAGLWVPDQGVAGYRGRG

SEQ ID NO: 49847 - protein, 147 aa, unidentified
  source 1..147: note = Sphingomonas jeddahensis
  REGION 1..147: note = tr|A0A1V2EU64|A0A1V2EU64_9SPHN NADPH-dependent 7-cyano-7-deazaguanine reductase OS=Sphingomonas jeddahensis OX=1915074 GN=queF PE=3 SV=1
MTLHLGKTSPLPTTPEEAVLDYVPNPRIGRNYLVRFVSPEFTSLCPVTGQPDFAHIVIDYVPGETIVESKSLKLFLGSFRNHAAFHEDCTVGIGERLVAEMKPLWLRIGGYWYPRGGIPIDVFWQTGAPPADLWVPDQGVPSYRGRG

SEQ ID NO: 49848 - protein, 151 aa, Sphingomonas koreensis
  REGION 1..151: note = tr|A0A1L6J936|A0A1L6J936_9SPHN NADPH-dependent 7-cyano-7-deazaguanine reductase OS=Sphingomonas koreensis; OX = 93064 GN=queF PE=3 SV=1
MARMNPKHLGQQSALPDSPEEAVLDYVPNPRTGTDYLVRFAAPEFTSLCPITGAPDFAHLVIDYVPGETIVESKSLKLFLGSFRNHGAFHEDCTVGIGQRLFDEMKPKWLRIGGYWYPRGGIPIDVFWQSGPAPDGVWIPAQDVPGYRGRG

SEQ ID NO: 49849 - protein, 148 aa, Sphingomonas koreensis
  REGION 1..148: note = tr|A0A430C3D2|A0A430C3D2_9SPHN NADPH-dependent 7-cyano-7-deazaguanine reductase OS=Sphingomonas koreensis; OX = 93064 GN=queF PE=3 SV=1
MNPKHLGQQSALPASPEEAVLDYVPNPRTGIDYLVRFAAPEFTSLCPITGAPDFAHLVIDYVPGETIVESKSLKLFLGSFRNHGAFHEDCTVGIGQRLFDEMKPKWLRIGGYWYPRGGIPIDVFWQSGPAPDGVWIPAQEVPGYRGRG

SEQ ID NO: 49850 - protein, 148 aa, unidentified
  source 1..148: note = Sphingomonas laterariae
  REGION 1..148: note = tr|A0A239JLN1|A0A239JLN1_9SPHN NADPH-dependent 7-cyano-7-deazaguanine reductase OS=Sphingomonas laterariae OX=861865 GN=queF PE=3 SV=1
MNPIHLGQASVQPNSPEEAVLDYVPNPRVGSLYLVRFAAPEFTSLCPVTGQPDFAHLVIDYAPAETIVESKSLKLFLSSFRNHRAFHEDCTVGIGQRLFDEMKPQWLRIGGYWYPRGGMPIDVFWQSGPAPAGLWVPDQGVASYRGRG

SEQ ID NO: 49851 - protein, 148 aa, Sphingomonas melonis
  REGION 1..148: note = tr|A0A175Y0S2|A0A175Y0S2_9SPHN NADPH-dependent 7-cyano-7-deazaguanine reductase OS=Sphingomonas melonis TY OX=621456 GN=queF PE=3 SV=1
MTPMHLGQTSQLPASPEEAVLDYVPNPRLGTTYLVRFAVPEFTSLCPVTGQPDFAHLVLDYVPGDTIVESKSLKLFLGSFRNHAAFHEDCTVGIGQRLFDEMKPQWLRIGGYWYPRGGIPIDVFWQSSAPPADLWLPDQGVASYRGRG

SEQ ID NO: 49852 - protein, 148 aa, Sphingomonas melonis
  REGION 1..148: note = tr|A0A0D1MF00|A0A0D1MF00_9SPHN NADPH-dependent 7-cyano-7-deazaguanine reductase OS=Sphingomonas melonis; OX = 152682 GN=queF PE=3 SV=1
MTPMHLGQTSQLPASPEEAVLDYVPNPRLGTTYLVRFAVPEFTSLCPVTGQPDFAHLVLDYVPGDTIVESKSLKLFLGSFRNHAAFHEDCTVGIGQRLFDEMKPQWLRIGGYWYPRGGIPIDVFWQSSAPPADLWLPDQGVAPYRGRG

SEQ ID NO: 49853 - protein, 147 aa, Sphingomonas mucosissima
  REGION 1..147: note = tr|A0A245ZLD9|A0A245ZLD9_9SPHN NADPH-dependent 7-cyano-7-deazaguanine reductase OS=Sphingomonas mucosissima OX=370959 GN=queF PE=3 SV=1
MTLHLGKNSPLPVSPDEAVLDYVPNPRPGRQYLVRFVSPEFTSLCPVTGQPDFAHLVIDYVPGETIVESKSLKLFLGSFRNHAAFHEDCTVGIGERLAHEMQPVWLRIGGYWYPRGGIPIDVFWQTGPAPADVWVPDQGVPSYRGRG

SEQ ID NO: 49854 - protein, 148 aa, unidentified
  source 1..148: note = Sphingomonas naasensis
  REGION 1..148: note = tr|A0A4S1WH69|A0A4S1WH69_9SPHN NADPH-dependent 7-cyano-7-deazaguanine reductase OS=Sphingomonas naasensis; OX = 1344951 GN=queF PE=3 SV=1
MEPKHLGQASSLPATPEEAELDYVPNPRPGSRYMIRFAAPEFTSLCPITGQPDFAHLVIDYVPGETIVESKSLKLFLGSFRNHGAFHEDCTVGIGERLFGEMKPEWLRIGGYWYPRGGIPIDVFWQSGEPPAGVWIPSQEVPGYRGRG

SEQ ID NO: 49855 - protein, 147 aa, unidentified
  source 1..147: note = Sphingomonas olei
  REGION 1..147: note = tr|A0A4S4GGI6|A0A4S4GGI6_9SPHN NADPH-dependent 7-cyano-7-deazaguanine reductase OS=Sphingomonas olei; OX = 1886787 GN=queF PE=3 SV=1
MTLHLGKATPLPQAPEEAVLDYVPNPRPGRNYLIRFVAPEFTSLCPVTAQPDFAHLVIDYVPGETIVESKSLKLFLGSFRNHAAFHEDCTVGIGERLVAEMNPVWLRIGGYWYPRGGIPIDVFWQTAAPPAGLWVPDQGVPSYRGRG

SEQ ID NO: 49856 - protein, 148 aa, unidentified
  source 1..148: note = Sphingomonas oleivorans
  REGION 1..148: note = tr|A0A2T5FXJ5|A0A2T5FXJ5_9SPHN NADPH-dependent 7-cyano-7-deazaguanine reductase OS=Sphingomonas oleivorans OX=1735121 GN=queF PE=3 SV=1
MSPIHLGQTSALPQTPEAAILDYVPNPRPGRPYLVRFTAPEFTSLCPVTGQPDFAHLVIDYAPGETIVESKSLKLFLGSFRNHAAFHEDCTVGIGERLTSEMKPLWLRIGGYWYPRGGIPIDVFWQSGPVPEGLWLPDQGVPSYRGRG

SEQ ID NO: 49857 - protein, 148 aa, Sphingomonas oligophenolica
  REGION 1..148: note = tr|A0A502CG95|A0A502CG95_9SPHN NADPH-dependent 7-cyano-7-deazaguanine reductase OS=Sphingomonas oligophenolica OX=301154 GN=queF PE=3 SV=1
MTPKFLGQSAPLPASPDEATLDYVPNPRIGTTYLVRFAVPEFTSLCPVTGQPDFAHLVIDYVPGETIVESKSLKLFLGSFRNHCAFHEDCTVGIGQRLAAEMMPAWLRIGGYWYPRGGIPIDVFWQSGAPPEDLWLPDQGVTPYRGRG

SEQ ID NO: 49858 - protein, 148 aa, unidentified
  source 1..148: note = Sphingomonas panacis
  REGION 1..148: note = tr|A0A1B3Z9L7|A0A1B3Z9L7_9SPHN NADPH-dependent 7-cyano-7-deazaguanine reductase OS=Sphingomonas panacis; OX = 1560345 GN=queF PE=3 SV=1
MTPMHLGQTSALPSSPEDAVLDYVPNPRRGRPYLVRFTAPEFTSLCPVTAQPDFAHLVIDYAPGETIVESKSLKLFLGAFRNHQAFHEDCTVGIGERLFAEMRPLWLRIGGYWYPRGGMPIDVFWQSGTPPEGLWLPSQDVPGYRGRG

SEQ ID NO: 49859 - protein, 149 aa, Sphingomonas parapaucimobilis
  REGION 1..149: note = tr|A0A0A1W9B5|A0A0A1W9B5_9SPHN NADPH-dependent 7-cyano-7-deazaguanine reductase OS=Sphingomonas parapaucimobilis NBRC 15100 OX=1219049 GN=queF PE=3 SV=1
MAFMKHLGQTSALPASPEEAVLDYVPNPRPGRTYLVRFAAPEFTSLCPVTGQPDFAHLVIDYVPGETIVESKSLKLFLGSFRNHAGFHEDCTVGIGERLFDEMKPVWLRIGGYWYPRGGIPIDVFWQSSAPPADLWLPDQGVAGYRGRG

SEQ ID NO: 49860 - protein, 167 aa, Sphingomonas paucimobilis
  REGION 1..167: note = tr|A0A031JE61|A0A031JE61_SPHPI NADPH-dependent 7-cyano-7-deazaguanine reductase OS=Sphingomonas paucimobilis OX=13689 GN=queF PE=3 SV=1
MTLCVQWRRWPDMTDTPNLSKPIHLGQTSALPTTPEEAVLDYVPNPRPGKPYLVRFTAPEFTSLCPVTGQPDFAHLVIDYAPAATIVESKSLKLFLGSFRNHAAFHEDCTVGIGERLFAEMQPLWLRIGGYWYPRGGIPIDVFWQSGEPPVGLWLPPQDVPGYRGRG

SEQ ID NO: 49861 - protein, 146 aa, Sphingomonas paucimobilis
  REGION 1..146: note = tr|A0A411LJ83|A0A411LJ83_SPHPI NADPH-dependent 7-cyano-7-deazaguanine reductase OS=Sphingomonas paucimobilis OX=13689 GN=queF PE=3 SV=1
MKHLGQTSALPASPEEAVLDYVPNPRPGRTYLIRFAAPEFTSLCPVTGQPDFAHLVIDYVPGETIVESKSLKLFLGSFRNHAGFHEDCTVGIGERLFEEMKPVWLRIGGYWYPRGGIPIDVFWQSSAPPADLWLPDQGVAGYRGRG

SEQ ID NO: 49862 - protein, 148 aa, unidentified
  source 1..148: note = Sphingomonas pokkalii
  REGION 1..148: note = tr|A0A2U0SIP6|A0A2U0SIP6_9SPHN NADPH-dependent 7-cyano-7-deazaguanine reductase OS=Sphingomonas pokkalii; OX = 2175090 GN=queF PE=3 SV=1
MDAKHLGKQSALPATPEEAELDYVPNPRAGTRYLVRFAAPEFTSLCPITGAPDFAHLVIDYVPGERIVESKSLKLFLGSFRNHGAFHEDCTVGIGERLFREMAPLWLRIGGYWYPRGGIPIDVFWQSGKPPEDVWIPDHGVPGYRGRG

SEQ ID NO: 49863 - protein, 148 aa, Sphingomonas rubra
  REGION 1..148: note = tr|A0A1I5U1S0|A0A1I5U1S0_9SPHN NADPH-dependent 7-cyano-7-deazaguanine reductase OS=Sphingomonas rubra; OX = 634430 GN=queF PE=3 SV=1
MTPKFLGQTAPLPASPQEAVLDYVPNPRAGSTYLVRFAAPEFTSLCPVTGQPDFAHLVIDYAPGDTIVESKSLKLFLGSFRNHAAFHEDCTVGIGERLHAEMAPRWLRIGGYWYPRGGIPIDVFWQSGPPPADLWVPDQGVAPYRGRG

SEQ ID NO: 49864 - protein, 149 aa, Sphingomonas sanguinis
  REGION 1..149: note = tr|A0A147J8M8|A0A147J8M8_9SPHN NADPH-dependent 7-cyano-7-deazaguanine reductase OS=Sphingomonas sanguinis; OX = 33051 GN=queF PE=3 SV=1
MAFMKHLGQTSALPASPEEAVLDYVPNPRPGRTYLIRFAAPEFTSLCPVTGQPDFAHLVIDYVPGETIVESKSLKLFLGSFRNHAGFHEDCTVGIGERLFEEMKPVWLRIGGYWYPRGGIPIDVFWQSSTPPADLWLPDQGVAGYRGRG

SEQ ID NO: 49865 - protein, 149 aa, Sphingomonas sanguinis
  REGION 1..149: note = tr|A0A147J3B6|A0A147J3B6_9SPHN NADPH-dependent 7-cyano-7-deazaguanine reductase OS=Sphingomonas sanguinis; OX = 33051 GN=queF PE=3 SV=1
MAFMKHLGQTSALPASPEEAVLDYVPNPRPGRTYLIRFAAPEFTSLCPVTGQPDFAHLVIDYVPGETIVESKSLKLFLGSFRNHAGFHEDCTVGIGERLFEEMKPVWLRIGGYWYPRGGIPIDVFWQSSAPPADLWLPDQGVAGYRGRG

SEQ ID NO: 49866 - protein, 148 aa, Sphingomonas sanxanigenens
  REGION 1..148: note = tr|W0A3T6|W0A3T6_9SPHN NADPH-dependent 7-cyano-7-deazaguanine reductase OS=Sphingomonas sanxanigenens DSM 19645 = NX02 OX=1123269 GN=queF PE=3 SV=1
MQTTHLGQTSMLPHSPEAATLDYVPNPRPGRPYLVRFTAPEFTSLCPVTGQPDFAHLVIDYAPAETIVESKSLKLFLGAFRNHAAFHEDCTVGIGERLFTEMKPVWLRIGGYWYPRGGIPIDVFWQSGAPPQGMWLPPQDVPGYRGRG

SEQ ID NO: 49867 - protein, 148 aa, Sphingomonas sanxanigenens
  REGION 1..148: note = tr|A0A2W5A547|A0A2W5A547_9SPHN NADPH-dependent 7-cyano-7-deazaguanine reductase OS=Sphingomonas sanxanigenens OX=397260 GN=queF PE=3 SV=1
MTITHLGQQSPLPASPEQAVLDYVPNPRPGRPYLVRFTAPEFTSLCPVTGQPDFAHLMIDYAPAETIVESKSLKLFLGSFRNHAAFHEDCTVGIGERLFAEMKPVWLRIGGYWYPRGGIPIDVFWQSGEPPAGLWLPPQDVPNYRGRG

SEQ ID NO: 49868 - protein, 149 aa, Sphingomonas sp.; identical to SEQ ID NO: 49859
  REGION 1..149: note = tr|A0A1R1YW96|A0A1R1YW96_9SPHN NADPH-dependent 7-cyano-7-deazaguanine reductase OS=Sphingomonas sp. Sph1(2015) OX=1628084 GN=queF PE=3 SV=1

SEQ ID NO: 49869 - protein, 148 aa, Sphingomonas sp.; identical to SEQ ID NO: 49829
  REGION 1..148: note = tr|A0A430DI41|A0A430DI41_9SPHN NADPH-dependent 7-cyano-7-deazaguanine reductase OS=Sphingomonas sp. ABOLF; OX = 1985879 GN=queF PE=3 SV=1

SEQ ID NO: 49870 - protein, 148 aa, unidentified
  source 1..148: note = Sphingomonas spermidinifaciens
  REGION 1..148: note = tr|A0A2A4B4S0|A0A2A4B4S0_9SPHN NADPH-dependent 7-cyano-7-deazaguanine reductase OS=Sphingomonas spermidinifaciens OX=1141889 GN=queF PE=3 SV=1
MTPKHLGQTSALPASPDEAVLDYVPNPRPGSLYCVRFAAPEFTSLCPVTAQPDFAHLVIDYAPAETIVESKSLKLFLGSFRNHAAFHEDCTVGIGERLVAEMKPQWLRIGGYWYPRGGIPIDVFWQSGLAPEGLWVPDQGVAGYRGRG

SEQ ID NO: 49871 - protein, 152 aa, unidentified
  source 1..152: note = Sphingomonas taxi
  REGION 1..152: note = tr|A0A2W4YTQ7|A0A2W4YTQ7_9SPHN NADPH-dependent 7-cyano-7-deazaguanine reductase OS=Sphingomonas taxi; OX = 1549858 GN=queF PE=3 SV=1
MTAPANPLHLGQNSALPASPEEAVLDYVPNPRPGRTYLVRFAAPEFTSLCPVTGQPDFAHLVIDYVPGETIVESKSLKLFLSSFRNHAGFHEDCTVGIGERLFDEMKPVWLRIGGYWYPRGGIPIDVFWQSSAPPQDLWLPDQGVASYRGRG

SEQ ID NO: 49872 - protein, 148 aa, unidentified
  source 1..148: note = Sphingomonas taxi
  REGION 1..148: note = tr|A0A097EFS3|A0A097EFS3_9SPHN NADPH-dependent 7-cyano-7-deazaguanine reductase OS=Sphingomonas taxi; OX = 1549858 GN=queF PE=3 SV=1
MTPMHLGQASQLPASPDEAVLDYVPNPRAGTTYLVRFAVPEFTSLCPVTGQPDFAHLVIDYAPGETIVESKSLKLFLGSFRNHAGFHEDCTVGIGQRLFDEMKPQWLRIGGYWYPRGGIPIDVFWQSGPPPADLWLPDQGVQPYRGRG

SEQ ID NO: 49873 - protein, 151 aa, Sphingomonas trueperi; identical to SEQ ID NO: 49832
  REGION 1..151: note = tr|A0A543LU59|A0A543LU59_9SPHN NADPH-dependent 7-cyano-7-deazaguanine reductase OS=Sphingomonas trueperi; OX = 53317 GN=queF PE=3 SV=1

SEQ ID NO: 49874 - protein, 148 aa, unidentified
  source 1..148: note = Sphingomonas turrisvirgatae
  REGION 1..148: note = tr|A0A1E3LWH2|A0A1E3LWH2_9SPHN NADPH-dependent 7-cyano-7-deazaguanine reductase OS=Sphingomonas turrisvirgatae OX=1888892 GN=queF PE=3 SV=1
MTPMHLGQQSALPTSPEAASLDYVPNPRAGTDYLVRFAAPEFTSLCPITGAPDFAHLVIDYVPGETIVESKSLKLFLGSFRNHGAFHEDCTVGIGQRLFDEMRPKWLRIGGYWYPRGGIPIDVFWQSGEPPAGVWIPAQDVPGYRGRG

SEQ ID NO: 49875 - protein, 150 aa, Sphingomonas wittichii
  REGION 1..150: note = tr|A0A1X9UBI8|A0A1X9UBI8_SPHSD NADPH-dependent 7-cyano-7-deazaguanine reductase OS=Sphingomonas wittichii (strain DC-6 / KACC 16600) OX=1283312 GN=queF PE=3 SV=1
MSASTLHLGKTSTLPASPEQAVLDYVPNPRPGTLYLVRFAAPEFTSLCPVTGQPDFAHLVIDYAPGETIVESKSLKLFLASFRNHAGFHEDCTVGIGQRLAEEMKPVWLRIGGYWYPRGGIPIDVFWQSGPAPEGLWVPDQGVPGYRGRG

SEQ ID NO: 49876 - protein, 150 aa, Sphingomonas wittichii; identical to SEQ ID NO: 49875
  REGION 1..150: note = tr|A5VCV3|A5VCV3_SPHWW NADPH-dependent 7-cyano-7-deazaguanine reductase OS=Sphingomonas wittichii (strain RW1 / DSM 6014 / JCM 10273) OX=392499 GN=queF PE=3; SV = 1

SEQ ID NO: 49877 - protein, 149 aa, Sphingomonas yabuuchiae
  REGION 1..149: note = tr|A0A147ITI6|A0A147ITI6_9SPHN NADPH-dependent 7-cyano-7-deazaguanine reductase OS=Sphingomonas yabuuchiae OX=172044 GN=queF PE=3 SV=1
MALMKHLGQTSALPASPEEAVLDYVPNPRPGRTYLIRFAAPEFTSLCPVTGQPDFAHLVIDYVPGETIVESKSLKLFLGSFRNHAGFHEDCTVGIGERLFEEMKPVWLRIGGYWYPRGGIPIDVFWQSSAPPADLWLPDQGVAGYRGRG

SEQ ID NO: 49878 - protein, 156 aa, Sphingopyxis alaskensis
  REGION 1..156: note = tr|Q1GNK5|Q1GNK5_SPHAL NADPH-dependent 7-cyano-7-deazaguanine reductase OS=Sphingopyxis alaskensis (strain DSM 13593 / LMG 18877 / RB2256); OX = 317655 GN=queF PE=3 SV= 1
MTDSTPTPLVPKHLGQSSELPASPEAAVLDYVPNPRAGELYLVRFAAPEFTSLCPVTGQPDFAHLVIDYAPGETIVESKSLKLFLGSFRNHAGFHEDCTVGIGRRLFDEMQPQWLRIGGYWYPRGGIPIDVFWQSGPPPAGLWLPDQGVAPYRGRG

SEQ ID NO: 49879 - protein, 156 aa, Sphingopyxis bauzanensis
  REGION 1..156: note = tr|A0A246K1P7|A0A246K1P7_9SPHN NADPH-dependent 7-cyano-7-deazaguanine reductase OS=Sphingopyxis bauzanensis OX=651663 GN=queF PE=3 SV=1
MSDSSHPPLAPKHLGQSSDLPAAPEAAVLDYVPNPRAGELYLVRFAAPEFTSLCPVTGQPDFAHLVIDYAPGETIVESKSLKLFLGSFRNHAGFHEDCTVGIGRRLFDEMQPQWLRIGGYWYPRGGIPIDVFWQSGAPPADLWLPDQGVAPYRGRG

SEQ ID NO: 49880 - protein, 129 aa, unidentified
  source 1..129: note = Sphingopyxis flava
  REGION 1..129: note = tr|A0A1T5ASV7|A0A1T5ASV7_9SPHN NADPH-dependent 7-cyano-7-deazaguanine reductase OS=Sphingopyxis flava; OX = 1507287 GN=queF PE=3 SV=1
MLDYVPNPRRGELYLVRFAAPEFTSLCPVTGQPDFAHLVVDYAPGETIVESKSLKLFLGSFRNHAGFHEDCTVGIGRRLFDEMRPQWLRIGGYWYPRGGIPIDVFWQSGPPPAGLWLPDQGVAPYRGRG

SEQ ID NO: 49881 - protein, 156 aa, unidentified
  source 1..156: note = Sphingopyxis fribergensis
  REGION 1..156: note = tr|A0A0A7PCZ1|A0A0A7PCZ1_9SPHN NADPH-dependent 7-cyano-7-deazaguanine reductase OS=Sphingopyxis fribergensis OX=1515612 GN=queF PE=3 SV=1
MTDSSPTPLAPKHLGQSSELPAAPEAAVLDYVPNPRAGELYLVRFVAPEFTSLCPVTGQPDFAHLVIDYAPGETIVESKSLKLFLGSFRNHAGFHEDCTVGIGRRLFDEMQPRWLRIGGYWYPRGGIPIDVFWQSGAPPAGLWLPDQGVAPYRGRG

SEQ ID NO: 49882 - protein, 156 aa, Sphingopyxis granuli
  REGION 1..156: note = tr|A0A0X8R6I0|A0A0X8R6I0_9SPHN NADPH-dependent 7-cyano-7-deazaguanine reductase OS=Sphingopyxis granuli; OX = 267128 GN=queF PE=3 SV=1
MTDSSHPPLAPKHLGQPSQLPAAPEAAVLDYVPNPRSGELYLVRFAAPEFTSLCPVTGQPDFAHLVIDYAPGETIVESKSLKLFLASFRNHAGFHEDCTVGIGRRLFDEMRPRWLRIGGYWYPRGGIPIDVFWQSGPPPEGLWLPDQGVAPYRGRG

SEQ ID NO: 49883 - protein, 156 aa, unidentified
  source 1..156: note = Sphingopyxis indica
  REGION 1..156: note = tr|A0A239K0U0|A0A239K0U0_9SPHN NADPH-dependent 7-cyano-7-deazaguanine reductase OS=Sphingopyxis indica; OX = 436663 GN=queF PE=3 SV=1
MSDSSHPPLAPKHLGQTSELPASPELAALDYVPNPRAGELYLVRFAAPEFTSLCPVTGQPDFAHLVIDYAPGKTIVESKSLKLFLGSFRNHAGFHEDCTVGIGRRLFDEMQPQWLRIGGYWYPRGGIPIDVFWQSGPPPAGLWLPDQGVAPYRGRG

SEQ ID NO: 49884 - protein, 156 aa, unidentified
  source 1..156: note = Sphingopyxis lindanitolerans
  REGION 1..156: note = tr|A0A2S8B823|A0A2S8B823_9SPHN NADPH-dependent 7-cyano-7-deazaguanine reductase OS=Sphingopyxis lindanitolerans OX=2054227 GN=queF PE=3 SV=1
MSDSSHPPLRPKHLGQPSELPASPEAAILDYVANPRVGDLYLVRFAAPEFTSLCPVTGQPDFAHLVIDYAPGETIVESKSLKLFLGAFRNHAGFHEDCTVGIGRRLFDEMRPKWLRIGGYWYPRGGIPIDVFWQSGAPPEGLWLPDQGVAPYRGRG

SEQ ID NO: 49885 - protein, 156 aa, Sphingopyxis macrogoltabida
  REGION 1..156: note = tr|A0A2W5MRE9|A0A2W5MRE9_SPHMC NADPH-dependent 7-cyano-7-deazaguanine reductase OS=Sphingopyxis macrogoltabida OX=33050 GN=queF PE=3 SV=1
MRDSSHPPLAPKHLGQSSDLPASPEAATLDYVPNPRAGELYLVRFAAPEFTSLCPVTGQPDFAHLVIDYAPRDTIVESKSLKLFLGSFRNHAGFHEDCTVGIGRRLFDEMRPRWLRIGGYWYPRGGIPIDVFWQSGAPPEGLWLPDQGVAPYRGRG

SEQ ID NO: 49886 - protein, 156 aa, Sphingopyxis macrogoltabida
  REGION 1..156: note = tr|A0A0N7GRU1|A0A0N7GRU1_SPHMC NADPH-dependent 7-cyano-7-deazaguanine reductase OS=Sphingopyxis macrogoltabida OX=33050 GN=queF PE=3 SV=1
MSDSSHPPLAPKHLGRSSDLPASPEAATLDYVPNPRADELYLVRFAAPEFTSLCPVTGQPDFAHIVIDYAPGETIVESKSLKLFLGSFRNHAGFHEDCTVGIGRRLVDEMRPKWLRIGGYWYPRGGIPIDVFWQSGPPPAGLWLPDQGVAPYRGRG

SEQ ID NO: 49887 - protein, 156 aa, Sphingopyxis sp.
  REGION 1..156: note = tr|A0A270BBN8|A0A270BBN8_9SPHN NADPH-dependent 7-cyano-7-deazaguanine reductase OS=Sphingopyxis sp. GW247-27LB OX=2012632 GN=queF PE=3 SV=1
MSDSSHPPLAPKHLGQSSELPASPEAAVLDYVPNPRGGELYLVRFAAPEFTSLCPVTGQPDFAHLVIDYAPGETIVESKSLKLFLSSFRNHAGFHEDCTVGIGRRLFDEMQPRWLRIGGYWYPRGGIPIDVFWQSGPPPADLWLPDQGVAAYRGRG

SEQ ID NO: 49888 - protein, 156 aa, Sphingopyxis sp.; identical to SEQ ID NO: 49882
  REGION 1..156: note = tr|A0A2L0VSD4|A0A2L0VSD4_9SPHN NADPH-dependent 7-cyano-7-deazaguanine reductase OS=Sphingopyxis sp. MG; OX = 1866325 GN=queF PE=3 SV=1

SEQ ID NO: 49889 - protein, 129 aa, Sphingopyxis terrae
  REGION 1..129: note = tr|A0A142VZB4|A0A142VZB4_9SPHN NADPH-dependent 7-cyano-7-deazaguanine reductase OS=Sphingopyxis terrae subsp. terrae NBRC 15098 OX=1219058 GN=queF PE=3 SV=1
MLDYVPNPRAGELYLVRFAAPEFTSLCPVTGQPDFAHLVIDYAPGETIVESKSLKLFLGSFRNHAGFHEDCTVGIGRRLFDEMQPQWLRIGGYWYPRGGIPIDVFWQSGPPPLGLWLPDQGVAPYRGRG

SEQ ID NO: 49890 - protein, 156 aa, Sphingopyxis terrae
  REGION 1..156: note = tr|A0A1Y6G112|A0A1Y6G112_9SPHN NADPH-dependent 7-cyano-7-deazaguanine reductase OS=Sphingopyxis terrae subsp. ummariensis OX=429001 GN=queF PE=3 SV=1
MSDSSHTPLQPKHLGQSSELPASPEAALLDYVPNPRVGELYLVRFAAPEFTSLCPVTGQPDFAHLVIDYAPGETIVESKSLKLFLGSFRNHAGFHEDCTVGIGRRLFDEMQPQWLRIGGYWYPRGGIPIDVFWQSGPPPQGLWLPDQGVAPYRGRG

SEQ ID NO: 49891 - protein, 156 aa, Sphingopyxis witflariensis
  REGION 1..156: note = tr|A0A246JNI8|A0A246JNI8_9SPHN NADPH-dependent 7-cyano-7-deazaguanine reductase OS=Sphingopyxis witflariensis OX=173675 GN=queF PE=3 SV=1
MSDSSHPPLAPKHLGRSSDLPASPEAAVLDYVPNPRASELYLVRFAAPEFTSLCPVTGQPDFAHLVIDYAPGETIVESKSLKLFLASFRNHAGFHEDCTVGIGRRLFDEMQPRWLRIGGYWYPRGGIPIDVFWQSGAPPEALWLPDQGVASYRGRG

SEQ ID NO: 49892 - protein, 152 aa, unidentified
  source 1..152: note = Sphingorhabdus contaminans
  REGION 1..152: note = tr|A0A553WBK6|A0A553WBK6_9SPHN NADPH-dependent 7-cyano-7-deazaguanine reductase OS=Sphingorhabdus contaminans OX=1343899 GN=queF PE=3 SV=1
MTEQPKTAFLGQQSTMPSSPENAKLDYVPNPRPGMLYMARFAVPEFTSLCPVTGQPDFAHLVIDYAPDQTIVESKSLKLFLGSFRNHAAFHEDCTVGIGQRLFEEMKPHWLRIGGYWYPRGGIPIDVFWQSGEPPKGLWMPDQGVAPYRGRG

SEQ ID NO: 49893 - protein, 159 aa, unidentified
  source 1..159: note = Sphingorhabdus marina
  REGION 1..159: note = tr|A0A1N6CY34|A0A1N6CY34_9SPHN NADPH-dependent 7-cyano-7-deazaguanine reductase OS=Sphingorhabdus marina DSM 22363 OX=1123272 GN=queF PE=3 SV=1
MTCMTEDDSASPAPRFLGQDSPLPASPEEAVLDYVPNPRAGELYLTRFAAPEFTSLCPVTAQPDFAHLVIDYAPDKTIVESKSLKLFLGSFRNHAAFHEDCTVGIGQRLFDEMQPKWLRIGGYWYPRGGIPIDVFWQSGEPPAGLWIPDQGVAPYRGRG

SEQ ID NO: 49894 - protein, 152 aa, unidentified
  source 1..152: note = Sphingorhabdus sp.
  REGION 1..152: note = tr|A0A2D5DG12|A0A2D5DG12_9SPHN NADPH-dependent 7-cyano-7-deazaguanine reductase OS=Sphingorhabdus sp.; OX = 1902408 GN=queF PE=3 SV=1
  VARIANT 109: note = Xaa can be any naturally occurring amino acid
  VARIANT 118: note = Xaa can be any naturally occurring amino acid
MAENSKPRFLGQDSPLPSSPDEAELDYVPNPRAGQLYCVRFTAPEFTSLCPVTGQPDFAHLVIDYAPGKTIVESKSLKLFLGSFRNHCAFHEDCTVGIGVRLFEEMQPXWLRIGGYWXPRGGIPIDVFWQSGEAPGGLWVPDTGVASYRGRG

SEQ ID NO: 49895 - protein, 148 aa, unidentified
  source 1..148: note = Sphingorhabdus sp.
  REGION 1..148: note = tr|A0A5C6UQE5|A0A5C6UQE5_9SPHN NADPH-dependent 7-cyano-7-deazaguanine reductase OS=Sphingorhabdus sp. D-2Q-5-6 OX=2601267 GN=queF PE=3 SV=1
MTPKHLGQASGLPASPDAAELDYVPNPRPDALYLVRFAAPEFTSLCPVTGQPDFAHLVIDYAPGETIVESKSLKLFLGSFRNHAAFHEDCTVGIGQRLFDEMRPQWLRIGGYWYPRGGIPIDVFWQSGKPPEGLWLPGQGVAPYRGRG

SEQ ID NO: 49896 - protein, 152 aa, unidentified
  source 1..152: note = Sphingorhabdus wooponensis
  REGION 1..152: note = tr|A0A426RQS0|A0A426RQS0_9SPHN NADPH-dependent 7-cyano-7-deazaguanine reductase OS=Sphingorhabdus wooponensis OX=940136 GN=queF PE=3 SV=1
MTDILKPKFLGAQSALPQTPEEAQLDYVPNPRPGTLYLARFAVPEFTSLCPVTAQPDFAHLVIDYAPDATIVESKSLKLFLGSFRNHAAFHEDCTVGIGQRLFSEMKPHWLRIGGYWYPRGGIPIDVFWQSGEPPKGLWIPDQGVQPYRGRG

SEQ ID NO: 49897 - protein, 148 aa, unidentified
  source 1..148: note = Sphingosinicella ginsenosidimutans
  REGION 1..148: note = tr|A0A5C6TRJ5|A0A5C6TRJ5_9SPHN NADPH-dependent 7-cyano-7-deazaguanine reductase OS=Sphingosinicella ginsenosidimutans OX=1176539 GN=queF PE=3 SV=1
MSLTHLGQPSALPASPEAARLDYVPNPRPGALYLVRFAAPEFTSLCPVTGQPDFAHLVIDYAPGETIVESKSLKLFLAAFRNHGAFHEDVTVGIGQRLAAEMKPLWLRIGGYWYPRGGIPIDVFWQTGDAPAGLWVPDQGVASYRGRG

SEQ ID NO: 49898 - protein, 158 aa, Sphingosinicella microcystinivorans
  REGION 1..158: note = tr|A0A495RVZ5|A0A495RVZ5_SPHMI NADPH-dependent 7-cyano-7-deazaguanine reductase OS=Sphingosinicella microcystinivorans OX=335406 GN=queF PE=3 SV=1
MAYGRSNAKPMETTHLGKVSALPASPEAAKLDYVPNPRPESRYLVRFAAPEFTSLCPVTGQPDFAHLVIDYVPAARIVESKSLKLFLGSFRNHAAFHEDCTVGIGERLFREMAPHWLRIGGYWYPRGGIPIDVFWQSGAPPADVWVPDQGVAPYRGRG

SEQ ID NO: 49899 - protein, 148 aa, Sphingosinicella sp.
  REGION 1..148: note = tr|A0A2P7QYY5|A0A2P7QYY5_9SPHN NADPH-dependent 7-cyano-7-deazaguanine reductase OS=Sphingosinicella sp. GL-C-18 OX=2116704 GN=queF PE=3 SV=1
MDLTHLGQTSALPTSPEDARLDYVPNPRLGRLYLVRFTAPEFTSLCPVTGQPDFAHIVLDYCPGETIVESKSLKLFLHSFRNHCGFHEDVTVGIAERLVEEMRPTWLRIGGYWYPRGGIPIDVFWQTGAPPDGLWVPDQGVASYRGRG

SEQ ID NO: 49900 - protein, 148 aa, Sphingosinicella sp.
  REGION 1..148: note = tr|A0A4P6FI71|A0A4P6FI71_9SPHN NADPH-dependent 7-cyano-7-deazaguanine reductase OS=Sphingosinicella sp. BN140058 OX=1892855 GN=queF PE=3 SV=1
MDLTHLGQSSPLPSSPEEARLDYVPNPRLGRLYLVRFTAPEFTSLCPVTGQPDFAHIMIDYCPGETIVESKSLKLFLHSFRNHCGFHEDVTVGIAERLVEEMQPRWLRIGAYWYPRGGIPIDVFWQTGAPPEGLWVPDQGVTSYRGRG

SEQ ID NO: 49901 - protein, 154 aa, unidentified
  source 1..154: note = Spiribacter aquaticus
  REGION 1..154: note = tr|A0A557RF83|A0A557RF83_9GAMM NADPH-dependent 7-cyano-7-deazaguanine reductase OS=Spiribacter aquaticus; OX = 1935996 GN=queF PE=3 SV=1
MSEDPTAGLSQLGSQSPIPTNPEEAVLERVPNPQSDVHYLARFTAPEFTSLCPMTGQPDFAHLVIDYVPGQWLIESKSLKLFLFAFRNHGAFHEDCTVTIARRLADLLEPVWLRIGGYWYPRGGMPIDVFYQTGQPPVDVWIPEQGVAGYRGRG

SEQ ID NO: 49902 - protein, 155 aa, unidentified
  source 1..155: note = Spiribacter salinus
  REGION 1..155: note = tr|R4VKQ1|R4VKQ1_9GAMM NADPH-dependent 7-cyano-7-deazaguanine reductase OS=Spiribacter salinus M19-40 OX=1260251 GN=queF PE=3 SV=1
MTTDHSHAGLTQLGQDTTLPNSPEEATLERVPNPQAGFGYVARFTAPEFTSICPMTGQPDFAQLVIDYVPGDWLVESKSLKLFLFSFRNHGAFHEDCTMTVARRLVDLLEPHWLRIGGYWYPRGGIPIDVFYQTGEPPADVWIPEQGVAPYRGRG

SEQ ID NO: 49903 - protein, 129 aa, unidentified
  source 1..129: note = Spiribacter sp.
  REGION 1..129: note = tr|A0A2U2N2P3|A0A2U2N2P3_9GAMM NADPH-dependent 7-cyano-7-deazaguanine reductase OS=Spiribacter sp. E85; OX = 2182432 GN=queF PE=3 SV=1
MTTQPSRALETFPNPAPERDYTIHFSIPEFTCLCPKTGQPDFATLEIDYVPEAHCVELKSLKLYIWSFRDQGAFHEAVTHHILGDLVAATAPRFMRVRGVFNVRGGIYTTVVAEHRAPGWEPPVPVTLP

SEQ ID NO: 49904 - protein, 159 aa, Spirochaeta africana
  REGION 1..159: note = tr|H1NB75|H1NB75_SPIAZ NADPH-dependent 7-cyano-7-deazaguanine reductase OS=Spirochaeta africana (strain ATCC 700263 / DSM 8902 / Z-7692) OX=889378 GN=queF; PE = 3 SV=1
MRDDLQNLGLGGKTTYPVEYDPTVLESFENRHQHRDYFVKFNCPEFTSLCPITNQPDFATIYLQYIPDKRMVESKSLKLYLFSFRNSGEFHEDCVNRILDDLVALLEPRYLEVWGKFTPRGGISIDPYANYGQPDTAWQDFAAQRLLMHDLYPEKIDNR

SEQ ID NO: 49905 - protein, 133 aa, unidentified
  source 1..133: note = Spirochaetaceae bacterium
  REGION 1..133: note = tr|A0A3D5WXH6|A0A3D5WXH6_9SPIO NADPH-dependent 7-cyano-7-deazaguanine reductase OS=Spirochaetaceae bacterium OX=1898206 GN=queF PE=3 SV=1
MAEYKFDILGKKVSEPMRKLETFPTPEHVKKVVLDCDEVTSLCPVTGQPDWETVRIEFEPDKFCIESKSLKLYLWSFREEGAFCESLSARIAQDIFDVCKPRWVKVTVAQKARGGIAITAESRIPDLEQGAGA

SEQ ID NO: 49906 - protein, 130 aa, unidentified
  source 1..130: note = Spirochaetaceae bacterium
  REGION 1..130: note = tr|A0A1W9VMH0|A0A1W9VMH0_9SPIO NADPH-dependent 7-cyano-7-deazaguanine reductase OS=Spirochaetaceae bacterium 4572_7 OX=1972456 GN=queF PE=3 SV=1
MKYGEKEIREFDVQKDLEIWPNEHEKEYLIKVTLPEFMGLCPRSGYPDFATIYIEYTPDKFVVELKAIKLYINSFMFRYISHENSANEIYDVIWEKIKPKNLKLIADFKPRGNVHTVIEIDSSKMSKREK

SEQ ID NO: 49907 - protein, 136 aa, unidentified
  source 1..136: note = Spirochaetae bacterium
  REGION 1..136: note = tr|A0A2N1TKQ9|A0A2N1TKQ9_9SPIR NADPH-dependent 7-cyano-7-deazaguanine reductase OS=Spirochaetae bacterium HGW-Spirochaetae-1 OX=2013832 GN=queF PE=3 SV=1
MPAAEGQIFEFTGPENIKTDFLETIEYEGNPQLITYETDEFSAVCPFSGLPDIARVTIEYIPGKKIVELKSLKYYFISFRNVGIYQEAATDRIYRDLYKCLKPVSLKIKTVYNIRGGILATCVMDSETAEKSGSGK

SEQ ID NO: 49908 - protein, 135 aa, unidentified
  source 1..135: note = Spirochaetae bacterium
  REGION 1..135: note = tr|A0A2N1RSB3|A0A2N1RSB3_9SPIR NADPH-dependent 7-cyano-7-deazaguanine reductase OS=Spirochaetae bacterium HGW-Spirochaetae-5 OX=2013837 GN=queF PE=3 SV=1
MPSAEGKTFTFDDQSHIDPELLESIEYTGNPQRIKYETGEFSAVCPFSGLPDIAVVEIEYIPAGKIIELKSLKYYFTSYRNVGIYQEAATDKIYKDIWKCIEPSFLSIKTVYNVRGGILATCIMDSDIIKKNESK

SEQ ID NO: 49909 - protein, 119 aa, unidentified
  source 1..119: note = Spirochaetales bacterium
  REGION 1..119: note = tr|A0A2E9KV21|A0A2E9KV21_9SPIR NADPH-dependent 7-cyano-7-deazaguanine reductase OS=Spirochaetales bacterium OX=2026792 GN=queF PE=3 SV=1
MSKLKTFINKVKNKDYTIDITCAEFTSLCPKTGQPDFAVITISYVPDKLCVELKSFKLYMFSYRNIGEFHEHVTNKILDDFVKACKPKYASITGDFNIRGGIKTVVQAEYKKKIKRKKL

SEQ ID NO: 49910 - protein, 137 aa, unidentified
  source 1..137: note = Spirochaetes bacterium
  REGION 1..137: note = tr|A0A1G3PFJ7|A0A1G3PFJ7_9SPIR NADPH-dependent 7-cyano-7-deazaguanine reductase OS=Spirochaetes bacterium GWF1_49_6 OX=1802189 GN=queF PE=3 SV=1
MPTNRESADYSGLQNEIPGLKIDPPLEVIENVYRDRDYWVEYFTDEFTSICPKTGLPDFASLSIQYIPGDYLVEEKALKMYLNGYRNLGIFQENATNKILDDFVAAVKPRYVNVNAEWNKRGGIGTKVEAEWGSPRD

SEQ ID NO: 49911 - protein, 136 aa, unidentified
  source 1..136: note = Spirochaetes bacterium
  REGION 1..136: note = tr|A0A1V5WA53|A0A1V5WA53_9SPIR NADPH-dependent 7-cyano-7-deazaguanine reductase OS=Spirochaetes bacterium ADurb.Bin218 OX=1852906 GN=queF PE=3 SV=1
MPVAEGRIFEFEDESSIRTDFLEAIEYEGLPQKIKYETDEFSAVCPFSGLPDIAHVEIDYIPNKKIVELKSLKYYFMSFRNVGIYQEQATDRIYRDLHNLLNPEFLSVKTIYNIRGGILATCIMDSETVNKNRIVP

SEQ ID NO: 49912 - protein, 133 aa, unidentified
  source 1..133: note = Spirochaetia bacterium
  REGION 1..133: note = tr|A0A352VWL0|A0A352VWL0_9SPIR NADPH-dependent 7-cyano-7-deazaguanine reductase OS=Spirochaetia bacterium; OX = 2053615 GN=queF PE=3 SV=1
MPETSGRYAGIRFDCEKYHAIKKDLLDTFAYEHSGKNITVTVSSDEFSAVCPWSGLPDYGKITVEYIPGQLILELKSFKYYLCTFRQVGIFQEHAINIIFDDLQNLLKPVFLKIVLSYNTRGGIDTVVTRQAP

SEQ ID NO: 49913 - protein, 273 aa, unidentified
  source 1..273: note = Spirochaetia bacterium
  REGION 1..273: note = tr|A0A354G7M8|A0A354G7M8_9SPIR NADPH-dependent 7-cyano-7-deazaguanine reductase QueF OS=Spirochaetia bacterium OX=2053615 GN=DC057_18970 PE=4 SV=1
MKSNPLGNKTEYKPYYDKSLLFPIKRDVNRANAQIDSTVFTGYDIWNCYELSYLNRNGVPQVRKCRIVYPSDSVCIVESKSLKLYLGSFIMTQFDGDESVQKIIQTDLQEILLSSFVKVELFDYIATGVIYPIPSNQLLDNLDVVCDVYTVDSSLLSCKKHEESAVYSHWTNLLKTNCPITGQPDWATVQIEYKGVFEVIPQSLLKYIISYREHGDYHETCCEKIFTDLFTILNPEYLFVKCFFTRRGGIDINPCRFYGIGSDGIFNEKHWRQ

SEQ ID NO: 49914 - protein, 273 aa, Spongiibacter sp.
  REGION 1..273: note = tr|A0A2E5TMI1|A0A2E5TMI1_9GAMM NADPH-dependent 7-cyano-7-deazaguanine reductase OS=Spongiibacter sp.; OX = 2024860 GN=queF PE=3 SV=1
MSLHGPLGSQVEYPEQYSPDVLHPIPRLDGRSRLNVQGDLPFAGVDIWNAYEMSWLNERGKPLVACGEFHFPADSPNIIESKSFKLYLNSFNQGRWASTDAVQKTLQNDLSAACGAPVTVVLHRPEAWPGGLGIDAMRGQCLDEQDIEMRDYQPDAALLACHDDRQLAQSYYSHLLRSRCPVTGQPDWASVHICCDGPKLDEAALLRYLVSFRQQNDFHEQCVEQIFCDIWRQCQPESLTVYARYLRRGGLDINPWRSSDPSAKPLNSREFRQ

SEQ ID NO: 49915 - protein, 273 aa, Spongiibacter sp.
  REGION 1..273: note = tr|A0A2D7WGC0|A0A2D7WGC0_9GAMM NADPH-dependent 7-cyano-7-deazaguanine reductase OS=Spongiibacter sp.; OX = 2024860 GN=queF PE=3 SV=1
MGIHGPLGAQVDYPEHYDPSVLHPIARSEGRQRLGIDGATHFYGVDVWNAFELSWLDHRGKPHVAVGEFHFPAASPFIVESKSFKLYLNSFNQTAFDSEQAVLSALTEDLSQACGAEVKVILHRPEHWDKTLCPESMEGQCLDSLDIDISDYQPSAQLLRCDDGEVVDQQYYSHLLRSRCPVTGQPDWASVSIRCRGPKIDEASLLRYLVSFRQQNDFHEQCVEQIFCDIQRACHTETLTVFARYLRRGGLDINPWRGSSEPAEPLNPRAFRQ

SEQ ID NO: 49916 - protein, 280 aa, unidentified
  source 1..280: note = Spongiibacteraceae bacterium
  REGION 1..280: note = tr|A0A2E7IPQ7|A0A2E7IPQ7_9GAMM NADPH-dependent 7-cyano-7-deazaguanine reductase OS=Spongiibacteraceae bacterium OX=2026793 GN=queF PE=3 SV=1
MTDKTDYSALPLGKSVDYPELYDPSQLQPISRANGRRHLAINLPDMQGSDHWNAYEVSWLDTNGKPQVACAQVVFPASSPNMVESKSFKLYLNSFNQSRFDSAELVCSTLRADLSAVAGAGVTVELLLPEQWHSALLTVPPTGLNLDKFDVSGVASEPEAGLLVSERGSDANLSERATYYSNLFRSRCPVTGQPDWATVEVELTGRQPEPASLLAYLLSYRSNDEFHEQCVERMFADIYQTLRPERLSVYARYTRRGGLDINPLRSTHLDYKPFHRLTRQ

SEQ ID NO: 49917 - protein, 272 aa, unidentified
  source 1..272: note = Spongiibacteraceae bacterium
  REGION 1..272: note = tr|A0A2E2K2Z1|A0A2E2K2Z1_9GAMM NADPH-dependent 7-cyano-7-deazaguanine reductase OS=Spongiibacteraceae bacterium OX=2026793 GN=queF PE=3 SV=1
MSDYRDLPLGKQTDYPDQYDPGQLCPIPRAKGRSLLAAPTLSMQGSDLWNAYEVSWLDASGKPQVACGQFVFPASSPNMVESKSFKLYLNSLNQTRFENPEALAAILEKDLSQVAQAEVAAELLLPDRWSSRFAVAEPEGESLDELPLLQVANEPRVELLQATGERGEKHYFSNLFRSCCPVTGQPDWATVEIALAGELPDASSLLTYLTSFRQNNEFHEQCVERIFSDLSQRFELETLTVFARYTRRGGLDINPLRSSDSSAQPFQRLARQ

SEQ ID NO: 49918 - protein, 165 aa, Sporanaerobacter sp.
  REGION 1..165: note = tr|A0A410QGY8|A0A410QGY8_9FIRM NADPH-dependent 7-cyano-7-deazaguanine reductase OS=Sporanaerobacter sp. JN28 OX=2507161 GN=queF PE=3 SV=1
MSERSEKELKDIKLLGNQGIKYKYDYDPSVLETFENKHQGNDYFVKFNCPEFTSVCPKTGQPDFATIYISYVPGKLMVESKSLKLYFFSFRNHGDFHEDCINMIMKDLINLLDPKYIEVWGKFTPRGGISIDPYCNYGRKGTKWEEVAEKRLFYHDMYPEKVDNR

SEQ ID NO: 49919 - protein, 165 aa, Sporanaerobacter sp.; identical to SEQ ID NO: 49918
  REGION 1..165: note = tr|A0A1G4FP43|A0A1G4FP43_9FIRM NADPH-dependent 7-cyano-7-deazaguanine reductase OS=Sporanaerobacter sp. PP17-6a OX=1891289 GN=queF PE=3 SV=1

SEQ ID NO: 49920 - protein, 161 aa, Sporobacter termitidis
  REGION 1..161: note = tr|A0A1M5VFK0|A0A1M5VFK0_9FIRM NADPH-dependent 7-cyano-7-deazaguanine reductase OS=Sporobacter termitidis DSM 10068 OX=1123282 GN=queF PE=3 SV=1
MTRENEGLKNLGGKNVQYVFDYDPGLLERFENKHPDNDYFVKLNCPEFTSLCPITGQPDFAAVYISYVPDRYLVESKSLKLYLFSFRNHGDFHEDCMNIVMKDLIGLLDPKYIEVRGKFLPRGGISIDPYCNYGKAGTVWLGTARKRLLMHDMYPEKIDNR

SEQ ID NO: 49921 - protein, 147 aa, Sporolactobacillus inulinus
  REGION 1..147: note = tr|A0A4Y1ZAV6|A0A4Y1ZAV6_9BACL NADPH-dependent 7-cyano-7-deazaguanine reductase OS=Sporolactobacillus inulinus OX=2078 GN=queF PE=3 SV=1
MDRSKEDLTLLGNKGTKYSFDYDPGLLESFQNAHPDRDYFVKFNFPEFTSLCPITHQPDFATLHISYVPAVRMVESKSLKLYLFSFRNHGDFHEDCMNKIADDLIHLMDPKYLEVWGKFTHAAASALIRMSTMASRARAGNRSPLSG

SEQ ID NO: 49922 - protein, 167 aa, Sporolactobacillus inulinus
  REGION 1..167: note = tr|A0A0U1QQ24|A0A0U1QQ24_9BACL NADPH-dependent 7-cyano-7-deazaguanine reductase OS=Sporolactobacillus inulinus CASD OX=1069536 GN=queF PE=3 SV=1
MKGADTMDRSKEDLTLLGNKGTKYSFDYDPGLLESFQNAHPDRDYFVKFNFPEFTSLCPITHQPDFATLHISYVPAVRMVESKSLKLYLFSFRNHGDFHEDCMNKIADDLIHLMDPKYLEVWGKFTPRGGISIDPYVNYGKPGTRWEQVAFERLSRHDMYPEKIDNR

SEQ ID NO: 49923 - protein, 162 aa, Sporolactobacillus laevolacticus
  REGION 1..162: note = tr|V6IY96|V6IY96_9BACL NADPH-dependent 7-cyano-7-deazaguanine reductase OS=Sporolactobacillus laevolacticus DSM 442 OX=1395513 GN=queF PE=3 SV=1
MTERKKEGLTLLGNKGTNYIFDYDPELLETFQNAHPNRDYFVKFNFPEFTSLCPITHQPDFATLHISYVPAERMVESKSLKLYLFSYRNHGDFHEDCVNKIADDLIRLMDPKYLEVWGKFLPRGGISIDPYVNYGKKGTRWEEVAFDRLSKHDLYPEKIDNR

SEQ ID NO: 49924 - protein, 162 aa, unidentified
  source 1..162: note = Sporolactobacillus nakayamae
  REGION 1..162: note = tr|A0A1I2QBP3|A0A1I2QBP3_9BACL NADPH-dependent 7-cyano-7-deazaguanine reductase OS=Sporolactobacillus nakayamae OX=269670 GN=queF PE=3 SV=1
MSDRKNEGLTLLGNKGTTYTFDYDPNLLETFQNQHPERDYFVKFNFPEFTSLCPITHQPDFATLHISYVPAERMVESKSLKLYLFSFRNHGDFHEDCVNNIANDLIQLMDPKYLEVWGKFLPRGGISIDPYVNYGKKGTRWEQVAFDRLSKHDLYPEPIDNR

SEQ ID NO: 49925 - protein, 162 aa, unidentified
  source 1..162: note = Sporolactobacillus shoreae
  REGION 1..162: note = tr|A0A4Z0GRU8|A0A4Z0GRU8_9BACL NADPH-dependent 7-cyano-7-deazaguanine reductase OS=Sporolactobacillus shoreae OX=1465501 GN=queF PE=3 SV=1
MNDRKKEGLTLLGNKGTQYVFDYDPTLLETFQNAHPDRDYFVKFNFPEFTSLCPITHQPDFATLHISYVPDVRMVESKSLKLYLFSFRNHGDFHEDCVNKIADDLIQLMDPKYLEVWGKFLPRGGISIDPYVNYGKKETRWEEVAFDRLSRHDLYPEKIDNR

SEQ ID NO: 49926 - protein, 162 aa, Sporolactobacillus sp.
  REGION 1..162: note = tr|A0A4Q4IP39|A0A4Q4IP39_9BACL NADPH-dependent 7-cyano-7-deazaguanine reductase OS=Sporolactobacillus sp. THM7-4 OX=2511170 GN=queF PE=3 SV=1
MTDRKQEGLTQLGNKGTKYIFDYDPGLLETFQNVHKDRDYFVKFNFPEFTSLCPITHQPDFATLHISYVPAERMVESKSLKLYLFSFRNHGDFHEDCINKIADDLIRLMDPKYLEVWGKFLPRGGISIDPYVNYGKEGTAWEKVAFERLTRHDMYPEKIDNR

SEQ ID NO: 49927 - protein, 162 aa, Sporolactobacillus sp.
  REGION 1..162: note = tr|A0A4Q4J7Y2|A0A4Q4J7Y2_9BACL NADPH-dependent 7-cyano-7-deazaguanine reductase OS=Sporolactobacillus sp. THM7-7 OX=2511172 GN=queF PE=3 SV=1
MTDRKKEGLALLGNKGTKYVFDYDPGVLETFKNAHPDRDYFVKFNFPEFTSLCPITHQPDFATLHISYVPAERMVESKSLKLYLFSFRNHGDFHEDCINKIADDLIKLMDPKYLEVWGKFLPRGGISIDPYVNYGKKGTMWEKVAFDRLTRHDLYPEKIDNR

SEQ ID NO: 49928 - protein, 161 aa, Sporolactobacillus terrae
  REGION 1..161: note = tr|A0A410D5S7|A0A410D5S7_9BACL NADPH-dependent 7-cyano-7-deazaguanine reductase OS=Sporolactobacillus terrae OX=269673 GN=queF PE=3 SV=1
MDRSKEDLTLLGNKGTKYSFDYDPGLLETFQNAHPDRDYFVKFNFPEFTSLCPITHQPDFATLHISYVPAVRMVESKSLKLYLFSFRNHGDFHEDCMNKIADDLIHLMDPKYLEVWGKFTPRGGISIDPYVNYGKPGTRWEQVAFERLSRHDMYPEKIDNR

SEQ ID NO: 49929 - protein, 165 aa, Sporolituus thermophilus
  REGION 1..165: note = tr|A0A1G7IRM8|A0A1G7IRM8_9FIRM NADPH-dependent 7-cyano-7-deazaguanine reductase OS=Sporolituus thermophilus DSM 23256 OX=1123285 GN=queF PE=3 SV=1
MAGRNERELSGVTLLGSQETTYKYQYDPSILEAFVNKHPENDYFVKFNCPEFTSICPKTGQPDFATIYISYVPDKLLVESKSLKLYLMSFRNHGDFHEDCVNIIMKDLIRLLDPKYIEVWGKFTPRGGISIDPYCNYGKPGTKWEQVAEKRLFYHDMYPEKVDNR

SEQ ID NO: 49930 - protein, 165 aa, Sporosarcina globispora
  REGION 1..165: note = tr|A0A0M0GK52|A0A0M0GK52_SPOGL NADPH-dependent 7-cyano-7-deazaguanine reductase OS=Sporosarcina globispora OX=1459 GN=queF PE=3 SV=1
MSGRRDEELTDITLLGNQGTKYLFEYSPEILEAFDNKHPNRDYFVKFNCPEFTSLCPKTGQPDFATIYISYIPDQKMVESKSLKLYLFSFRNHGDFHEDCMNIIMNDLIQLMDPRYIEVWGKFTPRGGISIDPYCNYGKPGTKYEKMADYRLMNHDLYPETIDNR

SEQ ID NO: 49931 - protein, 162 aa, Sporosarcina luteola
  REGION 1..162: note = tr|A0A511Z700|A0A511Z700_9BACL NADPH-dependent 7-cyano-7-deazaguanine reductase OS=Sporosarcina luteola; OX = 582850 GN=queF PE=3 SV=1
MKQSDTKDLTLLGNQNTEYKADYCPEVLETFENQHQENNYFVKFNIPEFTSLCPMTGQPDFAAIYISYIPDVRMVESKSLKLYMFSFRNHGAYHEDCVNLIMNDLIDLMDPRYIEVWAKFTPRGGISIDPYCNYGKPGTMFEQMAVNRLMQHDMYPENINNR

SEQ ID NO: 49932 - protein, 157 aa, Sporosarcina newyorkensis
  REGION 1..157: note = tr|F9DVV1|F9DVV1_9BACL NADPH-dependent 7-cyano-7-deazaguanine reductase OS=Sporosarcina newyorkensis 2681 OX=1027292 GN=queF PE=3 SV=1
MHDLTLLGNQNTVYDYSYNPNLLESIDNLHQGRDYFVKFNCPEFTSLCPQTGQPDFATIYISFIPDRKLVESKSLKLYLFSFRNHGDFHEDCVNSIMMDLVNLLEPRYIEVWGKFTPRGGLSIDPYCNYGKPGSKFEQMAEQRLFQHDLYPEKVDNR

SEQ ID NO: 49933 - protein, 165 aa, Sporosarcina newyorkensis
  REGION 1..165: note = tr|A0A1T4XPE8|A0A1T4XPE8_9BACL NADPH-dependent 7-cyano-7-deazaguanine reductase OS=Sporosarcina newyorkensis OX=759851 GN=queF PE=3 SV=1
MAGRDESTLHDLTLLGNQNTVYDYSYNPNLLESIDNLHQGRDYFVKFNCPEFTSLCPQTGQPDFATIYISFIPDRKLVESKSLKLYLFSFRNHGDFHEDCVNSIMMDLVNLLEPRYIEVWGKFTPRGGLSIDPYCNYGKPGTKFEQMAEQRLFQHDLYPEKVDNR

SEQ ID NO: 49934 - protein, 162 aa, Sporosarcina pasteurii
  REGION 1..162: note = tr|A0A380C3Y3|A0A380C3Y3_SPOPA NADPH-dependent 7-cyano-7-deazaguanine reductase OS=Sporosarcina pasteurii; OX = 1474 GN=queF PE=3 SV=1
MRKSDTKDLTLLGNQETTYNYEYDPDILETFNNQHTENDYFVKFNIPEFTSLCPMTGQPDFATIYISYMPDIKMVESKSLKLYIGSFRNHDGFHEDCANTIMKDLIKLMDPKYIEVWAKFTPRGGISIDPYCNYGKPGTIYEDMARERMFKHDMYPETVDNR

SEQ ID NO: 49935 - protein, 165 aa, Sporosarcina psychrophila
  REGION 1..165: note = tr|A0A127VX08|A0A127VX08_SPOPS NADPH-dependent 7-cyano-7-deazaguanine reductase OS=Sporosarcina psychrophila OX=1476 GN=queF PE=3 SV=1
MAGRDEATLTDLTLLGNQNTKYVYEYNPDVLEAVDNMHVDRDYFVKFNCPEFTSLCPMTGQPDFATMYISFVPDKKLVESKALKLYLFSFRNHGDFHEDCVNIIMNDIIKLIEPRYIEVWGKFTPRGGLSIDPYCNYGKPETKYVQMAEHRMMNHDMYPEKVDNR

SEQ ID NO: 49936 - protein, 162 aa, Sporosarcina sp.
  REGION 1..162: note = tr|A0A2G5XHL6|A0A2G5XHL6_9BACL NADPH-dependent 7-cyano-7-deazaguanine reductase OS=Sporosarcina sp. P19; OX = 2048258 GN=queF PE=3 SV=1
MPVNGENNLTLLGNQHTKYNYEYDPHVLETFENQHQSNDYFVKFNIPEFTSLCPITGQPDFATIYISYIPDVKMVESKSLKLYMFSFRNHPGFHEDCANLIMKDLIKLMEPRYIEVWAKFTPRGGISIDPYCNYGKPGTYFEQMAKERLFQHDIYPEKIDNR

SEQ ID NO: 49937 - protein, 165 aa, Sporosarcina sp.
  REGION 1..165: note = tr|A0A5B0DE71|A0A5B0DE71_9BACL NADPH-dependent 7-cyano-7-deazaguanine reductase OS=Sporosarcina sp. ANT_H38 OX=2597358 GN=queF PE=3 SV=1
MAGRDEATLTDLTLLGNQNTKYLYEYNPDVLEAVDNMHVDRDYFVKFNCPEFTSLCPMTGQPDFATMYISFMPDKKLVESKALKLYLFSFRNHGDFHEDCVNIIMNDLIKLIEPRYIEVWGKFTPRGGLSIDPYCNYGKPATKYEQMAEHRMMNHDMYPEKIDNR

SEQ ID NO: 49938 - protein, 148 aa, Stakelama pacifica
  REGION 1..148: note = tr|A0A4R6FWX4|A0A4R6FWX4_9SPHN NADPH-dependent 7-cyano-7-deazaguanine reductase OS=Stakelama pacifica; OX = 517720 GN=queF PE=3 SV=1
MTPKHLGQTSPLPASPEAAELDYVPNPRPGKPYLVRFTAPEFTSLCPVTGQPDFAHLVIDYAPNESIVESKSLKLFLGAFRNHAAFHEDCTVGIGERLFTEMAPHWLRIGGYWYPRGGIPIDVFWQSGPPPAGMWLPDQDVPGYRGRG

SEQ ID NO: 49939 - protein, 141 aa, unidentified
  source 1..141: note = Stanieria cyanosphaera
  REGION 1..141: note = tr|K9XTG2|K9XTG2_STAC7 NADPH-dependent 7-cyano-7-deazaguanine reductase OS=Stanieria cyanosphaera (strain ATCC 29371 / PCC 7437) OX=111780 GN=queF PE=3 SV=1
MTQSTASNVKYGERQIAEGELITFPNPRIGRTYEVNITLPEFTCKCPFSGYPDFATIYIAYCPNEKVVELKALKLYINSYRDRYISHEEVINQILDDFVAACDPLKLTIKGDFNPRGNVHTVIEVNHCKDGSSENPSQRKS

SEQ ID NO: 49940 - protein, 137 aa, unidentified
  source 1..137: note = Stanieria sp.
  REGION 1..137: note = tr|A0A140K0I3|A0A140K0I3_9CYAN NADPH-dependent 7-cyano-7-deazaguanine reductase OS=Stanieria sp. NIES-3757 OX=1807358 GN=queF PE=3 SV=1
MTQSTASNVKYGERNIAEGELITFPNPRIGRTYEVNITLPEFTCKCPFSGYPDFATIYITYCPNEKVVELKALKLYINSYRDRYISHEEVINQILDDFVAACDPLKATIKGDFNPRGNVHTVIEVNHYKDERSEIPS

SEQ ID NO: 49941 - protein, 166 aa, Staphylococcus agnetis
  REGION 1..166: note = tr|A0A085UCA4|A0A085UCA4_9STAP NADPH-dependent 7-cyano-7-deazaguanine reductase OS=Staphylococcus agnetis; OX = 985762 GN=queF PE=3 SV=1
MTEGRSKDELQDITLLGNQNNKYEFDYRPDVLESFDNKHQGRDYFVKFNCPEFTSLCPITGQPDFATIYISYIPNVKMVESKSLKLYLFSFRNHGDFHEDCMNIIMNDLIDLMDPHYIEVWGKFTPRGGISIDPYTNYGRPNSKYEKMAEHRLMNHDMYPENIDNR

SEQ ID NO: 49942 - protein, 166 aa, unidentified
  source 1..166: note = Staphylococcus argensis
  REGION 1..166: note = tr|A0A2K4FDH7|A0A2K4FDH7_9STAP NADPH-dependent 7-cyano-7-deazaguanine reductase OS=Staphylococcus argensis OX=1607738 GN=queF PE=3 SV=1
MAQGRNQEELEDITLLGNQNNQYDFDYRPDVLETFDNKHQGRDYFVKFNCPEFTSLCPITGQPDFATIYISYIPDVKMVESKSLKLYLFSFRNHGDFHEDCMNIIMNDLIDLMDPHYIEVWGKFTPRGGISIDPYTNYGRPNTKYERMAEHRLMNHDLYPEKVDNR

SEQ ID NO: 49943 - protein, 166 aa, unidentified
  source 1..166: note = Staphylococcus argenteus
  REGION 1..166: note = tr|A0A380BR87|A0A380BR87_9STAP NADPH-dependent 7-cyano-7-deazaguanine reductase OS=Staphylococcus argenteus OX=985002 GN=queF PE=3 SV=1
MAQGRQQDELQDITLLGNQDNTYNFDYRPDVLESFDNKHQGRDYFVKFNCPEFTSLCPITGQPDFATIYISYIPNIKMVESKSLKLYLFSFRNHGDFHEDCMNIIMNDLIELMDPHYIEVWGKFTPRGGISIDPYTNYGRPNSKYEKMAEHRLMNHDLYPEKIDNR

SEQ ID NO: 49944 - protein, 166 aa, Staphylococcus arlettae
  REGION 1..166: note = tr|A0A380CN04|A0A380CN04_9STAP NADPH-dependent 7-cyano-7-deazaguanine reductase OS=Staphylococcus arlettae OX=29378 GN=queF PE=3 SV=1
MTEGRKSDELQDITLLGNQNNKYDFDYRPDVLESFDNKHPGRDYFVKFNCPEFTSLCPITGQPDFATIYISYIPNIKMVESKSLKLYLFSFRNHGDFHEDCMNIIMNDLIDLMDPHYIEVWGKFTPRGGISIDPYTNYGRPDTKYATMAEHRLMNHDLYPEKIDNR

SEQ ID NO: 49945 - protein, 166 aa, Staphylococcus arlettae
  REGION 1..166: note = tr|A0A5F0TNL9|A0A5F0TNL9_9STAP NADPH-dependent 7-cyano-7-deazaguanine reductase OS=Staphylococcus arlettae OX=29378 GN=queF PE=3 SV=1
MTEGRKSDELQYITLLGNQNNKYDFDYRPDVLESFDNKHPGRDYFVKFNCPEFTSLCPITGQPDFATIYISYIPNIKMVESKSLKLYLFSFRNHGDFHEDCMNIIMNDLIDLMDPHYIEVWGKFTPRGGISIDPYTNYGRPDTKYATMAEHRLMNHDLYPEKIDNR

SEQ ID NO: 49946 - protein, 166 aa, Staphylococcus aureus
  REGION 1..166: note = tr|A0A033V0R7|A0A033V0R7_STAAU NADPH-dependent 7-cyano-7-deazaguanine reductase OS=Staphylococcus aureus C0673 OX=1413510 GN=queF PE=3 SV=1
MSEGRNKDELKDITLLGNQNNQYHDQYKPEVLEVFDNKHQGRDYFVKFNCPEFTSLCPITGQPDFATIYISYIPNVKMVESKSLKLYLFSFRNHGDFHEDCMNVIMNDLIELMDPHYIEVLGKFTPRGGISIDPYTNYGRPGSKYEKMAEYRMMNHDLYPENIDNR

SEQ ID NO: 49947 - protein, 166 aa, Staphylococcus aureus
  REGION 1..166: note = sp|Q6GIR3|QUEF_STAAR NADPH-dependent 7-cyano-7-deazaguanine reductase OS=Staphylococcus aureus (strain MRSA252) OX=282458 GN=queF PE=3 SV=1
MAHGRQQDELQDITLLGNQDNTYNFDYRPDVLESFDNKHQGRDYFVKFNCPEFTSLCPITGQPDFATIYISYIPNVKMVESKSLKLYLFSFRNHGDFHEDCMNIIMNDLIELMDPHYIEVWGKFTPRGGISIDPYTNYGRPNSKYEQMAEHRLMNHDLYPEKIDNR

SEQ ID NO: 49948 - protein, 166 aa, Staphylococcus auricularis
  REGION 1..166: note = tr|A0A2K4C5N4|A0A2K4C5N4_9STAP NADPH-dependent 7-cyano-7-deazaguanine reductase OS=Staphylococcus auricularis OX=29379 GN=queF PE=3 SV=1
MAEGRKKEELEDITLLGNQNNQYDFDYRPDVLETFENKHQGRDYFVKFNCPEFTSLCPITGQPDFATIYISYIPNIKMVESKSLKLYLFSFRNHGDFHEDCMNIIMNDLIDLMDPHYIEVWGKFTPRGGISIDPYTNYGRPDTKYEKMAEYRLMQHDLYPEHVDNR

SEQ ID NO: 49949 - protein, 166 aa, Staphylococcus capitis
  REGION 1..166: note = tr|A0A0U1E8A1|A0A0U1E8A1_STACP NADPH-dependent 7-cyano-7-deazaguanine reductase OS=Staphylococcus capitis; OX = 29388 GN=queF PE=3 SV=1
MAQGRQKNELQDITLLGNQNNTYDFNYRPDVLETFDNKHQGRDYFVKFNCPEFTSLCPITGQPDFATIYISYIPNVKMVESKSLKLYLFSFRNHGDFHEDCMNIIMNDLIELMDPHYIEVWGKFTPRGGISIDPYTNYGRPNSKYEKMAEHRLMNHDMYPEKIDNR

SEQ ID NO: 49950 - protein, 166 aa, Staphylococcus capitis
  REGION 1..166: note = tr|A0A4Q9WIG7|A0A4Q9WIG7_STACP NADPH-dependent 7-cyano-7-deazaguanine reductase OS=Staphylococcus capitis; OX = 29388 GN=queF PE=3 SV=1
MAQGRQKDELQDITLLGNQNNTYDFNYRPDVLETFDNKHQGRDYFVKFNCPEFTSLCPITGQPDFATIYISYIPNVKMVESKSLKLYLFSFRNHGDFHEDCMNIIMNDLIELMDPHYIEVWGKFTPRGGISIDPYTNYGRPNSKYEKMAEHRLMNHDMYPEKIDNR

SEQ ID NO: 49951 - protein, 166 aa, Staphylococcus caprae
  REGION 1..166: note = tr|C5QQ97|C5QQ97_9STAP NADPH-dependent 7-cyano-7-deazaguanine reductase OS=Staphylococcus caprae M23864:W1 OX=525378 GN=queF PE=3 SV=1
MEQGRQKDELQDITLLGNQNNTYDFDYRPDVLETFDNKHQGRDYFVKFNCPEFTSLCPITGQPDFATIYISYIPNIKMVESKSLKLYLFSFRNHGDFHEDCMNIIMNDLIELMDPHYIEVWGKFTPRGGISIDPYTNYGRPNSKYEKMAEHRLMNHDMYPEKIDNR

SEQ ID NO: 49952 - protein, 167 aa, Staphylococcus carnosus
  REGION 1..167: note = tr|A0A380F9S0|A0A380F9S0_STACA NADPH-dependent 7-cyano-7-deazaguanine reductase OS=Staphylococcus carnosus subsp. utilis OX=147449 GN=queF PE=3 SV=1
MSNEGRKKEELEDITLLGNQNNTYNFDYRPDVLETFENKHQGRDYFVKFNCPEFTSLCPITGQPDFATIYISYIPNIKMVESKSLKLYLFSFRNHGDFHEDCMNIIMNDLIDLMDPHYIEVWGKFTPRGGISIDPYTNYGRPDSKYEQMAEYRMMNHDLYPETIDNR

SEQ ID NO: 49953 - protein, 167 aa, Staphylococcus carnosus; identical to SEQ ID NO: 49952
  REGION 1..167: note = tr|B9DK26|B9DK26_STACT NADPH-dependent 7-cyano-7-deazaguanine reductase OS=Staphylococcus carnosus (strain TM300) OX=396513 GN=queF PE=3 SV=1

SEQ ID NO: 49954 - protein, 166 aa, Staphylococcus chromogenes
  REGION 1..166: note = tr|A0A2T4M0M3|A0A2T4M0M3_STACR NADPH-dependent 7-cyano-7-deazaguanine reductase OS=Staphylococcus chromogenes OX=46126 GN=queF PE=3 SV=1
MTEGRSKEELQDITLLGNQNNKYEFDYRPDVLETFDNKHQGRDYFVKFNCPEFTSLCPITGQPDFATIYISYIPNIKMVESKSLKLYLFSFRNHGDFHEDCMNIIMNDLIDLMDPHYIEVWGKFTPRGGISIDPYTNYGRPNTKYEAMAEHRLMNHDMYPEKIDNR

SEQ ID NO: 49955 - protein, 166 aa, Staphylococcus cohnii; identical to SEQ ID NO: 44471
  REGION 1..166: note = tr|A0A2T4LTI8|A0A2T4LTI8_9STAP NADPH-dependent 7-cyano-7-deazaguanine reductase OS=Staphylococcus cohnii; OX = 29382 GN=queF PE=3 SV=1

SEQ ID NO: 49956 - protein, 166 aa, Staphylococcus cohnii; identical to SEQ ID NO: 44471
  REGION 1..166: note = tr|A0A0M2P3Z0|A0A0M2P3Z0_STACC NADPH-dependent 7-cyano-7-deazaguanine reductase OS=Staphylococcus cohnii subsp. cohnii OX=74704 GN=queF PE=3 SV=1

SEQ ID NO: 49957 - protein, 167 aa, Staphylococcus condimenti
  REGION 1..167: note = tr|A0A143PAC8|A0A143PAC8_9STAP NADPH-dependent 7-cyano-7-deazaguanine reductase OS=Staphylococcus condimenti OX=70255 GN=queF PE=3 SV=1
MSNEGRKKEELEDITLLGNQNNTYNFDYRPDVLETFDNKHQGRDYFVKFNCPEFTSLCPITGQPDFATIYISYIPNVKMVESKSLKLYLFSFRNHGDFHEDCMNIIMNDLIDLMDPHYIEVWGKFTPRGGISIDPYTNYGRPDSKYEQMAEYRMMNHDLYPETIDNR

SEQ ID NO: 49958 - protein, 166 aa, Staphylococcus delphini
  REGION 1..166: note = tr|A0A447Z0M3|A0A447Z0M3_9STAP NADPH-dependent 7-cyano-7-deazaguanine reductase OS=Staphylococcus delphini OX=53344 GN=queF PE=3 SV=1
MTEGRTKDELQDITLLGNQNNTYNFDYRPDVLETFDNKHQNRDYFVKFNCPEFTSLCPITGQPDFATIYISYIPNVKMVESKSLKLYLFSFRNHGDFHEDCMNIIMNDLIALMDPHYIEVWGKFTPRGGISIDPYTNYGRPNSKYETMAEHRLMNHDMYPEKIDNR

SEQ ID NO: 49959 - protein, 166 aa, Staphylococcus delphini
  REGION 1..166: note = tr|A0A2A4HCP6|A0A2A4HCP6_9STAP NADPH-dependent 7-cyano-7-deazaguanine reductase OS=Staphylococcus delphini OX=53344 GN=queF PE=3 SV=1
MTEGRTKDELQDITLLGNQNNTYNFDYRPDVLETFVNKHQNRDYFVKFNCPEFTSLCPITGQPDFATIYISYIPNVKMVESKSLKLYLFSFRNHGDFHEDCMNIIMNDLIELMDPHYIEVWGKFTPRGGISIDPYTNYGRPNSKYETMAEHRLMNHDMYPEKIDNR

SEQ ID NO: 49960 - protein, 166 aa, Staphylococcus devriesei
  REGION 1..166: note = tr|A0A2K4DUU2|A0A2K4DUU2_9STAP NADPH-dependent 7-cyano-7-deazaguanine reductase OS=Staphylococcus devriesei OX=586733 GN=queF PE=3 SV=1
MTQGRQKEDLQDITLLGNQNNKYEFDYTPEVLETFENKHQGRDYFVKFNCPEFTSLCPITGQPDFATIYISYIPNIKMVESKSLKLYLFSFRNHGDFHEDCMNIIMNDLIQLMDPHYIEVWGKFTPRGGISIDPYTNYGRPNSKYEKMAEHRLMNHDMYPEKIDNR

SEQ ID NO: 49961 - protein, 166 aa, Staphylococcus devriesei
  REGION 1..166: note = tr|A0A2T4KBU0|A0A2T4KBU0_9STAP NADPH-dependent 7-cyano-7-deazaguanine reductase OS=Staphylococcus devriesei OX=586733 GN=queF PE=3 SV=1
MTQGRQKEDLQDITLLGNQNNKYEFDYTPEVLETFENKHQGRDYFVKFNCPEFTSLCPITGQPDFATIYISYIPNVKMVESKSLKLYLFSFRNHGDFHEDCMNIIMNDLIQLMDPHYIEVWGKFTPRGGISIDPYTNYGRPDSKYEKMAEHRLMNHDMYPEKIDNR

SEQ ID NO: 49962 - protein, 166 aa, unidentified
  source 1..166: note = Staphylococcus edaphicus
  REGION 1..166: note = tr|A0A2C6WHU3|A0A2C6WHU3_9STAP NADPH-dependent 7-cyano-7-deazaguanine reductase OS=Staphylococcus edaphicus OX=1955013 GN=queF PE=3 SV=1
MSEGRNKQELEDVTLLGNQNNKYDFDYRPDVLESFDNKHQGRDYFVKFNCPEFTSLCPITGQPDFATIYISYIPNIKMVESKSLKLYLFSFRNHGDFHEDCMNIIMNDLIELMDPHYIEVWGKFTPRGGISIDPYTNYGRPNSKYEKMAEHRLMNHDLYPEKIDNR

SEQ ID NO: 49963 - protein, 166 aa, Staphylococcus epidermidis
  REGION 1..166: note = tr|D4FNG2|D4FNG2_STAEP NADPH-dependent 7-cyano-7-deazaguanine reductase OS=Staphylococcus epidermidis M23864:W2(grey) OX=525375 GN=queF PE=3 SV=1
MTQGRQKDELKDITLLGNQNNTYEFDYRPEVLETFDNKHQGRDYFVKFNCPEFTSLCPITGQPDFATIYISYIPNIKMVESKSLKLYLFSFRNHGDFHEDCMNIIMNDLINLMDPHYIEVWGKFTPRGGISIDPYTNYGRPDTKYEKMAEHRLMNHDMYPEKIDNR

SEQ ID NO: 49964 - protein, 166 aa, Staphylococcus epidermidis; identical to SEQ ID NO: 49963
  REGION 1..166: note = sp|Q8CTG5|QUEF_STAES NADPH-dependent 7-cyano-7-deazaguanine reductase OS=Staphylococcus epidermidis (strain ATCC 12228) OX=176280 GN=queF PE=3 SV=1

SEQ ID NO: 49965 - protein, 166 aa, Staphylococcus equorum
  REGION 1..166: note = tr|A0A3S0NJB1|A0A3S0NJB1_9STAP NADPH-dependent 7-cyano-7-deazaguanine reductase OS=Staphylococcus equorum subsp. equorum OX=29383 GN=queF PE=3 SV=1
MTQGRQKGELNDISLLGNQNNQYDFDYRPNILETFDNKHQGHDYFVKFNCPEFTSLCPITGQPDFATIYISYIPNIKMIESKSLKLYLFSFRNHGDFHEDCMNIIMNDLINLMNPHYIEVWGKFTPRGGISIDPYTNYGRPGSKYEKMAEHRLMNHDMYPENIDNR

SEQ ID NO: 49966 - protein, 166 aa, Staphylococcus equorum
  REGION 1..166: note = tr|A0A1E5TIP3|A0A1E5TIP3_9STAP NADPH-dependent 7-cyano-7-deazaguanine reductase OS=Staphylococcus equorum; OX = 246432 GN=queF PE=3 SV=1
MTEGRNKEELEDITLLGNQNNKYDFDYRPDVLESFDNKHPGRDYFVKFNCPEFTSLCPITGQPDFATIYISYIPNIKMVESKSLKLYLFSFRNHGDFHEDCMNIIMNDLIDLMDPHYIEVWGKFTPRGGISIDPYTNYGRPDSKYEKMAEHRLMNHDLYPEKIDNR

SEQ ID NO: 49967 - protein, 166 aa, Staphylococcus felis
  REGION 1..166: note = tr|A0A2P1MJP6|A0A2P1MJP6_9STAP NADPH-dependent 7-cyano-7-deazaguanine reductase OS=Staphylococcus felis; OX = 46127 GN=queF PE=3 SV=1
MAEGRSKEELQDITLLGNQNNTYNFDYRPDVLETFDNKHQGRDYFVKFNCPEFTSLCPITGQPDFATIYISYIPNIKMVESKSLKLYLFSFRNHGDFHEDCMNIIMNDLIDLMDPHYIEVWGKFTPRGGISIDPYTNYGRPDTKYEKIAEHRLMNHDLYPEKIDNR

SEQ ID NO: 49968 - protein, 166 aa, Staphylococcus fleurettii
  REGION 1..166: note = tr|A0A380FUL6|A0A380FUL6_9STAP NADPH-dependent 7-cyano-7-deazaguanine reductase OS=Staphylococcus fleurettii OX=150056 GN=queF PE=3 SV=1
MSEGRNKEELKDITLLGNQNNQYHDQYKPEVLEVFDNKHQGRDYFVKFNCPEFTSLCPITGQPDFATIYISYIPNVKMVESKSLKLYLFSFRNHGDFHEDCMNVIMNDLIELMDPHYIEVLGKFTPRGGISIDPYTNYGRPDSKYEKMAEYRMMNHDLYPENIDNR

SEQ ID NO: 49969 - protein, 166 aa, Staphylococcus fleurettii
  REGION 1..166: note = tr|A0A431Z658|A0A431Z658_9STAP NADPH-dependent 7-cyano-7-deazaguanine reductase OS=Staphylococcus fleurettii OX=150056 GN=queF PE=3 SV=1
MPKGRSKEELKDITLLGNQNNTYDFDYRPDVLETFDNKHQGRDYFVKFNCPEFTSLCPITGQPDFATIYISYIPNVKMVESKSLKLYLFSFRNHGDFHEDCMNIIMNDLIELMDPHYIEVWGKFTPRGGISIDPYTNYGRPDTKYEKMADYRMMNHDLYPETIDNR

SEQ ID NO: 49970 - protein, 162 aa, Staphylococcus gallinarum
  REGION 1..162: note = tr|A0A380FCM4|A0A380FCM4_STAGA NADPH-dependent 7-cyano-7-deazaguanine reductase OS=Staphylococcus gallinarum OX=1293 GN=queF PE=3 SV=1
MAEGRNKDELQDITLLGNQNNQYDFDYRPDVLESFDNKHQGRDYFVKFNCPEFTSLCPITGQPDFATIYISYIPNIKMVESKSLKLYLFSFRNHGDFHEDCMNIIMNDLIELMDPHYIEVWGKFTPRGGISIDPYTNYGRPNSKYEKMAEHRLMNHDLYPEK

SEQ ID NO: 49971 - protein, 166 aa, Staphylococcus gallinarum
  REGION 1..166: note = tr|A0A2T4SWC4|A0A2T4SWC4_STAGA NADPH-dependent 7-cyano-7-deazaguanine reductase OS=Staphylococcus gallinarum OX=1293 GN=queF PE=3 SV=1
MAEGRNKDELQDITLLGNQNNQYDFDYRPDVLESFDNKHQGRDYFVKFNCPEFTSLCPITGQPDFATIYISYIPNVKMVESKSLKLYLFSFRNHGDFHEDCMNIIMNDLIELMDPHYIEVWGKFTPRGGISIDPYTNYGRPNSKYEKMAEHRLMNHDLYPEKIDNR

SEQ ID NO: 49972 - protein, 166 aa, Staphylococcus haemolyticus
  REGION 1..166: note = tr|A0A2A1K5D1|A0A2A1K5D1_STAHA NADPH-dependent 7-cyano-7-deazaguanine reductase OS=Staphylococcus haemolyticus OX=1283 GN=queF PE=3 SV=1
MTQGRQKEELQDITLLGNQNNKYEFDYTPEVLETFDNKHQGRDYFVKFNCPEFTSLCPITGQPDFATIYISYIPNIKMVESKSLKLYLFSFRNHGDFHEDCMNIIMNDLIDLMDPHYIEVWGKFTPRGGISIDPYTNYGRPNSKYEKMAEHRLMNHDLYPEKIDNR

SEQ ID NO: 49973 - protein, 166 aa, Staphylococcus haemolyticus; identical to SEQ ID NO: 49972
  REGION 1..166: note = sp|Q4L4F1|QUEF_STAHJ NADPH-dependent 7-cyano-7-deazaguanine reductase OS=Staphylococcus haemolyticus (strain JCSC1435) OX=279808 GN=queF PE=3 SV=1

SEQ ID NO: 49974 - protein, 166 aa, Staphylococcus hominis
  REGION 1..166: note = tr|A0A1L8Y4P7|A0A1L8Y4P7_STAHO NADPH-dependent 7-cyano-7-deazaguanine reductase OS=Staphylococcus hominis; OX = 1290 GN=queF PE=3 SV=1
MTQGRNKEELQDITLLGNQNNKYEFDYTPQVLETFDNKHQGRDYFVKFNCPEFTSLCPITGQPDFATIYISYIPNIKMVESKSLKLYLFSFRNHGDFHEDCMNIIMNDLIDLMDPHYIEVWGKFTPRGGISIDPYTNYGRPNSKYEKMAEHRLMNHDMYPEKIDNR

SEQ ID NO: 49975 - protein, 166 aa, Staphylococcus hyicus
  REGION 1..166: note = tr|A0A0A8HSR3|A0A0A8HSR3_STAHY NADPH-dependent 7-cyano-7-deazaguanine reductase OS=Staphylococcus hyicus; OX = 1284 GN=queF PE=3 SV=1
MTEGRSKDELQDITLLGNQNNNYEFDYRPDVLESFDNKHQGRDYFVKFNCPEFTSLCPITGQPDFASIYISYIPNVKMVESKSLKLYLFSFRNHGDFHEDCMNIIMNDLIELMDPHYIEVWGKFTPRGGISIDPYTNYGRPNSKYEKMAEHRLMNHDMYPENIDNR

SEQ ID NO: 49976 - protein, 166 aa, Staphylococcus hyicus
  REGION 1..166: note = tr|A0A4U9ZNJ9|A0A4U9ZNJ9_STAHY NADPH-dependent 7-cyano-7-deazaguanine reductase OS=Staphylococcus hyicus; OX = 1284 GN=queF PE=3 SV=1
MAHGRQQDELQDITLLGNQNNTYNFDYRPDVLESFDNKHQGRDYFVKFNCPEFTSLCPITGQPDFATIYISYIPNVKMVESKSLKLYLFSFRNHGDFHEDCMNIIMNDLIELMDPHYIEVWGKFTPRGGISIDPYTNYGRPNSKYEKMAEHRLMNHDLYPEKIDNR

SEQ ID NO: 49977 - protein, 166 aa, Staphylococcus intermedius
  REGION 1..166: note = tr|A0A380GB51|A0A380GB51_STAIN NADPH-dependent 7-cyano-7-deazaguanine reductase OS=Staphylococcus intermedius NCTC 11048 OX=1141106 GN=queF PE=3 SV=1
MAEGRSKDELQDITLLGNQNNTYNFDYRPDVLETFDNKHQNRDYFVKFNCPEFTSLCPITGQPDFATIYISYIPNIKMVESKSLKLYLFSFRNHGDFHEDCMNIIMNDLIDLMDPHYIEVWGKFTPRGGISIDPYTNYGRPNSKYEKMAEHRLMNHDMYPEKIDNR

SEQ ID NO: 49978 - protein, 166 aa, Staphylococcus kloosii
  REGION 1..166: note = tr|A0A512QFJ2|A0A512QFJ2_9STAP NADPH-dependent 7-cyano-7-deazaguanine reductase OS=Staphylococcus kloosii; OX = 29384 GN=queF PE=3 SV=1
MAQGRNNEELQDITLLGNQNNKYDFDYTPEVLESFDNKHQGRDYFVKFNCPEFTSLCPITGQPDFATIYISYIPNIKMVESKSLKLYLFSFRNHGDFHEDCMNIIMNDLIDLMDPHYIEVWGKFTPRGGISIDPYTNYGRPNSKYEQMAEHRLMNHDLYPEKIDNR

SEQ ID NO: 49979 - protein, 166 aa, Staphylococcus kloosii
  REGION 1..166: note = tr|A0A151A6P9|A0A151A6P9_9STAP NADPH-dependent 7-cyano-7-deazaguanine reductase OS=Staphylococcus kloosii; OX = 29384 GN=queF PE=3 SV=1
MAQGRNNEELQDITLLGNQYNKYDFDYTPEVLESFDNKHQGRDYFVKFNCPEFTSLCPITGQPDFATIYISYIPNIKMVESKSLKLYLFSFRNHGDFHEDCMNIIMNDLIDLMDPHYIEVWGKFTPRGGISIDPYTNYGRPNSKYEQMAEHRLMNHDLYPEKIDNR

SEQ ID NO: 49980 - protein, 166 aa, Staphylococcus lentus
  REGION 1..166: note = tr|A0A178NZZ7|A0A178NZZ7_STALE NADPH-dependent 7-cyano-7-deazaguanine reductase OS=Staphylococcus lentus; OX = 42858 GN=queF PE=3 SV=1
MSEGRKKEDLKDITLLGNQNNQYYDQYNPEVLEVFDNKHQGRDYFVKFNCPEFTSLCPITGQPDFAAIYISYIPNVKMVESKSLKLYLFSFRNHGDFHEDCMNVIMNDLIELMDPHYIEVLGKFTPRGGISIDPYTNYGRPGTKYEEMAEYRMMNHDLYPENIDNR

SEQ ID NO: 49981 - protein, 166 aa, Staphylococcus lentus
  REGION 1..166: note = tr|A0A4Y9KE95|A0A4Y9KE95_STALE NADPH-dependent 7-cyano-7-deazaguanine reductase OS=Staphylococcus lentus; OX = 42858 GN=queF PE=3 SV=1
MSEGRKKEDLKDITLLGNQNNQYYDQYNPEVLEVFDNKHQGRDYFVKFNCPEFTSLCPITGQPDFAAIYISYIPNVKMVESKSLKLYLFSFRNHGDFHEDCMNVIMNDLIELMDPHYIEVLGKFTPRGGISIDPYTNYGRLGTKYEEMAEYRMMNHDLYPENIDNR

SEQ ID NO: 49982 - protein, 166 aa, Staphylococcus lugdunensis
  REGION 1..166: note = tr|A0A292DHM0|A0A292DHM0_STALU NADPH-dependent 7-cyano-7-deazaguanine reductase OS=Staphylococcus lugdunensis OX=28035 GN=queF PE=3 SV=1
MTQGRQEEEMKDITLLGNQNNNYQFDYRPDVLETFVNKHQGRDYFVKFNCPEFTSLCPITGQPDFATIYISYIPNVKMVESKSLKLYLFSFRNHGDFHEDCMNIIMNDLIELMDPHYIEVWGKFTPRGGISIDPYTNYGRPDTKYARMAEHRLMNHDMYPEKIDNR

SEQ ID NO: 49983 - protein, 166 aa, Staphylococcus lugdunensis
  REGION 1..166: note = tr|A0A133Q1G5|A0A133Q1G5_STALU NADPH-dependent 7-cyano-7-deazaguanine reductase OS=Staphylococcus lugdunensis OX=28035 GN=queF PE=3 SV=1
MTQGRQEEEMKDITLLGNQNNHYQFDYRPDVLETFVNKHQGRDYFVKFNCPEFTSLCPITGQPDFATIYISYIPNVKMVESKSLKLYLFSFRNHGDFHEDCMNIIMNDLIELMDPHYIEVWGKFTPRGGISIDPYTNYGRPDTKYARMAEHRLMNHDMYPEKIDNR

SEQ ID NO: 49984 - protein, 166 aa, Staphylococcus lutrae
  REGION 1..166: note = tr|A0A1W6BMT9|A0A1W6BMT9_9STAP NADPH-dependent 7-cyano-7-deazaguanine reductase OS=Staphylococcus lutrae; OX = 155085 GN=queF PE=3 SV=1
MTEGRSKSELQDITLLGNQDNTYHFDYRPDILETFENKHQNRDYFVKFNCPEFTSLCPITGQPDFATIYISYIPNVKMVESKSLKLYLFSFRNHGDFHEDCMNIIMNDLIELMDPHYIEVWGKFTPRGGISIDPYTNYGRPNSKYEKMAEYRLMNHDMYPEKIDNR

SEQ ID NO: 49985 - protein, 164 aa, Staphylococcus massiliensis
  REGION 1..164: note = tr|K9AMC8|K9AMC8_9STAP NADPH-dependent 7-cyano-7-deazaguanine reductase OS=Staphylococcus massiliensis S46 OX=1229783 GN=queF PE=3 SV=1
MSREKHELDDLTLLGNKNNTYHFDYDPKLLESFDNKHPNRDYFVKFNCPEFTSLCPITGQPDFATIYISYIPNIKMVESKSLKLYLFSFRNHGDFHEDCMNIIMNDLIDLMDPHYIEVWGKFTPRGGISIDPYTNYGKPGTKYEKMAEHRLMNHDLYPEKIDNR

SEQ ID NO: 49986 - protein, 166 aa, Staphylococcus microti
  REGION 1..166: note = tr|A0A0D6XSU3|A0A0D6XSU3_9STAP NADPH-dependent 7-cyano-7-deazaguanine reductase OS=Staphylococcus microti; OX = 569857 GN=queF PE=3 SV=1
MSEGRSKEDLQDITLLGNQNNTYNFDYRPDVLESFDNKHQGRDYFVKFNCPEFTSLCPITGQPDFATIYISYIPNVKMVESKSLKLYLFSFRNHGDFHEDCMNIIMNDLIELMDPHYIEVWGKFTPRGGISIDPYTNYGRPNSKYEKMAEYRMMNHDLYPENIDNR

SEQ ID NO: 49987 - protein, 166 aa, Staphylococcus muscae
  REGION 1..166: note = tr|A0A240BWC6|A0A240BWC6_9STAP NADPH-dependent 7-cyano-7-deazaguanine reductase OS=Staphylococcus muscae; OX = 1294 GN=queF PE=3 SV=1
MSEGRSKEDLQDITLLGNQNNTYNFDYRPDVLESFDNKHQGRDYFVKFNCPEFTSLCPITGQPDFATIYISYIPNVKMVESKSLKLYLFSFRNHGDFHEDCMNIIMNDLIDLMDPHYIEVWGKFTPRGGISIDPYTNYGRPNSKYEKMAEYRMMNHDLYPETIDNR

SEQ ID NO: 49988 - protein, 72 aa, Staphylococcus nepalensis
  REGION 1..72: note = tr|A0A2T4S6V2|A0A2T4S6V2_9STAP NADPH-dependent 7-cyano-7-deazaguanine reductase QueF (Fragment); OS = Staphylococcus nepalensis OX=214473 GN=BUZ61_14075 PE=3; SV = 1
MSQQGRSKEDLEDLTLLGNQNNQYDFNYRPDVLESFDNKHQGRDYFVKFNCPEFTSLCPITGQPDFATIYIS

SEQ ID NO: 49989 - protein, 166 aa, Staphylococcus nepalensis; identical to SEQ ID NO: 45359
  REGION 1..166: note = tr|A0A291JMN2|A0A291JMN2_9STAP NADPH-dependent 7-cyano-7-deazaguanine reductase OS=Staphylococcus nepalensis OX=214473 GN=queF PE=3 SV=1

SEQ ID NO: 49990 - protein, 166 aa, Staphylococcus pasteuri; identical to SEQ ID NO: 49968
  REGION 1..166: note = tr|A0A3S0MYN7|A0A3S0MYN7_9STAP NADPH-dependent 7-cyano-7-deazaguanine reductase OS=Staphylococcus pasteuri OX=45972 GN=queF PE=3 SV=1

SEQ ID NO: 49991 - protein, 166 aa, Staphylococcus pasteuri
  REGION 1..166: note = tr|A0A0M2NU18|A0A0M2NU18_9STAP NADPH-dependent 7-cyano-7-deazaguanine reductase OS=Staphylococcus pasteuri OX=45972 GN=queF PE=3 SV=1
MAQGRQKDELQDITLLGNQNNTYDFDYRPDVLETFENKHQGRDYFVKFNCPEFTSLCPITGQPDFATIYISYIPNIKMVESKSLKLYLFSFRNHGDFHEDCMNIIMNDLIDLMDPHYIEVWGKFTPRGGISIDPYTNYGRPNSKYEQMAEHRMMNHDMYPENVDNR

SEQ ID NO: 49992 - protein, 166 aa, unidentified
  source 1..166: note = Staphylococcus petrasii
  REGION 1..166: note = tr|A0A5F1B2H5|A0A5F1B2H5_9STAP NADPH-dependent 7-cyano-7-deazaguanine reductase OS=Staphylococcus petrasii subsp. petrasii OX=1276937 GN=queF PE=3 SV=1
MTKGRQKDELQDITLLGNQNNKYEFDYTPEVLETFDNKHQGRDYFVKFNCPEFTSLCPITGQPDFATIYISYIPNVKMVESKSLKLYLFSFRNHGDFHEDCMNIIMNDLIDLMDPHYIEVWGKFTPRGGISIDPYTNYGRPNSKYEKMAEHRLMNHDMYPEKVDNR

SEQ ID NO: 49993 - protein, 166 aa, unidentified; identical to SEQ ID NO: 49992
  source 1..166: note = Staphylococcus petrasii
  REGION 1..166: note = tr|A0A380G298|A0A380G298_9STAP NADPH-dependent 7-cyano-7-deazaguanine reductase OS=Staphylococcus petrasii subsp. jettensis OX=1077965 GN=queF PE=3 SV=1

SEQ ID NO: 49994 - protein, 166 aa, Staphylococcus pettenkoferi
  REGION 1..166: note = tr|A0A1Z3U360|A0A1Z3U360_9STAP NADPH-dependent 7-cyano-7-deazaguanine reductase OS=Staphylococcus pettenkoferi OX=170573 GN=queF PE=3 SV=1
MAQGRNQEELEDITLLGNQNNQYDFDYRPDVLETFDNKHQGRDYFVKFNCPEFTSLCPITGQPDFATIYISYIPDVKMVESKSLKLYLFSFRNHGDFHEDCMNIIMNDLIDLMDPHYIEVWGKFTPRGGISIDPYTNYGRPNTKYERIAEHRLMNHDLYPEKVDNR

SEQ ID NO: 49995 - protein, 167 aa, Staphylococcus piscifermentans
  REGION 1..167: note = tr|A0A239UDF6|A0A239UDF6_9STAP NADPH-dependent 7-cyano-7-deazaguanine reductase OS=Staphylococcus piscifermentans OX=70258 GN=queF PE=3 SV=1
MSNEGRKKEELEDITLLGNQNNTYHFDYRPDVLETFDNKHQGRDYFVKFNCPEFTSLCPITGQPDFATIYISYIPNIKMVESKSLKLYLFSFRNHGDFHEDCMNIIMNDLIELMDPHYIEVWGKFTPRGGISIDPYTNYGRPDSKYEQMAEYRMMNHDLYPENIDNR

SEQ ID NO: 49996 - protein, 166 aa, Staphylococcus piscifermentans
  REGION 1..166: note = tr|A0A431Z3P4|A0A431Z3P4_9STAP NADPH-dependent 7-cyano-7-deazaguanine reductase OS=Staphylococcus piscifermentans OX=70258 GN=queF PE=3 SV=1
MTEGRNKEELEDITLLGNQNNKYDFDYRPDVLESFDNKHPGRDYFVKFNCPEFTSLCPITGQPDFATIYVSYIPNIKMVESKSLKLYLFSFRNHGDFHEDCMNIIMNDLIDLMDPHYIEVWGKFTPRGGISIDPYTNYGRPDSKYEKMAEHRLMNHDLYPEKIDNR

SEQ ID NO: 49997 - protein, 166 aa, Staphylococcus pseudintermedius
  REGION 1..166: note = tr|A0A161WK85|A0A161WK85_STAPS NADPH-dependent 7-cyano-7-deazaguanine reductase OS=Staphylococcus pseudintermedius OX=283734 GN=queF PE=3 SV=1
MTEGRSKDELQDITLLGNQNNTYNFDYRPDVLETFDNKHQNRDYFVKFNCPEFTSLCPITGQPDFATIYISYIPNVKMVESKSLKLYLFSFRNHGDFHEDCMNIIMNDLIELMDPHYIEVWGKFTPRGGISIDPYTNYGRPNSKYEKMAEHRLMNHDMYPEKIDNR

SEQ ID NO: 49998 - protein, 166 aa, Staphylococcus rostri
  REGION 1..166: note = tr|A0A2K3YSS9|A0A2K3YSS9_9STAP NADPH-dependent 7-cyano-7-deazaguanine reductase OS=Staphylococcus rostri; OX = 522262 GN=queF PE=3 SV=1
MSEGRSKEDLQDITLLGNQNNTYNFDYRPDVLETFDNKHQGRDYFVKFNCPEFTSLCPITGQPDFATIYISYIPNVKMVESKSLKLYLFSFRNHGDFHEDCMNIIMNDLIELMDPHYIEVWGKFTPRGGISIDPYTNYGRPDSKYEKMAEYRMMNHDLYPETIDNR

SEQ ID NO: 49999 - protein, 166 aa, Staphylococcus saccharolyticus; identical to SEQ ID NO: 49965
  REGION 1..166: note = tr|A0A380H6V8|A0A380H6V8_9STAP NADPH-dependent 7-cyano-7-deazaguanine reductase OS=Staphylococcus saccharolyticus OX=33028 GN=queF PE=3 SV=1

SEQ ID NO: 50000 - protein, 166 aa, Staphylococcus saccharolyticus
  REGION 1..166: note = tr|A0A4Q8MZP8|A0A4Q8MZP8_9STAP NADPH-dependent 7-cyano-7-deazaguanine reductase OS=Staphylococcus saccharolyticus OX=33028 GN=queF PE=3 SV=1
MTQGRQKDKLNDISLLGNQNNQYDFDYSPDILETFDNKHQGHDYFVKFNCPEFTSLCPITGQPDFATIYISYIPNIKMVESKSLKLYLFSFRNHGDFHEDCMNIIMNDLINLMNPHYIEVWGKFTPRGGISIDPYTNYGRPGSKYEKMAEHRLMNHDMYPENIDNR

SEQ ID NO: 50001 - protein, 166 aa, Staphylococcus saprophyticus
  REGION 1..166: note = tr|A0A380H771|A0A380H771_STASA NADPH-dependent 7-cyano-7-deazaguanine reductase OS=Staphylococcus saprophyticus OX=29385 GN=queF PE=3 SV=1
MTQGRNKEELQDITLLGNQNNKYEFDYTPQVLETFDNKHQGRDYFVKFNCPEFTSLCPITGQPDFATIYISYIPNIKMVESKSLKLYLFSFRNHGDFHEDCMNIIMNDLIDLMDPHYIEVWGKFTPRGGISIDPYTNYGRPNSKYEKMVEHRLMNHDMYPEKIDNR

SEQ ID NO: 50002 - protein, 166 aa, Staphylococcus saprophyticus
  REGION 1..166: note = sp|Q49VS6|QUEF_STAS1 NADPH-dependent 7-cyano-7-deazaguanine reductase OS=Staphylococcus saprophyticus subsp. saprophyticus (strain ATCC 15305 / DSM 20229 / NCIMB 871 1 / NCTC 7292 / S-41) OX=342451; GN = queF PE=3 SV=
MTEGRNKEELEDITLLGNQNNKYDFDYRPDVLESFDNKHQGRDYFVKFNCPEFTSLCPITGQPDFATIYISYIPNIKMVESKSLKLYLFSFRNHGDFHEDCMNIIMNDLIELMDPHYIEVWGKFTPRGGISIDPYTNYGRPDSKYEKMAEHRLMNHDLYPEKIDNR

SEQ ID NO: 50003 - protein, 166 aa, Staphylococcus schleiferi; identical to SEQ ID NO: 49946
  REGION 1..166: note = tr|A0A3S0K9K6|A0A3S0K9K6_9STAP NADPH-dependent 7-cyano-7-deazaguanine reductase OS=Staphylococcus schleiferi subsp. schleiferi OX=74707 GN=queF PE=3 SV=1

SEQ ID NO: 50004 - protein, 166 aa, Staphylococcus schleiferi
  REGION 1..166: note = tr|A0A0K1AEW2|A0A0K1AEW2_9STAP NADPH-dependent 7-cyano-7-deazaguanine reductase OS=Staphylococcus schleiferi OX=1295 GN=queF PE=3 SV=1
MPKGRSKEELKDITLLGNQNNTYDFDYRPDVLETFDNKHQGRDYFVKFNCPEFTSLCPITGQPDFATIYISYIPNVKMVESKSLKLYLFSFRNHGDFHEDCMNIIMNDLIELMDPHYIEVWGKFTPRGGISIDPYTNYGRPETKYEKMADYRMMNHDLYPETVDNR

SEQ ID NO: 50005 - protein, 166 aa, unidentified
  source 1..166: note = Staphylococcus schweitzeri
  REGION 1..166: note = tr|A0A2K4AJW3|A0A2K4AJW3_9STAP NADPH-dependent 7-cyano-7-deazaguanine reductase OS=Staphylococcus schweitzeri OX=1654388 GN=queF PE=3 SV=1
MAQGRQQDELQDITLLGNQDNTYNFDYRPDVLESFDNKHQGRDYFVKFNCPEFTSLCPITGQPDFATIYISYIPNVKMVESKSLKLYLFSFRNHGDFHEDCMNIIMNDLIKLMDPHYIEVWGKFTPRGGISIDPYTNYGRPNSKYEKMAEHRLMNHDLYPEKIDNR

SEQ ID NO: 50006 - protein, 52 aa, Staphylococcus sciuri
  REGION 1..52: note = tr|A0A2T4RP22|A0A2T4RP22_STASC NADPH-dependent 7-cyano-7-deazaguanine reductase QueF (Fragment); OS = Staphylococcus sciuri OX=1296 GN=BUZ90_15185 PE=4 SV=1
MAHGRQQDELQDITLLGNQDNTYNFDYRPDVLESFDNKHQGRDYFVKFNCPE

SEQ ID NO: 50007 - protein, 166 aa, Staphylococcus sciuri
  REGION 1..166: note = tr|A0A418JAD8|A0A418JAD8_STASC NADPH-dependent 7-cyano-7-deazaguanine reductase OS=Staphylococcus sciuri; OX = 1296 GN=queF PE=3 SV=1
MSEGRNKDDLKDITLLGNQNNQYYDQYKPEVLEVFDNKHQGRDYFVKFNCPEFTSLCPITGQPDFATIYISYIPNVKMVESKSLKLYLFSFRNHGDFHEDCMNVIMNDLIELMDPHYIEVLGKFTPRGGISIDPYTNYGRPDSKYEKMAEYRMMNHDLYPENIDNR

SEQ ID NO: 50008 - protein, 166 aa, Staphylococcus simiae
  REGION 1..166: note = tr|G5JIQ8|G5JIQ8_9STAP NADPH-dependent 7-cyano-7-deazaguanine reductase OS=Staphylococcus simiae CCM 7213 = CCUG 51256 OX=911238 GN=queF PE=3 SV=1
MTQGRQQDELQDITLLGNQNNQYHFDYRPDVLESFDNKHQGRDYFVKFNCPEFTSLCPITGQPDFATIYISYIPNIKMVESKSLKLYLFSFRNHGDFHEDCMNIIMNDLIELMDPHYIEVWGKFTPRGGISIDPYTNYGRPNTKYETMAEHRLMNHDLYPEKIDNR

SEQ ID NO: 50009 - protein, 167 aa, Staphylococcus simulans
  REGION 1..167: note = tr|A0A418J389|A0A418J389_STASI NADPH-dependent 7-cyano-7-deazaguanine reductase OS=Staphylococcus simulans OX=1286 GN=queF PE=3 SV=1
MSQQGRSKEDLEDLTLLGNQNNQYDFNYHPDVLESFDNKHQGRDYFVKFNCPEFTSLCPITGQPDFATIYISYIPNIKMVESKSLKLYLFSFRNHGDFHEDCMNIIMNDLIELMDPHYIEVWGKFTPRGGISIDPYTNYGRPDSKYEKMAEYRMMNHDLYPETIDNR

SEQ ID NO: 50010 - protein, 167 aa, Staphylococcus simulans
  REGION 1..167: note = tr|A0A2T4R129|A0A2T4R129_STASI NADPH-dependent 7-cyano-7-deazaguanine reductase OS=Staphylococcus simulans OX=1286 GN=queF PE=3 SV=1
MSQQGRSKEDLEDLTLLGNQNNQYDFNYRPDVLESFDNKHQGRDYFVKFNCPEFTSLCPITGQPDFATIYISYIPNVKMVESKSLKLYLFSFRNHGDFHEDCMNIIMNDLIELMDPHYIEVWGNFTPRGGISIDPYTNYGRPDSKYEKMAEYRMMNHDLYPEKIDNR

SEQ ID NO: 50011 - protein, 166 aa, Staphylococcus sp.
  REGION 1..166: note = tr|A0A1J4HDF1|A0A1J4HDF1_9STAP NADPH-dependent 7-cyano-7-deazaguanine reductase OS=Staphylococcus sp. HMSC34G04 OX=1608860 GN=queF PE=3 SV=1
MTQGRQKDELKDITLLGNQNNTYEFDYRPEVLETFDNKHQGRDYFVKFNCPEFTSLCPITGQPDFATIYISYIPNIKMVESKSLKLYLFSFRNHGDFHEDCMNIIMNDLINLMDPHYIEVWGKFTPRGGISIDPYTNYGRPNTKYEKIAEHRLMNHDMYPEKIDNR

SEQ ID NO: 50012 - protein, 166 aa, Staphylococcus sp.
  REGION 1..166: note = tr|A0A2J6P2U6|A0A2J6P2U6_9STAP NADPH-dependent 7-cyano-7-deazaguanine reductase OS=Staphylococcus sp. UMB0328 OX=2029110 GN=queF PE=3 SV=1
MAQGRQNDELQDITLLGNQNNTYNFDYRPDVLETFDNKHQGRDYFVKFNCPEFTSLCPITGQPDFATIYISYIPNIKMVESKSLKLYLFSFRNHGDFHEDCMNIIMNDLIDLMDPHYIEVWGKFTPRGGISIDPYTNYGRPNSKYEKMAEHRMMNHDMYPENIDNR

SEQ ID NO: 50013 - protein, 166 aa, unidentified
  source 1..166: note = Staphylococcus stepanovicii
  REGION 1..166: note = tr|A0A240A0F6|A0A240A0F6_9STAP NADPH-dependent 7-cyano-7-deazaguanine reductase OS=Staphylococcus stepanovicii OX=643214 GN=queF PE=3 SV=1
MSEGRNKEELKDITLLGNQNNTYHDQYTPEVLEVFDNKHQGRDYFVKFNCPEFTSLCPITGQPDFATIYISYIPNIKMVESKSLKLYLFSFRNHGDFHEDCMNVIMNDLIELMDPHYIEVLGKFTPRGGISIDPYTNYGRPDSKYEKMAEYRMMNHDLYPENVDNR

SEQ ID NO: 50014 - protein, 166 aa, Staphylococcus succinus
  REGION 1..166: note = tr|A0A2T4Q4T6|A0A2T4Q4T6_9STAP NADPH-dependent 7-cyano-7-deazaguanine reductase OS=Staphylococcus succinus OX=61015 GN=queF PE=3 SV=1
MSEGRNKTQLEDITLLGNQNNKYEFDYTPNVLESFDNKHQGRDYFVKFNCPEFTSLCPITGQPDFATIYISYIPNIKMVESKSLKLYLFSFRNHGDFHEDCMNIIMNDLIDLMDPHYIEVWGKFTPRGGISIDPYTNYGRPDSKYEKMAEHRLMNHDLYPEKIDNR

SEQ ID NO: 50015 - protein, 166 aa, Staphylococcus vitulinus
  REGION 1..166: note = tr|A0A2T4PVX0|A0A2T4PVX0_9STAP NADPH-dependent 7-cyano-7-deazaguanine reductase OS=Staphylococcus vitulinus OX=71237 GN=queF PE=3 SV=1
MSEGRNKEELKDITLLGNQNNQYHDQYTPEVLEVFDNKHQGRDYFVKFNCPEFTSLCPITGQPDFATIYISYIPNVKMVESKSLKLYLFSFRNHGDFHEDCMNVIMNDLIELMDPHYIEVLGKFTPRGGISIDPYTNYGRPDSKYEKMAEYRMMNHDLYPENIDNR

SEQ ID NO: 50016 - protein, 165 aa, Staphylococcus warneri
  REGION 1..165: note = tr|A0A2V3ZC36|A0A2V3ZC36_STAWA NADPH-dependent 7-cyano-7-deazaguanine reductase OS=Staphylococcus warneri; OX = 1292 GN=queF PE=3 SV=1
MTGRQKEEMEDVTLLGNQNNTYAFDYDPSVLETFENKHQDKDYFVKFNCPEFTSLCPITQQPDFATVYISYIPDVKMVESKALKLYLFSFRNHGDFHEDCMNIILKDLIELMDPKYIEVWGKFMPRGGISIDPYTNYGKAGTKYEKMAEQRLLQHDIYPEHVDNR

SEQ ID NO: 50017 - protein, 166 aa, Staphylococcus warneri; identical to SEQ ID NO: 50012
  REGION 1..166: note = tr|A0A364UQY6|A0A364UQY6_STAWA NADPH-dependent 7-cyano-7-deazaguanine reductase OS=Staphylococcus warneri; OX = 1292 GN=queF PE=3 SV=1

SEQ ID NO: 50018 - protein, 166 aa, Staphylococcus xylosus
  REGION 1..166: note = tr|A0A418IG93|A0A418IG93_STAXY NADPH-dependent 7-cyano-7-deazaguanine reductase OS=Staphylococcus xylosus; OX = 1288 GN=queF PE=3 SV=1
MSEGRNKENLQDITLLGSQNNKYEFDYDPSVLESFDNKHPGRDYFVKFNCPEFTSLCPITGQPDFATIYISYIPNIKMVESKSLKLYLFSFRNHGDFHEDCMNIIMNDLIQLMDPHYIEVWGKFTPRGGISIDPYTNYGRPDSKYEKMAEHRLMNHDLYPEKIDNR

SEQ ID NO: 50019 - protein, 166 aa, Staphylococcus xylosus
  REGION 1..166: note = tr|A0A2T4P6A8|A0A2T4P6A8_STAXY NADPH-dependent 7-cyano-7-deazaguanine reductase OS=Staphylococcus xylosus; OX = 1288 GN=queF PE=3 SV=1
MSEGRNTEDLQDITLLGNQNNKYEFDYDPAVLESFDNKHPGRDYFVKFNCPEFTSLCPITGQPDFATIYISYIPNVKMVESKSLKLYLFSFRNHGDFHEDCMNIIMNDLIELMDPHYIEVWGKFTPRGGISIDPYTNYGRPDSKYEKMAEHRLMNHDLYPEKIDNR

SEQ ID NO: 50020 - protein, 155 aa, Stappia indica
  REGION 1..155: note = tr|A0A285TPF3|A0A285TPF3_9RHOB NADPH-dependent 7-cyano-7-deazaguanine reductase OS=Stappia indica; OX = 538381 GN=queF PE=3 SV=1
MSDKDIYSGLTQLGSATQIPASPKDAVLERVPNPQPDVRYAVRFTAPEFTSLCPMTGQPDFAHLVIDYLPSGWLVESKSLKLYLTSFRNHGAFHEDCTVSIGRRLVDLLAPDWLRIGGYWYPRGGIPIDVFYQTGPAPADVWIPDQGVPPYRGRG

SEQ ID NO: 50021 - protein, 155 aa, Stappia sp.
  REGION 1..155: note = tr|A0A5D0WBT0|A0A5D0WBT0_9RHOB NADPH-dependent 7-cyano-7-deazaguanine reductase OS=Stappia sp. BW2; OX = 2592622 GN=queF PE=3 SV=1
MSDKSIYENLTQLGSSTELPDDPDKAVLEKVPNPQAGTGYMVRFVAPEFTSLCPITGAPDFAHLVIDYVPRDFLVESKSLKLFLGSFRNHGAFHEDCTVSIGKRLVDLLDPQWLRIGGYWYPRGGIPIDVFYQTGPAPEGVWIPEQGVAPYRGRG

SEQ ID NO: 50022 - protein, 155 aa, Stappia sp.
  REGION 1..155: note = tr|A0A420A939|A0A420A939_9RHOB NADPH-dependent 7-cyano-7-deazaguanine reductase OS=Stappia sp. ARW1T; OX = 2135615 GN=queF PE=3 SV=1
MSDKDIYSGLTQLGSATEIPASPKDAVLERVPNPQPDVRYAVRFTAPEFTSLCPMTGQPDFAHLVIDYLPSGWLVESKSLKLYLTSFRNHGAFHEDCTVSIGRRLVDLLAPDWLRIGGYWYPRGGIPIDVFYQTGPAPADVWIPDQGVPPYRGRG

SEQ ID NO: 50023 - protein, 153 aa, Starkeya novella
  REGION 1..153: note = tr|D6ZYJ3|D6ZYJ3_STAND NADPH-dependent 7-cyano-7-deazaguanine reductase OS=Starkeya novella (strain ATCC 8093 / DSM 506 / CCM 1077 / IAM 12100 / NBRC 12443 / NCIB 91 13) OX=639283 GN=queF PE=3 SV=1
MNDATESPLQLGRATQWPASPEEAVLDRVPNPQADTLYVARFTAPEFTSLCPVTGQPDFAHLVIDYVPKDWLVESKSLKLYLASFRNHGAFHEDCTVAVGRRLYDLLEPHWLRIGGYWYPRGGIPIDVFWQSGAPPADIWLPNQGVPPYRGRG

SEQ ID NO: 50024 - protein, 172 aa, Starkeya novella
  REGION 1..172: note = tr|A0A2W5K4A3|A0A2W5K4A3_STANO NADPH-dependent 7-cyano-7-deazaguanine reductase OS=Starkeya novella; OX = 921 GN=queF PE=3 SV=1
MRTPPERSRFSPRCAKSRQFSGELMSDLQLGKQTPLPASPEEAALDRVPNPHPDVDYVARFAAPEFTSLCPVTGQPDFAHLVIDYVPGEWLVESKSLKLYLGSFRNHGAFHEDCTVAIAKRLVAELAPKWLRIGGYWYPRGGIPIDVFFETGERPAGLWVPDQGVPPYRGRG

SEQ ID NO: 50025 - protein, 153 aa, Starkeya sp.
  REGION 1..153: note = tr|A0A556PAS6|A0A556PAS6_9RHIZ NADPH-dependent 7-cyano-7-deazaguanine reductase OS=Starkeya sp. 3C; OX = 2597768 GN=queF PE=3 SV=1
MTNPQEGPLQLGRPTTMPASPEEAVLDRVPNPQADTLYVARFTAPEFTSLCPVTGQPDFAHLVIDYVPNDWLVESKSLKLYLASFRNHGAFHEDCTVAVGRRIHDLLQPHWLRIGGYWYPRGGIPIDVFWQSGAPPKEVWLPDQGVPPYRGRG

SEQ ID NO: 50026 - protein, 150 aa, Stella humosa
  REGION 1..150: note = tr|A0A3N1ME50|A0A3N1ME50_9PROT NADPH-dependent 7-cyano-7-deazaguanine reductase OS=Stella humosa OX=94; GN = queF PE=3 SV=1
MTEQLTQLGQMTALPASPEAARLERVGNPHADLGYCVRFTAPEFTSLCPITGQPDFAHLVIDYIPGDWIVESKSLKLYLGSFRNHGAFHEGCTLDIARRLVAEIAPRWLRIGGYWYPRGGMPIDVFYQTGSAPEGVWIPPQDVAPYRGRG

SEQ ID NO: 50027 - protein, 270 aa, Stenotrophomonas acidaminiphila
  REGION 1..270: note = tr|A0A2L0SIB9|A0A2L0SIB9_9GAMM NADPH-dependent 7-cyano-7-deazaguanine reductase OS=Stenotrophomonas acidaminiphila OX=128780 GN=queF PE=3 SV=1
MNTPHDSSLGREVAYPSQYDPGLLFPIPRATARAAIGLDATLPFVGQDRWHVYELGWLDRRGKPCVATATLWVPAASPHLVESKSLKLYLNSLNAARFDSADEVRARIAADLSACAGAAVTVEFGLPPVADAEGHSIDGLDLDIDHYGPPQAGFLHADTGEAVAETLVSALLKSNCPVTGQPDWASISIRYAGPRIDRGGLLRYLVSYRDHAEFHEQCVERIFLDLMHHCGCHSLDVEARYTRRGGLDINPRRSTPDLAAGHRPLRDPRQ

SEQ ID NO: 50028 - protein, 270 aa, Stenotrophomonas acidaminiphila
  REGION 1..270: note = tr|A0A0R0E6F4|A0A0R0E6F4_9GAMM NADPH-dependent 7-cyano-7-deazaguanine reductase OS=Stenotrophomonas acidaminiphila OX=128780 GN=queF PE=3 SV=1
MNNPHDSSLGREVAYPSQYDPGLLFPIPRATARAEIGLAAALPFVGQDRWHVYELGWLDMRGKPCVATATLWVPAASPNLVESKSLKLYLNSLNAARFASAADVRARIAADLSACAGAGVTVEFGLPPVADAEGESIDGLELDIDHYGPPQAGFLHADGGEAVAETLVSALLKSNCPVTGQPDWASVSIRYAGPRIDRGGLLRYLASYRDHAEFHEQCVERIFLDLVRHCGCHSLDVEARYTRRGGLDINPRRSTADFAAGHRPFRDPRQ

SEQ ID NO: 50029 - protein, 269 aa, Stenotrophomonas daejeonensis
  REGION 1..269: note = tr|A0A0R0E1M3|A0A0R0E1M3_9GAMM NADPH-dependent 7-cyano-7-deazaguanine reductase OS=Stenotrophomonas daejeonensis OX=659018 GN=queF PE=3 SV=1
MNTPQDSSLGREVAYPSQYDPGLLFPIPRAAARAEIGIDGGLPFAGDDRWHAYELGWLDGRGKPCVGTATLHVPCDSPNLIESKSLKLYLNSLNATRFDSADAAWARIAADLSACAGATVRVEPGLPPVAGAGGESIDALEVDIDCYGPPDAGFLVADADTPVTEMLVSELLKSNCPVTGQPDWASVGIRYHGPRIDRAGLLRYLVSYRDHAEFHEQCVERIFLDLSRHCRCHWLEVEARYTRRGGLDINPRRTTLGQPANAAFRDARQ

SEQ ID NO: 50030 - protein, 271 aa, Stenotrophomonas ginsengisoli
  REGION 1..271: note = tr|A0A0R0DLA6|A0A0R0DLA6_9GAMM NADPH-dependent 7-cyano-7-deazaguanine reductase OS=Stenotrophomonas ginsengisoli OX=336566 GN=queF PE=3 SV=1
MNTPSDSSLGREVRYPDQYDAALLFPIPRLAARSEIGIDEAALPFVGHDRWHAYELSWLDAGGLPQVTVATFQVPCTSPNLIESKSFKLYLNSLNGKVFASPQQVQACLERDLGQCAGAPVTVSFQLPPLVQGGAAQSIDGQQLQIDCYGPPQADYLAADTANVVEEVLTSALLKSNCPVTGQPDWASVDIAYRGPAIDRTGLLRYLVSFRNHAEFHEQCVERIFADLSARCAPQWLSVHARYTRRGGLDINPVRCSPGAALPAASRDLRQ

SEQ ID NO: 50031 - protein, 271 aa, Stenotrophomonas humi
  REGION 1..271: note = tr|A0A0R0C7C0|A0A0R0C7C0_9GAMM NADPH-dependent 7-cyano-7-deazaguanine reductase OS=Stenotrophomonas humi; OX = 405444 GN=queF PE=3 SV=1
MNTPQDSSLGREVDYPRQYDASLLFPIPRAAARAEIGLSGDALPFEGEDRWHAYEVGWLDARGKPCVETATLWVPGSSPNLVESKSLKLYLNSLNSARFNRAEAVRERIATDLSACAGADVRVEFGLPAFANAPGETIDHLDVDIDCYGPPREAYLTANADEVVSETLTSALLKSNCPVTGQPDWASVSIRYHGPRIDREGLLRYLISYRDHAEFHEQCVERIFLEVMRRCAPAWLDVEARYTRRGGLDINPRRFTPGHAGPMAAIRDLRQ

SEQ ID NO: 50032 - protein, 271 aa, Stenotrophomonas koreensis
  REGION 1..271: note = tr|A0A0R0C302|A0A0R0C302_9GAMM NADPH-dependent 7-cyano-7-deazaguanine reductase OS=Stenotrophomonas koreensis OX=266128 GN=queF PE=3 SV=1
MNTPSDSSLGREVRYPDQYDPGLLFAIPRRAAREQIGIDEAALPFAGHDRWHAYELSWLDAGGLPQVAVATFCVPCTSPNLIESKSFKLYLNSLNGRRFDTAEQLRACLVQDLSACAGATVSVDFELPPMVAASAAQSIDQQSLVIDCYGPPQSGYLRADTATVVEEVLTSALLKSNCPVTGQPDWASVDIAYRGPAIDRAGLLRYLVSFRNHAEFHEQCVERIFADIQARCLPEWLSVHARYTRRGGLDINPVRVSAGAPLPAPSRDLRQ

SEQ ID NO: 50033 - protein, 272 aa, unidentified
  source 1..272: note = Stenotrophomonas lactitubi
  REGION 1..272: note = tr|A0A2M9R0Q6|A0A2M9R0Q6_9GAMM NADPH-dependent 7-cyano-7-deazaguanine reductase OS=Stenotrophomonas lactitubi OX=2045214 GN=queF PE=3 SV=1
MNTPQDSSLGREVSYPSQYDPGLLFPIPRVGARAEIGLDEAALPFVGHDRWHAFELSWLDPRGKPQVAVATVQVPCTSPRLIESKSFKLYLNSLNSTRLDSVEALRERLVADLSACAGAPVQVTFGLPALRESPLGELIDGLDVDIDCYGPPQADYLSANADALVEETLVSALLKSNCPVTGQPDWATVSLRYRGPQIDRAGLLRYLVSYREHAEFHEQCVERIFSEVSARCRPQWLEVEARYTRRGGLDINPWRASHGIAAPAATYRELRQ

SEQ ID NO: 50034 - protein, 272 aa, Stenotrophomonas maltophilia
  REGION 1..272: note = sp|B2FJS1|QUEF_STRMK NADPH-dependent 7-cyano-7-deazaguanine reductase OS=Stenotrophomonas maltophilia (strain K279a) OX=522373 GN=queF PE=3 SV=1
MNTPQDSSLGREVSYPSQYDPGLLFPIPRSGARAEIGLDDAALPFVGHDRWHAFELSWLDPRGKPQVAVATVQVPCTSPRLIESKSFKLYLNSLNSTRIDSAEALRARIVADLSDCAGAPVQVEFGLPGLRETPLGESIDGLELEIDCYGPPQADFLSANAGEVVEETLVSALLKSNCPVTGQPDWATVSLRYRGPKIDRAGLLRYLVSYREHAEFHEQCVERIFSEVSARCQPQWLEVEARYTRRGGLDINPWRASPGIAAPAATYRELRQ

SEQ ID NO: 50035 - protein, 272 aa, Stenotrophomonas maltophilia
  REGION 1..272: note = tr|A0A4T1DGB3|A0A4T1DGB3_STEMA NADPH-dependent 7-cyano-7-deazaguanine reductase OS=Stenotrophomonas maltophilia OX=40324 GN=queF PE=3 SV=1
MNTPQDSSLGREVSYPSQYDPGLLFPIPRSGARAEIGLDDAALPFVGHDRWHAFELSWLDPRGKPQVAVATVQVPCTSPRLVESKSFKLYLNSLNSTRIDSAEALRERLVTDLSACAGAPVQVRFGLPELREAPLGESIDGLDVEIDCYGPPQADFLVADAGEVVEETLVSALLKSNCPVTGQPDWATVSLRYRGPKIDRAGLLRYLISYREHAEFHEQCVERIFSEVSARCQPQWLEVEARYTRRGGLDINPWRASPGIAAPAATYRELRQ

SEQ ID NO: 50036 - protein, 271 aa, unidentified
  source 1..271: note = Stenotrophomonas panacihumi
  REGION 1..271: note = tr|A0A0Q9ZZP0|A0A0Q9ZZP0_9GAMM NADPH-dependent 7-cyano-7-deazaguanine reductase OS=Stenotrophomonas panacihumi OX=676599 GN=queF PE=3 SV=1
MNTPADSSLGREVAYPTRYDPSLLFPIPRLPSRESIGIDPAALPFVGLDRWHAYEIGWLDAQGKPCVATATLHVPSDSPNLVESKSLKLYLNSLNSTRFNSPAAVRECIATDLSARAGAPVSVEFGLPPVLDDAAEHSIDGLDVSIDDYGPPNASHLRTRPGEAVEETLASALLKSNCPVTGQPDWANVTLRYRGAPIDVEGLLRYLVSYRDHAEFHEQCVERIFHDVSRCCQPQWLVVEARYTRRGGLDINPWRATPGAPAPVARRDARQ

SEQ ID NO: 50037 - protein, 272 aa, Stenotrophomonas pavanii; identical to SEQ ID NO: 44455
  REGION 1..272: note = tr|A0A246L463|A0A246L463_9GAMM NADPH-dependent 7-cyano-7-deazaguanine reductase OS=Stenotrophomonas pavanii OX=487698 GN=queF PE=3 SV=1

SEQ ID NO: 50038 - protein, 272 aa, unidentified
  source 1..272: note = Stenotrophomonas pictorum
  REGION 1..272: note = tr|A0A0R0AHY1|A0A0R0AHY1_9GAMM NADPH-dependent 7-cyano-7-deazaguanine reductase OS=Stenotrophomonas pictorum JCM 9942 OX=1236960 GN=queF PE=3 SV=1
MNTPENSSLGREVDYPTRYDASLLFPIPRAAARGQIGLHGPALPFIGEDRWHVYELGWLDARGKPCVATATLWVPATSPNLIESKSLKLYLNSLNSARFNSAESLRERITTDLSSCAGADVRVEFGLPPVAEAPGQSVDHLDVAIDRYGPPDESLLLADAECIVEETLTSALLKSNCPVTGQPDWASLSIRYRGPRIDREGLLRYLVSYRDHAEFHEQCVERIFLGLMHRCAPQALHVEARYTRRGGLDINPRRTSAGDGLSAENAFRDARQ

SEQ ID NO: 50039 - protein, 272 aa, Stenotrophomonas rhizophila
  REGION 1..272: note = tr|A0A1B2N8S3|A0A1B2N8S3_9GAMM NADPH-dependent 7-cyano-7-deazaguanine reductase OS=Stenotrophomonas rhizophila OX=216778 GN=queF PE=3 SV=1
MNTPQDSSLGREVAYPSQYDPALLFPIPRRAAREELGVDEANLPFVGHDRWQAYELSWLDRRGKPRVAVATISVPCTSPNLIESKSFKLYLNSLNSTRFDDDEQARQRIAGDLSACAGAVVNVVFGVPLLVEAAEGESLDELDVAIERYGPPAPEYLSANAGQVVTETLSSALLKSNCPVTGQPDWASVSVRYRGPRIDREGLLRYLVSYREHAEFHEQCVERIFNELTLRCQPEWLEVEARYTRRGGLDINPWRASAGIEQPARTVRDLRQ

SEQ ID NO: 50040 - protein, 272 aa, Stenotrophomonas rhizophila
  REGION 1..272: note = tr|A0A4U3GIE4|A0A4U3GIE4_9GAMM NADPH-dependent 7-cyano-7-deazaguanine reductase OS=Stenotrophomonas rhizophila OX=216778 GN=queF PE=3 SV=1
MNTPQDSSLGREVAYPSQYDSALLFPIPRRGAREEIGLDEAALPFVGHDRWQAYELSWLDRRGKPRVAVATVSVPCTSPNLIESKSFKLYLNSLNSTRFDDDEAARLRITADLSGCAGAVVTVRFGVPMLVEEAEGESLDELDVAIERYGPPAPEFLSADPAQVVTETLSSALLKSNCPVTGQPDWASVSIRYHGPQIDREGLLKYLVSYREHAEFHEQCVERIFSEITQRCAPQWLEVEARYTRRGGLDINPWRASPGIELPARTVRDLRQ

SEQ ID NO: 50041 - protein, 271 aa, Stenotrophomonas sp.
  REGION 1..271: note = tr|A0A4V2X3G3|A0A4V2X3G3_9GAMM NADPH-dependent 7-cyano-7-deazaguanine reductase OS=Stenotrophomonas sp. ATCM1_4 OX=2259330 GN=queF PE=3 SV=1
MNTPQDSSLGREVGYPRQYDASLLFPIPRAGARSEIGLGGGDLPFHGEDRWHAYELGWLDARGKPCVETLTLWVPATSPNLIESKSLKLYLNSLNNARFNRPEAVRERIATDLSACAGADVRVEFGLPAFAGADGESVDHVDVDIDCYGPPDAGFLLADAGSVVEETLTSALLKSNCPVTGQPDWASVSIRYRGPRIDRKGLLRYLVSYRDHAEFHEQCVERIFLDLQRRCGPASLEVEARYTRRGGLDINPRRASPDRTAATAPIRDLRQ

SEQ ID NO: 50042 - protein, 272 aa, Stenotrophomonas sp.
  REGION 1..272: note = tr|A0A3S7JWE3|A0A3S7JWE3_9GAMM NADPH-dependent 7-cyano-7-deazaguanine reductase OS=Stenotrophomonas sp. ZAC14D2_NAIMI4_6 OX=2072406 GN=queF PE=3 SV=1
MNTPQDSSLGREVSYPSQYDPGLLFPIPRTGARSEIGLDDAALPFVGHDRWHAFELSWLDPRGKPQVAVATVQVPCTSPRLIESKSFKLYLNSLNSTRIDSAEALRERLVADLSACAGAPVQVEFGLPELREAPLGESIDGLEVEIDCYGPPQANYLAADAGNVVEETLVSALLKSNCPVTGQPDWATVSLRYRGPKIDRAGLLRYLVSYREHAEFHEQCVERIFSEVSARCQPQWLEVEARYTRRGGLDINPWRASPGIAAPAATYRELRQ

SEQ ID NO: 50043 - protein, 269 aa, Stenotrophomonas terrae
  REGION 1..269: note = tr|A0A0R0CEM6|A0A0R0CEM6_9GAMM NADPH-dependent 7-cyano-7-deazaguanine reductase OS=Stenotrophomonas terrae OX=405446 GN=queF PE=3 SV=1
MNTPENSSLGREVDYPRHYDASLLFPIPRAAARAEIGLGGELPFVGEDRWHIYELGWLDARGKPCVDTATLYVPATSPNLIESKSLKLYLNSLNGARFNRAEAVRERIATDLSACAGADVRVEFGLPPVAQAAGENIDHLDVAIDSYGPPNAALLLADSRAVVSETLVSALLKSNCPVTGQPDWASVSIRYQGPRIDREGLLRYLVSYRDHAEFHEQCVERIFLELSQRCQPTALEVEARYTRRGGLDINPRRASPGLAASAPIRDLRQ

SEQ ID NO: 50044 - protein, 166 aa, Steroidobacter denitrificans
  REGION 1..166: note = tr|A0A127FCB6|A0A127FCB6_STEDE NADPH-dependent 7-cyano-7-deazaguanine reductase OS=Steroidobacter denitrificans OX=465721 GN=queF PE=3 SV=1
MAAKGRKPRPADPDRTRTTIPAQLGRSVPWPASPDEAELERVPNPHPTKLYLARFTAPEFTSLCPVTGQPDFAHLVIDYVPRSWLVESKSLKLYLGSFRNHGTFHEDCTIAVAVRLAGFLRPRWLRIGGYWYPRGGIPIDVFWQTGRPPADLWIPEQGVPAYRGRG

SEQ ID NO: 50045 - protein, 120 aa, Stigmatella aurantiaca
  REGION 1..120: note = tr|A0A1H7ZQD1|A0A1H7ZQD1_STIAU NADPH-dependent 7-cyano-7-deazaguanine reductase OS=Stigmatella aurantiaca; OX = 41 GN=queF PE=3 SV=1
MPSEPTKELQTFPNPAADRDYEIAFDVPEFTCLCPMTGQPDFATFKIRYVPDELCVELKSLKLYMWSYRNEGAFHEKVTNTIADDIIRAIKPRKLTVVGDFFVRGGIGTIVTVTHEKKKA

SEQ ID NO: 50046 - protein, 120 aa, Stigmatella aurantiaca
  REGION 1..120: note = tr|Q090N9|Q090N9_STIAD NADPH-dependent 7-cyano-7-deazaguanine reductase OS=Stigmatella aurantiaca (strain DW4/3-1) OX=378806 GN=queF PE=3 SV=1
MPSEPSKDLQTFPNPASERDYEIAFDVPEFTCLCPMTGQPDFAHFKIRYVPDELCVELKSLKFYMWSYRNEGAFHEKVTNTIADDIIRAIKPRKLTVVGDFFVRGGIGTVVTVTHEKKKG

SEQ ID NO: 50047 - protein, 120 aa, Stigmatella erecta; identical to SEQ ID NO: 50045
  REGION 1..120: note = tr|A0A1I0KMY4|A0A1I0KMY4_9DELT NADPH-dependent 7-cyano-7-deazaguanine reductase OS=Stigmatella erecta; OX = 83460 GN=queF PE=3 SV=1

SEQ ID NO: 50048 - protein, 163 aa, Streptococcus australis
  REGION 1..163: note = tr|A0A4V0BXX4|A0A4V0BXX4_9STRE NADPH-dependent 7-cyano-7-deazaguanine reductase OS=Streptococcus australis OX=113107 GN=queF PE=3 SV=1
MSQQEEMKNLSLLGNKETNYIFDYQPEVLESFDNRHVENDYFIKFNCPEFTSLCPITAQPDFATIYISYIPDKLCVESKSLKLYLFSYRNHGDFHENCINTIGKDLVNLLDPRYLEVWGKFTPRGGISIDPYYNYGRPGTKYEGLAEQRLFQHDLYPEKIDNR

SEQ ID NO: 50049 - protein, 164 aa, Streptococcus criceti
  REGION 1..164: note = tr|G5JPD5|G5JPD5_STRCG NADPH-dependent 7-cyano-7-deazaguanine reductase OS=Streptococcus criceti HS-6 OX=873449 GN=queF PE=3 SV=1
MANNSKEMKDLTLLGNQQVPYVFDYDPSILESFQNRHQDNDYFIKFNCPEFTSLCPITGQPDFATIYLSYIPDELCVESKSLKLYLFSYRNHGDFHENCINTIGKDLIDLLKPRYLEVWGKFTPRGGISIDPYFNYGRPGTKYEEMANYRLMNHDLYPETIDNR

SEQ ID NO: 50050 - protein, 164 aa, Streptococcus downei
  REGION 1..164: note = tr|A0A380JET7|A0A380JET7_STRDO NADPH-dependent 7-cyano-7-deazaguanine reductase OS=Streptococcus downei MFe28 OX=764290 GN=queF PE=3 SV=1
MTQNDQDMKDLTLLGNQQIPYVFDYDPSILESFQNRHQDNDFFIKFNCPEFTSLCPITGQPDFATIYISYIPDQLCVESKSLKLYLFSYRNHGDFHENCINTIGKDLVDLLKPRYLEVWGKFTPRGGISIDPYYNYGRPDTKYQEMANYRLMNHDLYPETINNR

SEQ ID NO: 50051 - protein, 276 aa, Streptococcus dysgalactiae
  REGION 1..276: note = tr|A0A4U9YD83|A0A4U9YD83_STREQ 7-cyano-7-deazaguanine reductase OS=Streptococcus dysgalactiae subsp. equisimilis OX=119602 GN=queF PE=3 SV=1
MHHPAEHSPLGKTSEYVSRYTPSLLFPIARAAKWAELGLSAATLPYRGVDIWNCYELSWLTPAGKPVVAIGEFSIPADSPNIIESKSFKLYLNSLNQSSFDSRDALRAVLEKDLSVAAGAAVGVRLRSLDEVAEEGVGRLPGRCIDELEIAVDGYERPRPELLRCDAGRFVEEQLYSHLLKSNCPVTGQPDWGTLVVDYRGPALDPASLLAYLVSFRQHQDFHEQCVERIFLDLRRLLQPQALTVYARYVRRGGLDINPYRSLVDVAPDNRRLVRQ

SEQ ID NO: 50052 - protein, 166 aa, Streptococcus dysgalactiae
  REGION 1..166: note = tr|A0A4V0BWB8|A0A4V0BWB8_STREQ NADPH-dependent 7-cyano-7-deazaguanine reductase OS=Streptococcus dysgalactiae subsp. equisimilis OX=119602 GN=queF PE=3 SV=1
MAHGRQQDELQDITLLGNQDNTYNFDYRPDVLESFDNKHQGRDYFVKFNCPEFTSLCPITGQPDFATIYISYIPNVKMVESKSLKLYLFSFRNHGDFHEDCMNIIMNDLIELMDPHYIEVWGKFTPRGGISIDPYTNYGRPNSKYEKMAEHRLMNHDLYPEKIDNR

SEQ ID NO: 50053 - protein, 163 aa, Streptococcus equinus
  REGION 1..163: note = tr|A0A239R8Z1|A0A239R8Z1_STREI NADPH-dependent 7-cyano-7-deazaguanine reductase OS=Streptococcus equinus; OX = 1335 GN=queF PE=3 SV=1
MTRTDEMKDLTLLGNQNTKYTYEYDPSILESFDNRHVENDYFIKFNCPEFTSLCPITGQPDFATIYLSYIPDKLCVESKSLKLYLFSYRNHGDFHENCINTIGKDLIELLNPRYLEVWGKFTPRGGLSIDPYFNYGKPGTKYEKMAEHRLMNHDLYPEKIDNR

SEQ ID NO: 50054 - protein, 163 aa, Streptococcus equinus
  REGION 1..163: note = tr|A0A091CB51|A0A091CB51_STREI NADPH-dependent 7-cyano-7-deazaguanine reductase OS=Streptococcus equinus JB1 OX=1294274 GN=queF PE=3 SV=1
MTRTDEMKDLTLLGNQNTKYKYDYDPSILESFDNRHIDNDYFIKFNCPEFTSLCPITGQPDFATIYLSYIPDKLCVESKSLKLYLFSYRNHGDFHENCINTIGKDLIDLLQPRYLEVWGKFTPRGGLSIDPYFNYGKPGTKYEKMADYRLMNHDLYPENIDNR

SEQ ID NO: 50055 - protein, 163 aa, Streptococcus gallolyticus
  REGION 1..163: note = tr|A0A3E2SG19|A0A3E2SG19_9STRE NADPH-dependent 7-cyano-7-deazaguanine reductase OS=Streptococcus gallolyticus OX=315405 GN=queF PE=3 SV=1
MTRTDEMKDLTLLGNQKTTYTYDYDPSILESFDNRHVDNDYFIKFNCPEFTSLCPITGQPDFATIYISYIPDKLCVESKSLKLYLFSYRNHGDFHENCINTIGKDLVDLLQPRFLEVWGKFTPRGGLSIDPYFNYGEPNTKYEKMADYRLINHDLYPENIDNR

SEQ ID NO: 50056 - protein, 163 aa, Streptococcus gallolyticus
  REGION 1..163: note = tr|A0A0E1XF90|A0A0E1XF90_STRGY NADPH-dependent 7-cyano-7-deazaguanine reductase OS=Streptococcus gallolyticus subsp. gallolyticus TX20005 OX=545774 GN=queF; PE = 3 SV=1
MTRTDEMKDLTLLGNQKTTYTYDYDPSILESFDNRHVDNDYFIKFNCPEFTSLCPITGQPDFATIYISYIPDKLCVESKSLKLYLFSYRNHGDFHENCINTIGKDLIDLLQPRYLEVWGKFTPRGGLSIDPYFNYGKPNTKYEKMADYRLMNHDLYPETIDNR

SEQ ID NO: 50057 - protein, 163 aa, unidentified; identical to SEQ ID NO: 50048
  source 1..163: note = Streptococcus halitosis
  REGION 1..163: note = tr|A0A3R8LT03|A0A3R8LT03_9STRE NADPH-dependent 7-cyano-7-deazaguanine reductase OS=Streptococcus halitosis OX=2172545 GN=queF PE=3 SV=1

SEQ ID NO: 50058 - protein, 163 aa, Streptococcus henryi
  REGION 1..163: note = tr|A0A1G6B4P6|A0A1G6B4P6_9STRE NADPH-dependent 7-cyano-7-deazaguanine reductase OS=Streptococcus henryi; OX = 439219 GN=queF PE=3 SV=1
MRQANEMGTISALGNQGTKYPTDYAPEVLEIFPNKHPENDYFVKFNCPEFTSLCPMTGQPDFATIYISYIPDELMVESKSLKLYLFSFRNHGDFHEDCMNIIMKDLIKLMKPRYIEVWGKFTPRGGISIDPYCNYGRPDTKWEKFAWDRLCQHDLYPEKVDNR

SEQ ID NO: 50059 - protein, 58 aa, Streptococcus infantarius
  REGION 1..58: note = tr|A0A380KMW0|A0A380KMW0_9STRE 7-cyano-7-deazaguanine reductase OS=Streptococcus infantarius OX=102684 GN=queF PE=4 SV=1
MIDLLQPRYLEVWGKFTPRGGLSIDPYFNYGKPGTKYEKMADYRLMNHDLYPENIDNR

SEQ ID NO: 50060 - protein, 163 aa, Streptococcus infantis
  REGION 1..163: note = tr|F9PFQ9|F9PFQ9_9STRE NADPH-dependent 7-cyano-7-deazaguanine reductase OS=Streptococcus infantis X OX=997830 GN=queF PE=3 SV=1
MSQQEEMKNLSLLGNKETNYIFEYQPEVLESFDNRHVENDYFIKFNCPEFTSLCPITAQPDFATIYISYIPDKLCVESKSLKLYLFSYRNHGDFHENCINTIGKDLVNLLDPRYLEVWGKFTPRGGISIDPYYNYGRPGTKYEGLAEQRLFQHDLYPEKIDNR

SEQ ID NO: 50061 - protein, 163 aa, Streptococcus infantis; identical to SEQ ID NO: 50060
  REGION 1..163: note = tr|E8K2R1|E8K2R1_9STRE NADPH-dependent 7-cyano-7-deazaguanine reductase OS=Streptococcus infantis ATCC 700779 OX=889204 GN=queF PE=3 SV=1

SEQ ID NO: 50062 - protein, 163 aa, Streptococcus lutetiensis
  REGION 1..163: note = tr|S5QXJ8|S5QXJ8_9STRE NADPH-dependent 7-cyano-7-deazaguanine reductase OS=Streptococcus lutetiensis 033 OX=1076934 GN=queF PE=3 SV=1
MTRTDEIKNLTLLGNQNTKYKYDYDPSILESFDNRHVDNGYSIKFNCPEFTSLCPITGQPDFATIYLSYIPDKLCVESKSLKLYLFSYRNHGDFHENCINTIGKDLIDLLQPRYLKVWGKFTPRGGLSIDPYFNYGKPGTKYEKMADYRLMNHDLYPGTIDNR

SEQ ID NO: 50063 - protein, 163 aa, Streptococcus lutetiensis
  REGION 1..163: note = tr|A0A2X3VXK2|A0A2X3VXK2_9STRE NADPH-dependent 7-cyano-7-deazaguanine reductase OS=Streptococcus lutetiensis OX=150055 GN=queF PE=3 SV=1
MTRTDEMKNLTLLGNQNTKYKYDYDPSILESFDNRHVDNGYFIKFNCPEFTSLCPITGQPDFATIYLSYIPDKLCVESKSLKLYLFSYRNHGDFHENCINTIGKDLIDLLQPRYLKVWGKFTPRGGLSIDPYFNYGKPGTKYEKMADYRLMNHDLYPGTIDNR

SEQ ID NO: 50064 - protein, 163 aa, unidentified
  source 1..163: note = Streptococcus macedonicus
  REGION 1..163: note = tr|A0A2G3NYA0|A0A2G3NYA0_STRMC NADPH-dependent 7-cyano-7-deazaguanine reductase OS=Streptococcus macedonicus OX=59310 GN=queF PE=3 SV=1
MTRTDEMKDLTLLGNQKTTYTYEYDPSILESFDNRHVDNDYFIKFNCPEFTSLCPITGQPDFATIYISYIPDKLCVESKSLKLYLFSYRNHGDFHENCINTIGKDLIDLLQPRYLEVWGKFTPRGGLSIDPYFNYGKPNTKYEKMADYRLMNHDLYPEIIDNR

SEQ ID NO: 50065 - protein, 163 aa, unidentified
  source 1..163: note = Streptococcus macedonicus
  REGION 1..163: note = tr|A0A1C3SNZ3|A0A1C3SNZ3_STRMC NADPH-dependent 7-cyano-7-deazaguanine reductase OS=Streptococcus macedonicus OX=59310 GN=queF PE=3 SV=1
MTRTDEMKDLTLLGNQKTTYTYEYDPSILESFDNRHVDNDYFIKFNCPEFTSLCPITGQPDFATIYISYIPDKLCVESKSLKLYLFSYRNHGDFHENCINTIGKDLIDLLQPRYLEVWGKFTPRGGLSIDPYFNYGKPNTKYEKMADYRLMNHDLYPETIDNR

SEQ ID NO: 50066 - protein, 163 aa, Streptococcus mitis
  REGION 1..163: note = tr|A0A1X1L5X3|A0A1X1L5X3_STRMT NADPH-dependent 7-cyano-7-deazaguanine reductase OS=Streptococcus mitis; OX = 28037 GN=queF PE=3 SV=1
MSQQEEMKNLSLLGNKETNYIFEYQPEVLESFDNRHVENDYFIKFNCPEFTSLCPITAQPDFATIYISYIPDKLCVESKSLKLYLFSYRNHGDFHENCINTIGKDLVNLLNPRYLEVWGKFTPRGGISIDPYYNYGKPGTKYEGLAEQRLFQHDLYPEKIDNR

SEQ ID NO: 50067 - protein, 163 aa, Streptococcus mitis
  REGION 1..163: note = tr|A0A3R9QQW6|A0A3R9QQW6_STRMT NADPH-dependent 7-cyano-7-deazaguanine reductase OS=Streptococcus mitis; OX = 28037 GN=queF PE=3 SV=1
MSQQEEMKNLSLLGNKETNYIFEYQPEVLESFDNRHVENDYFIKFNCPEFTSLCPITAQPDFATIYISYIPDKLCVESKSLKLYLFSYRNHGDFHENCINTIGKDLVNLLDPRYLEIWGKFTPRGGISIDPYYNYGRPGTKYEGLAEQRLFQHDLYPEKIDNR

SEQ ID NO: 50068 - protein, 162 aa, Streptococcus mutans
  REGION 1..162: note = tr|A0A0E2EXV9|A0A0E2EXV9_STRMG NADPH-dependent 7-cyano-7-deazaguanine reductase OS=Streptococcus mutans SM6 OX=857119 GN=queF PE=3 SV=1
MSQEEIKDLTLLGNQKTNYNFDYDPNILEAFDNRHQDNDYFIKFNCPEFTSLCPITGQPDFATIYLSYIPDKKCVESKSLKLYLFSYRNHGDFHENCINTIGKDLVDLLQPRYLEVWGKFTPRGGISIDPYYNYGRPNTKYEEMAAYRLMNHDLYPETIDNR

SEQ ID NO: 50069 - protein, 162 aa, Streptococcus mutans
  REGION 1..162: note = sp|Q8DUL0|QUEF_STRMU NADPH-dependent 7-cyano-7-deazaguanine reductase OS=Streptococcus mutans serotype c (strain ATCC 700610 / UA159) OX=210007 GN=queF; PE = 3 SV=1
MSQEEIKDLTLLGNQKTNYNFDYDLNILEAFDNRHQDNDYFIKFNCPEFTSLCPITGQPDFATIYLSYIPDKKCVESKSLKLYLFSYRNHGDFHENCINTIGKDLVDLLQPRYLEVWGKFTPRGGISIDPYYNYGRPNTKYEEMAAYRLMNHDLYPETIDNR

SEQ ID NO: 50070 - protein, 163 aa, Streptococcus oralis
  REGION 1..163: note = tr|A0A428I7U0|A0A428I7U0_STROR NADPH-dependent 7-cyano-7-deazaguanine reductase OS=Streptococcus oralis; OX = 1303 GN=queF PE=3 SV=1
MSQQEEMKNLSLLGNKETNYIFDYQPEVLESFDNRHVENDYFIKFNCPEFTSLCPITAQPDFATIYISYIPDKLCVESKSLKLYLFSYRNHGDFHENCINTIGKDLVNLLDPRYLEVWGKFTPRGGISIDPYYNYGKPGTKYEGLAEQRLFQHDLYPEKIDNR

SEQ ID NO: 50071 - protein, 163 aa, Streptococcus oralis
  REGION 1..163: note = tr|D4FUE0|D4FUE0_STROR NADPH-dependent 7-cyano-7-deazaguanine reductase OS=Streptococcus oralis ATCC 35037 OX=655813 GN=queF PE=3 SV=1
MSQQEEMKNLSLLGNKETNYIFDYQPEVLESFDNRHVENDYFIKFNCPEFTSLCPITAQPDFATIYISYIPDKLCIESKSLKLYLFSYRNHGDFHENCINTIGKDLVNLLDPRYLEVWGKFTPRGGISIDPYYNYGRPGTKYEGLAEQRLFQHDLYPEKIDNR

SEQ ID NO: 50072 - protein, 230 aa, Streptococcus parauberis
  REGION 1..230: note = tr|A0A2I8AJ33|A0A2I8AJ33_9STRE PreQ(1) synthase; OS = Streptococcus parauberis OX=1348 GN=queF PE=4 SV=1
MRTVNEMSKLTGISVRTLHYYDAIGLLNPTYVGANGYRYYDEACLSRLQTILLYRELEFPLKKINEILDSPAFVRDEALLEQIKLLENKRLHLKKLILHATAIHGGKNMSEFDVYDQEVKERWGDSEAFQEYQSKAGKINHEQVAEQMQVIFAEFGHLQNEAFDSPLVQGQVKKLKDYITANFYTCTNEILAGLGQMYTVDDLFKTNIDQMGGQGTAAFASQAIIYYTNQ

SEQ ID NO: 50073 - protein, 163 aa, unidentified; identical to SEQ ID NO: 50055
  source 1..163: note = Streptococcus pasteurianus
  REGION 1..163: note = tr|F5X765|F5X765_STRPX NADPH-dependent 7-cyano-7-deazaguanine reductase OS=Streptococcus pasteurianus (strain ATCC 43144 / JCM 5346 / CDC 1723-81); OX = 981540 GN=queFPE=3 SV=1

SEQ ID NO: 50074 - protein, 163 aa, unidentified
  source 1..163: note = Streptococcus pasteurianus
  REGION 1..163: note = tr|A0A564SNC9|A0A564SNC9_9STRE NADPH-dependent 7-cyano-7-deazaguanine reductase OS=Streptococcus pasteurianus OX=197614 GN=queF PE=3 SV=1
MTRTDEMKDLTLLGNQKTTYTYDYDPSILESFDNRHVDNDYFIKFNCPEFTSLCLITGQPDFATIYISYIPDKLCVESKSLKLYLFSYRNHGDFHENCINTIGKDLVDLLQPRFLEVWGKFTPRGGLSIDPYFNYGEPNTKYEKMADYRLINHDLYPENIDNR

SEQ ID NO: 50075 - protein, 163 aa, Streptococcus peroris
  REGION 1..163: note = tr|E8KDG6|E8KDG6_9STRE NADPH-dependent 7-cyano-7-deazaguanine reductase OS=Streptococcus peroris ATCC 700780 OX=888746 GN=queF PE=3 SV=1
MSQQEEMKNLTLLGNKETNYHFDYQPEVLESFANRHVDNDYFIKFNCPEFTSLCPITAQPDFATIYISYIPDKLCVESKSLKLYLFSYRNHGDFHENCINTIGKDLVKLLDPRYLEVWGKFTPRGGISIDPYYNYGKAGTKYEGLAEQRLFQHDLYPEKIDNR

SEQ ID NO: 50076 - protein, 177 aa, Streptococcus pneumoniae
  REGION 1..177: note = tr|A0A0T8VTM3|A0A0T8VTM3_STREE NADPH-dependent 7-cyano-7-deazaguanine reductase OS=Streptococcus pneumoniae OX=1313 GN=queF_2 PE=3 SV=1
MKHQSALVVFSGGQDSTTCLFWAMQHYETVEAVTFAYSQRHHLEIQITREIAKEQGIRHHILDMSLLGQITAQPDFATIHISYIPDKLCVESKSLKLYLFSYRNHGDFHENCINTIGKDLVNLLDPRYLEVWGKFTPRGGISIDPYYNYGKQGTKYEGLAEQRLFQHDLYPEKIDNR

SEQ ID NO: 50077 - protein, 154 aa, Streptococcus pneumoniae; identical to SEQ ID NO: 42622
  REGION 1..154: note = sp|Q97P67|QUEF_STRPN Putative NADPH-dependent 7-cyano-7-deazaguanine reductase OS=Streptococcus pneumoniae serotype 4 (strain ATCC BAA-334 / TIGR4); OX = 170187 GN=queFPE=3 SV=1

SEQ ID NO: 50078 - protein, 163 aa, Streptococcus pseudopneumoniae
  REGION 1..163: note = tr|V8IIE2|V8IIE2_9STRE NADPH-dependent 7-cyano-7-deazaguanine reductase OS=Streptococcus pseudopneumoniae 5247 OX=1415761 GN=queF PE=3 SV=1
MSQQEEMKNLSLLGNKETNYIFEYQPEILESFDNRHVENDYFIKFNCPEFTSLCPITAQPDFATIYISYIPDKLCVESKSLKLYLFSYRNHGDFHENCINTIGKDLVNLLDPRYLEVWGKFTPRGGISIDPYYNYGKPGTKYEGLAEQRLFQHDLYPEKIDNR

SEQ ID NO: 50079 - protein, 163 aa, Streptococcus pseudopneumoniae
  REGION 1..163: note = tr|A0A1S9ZND4|A0A1S9ZND4_9STRE NADPH-dependent 7-cyano-7-deazaguanine reductase OS=Streptococcus pseudopneumoniae OX=257758 GN=queF PE=3 SV=1
MSQQEEMKNLSLLGNKETNYIFEYQPEVLESFDNRHVENDYFIKFNCPEFTSLCPITAQPDFATIYISYIPDKLCVESKSLKLYLFSYRNHGDFHENCINTIGKDLVNLLDPRYLEVWGKFTPRGGISIDPYYNYGKPGTKYEGLAEQRLFQHDLYPEKIDNR

SEQ ID NO: 50080 - protein, 162 aa, Streptococcus ratti
  REGION 1..162: note = tr|J3AJ53|J3AJ53_STRRT NADPH-dependent 7-cyano-7-deazaguanine reductase OS=Streptococcus ratti FA-1 = DSM 20564 OX=699248 GN=queF PE=3 SV=1
MSQEEMKDLTLLGKQKTTYDFDYDPHILEAFDNRHQDNDYFIKFNCPEFTSLCPITGQPDFATIYLSYIPDKKCVESKSLKLYLFSYRNHGDFHENCINTIGKDLVELLQPRYLEVWGKFTPRGGISIDPYYNYGRPNTKYEEMATYRLMNHDIYPETIDNR

SEQ ID NO: 50081 - protein, 162 aa, Streptococcus ratti; identical to SEQ ID NO: 50080
  REGION 1..162: note = tr|A0A5J6NMU8|A0A5J6NMU8_STRRT NADPH-dependent 7-cyano-7-deazaguanine reductase QueF OS=Streptococcus ratti OX=1341 GN=queF PE=4 SV=1

SEQ ID NO: 50082 - protein, 187 aa, Streptococcus salivarius
  REGION 1..187: note = tr|A0A1C7C8N8|A0A1C7C8N8_STRSL NADPH-dependent 7-cyano-7-deazaguanine reductase OS=Streptococcus salivarius OX=1304 GN=queF PE=3 SV=1
MSVVSRKDERTSYNHQNYTRKGRKMSQQEEMKNLTLLGNKETPYIFEYSPQVLESFDNRHTDNDYFIKFNCPEFTSLCPITGQPDFASIYISYIPDQLCVESKSLKLYLFSYRNHGDFHENCINTIGKDLVELLNPRYLEVWGKFTPRGGISIDPYFNYGRPETKYEKMAEQRLFNHDLYPENIDNR

SEQ ID NO: 50083 - protein, 163 aa, Streptococcus salivarius
  REGION 1..163: note = tr|A0A3S4P155|A0A3S4P155_STRSL NADPH-dependent 7-cyano-7-deazaguanine reductase OS=Streptococcus salivarius OX=1304 GN=queF PE=3 SV=1
MSQQEEMKNLTLLGNKETPYIFEYSPQVLESFDNRHTDNDYFIKFNCPEFTSLCPITGQPDFASIYISYIPDQLCVESKSLKLYLFSYRNHGDFHENCINTIGKDLVKLLNPRYLEVWGKFTPRGGISIDPYYNYGRPETKYEKMAEQRLFNHDLYPENIDNR

SEQ ID NO: 50084 - protein, 164 aa, Streptococcus sobrinus
  REGION 1..164: note = tr|U2KAY1|U2KAY1_9STRE NADPH-dependent 7-cyano-7-deazaguanine reductase OS=Streptococcus sobrinus W1703 OX=1227275 GN=queF PE=3 SV=1
MTEKSQEMKDLTLLGNQQVPYVFDYDSSILESFQNRHQGNDYFIKFNCPEFTSLCPITGQPDFATIYISYIPDQLCVESKSLKLYLFSYRNHGDFHENCINTIGKDLVDLLKPRYLEVWGKFTPRGGISIDPYYNYGRPDSKYQEMANYRLLNHDLYPETIDNR

SEQ ID NO: 50085 - protein, 163 aa, Streptococcus sp.; identical to SEQ ID NO: 50070
  REGION 1..163: note = tr|A0A1E9GA47|A0A1E9GA47_9STRE NADPH-dependent 7-cyano-7-deazaguanine reductase OS=Streptococcus sp. HMSC076C08 OX=1739270 GN=queF PE=3 SV=1

SEQ ID NO: 50086 - protein, 163 aa, Streptococcus sp.
  REGION 1..163: note = tr|A0A1E9AW10|A0A1E9AW10_9STRE NADPH-dependent 7-cyano-7-deazaguanine reductase OS=Streptococcus sp. HMSC056C01 OX=1739299 GN=queF PE=3 SV=1
MSQQEEMKNLSLLGNKETTYIFDYQPEVLESFDNRHVENDYFIKFNCPEFTSLCPITAQPDFATIYISYIPDKLCVESKSLKLYLFSYRNHGDFHENCINTIGKDLVNLLDPRYLEVWGKFTPRGGISIDPYYNYGRPGTKYEDLAEQRLFQHDLYPEKIDNR

SEQ ID NO: 50087 - protein, 163 aa, Streptococcus thermophilus
  REGION 1..163: note = tr|G6ENK3|G6ENK3_STRTR NADPH-dependent 7-cyano-7-deazaguanine reductase OS=Streptococcus thermophilus CNCM I-1630 OX=1042404 GN=queF PE=3 SV=1
MSQQEEMKNLTLLGSKETPYIFEYSPQVLESFDNRHADNDYFIKFNCPEFTSLCPITGQPDFASIYISYIPDQLCVESKSLKLYLFSYRNHGDFHENCINTIGKDLVELLNPRYLEVWGKFTPRGGISIDPYYNYGRPKTKYENMAEQRLFNHDLYPENIDNR

SEQ ID NO: 50088 - protein, 163 aa, Streptococcus thermophilus; identical to SEQ ID NO: 50087
  REGION 1..163: note = sp|Q5M061|QUEF_STRT1 NADPH-dependent 7-cyano-7-deazaguanine reductase OS=Streptococcus thermophilus (strain CNRZ 1066) OX=299768 GN=queF PE=3 SV=2

SEQ ID NO: 50089 - protein, 162 aa, unidentified
  source 1..162: note = Streptococcus troglodytae
  REGION 1..162: note = tr|A0A1L7LJR1|A0A1L7LJR1_9STRE NADPH-dependent 7-cyano-7-deazaguanine reductase OS=Streptococcus troglodytae OX=1111760 GN=queF PE=3 SV=1
MSQEEIKDLTLLGNQKTNYNFDYDPNILEAFDNRHQDNDYFIKFNCPEFTSLCPITGQPDFATIYLSYIPDKKCVESKSLKLYLFSYRNHGDFHENCINTIGKDLVDLLQPRYLEVWGKFTPRGGISIDPYYNYGHPNTKYEEMAAYRLMNHDLYPETINNR

SEQ ID NO: 50090 - protein, 163 aa, Streptococcus vestibularis
  REGION 1..163: note = tr|E3CQ05|E3CQ05_STRVE NADPH-dependent 7-cyano-7-deazaguanine reductase OS=Streptococcus vestibularis F0396 OX=904306 GN=queF PE=3 SV=1
MSQQEEMKNLTLLGNKETPYIFEYSPQVLEPFDNRHTDNDYFIKFNCPEFTSLCPITGQPDFASIYISYIPDQLCVESKSLKLYLFSYRNHGDFHENCINTIGKDLVELLNPRYLEVWGKFTPRGGISIDPYYNYGRPETKYEKMAEQRLFNHDLYPENIDNR

SEQ ID NO: 50091 - protein, 163 aa, Streptococcus vestibularis
  REGION 1..163: note = tr|A0A3E4XGZ8|A0A3E4XGZ8_STRVE NADPH-dependent 7-cyano-7-deazaguanine reductase OS=Streptococcus vestibularis OX=1343 GN=queF PE=3 SV=1
MSQQEEMKNLTLLGNKETPYIFEYSPQVLESFDNRHTDNDYFIKFNCPEFTSLCPITGQPDFASIYISYIPDQLCVESKSLKLYLFSYRNHGDFHENCINTIGKDLVELLNPRYLEVWGKFTPRGGISIDPYYNYGRPETKYEKMAEQRLFNHDLYPENIDNR

SEQ ID NO: 50092 - protein, 135 aa, Streptomyces griseocarneus
  REGION 1..135: note = tr|A0A3L8II08|A0A3L8II08_9ACTN 7-cyano-7-deazaguanine reductase OS=Streptomyces griseocarneus OX=51201 GN=CTZ27_33275 PE=4 SV=1
MNAPRYLGQSVGHAISADDLDTVPVPPNVGRVTYRTTELSALCPVTGQPDIYDATISYQPNGRSLESKALKHYLWGFRDKGAYCETLAATLADDLTAVLGVPVTVELRQQIRGGLVLSATATATATATATASQGV

SEQ ID NO: 50093 - protein, 141 aa, unidentified
  source 1..141: note = Streptomyces wuyuanensis
  REGION 1..141: note = tr|A0A1H0DJW0|A0A1H0DJW0_9ACTN 7-cyano-7-deazaguanine reductase OS=Streptomyces wuyuanensis OX=1196353 GN=SAMN05444921_13437 PE=4 SV=1
MEEDQSVSTMTDGLTFLGRPVYGPIRADDIETIPSASGISEITFSSTELTAVCPLTGQPDIYSIRISYRPRDRAIEHKSLKLYLVGYRDRGIFAEHLAAEIARDLASVVDVAVRVQVTQQPRGGLRLEVDAEGTPGPTSRS

SEQ ID NO: 50094 - protein, 270 aa, Succinatimonas hippei
  REGION 1..270: note = tr|E8LJG6|E8LJG6_SUCHY NADPH-dependent 7-cyano-7-deazaguanine reductase OS=Succinatimonas hippei (strain DSM 22608 / JCM 16073 / KCTC 15190 / YIT 12066); OX = 762983 GN =HMPREF9444_00845 PE=3 SV=1
MQKNELLLGKATSYLEEYDPTVLQPIGRNLGRAQLKSNVSLGYDLWRLYEITYLNRQGIPQIAVGTIKVPATSPYIVESKSLKLYIGSFTQTKFSNKEEVTAIIAHDLSKVLETNVEVKLFALNENNECFNIQMLSGTSIDQEPIEKPVYEPDPKLLVPSNGHYVIETLRSDLLRTLCPVTGQPDHASIMIRYEGEQIDKKALLSYIVSYRRHRGFHEQCCEQIFNDIKQNLRPVKLCVMACFTRRGGIDINPIRNEFSEDIIPVRTIRQ

SEQ ID NO: 50095 - protein, 287 aa, Succinatimonas sp.
  REGION 1..287: note = tr|R5EF07|R5EF07_9GAMM Putative queuine synthase; OS = Succinatimonas sp. CAG:777 OX=1262974 GN=BN779_00380; PE = 4 SV=1
MDNNESKAPEVSSGMSNLVLGKNTTYDNEYAPSRLQRIERQLGRSHIERLQKFVGYDIWRLYEMTYLNLNGLPKVCMGIMRVPADSKYIVESKSLKLYELSFTMTKFKDLKEVESVFEHDLSTLLESNVKVSLFELDNEEFSIRAVKGTCLEELDCCKDLSFKGYEYSPSLLTFDKEEKTIKKTYYTNLFRSLCPVTSQPDHAVVRIDYEGKKPDLKGLLSYLVTLRNHQGFHEQCVELIYSDLMYYLKPSKLTVSAYFTRRGGIDINPVRSSAKLNCSESVRTIRQ

SEQ ID NO: 50096 - protein, 165 aa, Succiniclasticum ruminis
  REGION 1..165: note = tr|A0A1I1ZJA6|A0A1I1ZJA6_9FIRM NADPH-dependent 7-cyano-7-deazaguanine reductase OS=Succiniclasticum ruminis DSM 9236 OX=1123323 GN=queF PE=3 SV=1
MTAGRTKKDLQGVKLLGNKTAYRDDYAPEVLECFSNKHPENDYFVKFNCPEFTSLCPKTGQPDFATIYISYVPDQKLVESKSLKLYLFSFRNHGDFHEDCVNIIMKDLIRLLDPKYIEVWGKFLPRGGLSIDPYANYGKKGTDWEKTAHQRLHFHDMQPEMVNNR

SEQ ID NO: 50097 - protein, 165 aa, Succiniclasticum ruminis
  REGION 1..165: note = tr|A0A1G6NZZ1|A0A1G6NZZ1_9FIRM NADPH-dependent 7-cyano-7-deazaguanine reductase OS=Succiniclasticum ruminis OX=40841 GN=queF PE=3 SV=1
MAAGRTEKDLQGVSLLGNKTKYRDDYAPDVLECFPNKHPENDYFVKFNCPEFTSLCPKTGQPDFATIYISYVPDQKLVESKSLKLYLFSFRNHGDFHEDCVNIIMKDLIGLLDPKYIEVWGKFLPRGGLSIDPYANYGKKGTDWEKTAHHRLHYHDMNPETVQNR

SEQ ID NO: 50098 - protein, 275 aa, Succinivibrio dextrinosolvens
  REGION 1..275: note = tr|A0A1T4V0V7|A0A1T4V0V7_9GAMM 7-cyano-7-deazaguanine reductase OS=Succinivibrio dextrinosolvens DSM 3072 OX=1123324 GN=SAMN02745213_00484; PE = 4 SV=1
MENSPLVLGKNTTYDNEYAPSRLHRIERALGRSAIKHLKSFNGMDIWRLYEMTYLNLNGLPEVCMGIMKVPASSRYIVESKSLKLYELSFTMTKFESLKDVETVFARDLSRLLECEVEVKLFEVKNKEFAFESPKGICLEEQDFAKSMSFKSYEYSPKVLTLAEGKKTVSKIYYTNLFRSLCPVTSQPDHATVMIEYKGLAPNEESLLNYLVSLRNHQGFHEQCVELIYSDIMHALEPSELTVSAFFTRRGGIDINPVRTNLKDQKFTSVRFIRQ

SEQ ID NO: 50099 - protein, 281 aa, Succinivibrio sp.
  REGION 1..281: note = tr|A0A3C1W1H2|A0A3C1W1H2_9GAMM NADPH-dependent 7-cyano-7-deazaguanine reductase QueF OS=Succinivibrio sp.; OX = 2053619 GN=DCQ86_05595 PE=4 SV=1
MYFWRFIVDTTNLVLGKSTTYQEEYSPSLLQRIERQLGRSAIKNLKSFEGFDVWHLYELTYLNLNGLPCVCMGCMIVPAKSKYIVESKSLKLYTMSFTMTRFKDLSFVQKVFERDLSKLLECKVEVKLYPLHSKDFAIHTIKGTCLEELRCCKDLNFKNFEYSPEVLAFDDKKEISKTYYTNLFRSLCPVTAQPDYASLMICYEGRKLKEESLLTYLVSLRHHQGFHEQCVELIYSDLVSYLNPKKLTVAAFFTRRGGIDINPVRTNQKSLSPLMLRTIRQ

SEQ ID NO: 50100 - protein, 298 aa, Succinivibrio sp.
  REGION 1..298: note = tr|A0A316SJE6|A0A316SJE6_9GAMM NADPH-dependent 7-cyano-7-deazaguanine reductase QueF OS=Succinivibrio sp.; OX = 2053619 GN=DBY31_03700 PE=4 SV=1
MHLRLQIRRFIMDNNESKAPEVSSGMSNLVLGKNTTYDNEYAPSRLQRIERQLGRSHIERLQKFVGYDIWRLYEMTYLNLNGLPKVCMGIMRVPADSKYIVESKSLKLYELSFTMTKFKDLKEVESVFEHDLSTLLESNVKVSLFELDNEEFSTRAVKGTCLEELDCCKDLSFKGYEYSPSLLTFDKEEKTIKKTYYTNLFRSLCPVTSQPDHAVIRIDYEGKKPDLKGLLSYLVTLRNHQGFHEQCVELIYSDLMYYLKPSKLTVSAYFTRRGGIDINPVRSSAKLNSSESVRTIRQ

SEQ ID NO: 50101 - protein, 270 aa, unidentified
  source 1..270: note = Succinivibrionaceae bacterium
  REGION 1..270: note = tr|A0A3C0C9Z9|A0A3C0C9Z9_9GAMM PreQ(1) synthase; OS = Succinivibrionaceae bacterium OX=2053620 GN=DCL74_01755; PE = 4 SV=1
MPAGKLSLGANSTTYFDEYNPSVLRPIERSLGRAVLKRKSFNGFDLWHLYEITFLNKLGIPKVCCGTIKIDAKSQYIVESKSLKLYLLSFTMTKFKDLAEVCAVITSDLERELKIRPEVKLWDLEYCPFIPQKNDGVLIDTETPPRIVYSCDDTLLVPSAEGMTVRETLRSNILRTLCPVTSQPDHAEVTISYAGKKIDHAGLFAYLISLRSHQGFHEQCCELIFSDIMERLHPEELTVCCSFTRRGGIDITPIRSTLSKVCEIPRTLRQ

SEQ ID NO: 50102 - protein, 282 aa, unidentified
  source 1..282: note = Succinivibrionaceae bacterium
  REGION 1..282: note = tr|A0A348YMW1|A0A348YMW1_9GAMM NADPH-dependent 7-cyano-7-deazaguanine reductase QueF; OS = Succinivibrionaceae bacterium OX=2053620 GN=DCR21_06025; PE = 4 SV=1
MHKNFILDAGTVMGHKNNLVLGKSSIYYNEYNPKVLHPIERMIGRAPLKLKNFSGYDLWRLYEITYLNAFGTPCVATGEIIVPADSTYIIESKSLKLYIGSFTMTKMKNLKQLEDVIRADLSKELECEIQVNLFQVEDCPFSIVKLPGELIDNEERLPMQNLAYNPDILSADKSLVVRETLRSNILRTLCPVTGQPDHASIQISYEGNRIDRQNLFAYLASLRTHQGFHEQCVELIFSDIKTTLNPVHLQVTACFTRRGGIDINPVRTDFDSAEKPVRLIRQ

SEQ ID NO: 50103 - protein, 153 aa, Sulfitobacter brevis
  REGION 1..153: note = tr|A0A1I1ULB6|A0A1I1ULB6_9RHOB NADPH-dependent 7-cyano-7-deazaguanine reductase OS=Sulfitobacter brevis; OX = 74348 GN=queF PE=3 SV=1
METIYSNLTQLGGATELPASPETAVLERVANPQADVDYCVRFTAPEFTSLCPMTGQPDFAHLVIDYVPDAYLVESKSLKLFLGAFRNHGAFHEDCTVSIARRLVDFLGPRWLRIGGYWYPRGGIPIDVFWQTGAMPQGVWIPDQGVPPYRGRG

SEQ ID NO: 50104 - protein, 166 aa, Sulfitobacter donghicola; identical to SEQ ID NO: 50012
  REGION 1..166: note = tr|A0A410XXC7|A0A410XXC7_9RHOB NADPH-dependent 7-cyano-7-deazaguanine reductase OS=Sulfitobacter donghicola OX=421000 GN=queF PE=3 SV=1

SEQ ID NO: 50105 - protein, 153 aa, Sulfitobacter guttiformis
  REGION 1..153: note = tr|A0A420DJK0|A0A420DJK0_9RHOB NADPH-dependent 7-cyano-7-deazaguanine reductase OS=Sulfitobacter guttiformis OX=74349 GN=queF PE=3 SV=1
METIYSDLKQLGAETDLPKSPEDAVLERVSNPQADVAYCVRFTAPEFTSLCPMTGQPDFAHLVLDYVPAEFLVESKSLKLFLGSFRNHGAFHEDCTISIARRLVDFLNPQWLRIGGYWYPRGGIPIDVFWQTGAMPEGVWIPDQGVPPYRGRG

SEQ ID NO: 50106 - protein, 154 aa, unidentified
  source 1..154: note = Sulfitobacter indolifex
  REGION 1..154: note = tr|A9E8K0|A9E8K0_9RHOB NADPH-dependent 7-cyano-7-deazaguanine reductase OS=Sulfitobacter indolifex HEL-45 OX=391624 GN=queF PE=3 SV=1
MSDDIYSNLKQLGGETRIPASPEEAELERVPNPQADVAYNVRFTAPEFTSLCPMTGQPDFAHLVIDYVPGPWLVESKSLKLFLTSFRNHGAFHEDCTISIARRLADFLDPQWLRIGGYWYPRGGIPIDVFWQTGPLPEGVWIPDQGVPPYRGRG

SEQ ID NO: 50107 - protein, 153 aa, Sulfitobacter litoralis
  REGION 1..153: note = tr|A0A1H0LHU2|A0A1H0LHU2_9RHOB NADPH-dependent 7-cyano-7-deazaguanine reductase OS=Sulfitobacter litoralis OX=335975 GN=queF PE=3 SV=1
METIYSDLQQLGGKTELPASPEEAMLEKVSNPQADVDYCVRFTAPEFTSLCPMTGQPDFAHLVIDYVPDQYLVESKSLKLYLGAFRNHGAFHEDCTVSIGRRLVGLLSPRWLRIGGYWYPRGGIPIDVFWQTGETPKNVWIPDQGVPPYRGRG

SEQ ID NO: 50108 - protein, 153 aa, Sulfitobacter pontiacus
  REGION 1..153: note = tr|A0A1H2T6N5|A0A1H2T6N5_9RHOB NADPH-dependent 7-cyano-7-deazaguanine reductase OS=Sulfitobacter pontiacus OX=60137 GN=queF PE=3 SV=1
METIYSDLQQLGGKTELPASPEEAMLEKVANPQADVDYCVRFTAPEFTSLCPMTGQPDFAHLVIDYVPDQYLVESKSLKLYLGAFRNHGAFHEDCTVSIGRRLVELLSPRWLRIGGYWYPRGGIPIDVFWQTGETPNSVWIPDQGVPPYRGRG

SEQ ID NO: 50109 - protein, 153 aa, unidentified
  source 1..153: note = Sulfitobacter pseudonitzschiae
  REGION 1..153: note = tr|A0A073J3D1|A0A073J3D1_9RHOB NADPH-dependent 7-cyano-7-deazaguanine reductase OS=Sulfitobacter pseudonitzschiae OX=1402135 GN=queF PE=3 SV=1
METIYSDLKQLGGKTELPETPEQAVLERVANPQADVSYCVRFTAPEFTSLCPMTGQPDFAHIVIDYVPDQWLVESKSLKLFLGAFRNHGAFHEDCTVSIARRLVELLSPRWLRIGGYWYPRGGIPIDVFWQTGAMPADVWIPDQGVPPYRGRG

SEQ ID NO: 50110 - protein, 153 aa, Sulfitobacter sp.
  REGION 1..153: note = tr|A0A085BV96|A0A085BV96_9RHOB NADPH-dependent 7-cyano-7-deazaguanine reductase OS=Sulfitobacter sp. CB2047 OX=1525218 GN=queF PE=3 SV=1
METIYSDLQQLGGKTELPASPEEAMLEKVANPQADVDYCVRFTAPEFTSLCPMTGQPDFAHLVIDYVPDQYLVESKSLKLYLGAFRNHGAFHEDCTVSIGRRLVELLSPRWLRIGGYWYPRGGIPIDVFWQTGETPKSVWIPDQGVPPYRGRG

SEQ ID NO: 50111 - protein, 153 aa, Sulfitobacter sp.
  REGION 1..153: note = tr|A0A345R173|A0A345R173_9RHOB NADPH-dependent 7-cyano-7-deazaguanine reductase OS=Sulfitobacter sp. SK025 OX=1389011 GN=queF PE=3 SV=1
METIYSDLQQLGGKTELPASPEEAMLEKVANPQADVDYCVRFTAPEFTSLCPMTGQPDFAHLVIDYVPDHYLVESKSLKLYLGAFRNHGAFHEDCTVSIGRRLVELLSPRWLRIGGYWYPRGGIPIDVFWQTGETPKSVWIPDQGVPPYRGRG

SEQ ID NO: 50112 - protein, 139 aa, Sulfuricella denitrificans
  REGION 1..139: note = tr|S6B4E9|S6B4E9_SULDS NADPH-dependent 7-cyano-7-deazaguanine reductase OS=Sulfuricella denitrificans (strain DSM 22764 / NBRC 105220 / skB26); OX = 1163617 GN=queF PE= 3 SV=1
MSSQPSKSLETFENPNPERDFHIHMEIPEFTCLCPKTGQPDFATLYLDYIADQKCVELKSLKMYIWSFRNEGAFHEAVTNSILNDLVTATQPRFMRLTAKFYVRGGIFTNVVAEHRKPGWEPQPRVDLTAFEANSNTRG

SEQ ID NO: 50113 - protein, 139 aa, Sulfuricella sp.
  REGION 1..139: note = tr|A0A0E9ME58|A0A0E9ME58_9PROT NADPH-dependent 7-cyano-7-deazaguanine reductase OS=Sulfuricella sp. T08; OX = 1632857 GN=queF PE=3 SV=1
MASQPSKILETFDNPNPERDFHIHMEIPEFTCLCPKTGQPDFATLYLDYIADQKCVELKSLKMYIWSFRNEGAFHEAVTNSILNDLVAATQPRFMRLTAKFYVRGGIFTNVVAEHRKPGWEPQPRVDLTAFKANSNTRG

SEQ ID NO: 50114 - protein, 129 aa, Sulfuricurvum kujiense
  REGION 1..129: note = tr|A0A2D3WBA6|A0A2D3WBA6_9HELI NADPH-dependent 7-cyano-7-deazaguanine reductase OS=Sulfuricurvum kujiense; OX = 148813 GN=queF PE=3 SV=1
MKYGEQIVENFNIEKDFEIWPNQHERDYVIKVTLPEFTCLCPRSGYPDFATIYVEYTPDKWVAELKAIKLYINSFRNRHISHENSANEIYSTFETKIAPKRLKVVADYYPRGNVHTVVEIDSEKMVEEK

SEQ ID NO: 50115 - protein, 129 aa, Sulfuricurvum kujiense
  REGION 1..129: note = tr|E4TW57|E4TW57_SULKY NADPH-dependent 7-cyano-7-deazaguanine reductase OS=Sulfuricurvum kujiense (strain ATCC BAA-921 / DSM 16994 / JCM 11577 / YK-1); OX = 709032 GN=q ueF PE=3 SV=1
MKYGEQIVENFDVEKDFEIWPNQHERDYVIKVTLPEFTCLCPRSGYPDFATIYVEYTPDKWVAELKAIKLYINSFRNRHISHENSANEIYSVFEQKIAPKRLKVVADYYPRGNVHTVVEIDSEKMVKEK

SEQ ID NO: 50116 - protein, 129 aa, Sulfuricurvum sp.
  REGION 1..129: note = tr|A0A4R4G5I5|A0A4R4G5I5_9HELI NADPH-dependent 7-cyano-7-deazaguanine reductase OS=Sulfuricurvum sp. IAE1; OX = 2546102 GN=queF PE=3 SV=1
MKYGEQIVENFDVEKDFEIWPNQHERDYVIKVTLPEFTCLCPRSGYPDFATIYVEYTPDKWVAELKAIKLYINSFRNRHISHENSANEIYSVFEQKIAPKRLKVVADFYPRGNVHTVVEIDSEKIVKEK

SEQ ID NO: 50117 - protein, 129 aa, Sulfuricurvum sp.; identical to SEQ ID NO: 44987
  REGION 1..129: note = tr|A0A259CLS4|A0A259CLS4_9HELI NADPH-dependent 7-cyano-7-deazaguanine reductase OS=Sulfuricurvum sp. 17-40-25 OX=1970439 GN=queF PE=3 SV=1

SEQ ID NO: 50118 - protein, 276 aa, unidentified
  source 1..276: note = Sulfuriferula multivorans
  REGION 1..276: note = tr|A0A401JEQ4|A0A401JEQ4_9PROT NADPH-dependent 7-cyano-7-deazaguanine reductase OS=Sulfuriferula multivorans OX=1559896 GN=queF PE=3 SV=1
MNTPEQSLLGKPACYQAEYDPSLLFPIPRQDKRSEIGIRGTLPFFGADIWNAYEVSWLNLRGKPQVAIATFIIPAESPNIVESKSFKLYLNSYNQTRLDDTDTLLARLKADVSAAVGASVQVRLTLPDAFGNMAFAELEGLSLDRLDIEVDSYAPNPALLRASKDAEPVEEKLVSNLLKSNCLVTGQPDWGSVQIHYVGAPIDQAGLLQYLIGFRTHNEFHEQCVERIFMDVLRQCKPLKLAVYARYTRRGGLDINPWRSNISGSQLPLNLRCARQ

SEQ ID NO: 50119 - protein, 276 aa, unidentified
  source 1..276: note = Sulfuriferula plumbiphila
  REGION 1..276: note = tr|A0A512L7E4|A0A512L7E4_9PROT NADPH-dependent 7-cyano-7-deazaguanine reductase OS=Sulfuriferula plumbiphila OX=171865 GN=queF PE=3 SV=1
MNTPEQSLLGKPACYQAEYDPSLLFPIPRQDKRNAIGISGTLPFFGADIWNAYEVSWLNLRGKPQVAIATFIIPADSPNIVESKSFKLYLNSYNQTRLADTEALLARLKVDVSTAVGAAVQVRLTLPDAFGSVAFAELKGLSLDRLDIEVDSYAPNPALLRATQGAGPVEETLVSNLLKSNCLVTGQPDWGSVQIHYIGAPIDQAGLLQYLIGFRTHNEFHEQCVERIFMDVLRQCKPLKLTVYARYTRRGGLDINPWRSNISGSPLPPNLRCARQ

SEQ ID NO: 50120 - protein, 278 aa, unidentified
  source 1..278: note = Sulfuriferula sp.
  REGION 1..278: note = tr|A0A1Y0GAY2|A0A1Y0GAY2_9PROT NADPH-dependent 7-cyano-7-deazaguanine reductase OS=Sulfuriferula sp. AH1; OX = 1985873 GN=queF PE=3 SV=1
MTDASLTGTVLGKPACYQTEYDPGLLFPIPRQNKRDEICLGGALPFMGADIWNGYELSWLNMRGKPQIAIATFVVPADSPNIIESKSFKLYLNSFNQTHLQSHEELLARLRADLSQAAGAPVQVRLILPEDFAGLSMGELEGELLDRLDIGVDSYTPNPELLTAQADAETVEQKLVSHLLKSNCLVTGQPDWASVQIHYVGAPIDEAGLLRYLIGFRTHNEFHEQCVERIFVDILRMCKPIKLSVYARYTRRGGLDINPWRTNFSTGGMPPNLRHARQ

SEQ ID NO: 50121 - protein, 123 aa, Sulfurihydrogenibium azorense
  REGION 1..123: note = tr|C1DTW2|C1DTW2_SULAA NADPH-dependent 7-cyano-7-deazaguanine reductase OS=Sulfurihydrogenibium azorense (strain Az-Fu1 / DSM 15241 / OCM 825) OX=204536; GN = queF PE=3SV=1
MKYGEKEILESKLEPWPNPYPDRNYTIEITFPEFSCLCPRSGYPDYATIKITYIPDQYIVELKSLKLYLNKYRNQYISHEEATNKIYEDLYNLLKPRKLQVIGDWNPRGNVKTIIKVSSEDNP

SEQ ID NO: 50122 - protein, 123 aa, Sulfurihydrogenibium sp.
  REGION 1..123: note = tr|B2V950|B2V950_SULSY NADPH-dependent 7-cyano-7-deazaguanine reductase OS=Sulfurihydrogenibium sp. (strain YO3AOP1) OX=436114 GN=queF PE=3 SV=1
MKYGEKEILEAKLEPWPNPYPERNYTIDITFPEFSCLCPRSGYPDYATIKIIYIPDQYIVELKSLKLYLNKYRNQYISHEEATNKIYEDLYNLLKPRKLEVIGDWNPRGNVKTIIKVSSEDNK

SEQ ID NO: 50123 - protein, 123 aa, Sulfurihydrogenibium sp.
  REGION 1..123: note = tr|A0A2J6W2G9|A0A2J6W2G9_9AQUI NADPH-dependent 7-cyano-7-deazaguanine reductase OS=Sulfurihydrogenibium sp. OX=2053621 GN=queF PE=3 SV=1
MKYGEKEILESKLEPWPNPYPDRNYTIDITFPEFSCLCPRSGYPDYATIKIIYIPDQYIVELKSLKLYLNKYRNQYISHEEATNKIYEDLYNLLKPRKLEVIGDWNPRGNVKTIIRVSSEDNR

SEQ ID NO: 50124 - protein, 123 aa, Sulfurihydrogenibium yellowstonense
  REGION 1..123: note = tr|C4FKD6|C4FKD6_9AQUI NADPH-dependent 7-cyano-7-deazaguanine reductase OS=Sulfurihydrogenibium yellowstonense SS-5 OX=432331 GN=queF PE=3 SV=1
MKYGEKEILEANLEPWPNPYPERNYTIDITFPEFSCLCPRSGYPDYATIKITYIPDQYIVELKSLKLYLNKYRNQYISHEEATNKIYEDLYNLLKPRKLEVIGDWNPRGNVKTIIKVSSEDNK

SEQ ID NO: 50125 - protein, 165 aa, Sulfurimonas autotrophica
  REGION 1..165: note = tr|E0UU67|E0UU67_SULAO NADPH-dependent 7-cyano-7-deazaguanine reductase OS=Sulfurimonas autotrophica (strain ATCC BAA-671 / DSM 16294 / JCM 11897 / OK10) OX=563040 G N=queF PE=3 SV=1
MDEKEYKAKRAKEVAQLGAGETEYKYEYAPELLEIFENVHPEMDYWVTLNADEFTSLCPKTNQPDFGTIIINYIPDVKMVESKSLKLYLFSFINSGEFHEDVVNKIGKDLVALMQPKYLEVIGLFYPRGNISIHPTFSYAKDEEKYKEIEKYRFLNRNLNPQRVE

SEQ ID NO: 50126 - protein, 119 aa, Sulfurimonas autotrophica
  REGION 1..119: note = tr|E0UU68|E0UU68_SULAO Uncharacterized protein; OS = Sulfurimonas autotrophica (strain ATCC BAA-671 / DSM 16294 / JCM 11897 / OK10) OX=563040 GN=Saut_1396 PE=4 SV=1
MKLTPLHVKENTTIQYMSHELLFLAQSGQPYRGTIYINFTSTGETFDLRDFKKYLTSLRDKKYNAEDIVYEIYETITKSIQTENLGVIVDLTARGGIQQRLCYGAEFDALQKENIFQVR

SEQ ID NO: 50127 - protein, 125 aa, Sulfurimonas denitrificans
  REGION 1..125: note = sp|Q30UP6|QUEF_SULDN NADPH-dependent 7-cyano-7-deazaguanine reductase OS=Sulfurimonas denitrificans (strain ATCC 33889 / DSM 1251) OX=326298; GN = queF PE=3 SV=1
MKYGEKIVSEFDVEKDLEIWPNEHKRDYLIKMTLPEFSCLCPRSGYPDYATIYLEYTPNERVVELKAIKLYINSFRDRHISHENSANEIYTVLERKLKPKYMKIVADYNPRGNVHTVIEIDSSKL

SEQ ID NO: 50128 - protein, 125 aa, unidentified
  source 1..125: note = Sulfurimonas gotlandica
  REGION 1..125: note = tr|B6BGZ1|B6BGZ1_SULGG NADPH-dependent 7-cyano-7-deazaguanine reductase OS=Sulfurimonas gotlandica (strain DSM 19862 / JCM 16533 / GD1) OX=929558; GN = queF PE=3 SV=1
MKYGEKIVNEFDIEKDLEIWPNQHKRNYLIKMTLPEFSCLCPRSGYPDYATIYLEYTPDEWVVELKAMKLYINSFRDKHVSHENSANEIYETLENKIKPKYMKIVADYNPRGNVHTVIEIDSSKL

SEQ ID NO: 50129 - protein, 126 aa, unidentified
  source 1..126: note = Sulfurimonas hongkongensis
  REGION 1..126: note = tr|T0JQ41|T0JQ41_9HELI NADPH-dependent 7-cyano-7-deazaguanine reductase OS=Sulfurimonas hongkongensis OX=1172190 GN=queF PE=3 SV=1
MKYGEKIVNEFDIEKDLEIWPNQYKRDYLIKMTLPEFSCLCPRSGYPDYATIYLEYTPDEFVIELKAMKLYINSFRDRHISHENSANEIYEALENKIKPKYMKIVADYNPRGNVHTVIEIDSSKIK

SEQ ID NO: 50130 - protein, 128 aa, Sulfurimonas sp.; identical to SEQ ID NO: 46427
  REGION 1..128: note = tr|A0A2M7D4L4|A0A2M7D4L4_9HELI NADPH-dependent 7-cyano-7-deazaguanine reductase OS=Sulfurimonas sp. CG02_land_8_20_14_3_00_36_67 OX=1975545 GN=queF PE=3 SV=1

SEQ ID NO: 50131 - protein, 128 aa, Sulfurimonas sp.
  REGION 1..128: note = tr|A0A2G2AQ96|A0A2G2AQ96_9HELI NADPH-dependent 7-cyano-7-deazaguanine reductase OS=Sulfurimonas sp.; OX = 2022749 GN=queF PE=3 SV=1
MSTSKYGEKILNEFDVEKDLEIWPNAHKRNYLIKMTLPEFSCLCPRSGYPDYATIYLEYTPNEWVVELKAMKLYINSFRDKHISHENSANEIYEILDAKLKPKYMKVIADYNPRGNVHTVIEIDSSKL

SEQ ID NO: 50132 - protein, 139 aa, unidentified
  source 1..139: note = Sulfurirhabdus autotrophica
  REGION 1..139: note = tr|A0A4R3YG17|A0A4R3YG17_9PROT NADPH-dependent 7-cyano-7-deazaguanine reductase OS=Sulfurirhabdus autotrophica OX=1706046 GN=queF PE=3 SV=1
MPSQPSQSLETFDNPNPERDFHIHMEIPEFTCLCPKTGQPDFATLYLDYIPDKHCVELKSLKLYIWGYRNEGAFHEAVTNRILDDLAKVTKPRFMRLTAKFFVRGGIFTNVVAEYRKKGWEPKPLVDLTRFDSQSNTRG

SEQ ID NO: 50133 - protein, 139 aa, unidentified
  source 1..139: note = Sulfurisoma sediminicola
  REGION 1..139: note = tr|A0A497XER4|A0A497XER4_9PROT NADPH-dependent 7-cyano-7-deazaguanine reductase OS=Sulfurisoma sediminicola OX=1381557 GN=queF PE=3 SV=1
MPSQPAKVLETFPNPAPHRDYQIHMEVPEFTCLCPKTGQPDFAVLTLDYVPDRLCVELKSLKLYVWSFREEGHFHEDVTNRILDDLAKAVKPRFMRLTARFFVRGGIFTNVVAEHRKKGWKPTPRVDLAEFAAQSNFRG

SEQ ID NO: 50134 - protein, 143 aa, Sulfuritalea hydrogenivorans
  REGION 1..143: note = tr|W0SFI7|W0SFI7_9PROT NADPH-dependent 7-cyano-7-deazaguanine reductase OS=Sulfuritalea hydrogenivorans sk43H OX=1223802 GN=queF PE=3 SV=1
MPKPAIPTRAKSLETFANPASHRDYQIHMEIPEFTCLCPKTGQPDFAVLTLDYIADRLCVELKSLKLYIWSFREEGHFHEDVTNRILDDLVKATRPRFMRLTARFYVRGGIFTNVVAEHRKKGWKPAAKVELAEFPAQSNTRG

SEQ ID NO: 50135 - protein, 139 aa, unidentified
  source 1..139: note = Sulfuritortus calidifontis
  REGION 1..139: note = tr|A0A4R3JT82|A0A4R3JT82_9PROT NADPH-dependent 7-cyano-7-deazaguanine reductase OS=Sulfuritortus calidifontis OX=1914471 GN=queF PE=3 SV=1
MPSQPTKDLETFENPTPTRDFQIHIEIPEFTCLCPKTGQPDFATLFLDYIPDQKCVELKSLKLYIWSFRNEGHFHEAVTNRILDDLVRATEPRFMRLTAKFYVRGGIFTNVVAEHRKAGWQPQPRVELAEFAPQSNTRG

SEQ ID NO: 50136 - protein, 273 aa, Sulfurivirga caldicuralii
  REGION 1..273: note = tr|A0A1N6H9G5|A0A1N6H9G5_9GAMM NADPH-dependent 7-cyano-7-deazaguanine reductase OS=Sulfurivirga caldicuralii OX=364032 GN=queF PE=3 SV=1
MTDPYAQLPLGKPTAYCSQYDPTLLCPLPRQAKRDELGIQAEALPFVGVDVWTGYELSWLNAQGKPQVAVGRFSFDAASPMLVESKSFKLYLNSFNNTVFASEEAVRDTLARDLSEASGAPVQVALYDVEAAPPCAPAPEGMRLDDLDIACSDYDLAPQHLRSGGETLAETLYSHLLKSNCLVTGQPDWGTVVIHYRGPRIDHAGLLRYIVSFRNHWEFHEQCVERIFVDILRHCQPQELLVYARYLRRGGLDINPYRSTHPFEPDTSRLLRQ

SEQ ID NO: 50137 - protein, 131 aa, Sulfurospirillum barnesii
  REGION 1..131: note = tr|I3XTR7|I3XTR7_SULBS NADPH-dependent 7-cyano-7-deazaguanine reductase OS=Sulfurospirillum barnesii (strain ATCC 700032 / DSM 10660 / SES-3); OX = 760154 GN=queF PE=3SV=1
MKYGEQIIKEFDVEKDLEIWPNQHKKNYVIKLILPEFCCLCPRSGYPDFATIYIDYIPNELVVELKAIKLYINSFMNRNISHENSANEIYDLLDSKLKPKWLKVVADFNPRGNVHTVIEIDSKLVRNETSC

SEQ ID NO: 50138 - protein, 131 aa, Sulfurospirillum cavolei
  REGION 1..131: note = tr|A0A2D3WKP9|A0A2D3WKP9_9PROT NADPH-dependent 7-cyano-7-deazaguanine reductase OS=Sulfurospirillum cavolei OX=366522 GN=queF PE=3 SV=1
MKYGEKIIKEFDVEKDLEIWPNQHKKNYVIKLTLPEFCCLCPRSGYPDFATIYIDYIPNEWVVELKAIKLYINSFMNRNISHENSANEIYDLLDTKLKPKWLKVVADFNPRGNVHTVIEIDSKVVRNESTC

SEQ ID NO: 50139 - protein, 131 aa, Sulfurospirillum deleyianum
  REGION 1..131: note = tr|D1B0Q1|D1B0Q1_SULD5 NADPH-dependent 7-cyano-7-deazaguanine reductase OS=Sulfurospirillum deleyianum (strain ATCC 51133 / DSM 6946 / 5175) OX=525898; GN = queF PE=3 S V=1
MKYGEKIITEFDVEKDLEIWPNQHKKNYVIKLTLPEFCCLCPRSGYPDFATIYIDYIPNELVVELKAIKLYINSFMNRNISHENSANEIYDLLDKKLKPKWLKVVADFNPRGNVHTVIEIDSKLVRNETSC

SEQ ID NO: 50140 - protein, 131 aa, Sulfurospirillum halorespirans
  REGION 1..131: note = tr|A0A1D7TFQ0|A0A1D7TFQ0_9PROT NADPH-dependent 7-cyano-7-deazaguanine reductase OS=Sulfurospirillum halorespirans DSM 13726 OX=1193502 GN=queF PE=3 SV=1
MKYGEQIIKEFDVEKDLEIWPNQHKKNYVIKLTLPEFCCLCPRSGYPDFATIYIDYIPNGFVVELKAIKLYINSFMNRNISHENSANEIYDLLDSKLKPKWLKVVADFNPRGNVHTVIEIDSKQVRNESIC

SEQ ID NO: 50141 - protein, 131 aa, Sulfurospirillum multivorans
  REGION 1..131: note = tr|A0A5B9TML9|A0A5B9TML9_SULMU NADPH-dependent 7-cyano-7-deazaguanine reductase OS=Sulfurospirillum multivorans OX=66821 GN=queF PE=3 SV=1
MKYGEQIIKEFDVEKDLEIWPNQHQKNYVIKLTLPEFCCLCPRSGYPDFATIYIDYIPNGFVVELKAIKLYINSFMNRNISHENSANEIYDLLDSKLKPKWLKVVADFNPRGNVHTVIEIDSKQVRNESAC

SEQ ID NO: 50142 - protein, 127 aa, Sulfurospirillum sp.
  REGION 1..127: note = tr|A0A2D3VZN1|A0A2D3VZN1_9PROT NADPH-dependent 7-cyano-7-deazaguanine reductase OS=Sulfurospirillum sp. UBA12182 OX=2015905 GN=queF PE=3 SV=1
MKYGEKEIKEFDIDRDLEIWPNKHKKNYVIKITLPEFCCLCPRSGYPDFATIYIEYIPNELVVELKAIKLYINSFMNRSISHENSANEIYDVLSTKLKPKWLKVVADFNPRGNVHTVIEIDSKLIEK

SEQ ID NO: 50143 - protein, 131 aa, Sulfurospirillum sp.
  REGION 1..131: note = tr|A0A290HRB3|A0A290HRB3_9PROT NADPH-dependent 7-cyano-7-deazaguanine reductase OS=Sulfurospirillum sp. JPD-1 OX=220622 GN=queF PE=3 SV=1
MKYGEQIIKEFDVEKDLEIWPNQHKKNYVIKLTLPEFCCLCPRSGYPDFATIYIDYTPDELVVELKAIKLYINSFMNRNISHENSANEIYDLLDRKLKPKWLKVVADFNPRGNVHTVIEIDSKQVRNESSC

SEQ ID NO: 50144 - protein, 125 aa, Sulfurovum lithotrophicum; identical to SEQ ID NO: 45539
  REGION 1..125: note = tr|A0A2T4CQD4|A0A2T4CQD4_9PROT NADPH-dependent 7-cyano-7-deazaguanine reductase OS=Sulfurovum lithotrophicum OX=206403 GN=queF PE=3 SV=1

SEQ ID NO: 50145 - protein, 125 aa, unidentified
  source 1..125: note = Sulfurovum riftiae
  REGION 1..125: note = tr|A0A151CH97|A0A151CH97_9PROT NADPH-dependent 7-cyano-7-deazaguanine reductase OS=Sulfurovum riftiae; OX = 1630136 GN=queF PE=3 SV=1
MKYGEKEIQEFDINAKENFWPNEHEKNYTINIELPEFMCLCPRSGYPDFATMKLSYVPDRTVIELKALKLYINSFMHRHISHENSANEIFDALYSRLQPRSMKLIADFNPRGNVHTVIEIDSEKF

SEQ ID NO: 50146 - protein, 131 aa, Sulfurovum sp.
  REGION 1..131: note = tr|A0A0C2ZQ45|A0A0C2ZQ45_9PROT NADPH-dependent 7-cyano-7-deazaguanine reductase OS=Sulfurovum sp. FS06-10; OX = 1539064 GN=queF PE=3 SV=1
MKYGEKIIKEFDVEKDLEIWPNQHKKNYVIKLTLPEFCCLCPRSGYPDFATIYIDYIPGELVVELKAIKLYINSFMNRNISHENSANEIYDLLDSKLKPKWLKVVADFNPRGNVHTVIEIDSKMVRNESPC

SEQ ID NO: 50147 - protein, 131 aa, Sulfurovum sp.
  REGION 1..131: note = tr|A0A0C2ZSJ8|A0A0C2ZSJ8_9PROT NADPH-dependent 7-cyano-7-deazaguanine reductase OS=Sulfurovum sp. FS06-10; OX = 1539064 GN=queF PE=3 SV=1
MKYGEQIIKAFDVEKDLEIWPNQHKKNYVIKLTLPEFCCLCPRSGYPDFATIYIDYIPNELVVELKAIKLYINSFMNRNISHENSANEIYDLLDTKLKPKWLKVVADFNPRGNVHTVIEIDSKLVRNETSC

SEQ ID NO: 50148 - protein, 156 aa, Sunxiuqinia elliptica
  REGION 1..156: note = tr|A0A1I2KIB1|A0A1I2KIB1_9BACT NADPH-dependent 7-cyano-7-deazaguanine reductase OS=Sunxiuqinia elliptica; OX = 655355 GN=queF PE=3 SV=1
MDDLKHLGGTTDYQFNYDPNLLEAFDNKHPENDYWVKFNTPEFTSLCPITGQPDFATLYISYLPNQKMVESKSLKLYLFSFRNHGDFHEDCINIIMKDLIKLMDPRYIEVWGKFLPRGGISIDPYANYGKPGTKYEELAWHRMQNHDLNPEKVDNR

SEQ ID NO: 50149 - protein, 156 aa, Sunxiuqinia elliptica
  REGION 1..156: note = tr|A0A4R6H5X7|A0A4R6H5X7_9BACT NADPH-dependent 7-cyano-7-deazaguanine reductase OS=Sunxiuqinia elliptica; OX = 655355 GN=queF PE=3 SV=1
MDDLKHLGGTTDYQFNYDPNLLEAFDNKHPENDYWVKFNTPEFTSLCPITGQPDFATLYISYLPNQKMVESKSLKLYLFSFRNHGDFHEDCINIIMKDLIKLMDPKYIEVWGKFLPRGGISIDPYANYGKPGTKYEELAWHRMQNHDLNPEKVDNR

SEQ ID NO: 50150 - protein, 281 aa, unidentified
  source 1..281: note = Superficieibacter electus
  REGION 1..281: note = tr|A0A2P5GTC3|A0A2P5GTC3_9ENTR NADPH-dependent 7-cyano-7-deazaguanine reductase OS=Superficieibacter electus OX=2022662 GN=queF PE=3 SV=1
MSSYENHQALSGLTLGKTTSYRDIYDASLLQGVPRSLNRDPLGLHADSLPFHGADIWTLYEISWLNAKGLPQVAVGQVELDYASVNLVESKSFKLYLNSFNQTRFASRDDVHATLERDLSACAQGSVRVTLYSLDELEGQPIARFNGVCIDQQDIEIDNYQFDADSLSGAARGSVVEESLVSHLLKSNCLITHQPDWGSVQIQYRGPAIDREKLLRYLVSFRHHNEFHEQCVERIFNDIQRFCQPETLSVYARYTRRGGLDINPWRSNTDFKPATGRLVRQ

SEQ ID NO: 50151 - protein, 279 aa, unidentified
  source 1..279: note = Sutterella megalosphaeroides
  REGION 1..279: note = tr|A0A2Z6ICQ6|A0A2Z6ICQ6_9BURK NADPH-dependent 7-cyano-7-deazaguanine reductase OS=Sutterella megalosphaeroides OX=2494234 GN=queF PE=3 SV=1
MTHTPVLMPEPEGTLLGKSTVYSSSYDPALLQPIPRALGRNAVGKSDFRGTDVWGLYEVTWLNEHGMPQVAVGELLVPATTPCIVESKSLKLYVGSFTQTRFSSIEAVAETMSKDISAAAGGPCVMTLRDLADWEGAVERMPGLLLEAEILDLAPVDYEVNPTLLEVVEGEVAEETLSSNLLRSLCPVTGQPDHASLTIRYKGPKIAHRSLLAYIVSYREHRGFHEQCVEQIYTDLSRLADFEFLEVYACFTRRGGIDISPFRSSRDDHPAHVIRAQRQ

SEQ ID NO: 50152 - protein, 293 aa, Sutterella parvirubra
  REGION 1..293: note = tr|H3KFN1|H3KFN1_9BURK Putative queuine synthase; OS = Sutterella parvirubra YIT 11816 OX=762967; GN = HMPREF9440_01550 PE=4 SV=1
MTDTAKTSKSPVLMPEPQHTMLGQATTYHDTYDATLLTPIPRKFGRDAIGRHDFQGHDYWHLFEVTWLSPNGLPQVAAGLMTVPATTECIVESKSLKLYVGSFTQSVFPSKEAVEARMTEDLVKLLGEGVRMELTLLSDWQGDAMLPTPLPGIRLEALPEMKDATFDAFEVDPNLLAVAEDAGGEIVEEVFSTELFRSCCPVTGQPDHAGVVIRMKGPKADRAGLLKYLVSYRCHRGFHEQCVEQIFTDLSNVFSPEILEVHALFTRRGGIDISPFRSNVRSTPDTVLRSPRQ

SEQ ID NO: 50153 - protein, 273 aa, Sutterella sp.
  REGION 1..273: note = tr|A0A5B7ZHK0|A0A5B7ZHK0_9BURK NADPH-dependent 7-cyano-7-deazaguanine reductase QueF OS=Sutterella sp. KGMB03119 OX=2584944 GN=queF PE=4 SV=1
MPEPKGTKLGQATTYAEHYSPELLQPIPRALGRDAIGDHDFQGADIWRLYEFSWLDHRGLPHAAEVELTVPASTPSIIESKSLKLYAMSFAMTKLADAAEAEAILTRDLSEAAGGAVQVKVNPLRTWETRVAPMPGDNLEEMLPETKADAYEVAPDLLQRDSGADEREVFWSTNIFRSLCPVTGQPDFASVSIHLAGEAVDPASLLRYLASYRQHRGFHEQCVEQIFHDLRSRFELRILEVQAAFTRRGGIDINPFRSSVREQPLNSPRELRQ

SEQ ID NO: 50154 - protein, 141 aa, Sutterella sp.
  REGION 1..141: note = tr|R7C2X3|R7C2X3_9BURK NADPH-dependent 7-cyano-7-deazaguanine reductase OS=Sutterella sp. CAG:397; OX = 1262976 GN=queF PE=3 SV=1
MSTTASRALETFDNPNPARDYLVHIEIPEFTCLCPLTGQPDFATLVLDYIPDQKNLELKALKLYMWSFRNEGHFHEDVTNRILNDFVEKTDPRFMRLEARWWVRGGIYTTVRAEHRKPGWEPQPTVDLPHFADNNPMRTIG

SEQ ID NO: 50155 - protein, 285 aa, Sutterella wadsworthensis
  REGION 1..285: note = tr|S3CI10|S3CI10_9BURK Queuine synthase; OS = Sutterella wadsworthensis HGA0223 OX=1203554; GN = HMPREF1476_00889 PE=4 SV=1
MAVLMPEPQGTALGLTTVYADQYDPKLLFPISRNIGRDAIGDHDFIGTDIWRMYEFSWLNANGLPQAAEVDVFVPASSPSIIESKSLKLYQGSFAQTRFAGGAEQVAAILKRDLSNAAGAPVEVAVNTLDTWTPTIDDLPGELLEEAFPDVSITDFEVNPELLEKAPAAIDTDVKGNIRAAVWRTNLFRSLCPVTGQPDYASVSIALTGEAVDPRSLLKYLVSYRAHRGFHEQCVEQIFHDLRSRFTFTALEVQACFTRRGGIDINPYRSMSSKMPEFVIREGRQ

SEQ ID NO: 50156 - protein, 274 aa, Sutterella wadsworthensis
  REGION 1..274: note = tr|K1JL52|K1JL52_9BURK NADPH-dependent 7-cyano-7-deazaguanine reductase OS=Sutterella wadsworthensis 2_1_59BFAA OX=742823 GN=HMPREF9465_01430; PE = 3 SV=1
MSACAPAGTLLGQTTEYVDTYRPDLLTPIPRSLGRDAIGVHDFRGTDVWRLYEITWINERGLPVAAAGEIRVPATSPCIVESKSLKLYIGSLTQTKIASVEEAARLIARDVSACVGAPVEVLIDDLARWEMPVTRVPGIVLEAECGDLECSVYEPDASLLKAASDEVVEETLSSNLLRSRCPVTSQPDHASIVISYRGRRIDRRALLAYIVSFRRHQGFHEQCCEQIHADIMRVLAPEALSVNCCFTRRGGIDISPFRSTVADLPDPVIRTPRQ

SEQ ID NO: 50157 - protein, 139 aa, unidentified; identical to SEQ ID NO: 46975
  source 1..139: note = Sutterellaceae bacterium
  REGION 1..139: note = tr|A0A2D6RUI0|A0A2D6RUI0_9BURK NADPH-dependent 7-cyano-7-deazaguanine reductase OS=Sutterellaceae bacterium OX=2026794 GN=queF PE=3 SV=1

SEQ ID NO: 50158 - protein, 139 aa, unidentified; identical to SEQ ID NO: 48656
  source 1..139: note = Sutterellaceae bacterium
  REGION 1..139: note = tr|A0A3D4GC53|A0A3D4GC53_9BURK NADPH-dependent 7-cyano-7-deazaguanine reductase OS=Sutterellaceae bacterium OX=2026794 GN=queF PE=3 SV=1

SEQ ID NO: 50159 - protein, 156 aa, Suttonella indologenes
  REGION 1..156: note = tr|A0A380MUN6|A0A380MUN6_9GAMM NADPH-dependent 7-cyano-7-deazaguanine reductase OS=Suttonella indologenes; OX = 13276 GN=queF PE=3 SV=1
MRNEQELAELSLLGNQGTHYPAQYSPDILEAFPNKHGDNDYFVRFICPEFTSLCPMTGQPDFAIIHIAYIPNQRMVESKSLKLYLFSFRNHGDFHEDCVNIIMKDLITLMQPKYIEVFGEFTPRGGIAIHPYANYGQADSPYAAMARERLFQHGRR

SEQ ID NO: 50160 - protein, 156 aa, Swaminathania salitolerans
  REGION 1..156: note = tr|A0A511BQL2|A0A511BQL2_9PROT NADPH-dependent 7-cyano-7-deazaguanine reductase OS=Swaminathania salitolerans OX=182838 GN=queF PE=3 SV=1
MTTSENDLAGLSQLGRHTVQPDNPETATLEKVPSPHRGRDYVVRFTAPEFTSLCPVTGQPDFAHIVIDYIPDEWIVESKSLKLYLTSFRNHGAFHEDCSVSIATRLVEVLNPKWLRIGAYWYPRGGIPIDVFWQTGNAPEGVWIPAQDVPGYRGRG

SEQ ID NO: 50161 - protein, 163 aa, unidentified
  source 1..163: note = Swingsia samuiensis
  REGION 1..163: note = tr|A0A4Y6UGG9|A0A4Y6UGG9_9PROT NADPH-dependent 7-cyano-7-deazaguanine reductase OS=Swingsia samuiensis; OX = 1293412 GN=queF PE=3 SV=1
MPNHTTPTGPSAPGTEALSQLGRNTAAANSPEEAQLERVPSPHQGRKYVVRFTAPEFTSLCPVTGQPDFAHIVIDYIPSQWIVESKSLKLFLTSFRNHGAFHEDCSVTIAERLIELLDPEWLRIGAYWYPRGGIPIDVFWQTGEPPAGVWLPPQDVPGYRGRG

SEQ ID NO: 50162 - protein, 164 aa, unidentified
  source 1..164: note = Swingsia sp.
  REGION 1..164: note = tr|A0A4Y6U8B3|A0A4Y6U8B3_9PROT NADPH-dependent 7-cyano-7-deazaguanine reductase OS=Swingsia sp. F3b2; OX = 2558361 GN=queF PE=3 SV=1
MQHEPSAPTHSSQSKAGSLTQLGAKAALPAHPDEAVLERVPAPHQGKRYMVRFTAPEFTSLCPVTGQPDFAHLVIDYVPRQWIVESKSLKLYLGSFRNHGAFHEDCTVGIGVKLAELLEPEWLRIGGYWYPRGGMPIDVFWQSGPKPEDLWIPNQDVPPYRGRG

SEQ ID NO: 50163 - protein, 60 aa, unidentified
  source 1..60: note = Synechococcales bacterium
  REGION 1..60: note = tr|A0A3D5HZ92|A0A3D5HZ92_9CYAN NADPH-dependent 7-cyano-7-deazaguanine reductase QueF (Fragment); OS = Synechococcales bacterium UBA12195 OX=2055798; GN = DGR08_02470 PE=4SV=1
MAEAELICFDNPRQGRPYDVAISLPEFTCKCPFSGYPDFAVLRLIYQPGPRVVELKAIKL

SEQ ID NO: 50164 - protein, 151 aa, unidentified
  source 1..151: note = Synechococcales bacterium
  REGION 1..151: note = tr|A0A354AY37|A0A354AY37_9CYAN NADPH-dependent 7-cyano-7-deazaguanine reductase OS=Synechococcales bacterium UBA10510 OX=2055795 GN=queF PE=3 SV=1
MAIEQIAESASVSPSAANHQAEATRTPLYGERAIADAQLICFDNPRPGRAYEVSIELPEFTCLCPFSGYPDFAVLRLLYQPGPRVLELKAIKLYVNSYRNRAISHEEVANRILDDLVAAANPQWIELVADFSRRGNVHTVVRVSQGTRLPC

SEQ ID NO: 50165 - protein, 150 aa, Synechococcus elongatus
  REGION 1..150: note = tr|A0A3G6X149|A0A3G6X149_SYNEL NADPH-dependent 7-cyano-7-deazaguanine reductase OS=Synechococcus elongatus PCC 11801 OX=2219813 GN=queF PE=3 SV=1
MTETLTQLGQQVGLPASPEVAVLETFENPHPDRQYLVRFVAPEFTSLCPLTGQPDFAHLVLDYVPDQRLVESKSLKLFLGSFRNHGAFHENCTLTIAKRLEEAMNPTWLRLGGYWYPRGGLPIDVFYQSGEPPAGVWVPDQGVAPYRGRG

SEQ ID NO: 50166 - protein, 174 aa, Synechococcus elongatus
  REGION 1..174: note = sp|Q8GJN6|QUEF_SYNE7 NADPH-dependent 7-cyano-7-deazaguanine reductase OS=Synechococcus elongatus (strain PCC 7942) OX=1140 GN=queF PE=3 SV=1
MGREGWSRVLSATGENRERSLQKFMTETLTQLGQMVGLPASPEVAVLETFDNPHPDRQYLVRFVAPEFTSLCPLTGQPDFAHLVLDYVPDQRLVESKSLKLFLGSFRNHGAFHENCTLTIAKRLEEAMNPTWLRLGGYWYPRGGLPIDVFYQSGEPPAGVWVPEQGVAPYRGRG

SEQ ID NO: 50167 - protein, 162 aa, unidentified
  source 1..162: note = Synechococcus lacustris
  REGION 1..162: note = tr|A0A2P7EG77|A0A2P7EG77_9SYNE NADPH-dependent 7-cyano-7-deazaguanine reductase OS=Synechococcus lacustris OX=2116544 GN=queF PE=3 SV=1
  VARIANT 22: note = Xaa can be any naturally occurring amino acid
MAADPFQEPPAHFCVAIVTVNXFPPIHFYFVTVPSTQSPAYGERNIAAAELICFDNPQQQRPYNIAISLPEFTCKCPFSGYPDFAKLQLNYQPGPRVLELKALKLYVNSWRDCTISHEEVVNRILDDFVAAAAPIWMELVADFNPRGNVHTVITVHHGVEQH

SEQ ID NO: 50168 - protein, 128 aa, Synechococcus lividus
  REGION 1..128: note = tr|A0A2D2Q4H9|A0A2D2Q4H9_SYNLI NADPH-dependent 7-cyano-7-deazaguanine reductase OS=Synechococcus lividus PCC 6715 OX=1917166 GN=queF PE=3 SV=1
MQETAMKYGERAIEEGQLITFPNPRPGRHYTIEITLPEFTCKCPFSGYPDFATLYVSYSPHEKVVELKAIKLYINSYRDRYISHEEAVNQVLDDLVAACDPLYMQIKGDFAPRGNVHTVITVEHRRSA

SEQ ID NO: 50169 - protein, 143 aa, Synechococcus sp.
  REGION 1..143: note = tr|A0A076H3T6|A0A076H3T6_9SYNE NADPH-dependent 7-cyano-7-deazaguanine reductase OS=Synechococcus sp. KORDI-100 OX=1280380 GN=queF PE=3 SV=1
MFPSELVTAASAADRTLTPHYGERAIAQAELICFENPRPGRPYEVSIELPEFTCKCPFSGYPDFAVLRLVYQPGPRVVELKAIKLYVNSFRDRSISHEEVTNRILDDLVAATDPVWMQLEADFNPRGNVHTIVRVSHGTRQPC

SEQ ID NO: 50170 - protein, 137 aa, Synechococcus sp.
  REGION 1..137: note = sp|Q3AZN8|QUEF_SYNS9 NADPH-dependent 7-cyano-7-deazaguanine reductase OS=Synechococcus sp. (strain CC9902) OX=316279 GN=queF PE=3 SV=1
MTGAASQQQTETPLYGERAIDEAELICFDNPRPGRAYEVSIELPEFTCKCPFSGYPDFAVLRLIYQPGPRVVELKAIKLYVNSYRDRSISHEEVSNRIVDDLVAACDPVWLQLEADFNPRGNVHTVVRVSHGTRQPC

SEQ ID NO: 50171 - protein, 137 aa, Synechocystis sp.
  REGION 1..137: note = tr|A0A068MSS9|A0A068MSS9_SYNY4 NADPH-dependent 7-cyano-7-deazaguanine reductase OS=Synechocystis sp. (strain PCC 6714) OX=1147 GN=queF PE=3 SV=1
MADTAITTSDNIEKYGEREIRDAQLITFPNPRPGRRYDVHITLPEFTCKCPFSGYPDFATLYLTYCPDQKVVELKSIKLYINSYRDRHIPHEEVTNQILDDFVAVANPLYARLKADFNPRGNVHTVIEVEYHQEKDS

SEQ ID NO: 50172 - protein, 137 aa, Synechocystis sp.
  REGION 1..137: note = sp|Q55978|QUEF_SYNY3 NADPH-dependent 7-cyano-7-deazaguanine reductase OS=Synechocystis sp. (strain PCC 6803 / Kazusa) OX=1111708 GN=queF PE=3 SV=1
MTETTITTSDNVEKYGEREIRDAQLITFPNPRPGRRYDVHITLPEFTCKCPFSGYPDFATLYLTYCPDQKVVELKSIKLYINSYRDRHIPHEEVTNQILDDFVAVANPLYARLKADFNPRGNVHTVIEVEYHQEKAS

SEQ ID NO: 50173 - protein, 135 aa, unidentified
  source 1..135: note = Syntrophaceae bacterium
  REGION 1..135: note = tr|A0A1J5IIJ2|A0A1J5IIJ2_9DELT NADPH-dependent 7-cyano-7-deazaguanine reductase OS=Syntrophaceae bacterium CG2_30_58_14 OX=1805378 GN=queF PE=3 SV=1
MTEKSDLEGLTLLGRGEEKPAKRLETFPNHHPDRDYVVTLRTEEFTCVCPATGQPDFARLTLQYIPDRKIVESKSLKLYLWSFRNRGVFHEHAANAILDDLVKALAPRWCKVTADFAVRGGISISVEAEHGKRNG

SEQ ID NO: 50174 - protein, 264 aa, unidentified
  source 1..264: note = Syntrophaceae bacterium
  REGION 1..264: note = tr|A0A1V4XJ75|A0A1V4XJ75_9DELT NADPH-dependent 7-cyano-7-deazaguanine reductase OS=Syntrophaceae bacterium PtaB.Bin038 OX=1811716 GN=queF PE=3 SV=1
MKIIPYKDTYDPGLLQPVPRAPHRRELGIAESLPFTGVDLWTAYELSWLDPSGRPRVAMATFVVDARSPNLVESKSFKLYLNSFNQTELASPESLRQRLIADIGNACGMPVDVELKLPGAFGDERIEELDGELLDDIDAEIRDYRPNPALLRTGRSETDETLVSNLLKTNCPLTGQPDWASIQVRYRGPRIDRAGLLRYLVSFRRHGGFHEQCVEHIFMDILGRCAPERLTVYARYTRRGGLDINPFRTNCGEKPPRNVRTARQ

SEQ ID NO: 50175 - protein, 133 aa, Syntrophaceticus schinkii
  REGION 1..133: note = tr|A0A0B7MRZ0|A0A0B7MRZ0_9FIRM NADPH-dependent 7-cyano-7-deazaguanine reductase OS=Syntrophaceticus schinkii OX=499207 GN=queF PE=3 SV=1
MNQEKEKDLMRWDMDTYEAIATEVLEAIPFEYPGSDTEVAYVYPEFTSVCPWTGLPDFGELTISYIPREKLVELKSLKYYLNSFRNVGILQEHVVSRVKEDLVQLLNPVSLTVKADFRPRGGIGTQVQADFRS

SEQ ID NO: 50176 - protein, 155 aa, Syntrophobacter fumaroxidans
  REGION 1..155: note = sp|A0LJR4|QUEF_SYNFM NADPH-dependent 7-cyano-7-deazaguanine reductase OS=Syntrophobacter fumaroxidans (strain DSM 10017 / MPOB) OX=335543 GN=queF; PE = 3 SV=1
MPIDGYSSLTQLGRQAGVPANPDEAVIETFANPHPGTNYTVRLTAPELTTICPITGQPDFATLIVDYVPRDRLVESKSFKLFLGSFRNLGTFHEDCTAYIHKRLSDALDAAFLRVVGLWNARGGITIDCVVQTGELPSNCALLPLGRTDYRTGRI

SEQ ID NO: 50177 - protein, 154 aa, Syntrophobacter sp.
  REGION 1..154: note = tr|A0A2U3KZB9|A0A2U3KZB9_9DELT NADPH-dependent 7-cyano-7-deazaguanine reductase OS=Syntrophobacter sp. SbD1 OX=2043167 GN=queF PE=3 SV=1
MLRDAGGLTQLGKKAKIPKTPETAILETFKNANPETVYVVRLSAPEFTTMCPITGQPDFATIVVDYVPADLLVESKSLKLFLGSFRNHGAFHEDCTVYIHNRLKEAMSPKFIRVTGIWNARGGIAIDVMVESGIMPPSCTLLPMGKTDYRGGRE

SEQ ID NO: 50178 - protein, 131 aa, unidentified
  source 1..131: note = Syntrophobacteraceae bacterium
  REGION 1..131: note = tr|A0A2G9XNT0|A0A2G9XNT0_9DELT NADPH-dependent 7-cyano-7-deazaguanine reductase OS=Syntrophobacteraceae bacterium CG23_combo_of_CG06-09_8_20_14_all_50_8; OX = 1974096 G N=queF PE=3 SV=1
MTSASDLDGLTLLGKEAQPGRILEAFPNHHPERDYTVTLMTGEFTCLCPLTGQPDFARITIRYIPDKSIVESKSLKLYLASFRNEGAFHEHVTNAILDDLVKTIAPRWCKVSAEFAVRGGIAITVDAEYKK

SEQ ID NO: 50179 - protein, 156 aa, unidentified
  source 1..156: note = Syntrophobacteraceae bacterium
  REGION 1..156: note = tr|A0A1J5IP40|A0A1J5IP40_9DELT NADPH-dependent 7-cyano-7-deazaguanine reductase OS=Syntrophobacteraceae bacterium CG2_30_61_12 OX=1805379 GN=queF PE=3 SV=1
MLNEPNAEHFTQLGKPAVIPTSPAEAVLETFANPHQDRDYVVRLSAPEFTSVCPITGQPDFAVLIVDYVPNQRLVESKSFKFFLMSYRNHGAFHEDCTVSIHKRLEQAMTPKYLRVVGLWYARGGITIDVTIESGSLPVNCWLLPLGKSSYRGGRE

SEQ ID NO: 50180 - protein, 75 aa, unidentified
  source 1..75: note = Syntrophobacterales bacterium
  REGION 1..75: note = tr|A0A2M7BM95|A0A2M7BM95_9DELT NADPH-dependent 7-cyano-7-deazaguanine reductase QueF (Fragment); OS = Syntrophobacterales bacterium CG03_land_8_20_14_0_80_58_14 OX=1974 100 GN=COS57_02665; PE = 4 SV=1
MPKMTEKSDLEGLTLLGRGEEKPAKRLETFPNHHPDRDYVVTLRTEEFTCVCPATGQPDFARLTLQYIPDRKIVE

SEQ ID NO: 50181 - protein, 123 aa, unidentified
  source 1..123: note = Syntrophobacterales bacterium
  REGION 1..123: note = tr|A0A2M8GAA7|A0A2M8GAA7_9DELT NADPH-dependent 7-cyano-7-deazaguanine reductase OS=Syntrophobacterales bacterium CG_4_8_14_3_um_filter_49_14 OX=1974097 GN=queF; PE = 3SV=1
MEFEFLGKNVGDPVRRLETFEKPANVSIITMKSDEVTSLCPVTGQPDWETVKIEYAPDKLCVESKSLKLYLWSFREEGCFCESLADTIANDFYAVCKPFWCKVTVIQKPRGGIEITSVAELKR

SEQ ID NO: 50182 - protein, 156 aa, Syntrophobotulus glycolicus
  REGION 1..156: note = tr|F0SYI8|F0SYI8_SYNGF NADPH-dependent 7-cyano-7-deazaguanine reductase OS=Syntrophobotulus glycolicus (strain DSM 8271 / FlGlyR) OX=645991 GN=queF; PE = 3 SV=1
MRDKNTEGLTRLGSDHQYVFAYSSEILEAFENKHPDTDYFVRFNCPEFTSLCPITGQPDFAVIYIHYVPEQKLVESKSLKMYLFSFRDHGDFHEDVVNVIRKDLTALLDPKYLEVIGEFAPRGGISIYPFANYGKPETKWVEFAEKRFFEYSLYRK

SEQ ID NO: 50183 - protein, 145 aa, Syntrophorhabdus aromaticivorans
  REGION 1..145: note = tr|A0A351U2M2|A0A351U2M2_9DELT NADPH-dependent 7-cyano-7-deazaguanine reductase OS=Syntrophorhabdus aromaticivorans OX=328301 GN=queF PE=3 SV=1
MKNAVKTYKDIDKAILKAIPNPTGGAYEIKIKVPELTFLGVQEQPDFAVLYITFYPKKKIIELKSLKQYVYQFRDITVSYERLINVIFDHLMEVYEPDRIRLVMICNPRGGISSRLTIDSDWGVRGGEEKFKDWMGLEDTWGVSM

SEQ ID NO: 50184 - protein, 147 aa, Syntrophorhabdus sp.
  REGION 1..147: note = tr|A0A1V5CGY6|A0A1V5CGY6_9DELT NADPH-dependent 7-cyano-7-deazaguanine reductase OS=Syntrophorhabdus sp. PtaU1.Bin002 OX=1811702 GN=queF_2 PE=3 SV=1
MTTLKKIKTFQDIDKSILKSLPNPTGEAYEIKIKIPELTFLGVSEQPDFAVAYVTFYPAKKIIELKSLKLYVYQLRDVTVSYERLINVLYDHLMEIYEPDRLRIVMVFNPRGGISSKLTVDSDWGARGGKEKYRDWVGLADTWSVAM

SEQ ID NO: 50185 - protein, 145 aa, Syntrophorhabdus sp.
  REGION 1..145: note = tr|A0A1V5D7H7|A0A1V5D7H7_9DELT NADPH-dependent 7-cyano-7-deazaguanine reductase OS=Syntrophorhabdus sp. PtaU1.Bin153 OX=1811705 GN=queF PE=4 SV=1
MKNVSKTYKDIDKAILKAIPNPTGGAYEIKIKVPELTFLGVHEQPDFAALYITFYPKKKVIELKSLKQYVYQLRDVTVSYERLINVIFDHLMETYEPERIRIVMICNPRGGISSRLTIDSDWGVRGGEEKFKDWMGLEDMWGVSM

SEQ ID NO: 50186 - protein, 140 aa, Syntrophus aciditrophicus
  REGION 1..140: note = sp|Q2LTJ0|QUEF_SYNAS NADPH-dependent 7-cyano-7-deazaguanine reductase OS=Syntrophus aciditrophicus (strain SB) OX=56780 GN=queF PE=3 SV=1
MQKSTPPEDLSRLTLLGREAKPSRKLETFPNRHPDRDYIVTMETAEFTCVCPMTGQPDFADLHISYIPDASILESKSLKLYLWSYRNEGIFHEHVTNVILEDVVAALSPRWCKVTANFGVRGGISITVEAEYKKPGWSKP

SEQ ID NO: 50187 - protein, 140 aa, Syntrophus gentianae
  REGION 1..140: note = tr|A0A1H7XBZ1|A0A1H7XBZ1_9DELT NADPH-dependent 7-cyano-7-deazaguanine reductase OS=Syntrophus gentianae; OX = 43775 GN=queF PE=3 SV=1
MQNSTQPEDLSKLTLLGREAKPSKKLETFPNRHPGRNYVVTLETTEFTCVCPMTGQPDFADLKIQYIPDASILESKSLKLYLWSYRNEGIFHEHVTNVILEDLVAALSPRWCKVTANFGVRGGISISVEAEYSKPGTSQP

SEQ ID NO: 50188 - protein, 132 aa, Syntrophus sp.
  REGION 1..132: note = tr|A0A3C0KVM5|A0A3C0KVM5_9DELT NADPH-dependent 7-cyano-7-deazaguanine reductase OS=Syntrophus sp. (in: Bacteria) OX=48412 GN=queF PE=3 SV=1
MENFHYLGKKVNAPSKQLDTFPKPVNVQTVKFESNELTSVCPVTHQPDFNTVTIEFAPDKLCIESKSLKLYLWSFREEPIFAEGLANTISEDIFTAVQPFWCRITLVQNIRGGMQLSVVAEKKAVAFLREID

SEQ ID NO: 50189 - protein, 140 aa, Syntrophus sp.
  REGION 1..140: note = tr|A0A1V4Y3U1|A0A1V4Y3U1_9DELT NADPH-dependent 7-cyano-7-deazaguanine reductase OS=Syntrophus sp. PtaB.Bin138 OX=1811711 GN=queF PE=3 SV=1
MQNSTQQEDLSRLTLLGREAKPSKSLETFPNRHPDRDYVVTMETYEFTCVCPMTGQPDFAHLQIRYIPDASILESKSLKLYLWSYRNEGIFHEHVTNVILEDLIAVLSPRWCKVTAHFGVRGGISITVEAEYTKPGTAQP

SEQ ID NO: 50190 - protein, 353 aa, unidentified
  source 1..353: note = Tahibacter aquaticus
  REGION 1..353: note = tr|A0A4R6Z7P4|A0A4R6Z7P4_9GAMM NADPH-dependent 7-cyano-7-deazaguanine reductase OS=Tahibacter aquaticus; OX = 520092 GN=queF PE=3 SV=1
MSECELHRKLPLPACVACHAAQFAVLIGAPPKRSVLDRRRIGAGDCRRYNPAKTRGAGSGDSLPGKRVARRKAAKLRGMNTAEHSSLGKSVAYRDDYDASLLFPIPRQAKRIELGLTADLPFHGVDVWNAYELSWLDLRGKPRVAMAEFRVPATSPNIIESKSFKLYLNTFAQTRMADAAAVADLLQRDLSAAAGAQVTVSLRSGGQVAAQGLAELDGECLDELELDIADYDAPRPDYLVAESAWIAEETLVSHLLKSNCPVTGQPDWASVQVRYRGPRIDRAGLLRYLVSFRRHSDFHEQCVERIFTDLLRCCMPVELSVYARYTRRGGLDINPFRSSAAEWRIDNPRGARQ

SEQ ID NO: 50191 - protein, 268 aa, unidentified
  source 1..268: note = Tamilnaduibacter salinus
  REGION 1..268: note = tr|A0A2A2I1P7|A0A2A2I1P7_9ALTE NADPH-dependent 7-cyano-7-deazaguanine reductase OS=Tamilnaduibacter salinus OX=1484056 GN=queF PE=3 SV=1
MSLNDAPLGQTSDYPEQYAPERLYPVPRAANRKRLALSEGHWPWFGADIWQAWELSWLRSDGIPAVAWARFTVPADSPFLIESKSLKLYLNSLNQERFESAAAVRHCIERDMSQVAGKAVGVQLYSVDDATTAAGRPDNTILIDDAPITTHTPENPTAGERRVTERLCSHLLKSNCPVTGQPDWATVVVAYTGREIERASLLNYLVGFRQKQDFHEHCVETIFTDLMKHCRPEALSVLAQYTRRGGLDINPWRSTADRAPAFQRLVRQ

SEQ ID NO: 50192 - protein, 157 aa, Tannerella forsythia
  REGION 1..157: note = tr|G8UIK1|G8UIK1_TANFA NADPH-dependent 7-cyano-7-deazaguanine reductase OS=Tannerella forsythia (strain ATCC 43037 / JCM 10827 / FDC 338) OX=203275; GN = queF PE=3 SV=1
MENKELTLLGTATTYRQDYAPEVLEAFTNKHPERDYWVHFECPEFTSLCPITGQPDFATIWIDYLPDVKMVESKSLKLYLFSFRGHGAFHEDCVNLIMNDLIRLMEPKYIEVTGLFTPRGGISIYPYCNYGRPGTKYEALAEQRLFNIQAGNLRAGR

SEQ ID NO: 50193 - protein, 157 aa, Tannerella forsythia; identical to SEQ ID NO: 50192
  REGION 1..157: note = tr|A0A1D3URM0|A0A1D3URM0_TANFO NADPH-dependent 7-cyano-7-deazaguanine reductase OS=Tannerella forsythia; OX = 28112 GN=queF PE=3 SV=1

SEQ ID NO: 50194 - protein, 149 aa, Tannerella sp.; identical to SEQ ID NO: 45434
  REGION 1..149: note = tr|R7DKQ7|R7DKQ7_9BACT NADPH-dependent 7-cyano-7-deazaguanine reductase OS=Tannerella sp. CAG:51; OX = 1262979 GN=queF PE=3 SV=1

SEQ ID NO: 50195 - protein, 148 aa, Tannerella sp.
  REGION 1..148: note = tr|A0A2N8N9B0|A0A2N8N9B0_9BACT NADPH-dependent 7-cyano-7-deazaguanine reductase OS=Tannerella sp. oral taxon 808 OX=712711 GN=queF PE=3 SV=1
MEKQELTLLGKKTEYRQDYAPEVLETFTNRHPERDYRVHFHCPEFTSLCPITGQPDFATITIDYIPDMKMVESKSLKLYLFSFRNHGAFHEDCVNLIMKDLIRLMDPKYIEVRGLFTPRGGISIHPLCTYGRPGTRYEALAERRLFDK

SEQ ID NO: 50196 - protein, 155 aa, Tanticharoenia sakaeratensis
  REGION 1..155: note = tr|A0A0D6MM34|A0A0D6MM34_9PROT NADPH-dependent 7-cyano-7-deazaguanine reductase OS=Tanticharoenia sakaeratensis NBRC 103193 OX=1231623 GN=queF PE=3 SV=1
MTDKPPTEHLSQLGHAITIPQKPEDAILERVPSPHPDRDYMVRFTAPEFTSICPVTGQPDFAHIVIDYVPDAWIVESKSLKLYLTSFRNHGAFHEDCSVAIARRLVDELQPRWLRIGAYWYPRGGIPIDVFWQTGPAPEGVWIPAQDVPSYRGRG

SEQ ID NO: 50197 - protein, 159 aa, unidentified
  source 1..159: note = Tardiphaga robiniae
  REGION 1..159: note = tr|A0A164AAM5|A0A164AAM5_9BRAD NADPH-dependent 7-cyano-7-deazaguanine reductase OS=Tardiphaga robiniae; OX = 943830 GN=queF PE=3 SV=1
MSKTPRKSPKLPADLQLGRAVEWPTSPEQAKLDRVPNPQKDTNYVVRFTAPEFTSLCPITGQPDFAHLMIDYVPGQWLVESKSLKLYLASFRNHGAFHEDCTVEIGKRVASAIKPKWLRIGGYWYPRGGIPIDVFWQTGTLPKGVWVPEQGVAPYRGRG

SEQ ID NO: 50198 - protein, 159 aa, unidentified
  source 1..159: note = Tardiphaga sp.
  REGION 1..159: note = tr|A0A2U0TWJ0|A0A2U0TWJ0_9BRAD NADPH-dependent 7-cyano-7-deazaguanine reductase OS=Tardiphaga sp. OV697; OX = 2135487 GN=queF PE=3 SV=1
MSKTPRKSPKLPDDLQLGRAVEWPTSPEQAKLDRVPNPQKDTNYVVRFTAPEFTSLCPITGQPDFAHLMIDYVPGQWLVESKSLKLYLASFRNHGAFHEDCTVEIGKRVASAIKPKWLRIGGYWYPRGGIPIDVFWQTGTLPKGVWVPEQGVAPYRGRG

SEQ ID NO: 50199 - protein, 159 aa, unidentified
  source 1..159: note = Tardiphaga sp.
  REGION 1..159: note = tr|A0A5A7W6C8|A0A5A7W6C8_9BRAD NADPH-dependent 7-cyano-7-deazaguanine reductase OS=Tardiphaga sp. P9-11; OX = 2024614 GN=queF PE=3 SV=1
MSKTPRKSPKLPNDLQLGRAVEWPTSPEQAKLDRVPNPQKDTNYVVRFTAPEFTSLCPITGQPDFAHLMIDYVPGQWLVESKSLKLYLASFRNHGAFHEDCTVEIGKRVASAIKPKWLRIGGYWYPRGGIPIDVFWQTGTLPKGVWVPEQGVAPYRGRG

SEQ ID NO: 50200 - protein, 154 aa, Tateyamaria omphalii
  REGION 1..154: note = tr|A0A1P8MX17|A0A1P8MX17_9RHOB NADPH-dependent 7-cyano-7-deazaguanine reductase OS=Tateyamaria omphalii; OX = 299262 GN=queF PE=3 SV=1
MSDTIYSNLKQLGGDTVQPRSPEEAELERVQNPQADVAYNVRFTAPEFTSLCPMTGQPDFAHLVIDYVPGQWLVESKSLKLYLTSFRNHGAFHEDCTISIARRLVGFLEPAWLRIGGYWYPRGGIPIDVFWQTGEMPEGVWIPDQGVPPYRGRG

SEQ ID NO: 50201 - protein, 154 aa, Tateyamaria sp.
  REGION 1..154: note = tr|A0A0B4BVV0|A0A0B4BVV0_9RHOB NADPH-dependent 7-cyano-7-deazaguanine reductase OS=Tateyamaria sp. ANG-S1; OX = 1577905 GN=queF PE=3 SV=1
MSETIYSNLKQLGGATVQPSSPEEAELERVQNPQADVAYNVRFTAPEFTSLCPMTGQPDFAHLVIDYVPGQWLVESKSLKLYLTSFRNHGAFHEDCTISIARRLVDFLEPAWLRIGGYWYPRGGIPIDVFWQTGEMPEGVWIPDQGVPSYRGRG

SEQ ID NO: 50202 - protein, 415 aa, Tatlockia micdadei
  REGION 1..415: note = tr|A0A098GET4|A0A098GET4_TATMI NADPH-dependent 7-cyano-7-deazaguanine reductase OS=Tatlockia micdadei; OX = 451 GN=queF PE=3 SV=1
MKYYQIKEISQMTSLSIRSLHYYEEVGLLRPLRHPDSGYRLYSEDDLLILQQIITLKFLGFPLSIIKEIIRNPSFNLAESMGIQARELGEKAVKINEAASLLTYIASQLEMNEHVNWKSTAKIIEILELNTMSDTVLKKYQLVNKSELGKKSDYDAIYNPNRLYPIHRAGKRQEIGIDPANLPFVGFDCWNHYEVSWLNEKGKPMVGIGEIFYDCNSPKLIESKSMKLYFNSFNNTKIKNIEVLENTIKKDLEERVEAPVFVKIYPLEQAKKFTVSPTFTGECIDYLDVECSVYFVEPSFLSVHDLVVEEVLYSDLLKSNCLVTNQPDWGSIQIAYKGKKINREGLLKYLISFRNHNEFHEQCIERIFADIMNCCKPESLTVYGRYTRRGGLDINPYRTTEAAAFDGKNSRLVRQ

SEQ ID NO: 50203 - protein, 281 aa, Tatumella citrea
  REGION 1..281: note = tr|A0A1Y0L643|A0A1Y0L643_TATCI NADPH-dependent 7-cyano-7-deazaguanine reductase OS=Tatumella citrea; OX = 53336 GN=queF PE=3 SV=1
MNHYDHHQALEGLTLGKQTTYTEHYAPQLLQPVPRSLNRDALNLHDDNLPFHGEDLWTLYELSWLNSLGVPQVAIGHMALSATSINLIESKSFKLYLNSFNQTKFADRDSVRQTLEQDLAACAQGTVKITLHSLDEFEGQPIGSFKGECIDSLPVTVDNYSFDNNLLSGATEPESVEETLVSHLLKSNCLITSQPDWGSVMIRYRGPRIRREALLRYLLSFRQHNEFHEQCVERIFCDLLKFCQPEELTVYARYTRRGGLDINPWRSNVRFDAPTARLARQ

SEQ ID NO: 50204 - protein, 281 aa, Tatumella morbirosei
  REGION 1..281: note = tr|A0A095VKB3|A0A095VKB3_9GAMM NADPH-dependent 7-cyano-7-deazaguanine reductase OS=Tatumella morbirosei; OX = 642227 GN=queF PE=3 SV=1
MNHYDHHQALEGLPLGKQTSYTEHYAPQLLQPVPRSLNRDALKLHDDNLPFHGEDLWTLYELSWLNSLGVPQVAIGHMALSAASLNLIESKSFKLYLNSFNQTKFADRESVRQTLEQDLSACAQGEVRITLHSLDEFEGQPVGSFRGECIDSLPVSVDNYSFDNTLLAGASETQVVEETLVSHLLKSNCLITSQPDWGSVMIRYRGPRIRREPLLRYLLSFRQHNEFHEQCVERIFCDLLKFCQPEELTVYARYTRRGGLDINPWRSNVSFDAPTVRLARQ

SEQ ID NO: 50205 - protein, 281 aa, Tatumella ptyseos
  REGION 1..281: note = tr|A0A085JAP1|A0A085JAP1_9GAMM NADPH-dependent 7-cyano-7-deazaguanine reductase OS=Tatumella ptyseos ATCC 33301 OX=1005995 GN=queF PE=3 SV=1
MTHYDQHQALEGLTLGKKTSYTEHYAPELLQPVPRSLNRDGLGLQEGNLPFHGEDLWTLYELSWLNDQGVPRVAIGYVALCATSRNLIESKSFKLYLNSFNQTKFADTETVRATLEKDLSACAGGKVTVTLSSLSEAEGQPVGHFAGECIDDLPITVDNYSFDNNLLQDATTSDIVEETLVSHLLKSNCLITQQPDWGSVMIRYRGPRIEREALLRYLLSFRQHNEFHEQCVERIFNDLMQFCQPEQLTVYARYTRRGGLDINPWRSNVAFEAPVARLARQ

SEQ ID NO: 50206 - protein, 281 aa, Tatumella ptyseos; identical to SEQ ID NO: 50205
  REGION 1..281: note = tr|A0A2X5NHT6|A0A2X5NHT6_9GAMM NADPH-dependent 7-cyano-7-deazaguanine reductase OS=Tatumella ptyseos; OX = 82987 GN=queF PE=3 SV=1

SEQ ID NO: 50207 - protein, 281 aa, Tatumella sp.
  REGION 1..281: note = tr|A0A2G8CAV8|A0A2G8CAV8_9GAMM NADPH-dependent 7-cyano-7-deazaguanine reductase OS=Tatumella sp. OPLPL6; OX = 1928657 GN=queF PE=3 SV=1
MADYENHPTLSELTLGKSTAYISDYQPSLLQAVPRSLNRDSLQLDGAQLPFHGEDFWTLYELSWLNENGIPQVAIGDVALPASSQNLIESKSFKLYLNSFNQTRFSDWHSVEQTLVRDLSECAQGEVRVTLHRLSDFAAQPIDDFAGEVIDEQAITVDDYQFNRDYLRDAAHGEWVEETLVSHLLKSNCLITQQPDWGSVMIHYKGKKIDREALLRYLLSFRQHNEFHEQCVERIYMDIMALCEPEALTVYARYTRRGGLDINPWRTNQHFSPHNRRLARQ

SEQ ID NO: 50208 - protein, 286 aa, Taylorella asinigenitalis
  REGION 1..286: note = tr|G4QCE4|G4QCE4_TAYAM NADPH-dependent 7-cyano-7-deazaguanine reductase OS=Taylorella asinigenitalis (strain MCE3) OX=1008459 GN=TASI_0291 PE=3; SV = 1
MDLSQSALGKATEYPQGYDSSLLQPFSRDLGRSEIDLNQIDFQGVDIWYAYEFSWLNPNGKPEIAVIRFTFPASNPFLIESKSFKLYLNSFNNEHLEKEEVLKLMTRDLKNATKGDVKIEFFDIDKSEELLSYSVIRRNATSKIQNIDKLDIDFFQYYPDTNLLQTEDIQGSTYISEELESHLLKSNCPVTGQPDWATVHIKYSGNKKINHEGLLRYIVSYRNHSGFHEQCVEKIYADIWKHCQPKYLSVFAMYTRRGGLDINPFRETAGSVEDYEDLKEKRQFRQ

SEQ ID NO: 50209 - protein, 286 aa, Taylorella asinigenitalis
  REGION 1..286: note = tr|I7JNK3|I7JNK3_9BURK NADPH-dependent 7-cyano-7-deazaguanine reductase OS=Taylorella asinigenitalis 14/45 OX=1091495 GN=queF PE=3 SV=1
MDLSQSALGKATEYPQGYDSSLLQPISRDLGRSEIDLNQIDFQGVDIWYAYEFSWLNPNGKPEIAVIRFTFPASNPFLIESKSFKLYLNSFNNEHLEKEEVLKLMTRDLKNATKGDVKIEFFNIDESEELLSYSVIRRNATSKIQNIDKLDIDFFQYYPDTNLLQTEDIQGSTYVSEELESHLLKSNCPVTGQPDWATVHIKYSGNKKINHDGLLRYIVSYRNHSGFHEQCVEQIYADIWKHCQPKYLSVFAMYTRRGGLDINPFRETAGSVEDYDDLKEKRQFRQ

SEQ ID NO: 50210 - protein, 286 aa, Taylorella equigenitalis
  REGION 1..286: note = tr|I7JK61|I7JK61_9BURK NADPH-dependent 7-cyano-7-deazaguanine reductase OS=Taylorella equigenitalis 14/56 OX=1091497 GN=queF PE=3 SV=1
MDLSQSALGKKTEYPQGYDSSLLQPISRELGRTELGSDYIDFQGVDIWYAYEFSWLNPIGKPEIAVIRFTFPASNPYLIESKSFKLYLNSFNNEHLERNEVIKLLTGDLKNATRGDVSVEFFNSDEFENLLSNWLEGRASASCVLNLDELDIDFFQYYPDPNLLQTEEINGSDLIEEELESHLLKSNCPVTGQPDWATVHIKYSSDKKINHEGLLRYIVSYRNHSGFHEQCVERIYADIWKHCQPKYLSVFAMYTRRGGLDINPFRETAGSNTSYNKLDDQRQFRQ

SEQ ID NO: 50211 - protein, 154 aa, Telmatospirillum siberiense
  REGION 1..154: note = tr|A0A2N3PPF1|A0A2N3PPF1_9PROT NADPH-dependent 7-cyano-7-deazaguanine reductase OS=Telmatospirillum siberiense OX=382514 GN=queF PE=3 SV=1
MAETIYDSLTQLGGPASIPASPDQAVLETVRNPHPGTLYLVRFAAPEFTSLCPITGQPDFAHLVIDYVPDELLVESKSLKLFLASFRNHGAFHEDCTVGIGKRLVDALSPLWLRIGGYWFPRGGIPIDVFWQTGEAPDGLWLPDQGVAAYRGRG

SEQ ID NO: 50212 - protein, 146 aa, unidentified
  source 1..146: note = Tengunoibacter tsumagoiensis
  REGION 1..146: note = tr|A0A402AAA6|A0A402AAA6_9CHLR NADPH-dependent 7-cyano-7-deazaguanine reductase OS=Tengunoibacter tsumagoiensis OX=2014871 GN=queF PE=3 SV=1
MEEQRVPGRYGFEEIKNNHLEPWPNPHPDRDYVTHFEIPEFTCLCPRSGFPDFATIVIDYVPDGYVVELKSLKLYINAYRDRQISHESAANTILNDLVELLKPRWMRVVGDYTVRGNIKTIVFADYAQPDYQGPRPDYRRYLPTGM

SEQ ID NO: 50213 - protein, 135 aa, Tenuibacillus multivorans
  REGION 1..135: note = tr|A0A1G9WR72|A0A1G9WR72_9BACI NADPH-dependent 7-cyano-7-deazaguanine reductase OS=Tenuibacillus multivorans OX=237069 GN=queF PE=3 SV=1
MTENYYLPRSGPMPRPNSVEEGREILKNEAFDAPNVQSITFNALEFTAVCPKTGQPDFGRVEITYTPQEKCIESKSLKFYLWSFRDQGAFCESLAAQIADDVVYAIQPEEVHVTVYQTARGGIELTTKAVRHRDE

SEQ ID NO: 50214 - protein, 152 aa, Tepidamorphus gemmatus
  REGION 1..152: note = tr|A0A4R3MFI8|A0A4R3MFI8_9RHIZ NADPH-dependent 7-cyano-7-deazaguanine reductase OS=Tepidamorphus gemmatus; OX = 747076 GN=queF PE=3 SV=1
MTSPDSPMQLGRPVPVPESPDVAGLDRVPNPHADTDYVARFTCPEFTSLCPVTGQPDFAHLVIDYVPDQWLVESKSLKLFLASFRNHAAFHEDCTVAIGRRLASRLQPRWLRIGGYWYPRGGIPIDVFWQTGMAPAGLWIPDQGVAPYRGRG

SEQ ID NO: 50215 - protein, 140 aa, unidentified
  source 1..140: note = Tepidibacillus decaturensis
  REGION 1..140: note = tr|A0A135L515|A0A135L515_9BACI NADPH-dependent 7-cyano-7-deazaguanine reductase OS=Tepidibacillus decaturensis OX=1413211 GN=queF PE=3 SV=1
MAQVEMNHEKYKNIRFDIEDESVILVDILETIPNEYVGKDTLVTIPTTEFTSVCPWSGLPDFADVKITYIPKEELIEMKSLKYYLTSYRNVGIYQEHATNRILEDLVRLCDPKWMKIEAVWNARGGLGTTVIVEYPEKRS

SEQ ID NO: 50216 - protein, 143 aa, unidentified
  source 1..143: note = Tepidibacillus fermentans
  REGION 1..143: note = tr|A0A4R3KI27|A0A4R3KI27_9BACI NADPH-dependent 7-cyano-7-deazaguanine reductase OS=Tepidibacillus fermentans OX=1281767 GN=queF PE=3 SV=1
MAKVEVNHEKYKNIRFDIEDESVILVDILETIPYEYVGKDIEVTIPTTEFTSVCPWSGLPDFADIKITYIPNEKLIEMKSLKYYLTSYRNVGIYQEHATNRILEDLVRLCDPKWMKVEAVWNARGGLGTVVIAEYPRKEVQNS

SEQ ID NO: 50217 - protein, 153 aa, unidentified
  source 1..153: note = Tepidicaulis marinus
  REGION 1..153: note = tr|A0A081B8Y7|A0A081B8Y7_9RHIZ NADPH-dependent 7-cyano-7-deazaguanine reductase OS=Tepidicaulis marinus; OX = 1333998 GN=queF PE=3 SV=1
MAEYTKDLTQLGAKTAAPATPEEAELERVPNPHADTDYLARFTCPEFTSLCPVTGAPDFAHLVIDYAPGDWLVESKSLKLYLQSFRNHGAFHEDCTVAIGKRLAETLKPKWLRIGGYWYPRGGIPIDVFWQTGTLPEGLWVPDQGVSPYRGRG

SEQ ID NO: 50218 - protein, 281 aa, Tepidicella xavieri
  REGION 1..281: note = tr|A0A4R6U4U0|A0A4R6U4U0_9BURK NADPH-dependent 7-cyano-7-deazaguanine reductase OS=Tepidicella xavieri; OX = 360241 GN=queF PE=3 SV=1
MSQPQDSPLGKATAYVDRYDPSLLFALPRQPKRAEIGIEGAPPFMGADLWTAYELSWLNPRGKPQVALAHITVPCETPNLVESKSLKLYLNSFNQTVFESAEAVRQRLRQDLSEAVWRGQPVGGSVGVRLLEPPAWSAETVAALEGLSLDRLDVECADYTPAPHHLQADHSQPQVQEALVSDLLKSNCLVTGQPDWGSVRIAYVGAPIDQAGLLRYLVSFRQHHEFHEQCVERIFMDIWTRCRPARLSVYARYTRRGGLDINPWRTSHPQQPPASQRTARQ

SEQ ID NO: 50219 - protein, 291 aa, unidentified
  source 1..291: note = Tepidimonas alkaliphilus
  REGION 1..291: note = tr|A0A554W6S8|A0A554W6S8_9BURK NADPH-dependent 7-cyano-7-deazaguanine reductase OS=Tepidimonas alkaliphilus OX=2588942 GN=queF PE=3 SV=1
MQEAEGGAPAAWLHTTPLGQSSAYPDRYDPGLLCPLPRAAARQALALQGLPPFTGADVWTAYEVSWLNPRGKPQVAMAQFTIPAETPNLIESKSLKLYLNSLNHERMASLEEVRARLRADLTEALWRGSEQPPGHIGVQLWTPAQWGGELHGALPGLSLDRLDVECTHDEPDTALLRADATQPPVQEVLTSDLFRSLCPVTGQPDWASVQIAYTGAPIDQEGLLRYLVGFRRHAGFHEQCVERIFVDLWRRCQPVRLAVLARFTRRGGLDINPWRTSHPQPLPAALRLARQ

SEQ ID NO: 50220 - protein, 293 aa, Tepidimonas aquatica
  REGION 1..293: note = tr|A0A554WQW8|A0A554WQW8_9BURK NADPH-dependent 7-cyano-7-deazaguanine reductase OS=Tepidimonas aquatica; OX = 247482 GN=queF PE=3 SV=1
MVTTTDHPQAATAALHATPLGRETAYPERYDPTLLCPVPRALARAALGWTGPLPFTGADLWTAFEVSWLNPRGKPLVAIAHLTVPAETPNLIESKSLKLYLNSFNQERLRDADELRARLRADLTEALWRGSGQTPGSVGVRLQLPTEWACEAAAGLPGLSLDRLDVECTHDHPAPQLLRADATQPPVDETLSSDLFKSNCPVTGQPDWASVQIRYSGPPIDQEGLLRYLVSFRQHQGFHEHCVERIFIDIWQRCRPVRLSVYARFTRRGGLDINPSRTSHPQPAPGAVRLARQ

SEQ ID NO: 50221 - protein, 278 aa, unidentified
  source 1..278: note = Tepidimonas fonticaldi
  REGION 1..278: note = tr|A0A1A6DTN1|A0A1A6DTN1_9BURK NADPH-dependent 7-cyano-7-deazaguanine reductase OS=Tepidimonas fonticaldi; OX = 1101373 GN=queF PE=3 SV=1
MADAPLGRATAYTDTYDATLLCPLPRAPKRAEIGITGTPPFTGADLWTAFELSWLNDRGKPQVALAHITIPAETPHLIESKSFKLYLNSFNQTRFADAEQVRERLRADLAEALWRGSERAGSVGVRLRLPHEWAAEAVRPLPGLSLDRLDVECTHYQPAPELLRADPEQPPVEEVLTSDLLKSNCLVTGQPDWGSVQIAYSGAPIDQEGLLRYLVSFRQHQEFHEQCVERIFMDIWTRCRPVRLSVYARYTRRGGLDINPWRTSHPQQPPVNARTARQ

SEQ ID NO: 50222 - protein, 300 aa, unidentified
  source 1..300: note = Tepidimonas fonticaldi
  REGION 1..300: note = tr|A0A554XL87|A0A554XL87_9BURK NADPH-dependent 7-cyano-7-deazaguanine reductase OS=Tepidimonas fonticaldi; OX = 1101373 GN=queF PE=3 SV=1
MSADSTASVPAIDPARAAGVPGLADAPLGRATAYTDTYDATLLCPLPRAPKRAEIGITGTPPFTGADLWTAFELSWLNHRGKPQVALAHITIPAETPHLIESKSFKLYLNSFNQTRFADAEQVRERLRADLAEALWRGSERAGSVGVRLRLPHEWAAEAVRPLPGLSLDRLDVECTHYQPAPELLRADPEQPPVEEVLTSDLLKSNCLVTGQPDWGSVQIAYSGAPIDQEGLLRYLVSFRQHQEFHEQCVERIFMDIWTRCRPVRLSVYARYTRRGGLDINPWRTSHPQQPPVNARTARQ

SEQ ID NO: 50223 - protein, 293 aa, Tepidimonas ignava
  REGION 1..293: note = tr|A0A4R3LCW5|A0A4R3LCW5_9BURK NADPH-dependent 7-cyano-7-deazaguanine reductase OS=Tepidimonas ignava; OX = 114249 GN=queF PE=3 SV=1
MVTTTEQAPAAADTLHATPLGRETAYPDRYDPTLLCPVPRALARATLGAGAPLPFTGADFWTAFEVSWLNPRGKPQVAIAHLTVPAETPNLIESKSLKLYLNSFNQERLRDADELRARLRADLSEALWRGSGQPPGSVGVRLQPPAEWACEAVAGLPGLSLDRLDVECTHDHPAPELLRADATQPPVDETLCSDLFKSNCPVTGQPDWASVQIRYSGVPIDQEGLLRYLVSFRQHQGFHEHCVERIFIDIWQRCRPVRLSVYARFTRRGGLDINPWRTSHPQPAPSVARLARQ

SEQ ID NO: 50224 - protein, 293 aa, unidentified
  source 1..293: note = Tepidimonas sediminis
  REGION 1..293: note = tr|A0A554WRG2|A0A554WRG2_9BURK NADPH-dependent 7-cyano-7-deazaguanine reductase OS=Tepidimonas sediminis; OX = 2588941 GN=queF PE=3 SV=1
MSEPTATSAAGARLQDTPLGRASACPDRYDPGLLCPLPRAASRVEWGCAGPLPFTGADVWTAYEVSWLNPRGKPQVAIAQFTVPAESPNLIESKSLKLYLNGLNHARFASAEEVRARLRADLAEALWRGSGQPPGTVGVRLWGPQEWGGAALHAALPGLSLDRLDVDCDDDGPQPAWLRAEAAQPPVQEVLTTDLFRSLCPVTGQPDWASVQIAYTGAPIDQEGLLRYLVGFRRHGGFHEQCVERIFVDLWQRCRPVRLAVLARFTRRGGLDINPWRTSHPQPLPPALRLARQ

SEQ ID NO: 50225 - protein, 315 aa, Tepidimonas sp.
  REGION 1..315: note = tr|A0A554X9T9|A0A554X9T9_9BURK NADPH-dependent 7-cyano-7-deazaguanine reductase OS=Tepidimonas sp. SPSP-6; OX = 2267262 GN=queF PE=3 SV=1
MNPEPNICAPASDDDRPSAGSGARPSHAWASAPTAPDLAATPLGRPSPYVDTYDPGLLCPLPRAPKRAEIGVGTTPPFTGADLWTAFELSWLNVRGKPQVAIAHFVIPAETPNLIESKSFKLYLNSFNQTRFADADGVRERLLADLSEALWRGSEQRGRIGVRLRLPAEWAVETVHSLPGLSLDRLDVECTDYQPAPEWLRADTEQPPVQEVLTSDLLKSNCLVTGQPDWGSVQIAYSGHPIDQAGLLRYLVSFRQHQEFHEQCVERIFMDIWTRCRPVRLSVYARYTRRGGLDINPWRTSHPQQPPANVRTARQ

SEQ ID NO: 50226 - protein, 295 aa, Tepidimonas taiwanensis
  REGION 1..295: note = tr|A0A554X1Z6|A0A554X1Z6_9BURK NADPH-dependent 7-cyano-7-deazaguanine reductase OS=Tepidimonas taiwanensis OX=307486 GN=queF PE=3 SV=1
MTNDPTPTAAAAAALPELAQAPLGRASAYVDQYDPTLLCPLPRAPKRVEIGIDGTPPFTGADLWTAFELSWLNPRGKPQVAIAHFTIPAETPNLIESKSFKLYLNSYNQTVFADARAVRERLRADLTEALWRGADRTGSIGVRLCTPSEWSQEAVQPLGGLSLDRLDVDCTHYQPAPELLRADHDQPPVQEVLTSDLLKSNCLVTGQPDWGSVQIAYSGAPIDQEGLLRYLVSFRQHQEFHEQCVERIFMDIWTRCRPVRLSVYARYTRRGGLDINPWRTSHPQQPPANVRTARQ

SEQ ID NO: 50227 - protein, 300 aa, Tepidimonas thermarum
  REGION 1..300: note = tr|A0A554WXK7|A0A554WXK7_9BURK NADPH-dependent 7-cyano-7-deazaguanine reductase OS=Tepidimonas thermarum; OX = 335431 GN=queF PE=3 SV=1
MSADSTASIPAVDPTRAAVLPGLADAPLGRSTAYTDTYDPTLLCPLPRAPKRAEIGITGTPPFTGADLWTAFELSWLNERGKPQVALAHFTIPAETPNLVESKSFKLYLNSLHQTRFASAEAVRERLRADVSEALWRGSERTGSIGVRLRLPHEWEAEAVQPLAGLSLDRLDVECTHYQPAPELLRADPSQPPVQEVLTSDLLKSNCLVTGQPDWGSVQIAYSGAPIDQEGLLRYLVSFRQHQEFHEQCVERIFMDIWTRCRPVRLSVYARYTRRGGLDINPWRTSHPQQPPLNVRTARQ

SEQ ID NO: 50228 - protein, 268 aa, unidentified
  source 1..268: note = Tepidiphilus thermophilus
  REGION 1..268: note = tr|A0A0K6IRT8|A0A0K6IRT8_9PROT NADPH-dependent 7-cyano-7-deazaguanine reductase OS=Tepidiphilus thermophilus OX=876478 GN=Ga0061068_102157 PE=3 SV=1
MSELWLGRQVAVPSSYDPGVLTPIARAQTRRDLDPPPFVGFDEWRAYELSWLDGRGKPVVALARFRVPCDSPCLIESKSLKLYLNGLGGTRFSEVDAVAATIRADLSRAAGAAVEVAIAPLSMRPQRAPGYPAGDCVDELPVEIETYRYDPALLRIAEEAPRAQWLVSHLLKSNCPVTGQPDWGCVVVHALGPVIDPASFLRYVVSFREQQEFHEQCVERIYRDLWRLGMQELMVFACYTRRGGLDISPVRASRVGLLPETLPEEIRQ

SEQ ID NO: 50229 - protein, 278 aa, unidentified
  source 1..278: note = Terasakiispira papahanaumokuakeensis
  REGION 1..278: note = tr|A0A1E2V7S8|A0A1E2V7S8_9GAMM NADPH-dependent 7-cyano-7-deazaguanine reductase OS=Terasakiispira papahanaumokuakeensis OX=197479 GN=queF PE=3 SV=1
MESFEQHLGAAPLGKTQGYVDQHDPSLLYPIPRQAQREPLGVVADQVLPFVGEDVWTAYEVSWLLPGGRPVVRVAEFRIPAQSPNIIESKSFKLYLNSLNQTRASQSQVQQWLETHLSDAAGAPVDVKLMHLDDWIERDIKRPIGHCLDELEVDCDDLAAPQPALLSASGDVVSERLYSHLLKSNCPVTGQPDWATVVVDYTGPKINPEGLLRYIVSYRRHNDFHEHCVEKMFLDLQERCHPEHLSVQARYTRRGGLDINPWRSTSDQRAPDWRDVRQ

SEQ ID NO: 50230 - protein, 268 aa, Teredinibacter sp.
  REGION 1..268: note = tr|A0A509E402|A0A509E402_9GAMM NADPH-dependent 7-cyano-7-deazaguanine reductase OS=Teredinibacter sp. ISS155 OX=2584524 GN=queF PE=3 SV=1
MSEGIQLGKDALYVDHYDAELLVPIPRSESRAKVFGATLPFMGKDIWTSYELSWLSKSGKPQVAIAEFEFPYDSQNIIESKSFKYYLNSFNQTFFDSMEEVRQTLIRDLSQAAGGDVSVDVQNLSSDHQIYVLPGTCVDNLNVNVNQYTPNPELLTSGRRTVEKKQLFSHLLKSNCPVTGQPDWATVWIEYSGTEIIPESFLAYVISYRQHQDFHENCVESMFKDIMRQCQPSTLSVYARYTRRGGLDINPFRTNAREEVPVKRLARQ

SEQ ID NO: 50231 - protein, 276 aa, Teredinibacter turnerae
  REGION 1..276: note = sp|C5BR59|QUEF_TERTT NADPH-dependent 7-cyano-7-deazaguanine reductase OS=Teredinibacter turnerae (strain ATCC 39867 / T7901) OX=377629 GN=queF; PE = 3 SV=1
MSDHADTLLGKDTTYPEHYDPALLQPIPRERSRETMVRGDLPFTGVDIWTAYELSWLDSSGKPHVAVGEFWVPADSSAIIESKSLKYYLNSLNQHRFATREQARQAIAGDLSEAAGGEVQVTLFDIDDYSNVGTLPGTCVDTLDAPVYVYQPDASLLKFVDQPGEQQQLFSHLLKSNCPVTGQPDWATVWVQCSGLTLVPESFLAYVVSFRGHQDFHENCVERIFTDLMAGGKLQDLAVYARYTRRGGLDINPLRFSGAQDPEALEQLVSKRIARQ

SEQ ID NO: 50232 - protein, 140 aa, unidentified
  source 1..140: note = Terrabacteria group
  REGION 1..140: note = tr|A0A537KX24|A0A537KX24_9BACT NADPH-dependent 7-cyano-7-deazaguanine reductase OS=Terrabacteria group bacterium ANGP1 OX=2569760 GN=queF PE=3 SV=1
MARIVETPPVPDRRFDIAGYDAIDTAALETFPYEYPGRDVAVDIETDEFTAVCPWSGLPDFGTVKIRYLPGGKILELRSLKYYLLSYRNVGIYQEHAVTRMLDDLVTTVEPKWMEISLDYKIRGGIHTVCRVRYPHLENA

SEQ ID NO: 50233 - protein, 161 aa, unidentified
  source 1..161: note = Terrabacteria group
  REGION 1..161: note = tr|A0A537JZA9|A0A537JZA9_9BACT NADPH-dependent 7-cyano-7-deazaguanine reductase OS=Terrabacteria group bacterium ANGP1 OX=2569760 GN=queF PE=3 SV=1
MLGRQRAAQQRGSRRRNPAAPAEGAEAAAPPAPDLRLEIQDPEAVRPGLLETFPYEYPGSPATVEISTDEFTAVCPWSGLPDFGTVTIRYLPRERVLELRSFKYYLLSYRSVGIYQEHAANRILQDLVRACAPEWMELDLDYRVRGGIRTVVRVRWARPAA

SEQ ID NO: 50234 - protein, 165 aa, Terribacillus aidingensis
  REGION 1..165: note = tr|A0A285N3S4|A0A285N3S4_9BACI NADPH-dependent 7-cyano-7-deazaguanine reductase OS=Terribacillus aidingensis OX=586416 GN=queF PE=3 SV=1
MAGRNPEEMEDVTLLGNQNNVYDFDYKPEVLETFDNKHVYRDYFVKFNCPEFTTLCPITNQPDFGTVYISYIPDEKMVESKSLKLYLFSFRNHGDFHEDCINIILNDLKELMNPRYIEVWGKFTPRGGISIDPYVNYGRPGTKYEQMADHRMMNHDLYPEKVDNR

SEQ ID NO: 50235 - protein, 165 aa, Terribacillus goriensis
  REGION 1..165: note = tr|A0A075LLX6|A0A075LLX6_9BACI NADPH-dependent 7-cyano-7-deazaguanine reductase OS=Terribacillus goriensis OX=386490 GN=queF PE=3 SV=1
MAGRNPEEMEDVTLLGNQNNVYDFDYKPEVLETFDNKHTYRDYFVKFNCPEFTTLCPITNQPDFGTVYISYIPDEKMVESKSLKLYLFSFRNHGDFHEDCINIILNDLKELMNPRYIEVWGKFTPRGGISIDPYVNYGRPGTKYEQMADHRMMNHDMYPEKVDNR

SEQ ID NO: 50236 - protein, 165 aa, Terribacillus halophilus
  REGION 1..165: note = tr|A0A1G6HXP1|A0A1G6HXP1_9BACI NADPH-dependent 7-cyano-7-deazaguanine reductase OS=Terribacillus halophilus OX=361279 GN=queF PE=3 SV=1
MAGRKPEEMTDVTLLGNKNNVYDFDYKPEVLETFDNKHTYRDYFVKFNCPEFTTLCPITNQPDFGTVYISYIPDEKMVESKSLKLYLFSFRNHGDFHEDCMNIILNDLKELMNPRYIEVWGKFTPRGGISIDPYVNYGRPGTKYEQMADHRMMNHDMYPEKVDNR

SEQ ID NO: 50237 - protein, 165 aa, Terribacillus saccharophilus
  REGION 1..165: note = tr|A0A268AE98|A0A268AE98_9BACI NADPH-dependent 7-cyano-7-deazaguanine reductase OS=Terribacillus saccharophilus OX=361277 GN=queF PE=3 SV=1
MAGRNPEEMEDVTLLGNQNNVYDFNYKPEVLETFDNKHTYRDYFVKFNCPEFTTLCPITNQPDFGTVYISYIPDEKMVESKSLKLYLFSFRNHGDFHEDCINIILNDLKELMNPRYIEVWGKFTPRGGISIDPYVNYGRPGTKYEQMADHRMMNHDMYPEKVDNR

SEQ ID NO: 50238 - protein, 165 aa, Terribacillus saccharophilus; identical to SEQ ID NO: 50235
  REGION 1..165: note = tr|A0A1H8G5H8|A0A1H8G5H8_9BACI NADPH-dependent 7-cyano-7-deazaguanine reductase OS=Terribacillus saccharophilus OX=361277 GN=queF PE=3 SV=1

SEQ ID NO: 50239 - protein, 165 aa, Terribacillus sp.
  REGION 1..165: note = tr|A0A268BW46|A0A268BW46_9BACI NADPH-dependent 7-cyano-7-deazaguanine reductase OS=Terribacillus sp. 7520-G OX=2025389 GN=queF PE=3 SV=1
MAGRKPEEMEDITLLGNKNNVYDFDYKPEVLETFDNKHTYRDYFVKFNCPEFTTLCPITNQPDFGTVYISYIPDEKMVESKSLKLYLFSFRNHGDFHEDCMNIILNDLKELMNPRYIEVWGKFTPRGGISIDPYVNYGRPGTKYEQMADHRMMNHDMYPEKVDNR

SEQ ID NO: 50240 - protein, 133 aa, unidentified
  source 1..133: note = Terriglobus albidus
  REGION 1..133: note = tr|A0A5B9EDU5|A0A5B9EDU5_9BACT NADPH-dependent 7-cyano-7-deazaguanine reductase OS=Terriglobus albidus; OX = 1592106 GN=queF PE=3 SV=1
MAKKQPRYTDEHAAAGLDTKFPEIETWANQFPAYEILIDDPEFTSVCPKTGLPDFGVLQIRYMPKKRCLELKSLKEYLFTYRNLGIFQENICNQVLEDVVKATDPVWAEVKGDFRPRGGISTIVTARWPRPKK

SEQ ID NO: 50241 - protein, 147 aa, Terriglobus roseus
  REGION 1..147: note = tr|A0A1H4K9Z3|A0A1H4K9Z3_9BACT NADPH-dependent 7-cyano-7-deazaguanine reductase OS=Terriglobus roseus; OX = 392734 GN=queF PE=3 SV=1
MKPIPDNRMNNTSPLYTDEHAAAGLDVAMPEIETWQNHFRSYEILIDDPEFTSVCPRTGLPDFGHLTVRYMPKDRCLELKSLKEYLFCYRNLGIFQENICNRVLDDMVKACDPVWAEVKGDFRPRGGISTVVTATYPRPHDQLTPTR

SEQ ID NO: 50242 - protein, 147 aa, Terriglobus roseus
  REGION 1..147: note = tr|I3ZDU0|I3ZDU0_TERRK NADPH-dependent 7-cyano-7-deazaguanine reductase OS=Terriglobus roseus (strain DSM 18391 / NRRL B-41598 / KBS 63) OX=926566; GN = queF PE=3 SV=1
MKPIPDNRMNNTSPLYTDEHAAAGLDVAMPEIETWQNHFRSYEILIDDPEFTSVCPRTGLPDFGHLTIRYMPKDRCLELKSLKEYLFCYRNLGIFQENICNRVLDDMVKACEPVWAEVKGDFRPRGGISTVVTATFPRPHEQTTPTC

SEQ ID NO: 50243 - protein, 136 aa, Terriglobus saanensis
  REGION 1..136: note = tr|E8V8E7|E8V8E7_TERSS NADPH-dependent 7-cyano-7-deazaguanine reductase OS=Terriglobus saanensis (strain ATCC BAA-1853 / DSM 23119 / SP1PR4) OX=401053; GN = queF PE=3 S V=1
MTTDKRYTDEHAAAGLDHAFPAIETWQNHFRAYEILVDDPEFTSVCPKTGLPDFGVLTIRYMPRESCLELKSLKEYLFHYRNLGIFQENIVNQVLNDVVKACDPIWCEIKGDFRPRGGISTIVTAYHPRTEDDPRR

SEQ ID NO: 50244 - protein, 280 aa, unidentified
  source 1..280: note = Testudinibacter aquarius
  REGION 1..280: note = tr|A0A4R3Y240|A0A4R3Y240_9PAST NADPH-dependent 7-cyano-7-deazaguanine reductase OS=Testudinibacter aquarius OX=1524974 GN=queF PE=3 SV=1
MATYHHSSLDQLTLGKQTDYHSEYDPRLLQAVPRSLNRDSLGISSQQPFNCGADIWTAYEISWLNAKGLPQVAIGDIYLNFQSKNLIESKSFKLYLNSFNQSRFDSLQQVESLIQQDLAVCAQGEVQVRLRPLDAYQNQTIDYFQGECIDYQDIEIDSYEFQPQLLQHCTTAEQVDEVLVSHLLKSNCLITNQPDWGSVQIEYQGAKINREALLRYLVSFRQHNEFHEQCVERIFCDLVHYAKPTKLKVYARYTRRGGLDINPYRANYPLELQNQRLARQ

SEQ ID NO: 50245 - protein, 166 aa, unidentified
  source 1..166: note = Tetzosporium hominis
  REGION 1..166: note = tr|A0A264W420|A0A264W420_9BACL NADPH-dependent 7-cyano-7-deazaguanine reductase OS=Tetzosporium hominis; OX = 2020506 GN=queF PE=3 SV=1
MSGRTHEQGLDELTLLGNQGTKYPQDYAPEVLEAVDSLHSNRDYFVKFNAPEFTSLCPITGQPDFATMYISYIPDQKIVESKSLKLYLFSFRNHGDFHEDCVNIIMNDLIKLLDPRYIEVWGKFTPRGGISIDPWCNYGKPGTKYEEMAFHRLMNHDLYPEKVDNR

SEQ ID NO: 50246 - protein, 165 aa, Thalassobacillus cyri
  REGION 1..165: note = tr|A0A1H3X2E9|A0A1H3X2E9_9BACI NADPH-dependent 7-cyano-7-deazaguanine reductase OS=Thalassobacillus cyri; OX = 571932 GN=queF PE=3 SV=1
MAGRKDEDLKDLSLLGSQGTNYSFDYDPAVLETFDNQHPNRDYFVKFNCPEFTTLCPKTGQPDFATIYISYIPDEKMVESKSLKLYLFSFRNHGDFHEDSVNIIMNDLIELMTPRYIEVWGKFTPRGGISIDPYCNYGKPGTKFEQMAEQRLFNHDLYPEKIDNR

SEQ ID NO: 50247 - protein, 155 aa, Thalassobaculum litoreum
  REGION 1..155: note = tr|A0A1G7Q233|A0A1G7Q233_9PROT NADPH-dependent 7-cyano-7-deazaguanine reductase OS=Thalassobaculum litoreum DSM 18839 OX=1123362 GN=queF PE=3 SV=1
MSDQTIYGGLNQLGGATALPASPEEAVLEKVENPHRGTDYVVRFTQPEFTSLCPVTGQPDFAFLIIDYVPTDWLVESKSLKLYLGSFRNHGAFHEGCTIDIAKRVTDLLAPKWLRIGGYWYPRGGMPIDVFYQTGEPPKGLWIPSQDVPVYRGRP

SEQ ID NO: 50248 - protein, 155 aa, unidentified
  source 1..155: note = Thalassobius activus
  REGION 1..155: note = tr|A0A0P1IRR4|A0A0P1IRR4_9RHOB NADPH-dependent 7-cyano-7-deazaguanine reductase OS=Thalassobius activus; OX = 1715691 GN=queF PE=3 SV=1
MSDKSIYENLTQLGSHTALPQTPEEAVMERVPNPQKGTDYAVRFTAPEFTSLCPLTSAPDFAHIVIDYVPGDWLVESKSLKLFLGSFRNHGAFHEDCSVTIGKRIEELLEPKWLRVGAYWYPRGGIPIDVFYQTGPELPNVWIPEQGVPTYRGRG

SEQ ID NO: 50249 - protein, 154 aa, Thalassococcus halodurans
  REGION 1..154: note = tr|A0A1H5TMI4|A0A1H5TMI4_9RHOB NADPH-dependent 7-cyano-7-deazaguanine reductase OS=Thalassococcus halodurans OX=373675 GN=queF PE=3 SV=1
MSDSIYSNLKQLGGATVLPTDPDQAELERVQNPQADVDYNVRFTAPEFTSLCPMTGQPDFAHLVIDYVPGDWLVESKSLKLYLGSFRNHGAFHEDCTVSIGRRLNDFLSPRWLRIGGYWYPRGGIPIDVFWQTGPQPESVWIPDQGVPPYRGRG

SEQ ID NO: 50250 - protein, 155 aa, Thalassococcus sp.
  REGION 1..155: note = tr|A0A4P6ML24|A0A4P6ML24_9RHOB NADPH-dependent 7-cyano-7-deazaguanine reductase OS=Thalassococcus sp. S3; OX = 2017482 GN=queF PE=3 SV=1
MMTQDIYQNLTQLGAPTDLPKSPEEAVLERVPNPQAGTGYAVRFVAPEFTSLCPLTGQPDFAHLVLDYVPGDWLVESKSLKLFLGSFRNHGAFHEDCTVSIGLRLVETLSPTWLRIGGYWYPRGGIPIDVFYQTGEPPRGIWIPDQGVQGYRGRG

SEQ ID NO: 50251 - protein, 278 aa, Thalassolituus oleivorans
  REGION 1..278: note = tr|A0A1L6KD16|A0A1L6KD16_9GAMM NADPH-dependent 7-cyano-7-deazaguanine reductase OS=Thalassolituus oleivorans OX=187493 GN=queF PE=3 SV=1
MASVHSDNNPLGQVSAYRDTYDPSVLFPIERDESWRAQGLDRNQFPFFGVDIWNGYEISWLNAKGKPLVCTAEFRIPATSRYLIESKSFKLYLNSFNQSRFDSVDAVKALMVADLSAAAGVAEGTFVDVIFHGFDTQFPSAPEAKCLDDIDIEVFSYELDPEFLRASGDEIFDGWLCSHLLKSNCPVTGQPDWGSIFVYYRGSKIDEAGLLQYLVSLRQHQDFHEQCVERTFRDISARCQPEALTVYARYVRRGGLDINPFRSSMTDAKAENFRLFRQ

SEQ ID NO: 50252 - protein, 278 aa, Thalassolituus oleivorans
  REGION 1..278: note = tr|M5DSD7|M5DSD7_9GAMM NADPH-dependent 7-cyano-7-deazaguanine reductase OS=Thalassolituus oleivorans MIL-1 OX=1298593 GN=queF PE=3 SV=1
MASVHSDNNPLGQVSAYRDTYDPSVLFPIERDESWRAQGLDRNQFPFFGVDIWNGYEISWLNAKGKPLVCTAEFRIPATSRYLIESKSFKLYLNSFNQSRFDSVDAVRALMVADLSAAAGVAEGTFVDVIFHGFDTQFPLAPEAKCLDDIDIEVSSYELDPEFLRANGDEIFDGWLCSHLLKSNCPVTGQPDWGSIFVYYRGSKIDEAGLLQYLVSLRQHQDFHEQCVERTFRDISARCQPEALTVYARYVRRGGLDINPFRSSMTDAKAENFRLFRQ

SEQ ID NO: 50253 - protein, 273 aa, Thalassolituus sp.
  REGION 1..273: note = tr|A0A558NM57|A0A558NM57_9GAMM NADPH-dependent 7-cyano-7-deazaguanine reductase OS=Thalassolituus sp. C2-1 OX=2597518 GN=queF PE=3 SV=1
MASVTSEHNPLGKVSAYKDEYDASLLFPIEREESWRAQGLDRHEVPFYGVDIWNGYEISWLNSKGKPVVCLAEFRIPATSRFLVESKSFKLYLNSFNQTRFDDAEQARLRMATDLSAAAQGDVQVIFHAVDADFPRPPVAHCIDDLDIEVNSYALDASLLKTTDGQFEGWLCSHLLKSNCPVTGQPDWGTLYIYYRGQKIDEAGLLAYIVSLRQHQDFHEQCAERTYRDISLACKPESLTVYARYVRRGGLDINPFRTSEAVFSAENFRLVRQ

SEQ ID NO: 50254 - protein, 288 aa, Thalassomonas actiniarum
  REGION 1..288: note = tr|A0A0D8D3K5|A0A0D8D3K5_9GAMM NADPH-dependent 7-cyano-7-deazaguanine reductase OS=Thalassomonas actiniarum OX=485447 GN=queF PE=3 SV=1
MSYFMANYQNSDALNNLTLGKTTAYVAQYTPDLLQGVPRSLNRNDLALDQNNLPFQGEDLWYGYELSWLNSKGKPVVAVAEFRFPCSSENIIESKSFKLYLNSFNQTRFDSRENVQLALIEDLSRVAKADVEVALFNVDDCPPLAIAPIDAVCIDDEDITVDHYDFDPKLLQRAQQHGSDEIKQQALVSHLLKSNCLITNQPDWASIFIEYRGREICHAALLRYLISFRQHNEFHEQCVERIFCDLKQYCQLESLTVYARYTRRGGLDINPYRSTSEKSAPKIRTLRQ

SEQ ID NO: 50255 - protein, 282 aa, Thalassomonas sp.
  REGION 1..282: note = tr|A0A553FIJ7|A0A553FIJ7_9GAMM NADPH-dependent 7-cyano-7-deazaguanine reductase OS=Thalassomonas sp. M1454 OX=2594477 GN=queF PE=3 SV=1
MTKYQNADELKSLTLGKSTEYASKYSPQLLQGVPRALNRDDLNLKADALPFFGEDVWYGYELSWLEPNGKPVVAVAEFRFCCSSVNLIESKSFKLYLNSFNQSHFSNMDEVSAILSKDLEQVSGKPVQVTLYKVDQCPALAIAPITAQCIDDIDLTIDSYQFDRSILENSTSNDEIVTQYLVSHLLKSNCLITNQPDWGSVYINYTGPKINQEKLLRYLISFRQHNEFHEQCVERIYTDLLEFCHCSSLSVFARYTRRGGLDINPFRSSQAESAPQSRTLRQ

SEQ ID NO: 50256 - protein, 284 aa, Thalassomonas viridans
  REGION 1..284: note = tr|A0A0D8DAZ2|A0A0D8DAZ2_9GAMM NADPH-dependent 7-cyano-7-deazaguanine reductase OS=Thalassomonas viridans; OX = 137584 GN=queF PE=3 SV=1
MANYQNSDALNNLTLGKTTSYVAQYTPDLLQGVPRSLNRNDLALDQANLPFYGEDLWYGYELSWLNSKGKPVVAVAEFRFPCSSENIIESKSFKLYLNSFNQTRFDSRESVQKALIEDLSRVANGDVEVALFDVDDCPPLAIAPITAACIDDEDISVDDYDFAPESLKHAQQGSGDEIREHALVSHLLKSNCLITNQPDWASIFIEYTGREISRAALLRYLISFRQHNEFHEQCVERIFCDLQQHCQLQALTVYARYTRRGGLDINPYRSTTDKKAPRIRTLRQ

SEQ ID NO: 50257 - protein, 155 aa, unidentified
  source 1..155: note = Thalassospira alkalitolerans
  REGION 1..155: note = tr|A0A1Y2LHQ7|A0A1Y2LHQ7_9PROT NADPH-dependent 7-cyano-7-deazaguanine reductase OS=Thalassospira alkalitolerans OX=1293890 GN=queF PE=3 SV=1
MADQTIYDNLTMLGGATEQPASPEEAVLERVQNPQAGTDYCVRFVAPEFTSLCPITGQPDFAHLVIDYVPGDWLVESKSLKLFLTSFRNHGSFHEDCTVKVGKRIAETIDPKWLRIGGYWYPRGGIPIDVFYQTGPAPDGVWIPDQGVAPYRGRG

SEQ ID NO: 50258 - protein, 155 aa, unidentified
  source 1..155: note = Thalassospira lohafexi
  REGION 1..155: note = tr|A0A2N3LC30|A0A2N3LC30_9PROT NADPH-dependent 7-cyano-7-deazaguanine reductase OS=Thalassospira lohafexi; OX = 744227 GN=queF PE=3 SV=1
MADQTIYDNLTMLGSDTAQPASPDEAVLERVANPQAGTDYCVRFVAPEFTSLCPMTGQPDFAHLVIDYIPGDWLVESKSLKLFLTSFRNHGSFHEDCTIKVAKRIVETLDPKWLRIGGYWYPRGGIPIDVFYQTGAAPEGVWIPDQGVAPYRGRG

SEQ ID NO: 50259 - protein, 155 aa, Thalassospira lucentensis
  REGION 1..155: note = tr|A0A367V634|A0A367V634_9PROT NADPH-dependent 7-cyano-7-deazaguanine reductase OS=Thalassospira lucentensis MCCC 1A00383 = DSM 14000 OX=1123365 GN=queF; PE = 3 SV=1
MADQTIYDNLTMLGSDTAQPASPDEAVLERVANPQAGTDYCVRFVAPEFTSLCPMTGQPDFAHLVIDYIPGDWLVESKSLKLFLTSFRNHGSFHEDCTIKVAKRIVETLDPKWLRIGGYWYPRGGIPIDVFYQTGAEPEGVWIPDQGVAPYRGRG

SEQ ID NO: 50260 - protein, 155 aa, Thalassospira lucentensis; identical to SEQ ID NO: 50258
  REGION 1..155: note = tr|A0A358HR82|A0A358HR82_9PROT NADPH-dependent 7-cyano-7-deazaguanine reductase OS=Thalassospira lucentensis OX=168935 GN=queF PE=3 SV=1

SEQ ID NO: 50261 - protein, 155 aa, unidentified
  source 1..155: note = Thalassospira marina
  REGION 1..155: note = tr|A0A2N3KWF7|A0A2N3KWF7_9PROT NADPH-dependent 7-cyano-7-deazaguanine reductase OS=Thalassospira marina; OX = 2048283 GN=queF PE=3 SV=1
MADESIYQNLTMLGGDTKQPASPEEAVLERVQNPQAGTDYCVRFVAPEFTSLCPITGQPDFAHLVIDYVPADWLVESKSLKLFLTSFRNHGSFHEDCTIKVGKRIVETLDPKWLRIGGYWYPRGGIPIDVFYQTGPAPEGVWIPDQGVAPYRGRG

SEQ ID NO: 50262 - protein, 155 aa, unidentified
  source 1..155: note = Thalassospira mesophila
  REGION 1..155: note = tr|A0A1Y2L1Q8|A0A1Y2L1Q8_9PROT NADPH-dependent 7-cyano-7-deazaguanine reductase OS=Thalassospira mesophila OX=1293891 GN=queF PE=3 SV=1
MSDQSIYQNLTMLGGDTKQPESPEEAVLEKVKNPQEGTDYCVRFVAPEFTSLCPITGQPDFAHIVIDYIPDGWLVESKSLKLFLTSFRNHGAFHEDCTVSIGKRIAETLNPKWLRIGGYWYPRGGIPIDVFYQTGPAPEGVWIPDQGVAPYRGRG

SEQ ID NO: 50263 - protein, 155 aa, unidentified
  source 1..155: note = Thalassospira permensis
  REGION 1..155: note = tr|A0A074J6A5|A0A074J6A5_9PROT NADPH-dependent 7-cyano-7-deazaguanine reductase OS=Thalassospira permensis NBRC 106175 OX=1353532 GN=queF PE=3 SV=1
MADQTIYDNLTMLGGTTEQPASPDEAVLERVQNPQAGTDYCVRFVAPEFTSLCPITGQPDFAHLVIDYVPGDWLVESKSLKLFLTSFRNHGSFHEDCTVKVGKRIADMIDPKWLRIGGYWYPRGGIPIDVFYQTGPAPDGVWIPDQGVAPYRGRG

SEQ ID NO: 50264 - protein, 155 aa, unidentified
  source 1..155: note = Thalassospira povalilytica
  REGION 1..155: note = tr|A0A2N3KQ57|A0A2N3KQ57_9PROT NADPH-dependent 7-cyano-7-deazaguanine reductase OS=Thalassospira povalilytica OX=732237 GN=queF PE=3 SV=1
MADQTIYDNLTMLGGDTVQPASPDEAVLERVQNPQAGTDYCVRFVAPEFTSLCPITGQPDFAHLVIDYVPGDWLVESKSLKLFLTSFRNHGSFHEDCTIKVGKRIVETLDPKWLRIGGYWYPRGGIPIDVFYQTGAAPEGVWIPEQGVAPYRGRG

SEQ ID NO: 50265 - protein, 155 aa, Thalassospira profundimaris; identical to SEQ ID NO: 50264
  REGION 1..155: note = tr|A0A367VC24|A0A367VC24_9PROT NADPH-dependent 7-cyano-7-deazaguanine reductase OS=Thalassospira profundimaris OX=502049 GN=queF PE=3 SV=1

SEQ ID NO: 50266 - protein, 155 aa, Thalassospira profundimaris
  REGION 1..155: note = tr|K2LKH1|K2LKH1_9PROT NADPH-dependent 7-cyano-7-deazaguanine reductase OS=Thalassospira profundimaris WP0211 OX=1177928 GN=queF PE=3 SV=1
MADQTIYDNLTMLGGDTKQPASPDEAVLERVQNPQAGTDYCVRFVAPEFTSLCPITGQPDFAHLVIDYVPGDWLVESKSLKLFLTSFRNHGSFHEDCTIKVGKRIVETLDPKWLRIGGYWYPRGGIPIDVFYQTGPAPEGVWIPEQGVAPYRGRG

SEQ ID NO: 50267 - protein, 155 aa, Thalassospira sp.
  REGION 1..155: note = tr|A0A419X250|A0A419X250_9PROT NADPH-dependent 7-cyano-7-deazaguanine reductase OS=Thalassospira sp. DSM 26710 OX=2035225 GN=queF PE=3 SV=1
MADQTIYDNLTMLGGDTQQPASPDEAVLERVQNPQAGTDYCVRFVAPEFTSLCPITGQPDFAHLVIDYVPGDWLVESKSLKLFLTSFRNHGSFHEDCTIKVGKRIVETLDPKWLRIGGYWYPRGGIPIDVFYQTGPAPEGVWIPEQGVAPYRGRG

SEQ ID NO: 50268 - protein, 155 aa, Thalassospira sp.
  REGION 1..155: note = tr|A0A1Q4URJ6|A0A1Q4URJ6_9PROT NADPH-dependent 7-cyano-7-deazaguanine reductase OS=Thalassospira sp. TSL5-1 OX=1544451 GN=queF PE=3 SV=1
MSDQSIYQNLTMLGGDTKQPASPEEAVLERVQNPQAGTDYCVRFVAPEFTSLCPITGQPDFAHLVIDYVPADWLVESKSLKLFLTSFRNHGSFHEDCTIKVGKRIVETLDPKWLRIGGYWYPRGGIPIDVFYQTGPAPEGVWIPDQGVAPYRGRG

SEQ ID NO: 50269 - protein, 155 aa, Thalassospira xiamenensis
  REGION 1..155: note = tr|A0A285TZI7|A0A285TZI7_9PROT NADPH-dependent 7-cyano-7-deazaguanine reductase OS=Thalassospira xiamenensis OX=220697 GN=queF PE=3 SV=1
MADQTIYDNLTMLGGATEQPASPDEAVLERVSNPQAGTDYCVRFVAPEFTSLCPITGQPDFAHLVIDYVPGDWLVESKSLKLFLTSFRNHGSFHEDCTVKVGKRIADMIDPKWLRIGGYWYPRGGIPIDVFYQTGPAPEGVWIPDQGVAPYRGRG

SEQ ID NO: 50270 - protein, 155 aa, Thalassospira xiamenensis
  REGION 1..155: note = tr|A0A367XGS1|A0A367XGS1_9PROT NADPH-dependent 7-cyano-7-deazaguanine reductase OS=Thalassospira xiamenensis OX=220697 GN=queF PE=3 SV=1
MADQTIYDNLTMLGGTTEQPASPDEAVLERVQNPQAGTDYCVRFVAPEFTSLCPITGQPDFAHLVIDYVPGDWLVESKSLKLFLTSFRNHGSFHEDCTVKVGKRIADMIDPKWLRIGGYWYPRGGIPIDVFYQTGPAPEGVWIPDQGVAPYRGRG

SEQ ID NO: 50271 - protein, 155 aa, Thalassospira xianhensis; identical to SEQ ID NO: 50270
  REGION 1..155: note = tr|A0A367U6W6|A0A367U6W6_9PROT NADPH-dependent 7-cyano-7-deazaguanine reductase OS=Thalassospira xianhensis MCCC 1A02616 OX=1177929 GN=queF PE=3 SV=1

SEQ ID NO: 50272 - protein, 283 aa, unidentified
  source 1..283: note = Thalassotalea agarivorans
  REGION 1..283: note = tr|A0A1I0FHZ0|A0A1I0FHZ0_THASX NADPH-dependent 7-cyano-7-deazaguanine reductase OS=Thalassotalea agarivorans OX=349064 GN=queF PE=3 SV=1
MSKYKDSQALKGLTLGKTTAYVSEYQPEILQAVPRSLNRDDIDVSNDNLPFKGEDVWYGYELSWLNAKGKPIVAVAEFRFPCESENIVESKSFKLYLNSFNQSRFDSWHAVKDALTKDLSEVAKLPVQVTLFAVDDCPALQIGQSTALCIDDLDINIDDFDFNPSLLEGAQAIDGEIRSVSLVSHLLKSNCLITNQPDWASLYIDYQGKEIDNEKLLAYIISFRQHNEFHEQCVERIFCDLQHYFELSSLTVYARYTRRGGLDINPYRSTADLSAPSLRTLRQ

SEQ ID NO: 50273 - protein, 283 aa, unidentified
  source 1..283: note = Thalassotalea euphylliae
  REGION 1..283: note = tr|A0A3E0TPK3|A0A3E0TPK3_9GAMM NADPH-dependent 7-cyano-7-deazaguanine reductase OS=Thalassotalea euphylliae OX=1655234 GN=queF PE=3 SV=1
MAKYQNSDLLEGLTLGKATDYSNQYDPSLLQGVPRSLNRDDLDIDQSKLPFFGEDIWYGYEVSWLNAKGKPVVAVAEFQFPCSSDNLIESKSFKLYLNSFNQTRFDSQAQVIEHMTNDLSKVAGAHATVRLFPVDNCPPLAIAATKATCIDELDVEIEQYQYQPTLLADATDKDKKQVTEQLVSHLLKSNCLITNQPDWASVYISYTGNEIDKEKLLKYLISFRDHNEFHEQCVERIYCDIQQFCNPKYLTVFARYTRRGGLDINPYRSSLPSNAPTSRTLRQ

SEQ ID NO: 50274 - protein, 283 aa, unidentified
  source 1..283: note = Thalassotalea euphylliae
  REGION 1..283: note = tr|A0A3E0UED7|A0A3E0UED7_9GAMM NADPH-dependent 7-cyano-7-deazaguanine reductase OS=Thalassotalea euphylliae OX=1655234 GN=queF PE=3 SV=1
MAKYQNSGLLEGLTLGKATDYSDQYDPSLLQGVPRSLNRDDLDIDQSNLPFFGEDIWYGYEVSWLNAKGKPVVAVAEFHFPCSSDNLIESKSFKLYLNSFNQTRFDSQAQVLEHMTNDLSKVAGAHATVRLFPVDNCPPLAIAATKATCIDELDVEIDQYQYQPTLLADATGKGKKQVTEQLVSHLLKSNCLITNQPDWASVYISYTGNEIDKEKLLKYLISFRDHNEFHEQCVERIYCDIQQFCNPKYLTVFARYTRRGGLDINPYRSSLPSNAPSSRSLRQ

SEQ ID NO: 50275 - protein, 283 aa, unidentified
  source 1..283: note = Thalassotalea sp.
  REGION 1..283: note = tr|A0A516HD74|A0A516HD74_9GAMM NADPH-dependent 7-cyano-7-deazaguanine reductase OS=Thalassotalea sp. PS06; OX = 2594005 GN=queF PE=3 SV=1
MSNYQNADELKALLLGKETEYKSDYDASLLQGVPRSLNRDSLAIDQVNLPFLGEDVWYGFELSWLNAKGLPQVAVAEFRFPCTSTNIVESKSFKLYLNSFNQTRFSSWDMVKEKLGQDLSLVCDGQAIVNLFDVEHCPALQIASQQSYQRIDDQDIEITNYQFDRELLEGAANKDEIVSEQLVSHLLKSNCLITNQPDWASLYIDYRGGKIDQQKLLRYLISFRQHNEFHEQCVERIFVDLMEFCQCQELTVYARYTRRGGLDINPYRSTNASPAPDLRTIRQ

SEQ ID NO: 50276 - protein, 280 aa, unidentified
  source 1..280: note = Thalassotalea sp.
  REGION 1..280: note = tr|A0A1Q6CIP1|A0A1Q6CIP1_9GAMM NADPH-dependent 7-cyano-7-deazaguanine reductase OS=Thalassotalea sp. PP2-459 OX=1742724 GN=queF PE=3 SV=1
MSQYKNANALEKLTLGKNTEYASQYNAALLQGVPRRLNRDSLSLDENTLPFMGEDVWYGYEISWLNAKGKPIVRVAEFSFPCTSENIIESKSFKLYLNSFNQTTFSSEQEVITAMKNDLSAVCGAQANVILFPVDKCPALEINTPNARCLDELDIEMHDYQLSSALLNTESDTVVSEVLVSHLLKSNCLITNQPDWASLFISYKGKKINHSALLKYIISFREHNEFHEQCVERIFCDLMTICQPEALTVYARYTRRGGLDINPFRSTHESVAPKTRTLRQ

SEQ ID NO: 50277 - protein, 281 aa, Thauera aminoaromatica
  REGION 1..281: note = tr|N6YN03|N6YN03_9RHOO NADPH-dependent 7-cyano-7-deazaguanine reductase OS=Thauera aminoaromatica S2 OX=1234381 GN=queF PE=3 SV=1
MNTDTPRRHGAESSPLGQAVAYRDTYAPELLFPISRQLKRDELGLRADMLPFCGEDLWNAYELSWLDARGKPVVALGEFRVPAASPRLIESKSLKLYLNSFNQQRCASVEEVRATIARDLSAAAGAAVAVVLRPLQERPGRSFGYPEGVCIDALEIDIGRYQPCAETLRAAGPEVEETLYSHLLKSNCLVTGQPDWGTLVVRYRGAAIDREGLLRYVVSFRGHNEFHEQCVERVFCDLMARCKPQELAVWARYTRRGGLDINPFRASRAGLRADEAMEVRQ

SEQ ID NO: 50278 - protein, 281 aa, Thauera aminoaromatica; identical to SEQ ID NO: 50277
  REGION 1..281: note = tr|A0A5C7T5W2|A0A5C7T5W2_9RHOO NADPH-dependent 7-cyano-7-deazaguanine reductase OS=Thauera aminoaromatica; OX = 164330 GN=queF PE=3 SV=1

SEQ ID NO: 50279 - protein, 281 aa, Thauera aromatica
  REGION 1..281: note = tr|A0A2R4BJH8|A0A2R4BJH8_THAAR NADPH-dependent 7-cyano-7-deazaguanine reductase OS=Thauera aromatica K172; OX = 44139 GN=queF PE=3 SV=1
MSRPRTPRHGAETSLLGQAVAYRDTYAPELLFPIERQLKRDELGLRAGALPFVGEDLWNAYELSWLDARGKPVVALGEFRVPAASPRLVESKSLKLYLNSFNQQRFGTVEEPRARIARDLSAAAGAEVGVAVTPLALRPQRASGYPQGVCLDGLEIDIDTYQPEPGFLRAGGAERSETLYSHLLKSNCLVTGQPDWGMVVVRYTGAAIDREGLLRYIVSFRAHNEFHEQCVERMFCDLLARCRPRELAVWARYTRRGGLDINPFRASHAGLRPDEAMEVRQ

SEQ ID NO: 50280 - protein, 281 aa, Thauera chlorobenzoica
  REGION 1..281: note = tr|A0A1H5W1X4|A0A1H5W1X4_9RHOO NADPH-dependent 7-cyano-7-deazaguanine reductase OS=Thauera chlorobenzoica; OX = 96773 GN=queF PE=3 SV=1
MSRPRSPRHGAETSLLGQAVAYRDTYAPELLFPIERQLKRDELGLRPAALPFVGEDLWNAYELSWLDARGKPVVALGEFRVPAASPRLVESKSLKLYLNSFNQQRFAATEDVRTRIVRDLSAAAGAEVGVAVTPLALRPQRASGYPQGVCLDGLEIDIDTYQPEPGFLRAAGAERSETLYSHLLKSNCLVTGQPDWGMVVVRYTGAAIDREGLLRYIVSFRAHNEFHEQCVERMFCDLLARCRPRELAVWARYTRRGGVDINPFRASHAGLRPDEAMEVRQ

SEQ ID NO: 50281 - protein, 281 aa, unidentified
  source 1..281: note = Thauera humireducens
  REGION 1..281: note = tr|A0A127K720|A0A127K720_9RHOO NADPH-dependent 7-cyano-7-deazaguanine reductase OS=Thauera humireducens; OX = 1134435 GN=queF PE=3 SV=1
MSTDTPRLHGAETSPLGKPVAYRDTYAPELLFPIERQLKRDELGLKPEALPFVGEDLWNAYELSWLDPRGKPVVALARFRVPASSPRLIESKSLKLYLNAFNQQRCADAAEVQATIARDLSAAAGAEVGVEVEPLALRPQRAFGYPDGVCLDTLDIAIDTYQPAPELLTAGGTEVSETLYSHLLKSNCLVTGQPDWGMLVVRYSGPAIAREGLLRYIVSFREHNEFHEQCVERVFCDVLARCRPRELAVWARYTRRGGLDINPFRASRPGLLADERMEIRQ

SEQ ID NO: 50282 - protein, 281 aa, Thauera linaloolentis
  REGION 1..281: note = tr|N6ZB24|N6ZB24_9RHOO NADPH-dependent 7-cyano-7-deazaguanine reductase OS=Thauera linaloolentis 47Lol = DSM 12138 OX=1123367 GN=queF PE=3 SV=1
MSSTPARPHGAESSPLGRPVAYRDTYAPELLFPIERQLKRDELGLRPGALPFVGEDLWNAYELSWLDPRGKPMVALARFRVPASSPRLIESKSLKLYLNAFNQQRCAAADEVQATIARDLSAAAGAGVEVDIEPLALRPQRISAYPDGVCLDGLEIDIDRYQPDPALLRAGGGEVSETLYSHLLKSNCLVTGQPDWGMLVVRYTGPAIEREGLLRYIVSFREHNEFHEQCVERVFCDLTARCKPRELAVWARYTRRGGLDINPFRASREGLEADAGMEVRQ

SEQ ID NO: 50283 - protein, 281 aa, Thauera phenylacetica
  REGION 1..281: note = tr|N6YP61|N6YP61_9RHOO NADPH-dependent 7-cyano-7-deazaguanine reductase OS=Thauera phenylacetica B4P OX=1234382 GN=queF PE=3 SV=1
MNPDTPRRHGAEESLLGQAVAYRDTYAPELLFPIARQLKRDELGLHADALPFVGEDLWNAYELSWLDARGKPVVALGEFRVPAASPRLIESKSLKLYLNSFNQQRCASVEEVRATIARDLSAAAGAAVAVVLRPLHERPGRRFGYPEGVCLDALEIDIERYQPCPETLRAEGPEVEETLYSHLLKSNCLVTGQPDWGTLVVRYRGAAIDREGLLRYVVSFRAHNEFHEQCVERVFCDLMARCKPQELAVWARYTRRGGLDINPFRASRAGLRADEAMEVRQ

SEQ ID NO: 50284 - protein, 281 aa, unidentified
  source 1..281: note = Thauera propionica
  REGION 1..281: note = tr|A0A235F332|A0A235F332_9RHOO NADPH-dependent 7-cyano-7-deazaguanine reductase OS=Thauera propionica; OX = 2019431 GN=queF PE=3 SV=1
MSTDTPRLHGAESSPLGKPVAYRDTYAPELLFPIERQLKRDELGLKPGALPFVGEDLWNAYELSWLDPRGKPVVALARFRVPASSPRLIESKSLKLYLNAFNQQRCADAAEVQVMIARDLSAAAGAEVGVEVEPLALRPQRVFGYPDGVCLDTLDVAIDTYQPAPELLTAGGAEVSETLYSHLLKSNCLVTGQPDWGMVVVRYSGKAISREGLLRYIVSFREHNEFHEQCVERVFCDVLERCQPRELAVWARYTRRGGLDINPFRASRPGLIADERMEVRQ

SEQ ID NO: 50285 - protein, 281 aa, Thauera sp.
  REGION 1..281: note = tr|A0A0C3N175|A0A0C3N175_9RHOO NADPH-dependent 7-cyano-7-deazaguanine reductase OS=Thauera sp. SWB20; OX = 1572758 GN=queF PE=3 SV=1
MNTDTPRRHGAESSPLGQAVAYRDTYAPELLFPISRQLKRDELGLRADMLPFCGEDLWNAYELSWLDARGKPVVALGEFRVPAASPRLIESKSLKLYLNSFNQQRCASVEEVRATIARDLSAAAGAAVAVVLRPLQERPGRSFGYPEGVCIDALEIDIGRYQPCPETLRAAGPEVEETLYSHLLKSNCLVTGQPDWGTLVVRYRGAAIDREGLLRYVVSFRGHNEFHEQCVERVFCDLMARCKPQELAVWARYTRRGGLDINPFRASRAGLRADEAMEVRQ

SEQ ID NO: 50286 - protein, 283 aa, Thauera sp.
  REGION 1..283: note = tr|A0A290ZTJ8|A0A290ZTJ8_9RHOO NADPH-dependent 7-cyano-7-deazaguanine reductase OS=Thauera sp. K11; OX = 2005884 GN=queF PE=3 SV=1
MNTIPDRPHGAEASPLGRAVAYRDTYAPELLFPIDRQLKRAELGLQAGALPFVGEDLWNAYELSWLDPRGKPVVALGRFRVPASTPRLVESKSLKLYLNSFNQQRFASADGVRDAIARDLSAAAGGTVAVDVVPLALRPQRLAAYPEGVCLDTLDIDIDTYQPEPAFLRVADDGGEVGETLYSHLLKSNCLVTGQPDWGMLVVRYRGRPIDRAGLLRYIVSFRGHNEFHEQCVERVFCDILARCRLAELAVWARYTRRGGLDINPFRATHAGLRAGEEMEVRQ

SEQ ID NO: 50287 - protein, 281 aa, Thauera terpenica
  REGION 1..281: note = tr|T0B1M3|T0B1M3_9RHOO NADPH-dependent 7-cyano-7-deazaguanine reductase OS=Thauera terpenica 58Eu; OX = 1348657 GN=queF PE=3 SV=1
MSTDTPRLHGAESSPLGRPAAYRDTYAPDLLFPIERQLKRDELGLKADDLPFIGEDLWNAYELSWLDLRGKPVVALAQFRVPANSPRLIESKSLKLYLNAYNQQRCADVGTVQAMIACDLVAAAGAAVAVRITPLTQRPQRSSSYPQGFCLDQLELDIDTYEPAPDLLHAHGSEVSETLYSHLLKSNCLVTGQPDWGMLVVRYTGPAMDRAGLLRYLVSFRTHNEFHEQCVERVFCDILARCRPRELAVWARYTRRGGLDINPFRTSHAGLQADEGMEVRQ

SEQ ID NO: 50288 - protein, 135 aa, Thermacetogenium phaeum
  REGION 1..135: note = tr|A0A117LAU1|A0A117LAU1_9THEO NADPH-dependent 7-cyano-7-deazaguanine reductase OS=Thermacetogenium phaeum OX=85874 GN=queF PE=3 SV=1
MEQRVEDKYARRWDVDSYDTIATEVLEAIPFEYPGSKTDVVYTDPEFTSVCPWTGLPDFGTLTITYVPGDKLVELKSLKYYLNSFRNVGILQEHVVNRVKEDLVKLLNPVSLTVEAEFRPRGGISTYVRADYRRA

SEQ ID NO: 50289 - protein, 135 aa, Thermacetogenium phaeum; identical to SEQ ID NO: 50288
  REGION 1..135: note = tr|K4LJ92|K4LJ92_THEPS NADPH-dependent 7-cyano-7-deazaguanine reductase OS=Thermacetogenium phaeum (strain ATCC BAA-254 / DSM 12270 / PB) OX=1089553; GN = queF PE=3 SV= 1

SEQ ID NO: 50290 - protein, 139 aa, Thermaerobacter marianensis
  REGION 1..139: note = tr|E6SJX2|E6SJX2_THEM7 NADPH-dependent 7-cyano-7-deazaguanine reductase OS=Thermaerobacter marianensis (strain ATCC 700841 / DSM 12885 / JCM 10246 / 7p75a) OX=644966GN=queF PE=3 SV=1
MTGTEATGRLPAYGPLPRPRSLAEARAILKQERFPAPRVDLVEFEAYEFTAVCPRTGQPDFGKVRITYVPRQWCIESKSLKFYLWAYRDEGAFCETLAAQIADDIVRAVEPQYVEVVVEQNPRGGIGLKATARRGRPPA

SEQ ID NO: 50291 - protein, 126 aa, Thermanaeromonas toyohensis
  REGION 1..126: note = tr|A0A1W1W1B0|A0A1W1W1B0_9THEO NADPH-dependent 7-cyano-7-deazaguanine reductase OS=Thermanaeromonas toyohensis ToBE OX=698762 GN=queF PE=3 SV=1
MMEFEALGKPVREPRKKLEVFPKPPHVEIVTLETDEVTSLCPVTGQPDFETVIVEYAPDKYCIESKSFKLYLWSFREEGIFCESLADTIAKDIYEACQPHWCKVTVIQKPRGGIKITASALYGERK

SEQ ID NO: 50292 - protein, 163 aa, Thermoactinomyces sp.
  REGION 1..163: note = tr|A0A151YXQ4|A0A151YXQ4_9BACL NADPH-dependent 7-cyano-7-deazaguanine reductase OS=Thermoactinomyces sp. AS95 OX=1811386 GN=queF PE=3 SV=1
MSDKSKEELSLKALGNDTTYHFEYNPGLLETFDNRHPGTDYFVKFNCPEFTSLCPITGQPDFATIYLSYVPDQKLVESKSLKLYLFSFRNHGDFHENCIVTIMKDLIEKLDPKYIEVWGKFLPRGGISIDPYVNYGKPGTRWEKIAEQRLALHDLYPEKVDNR

SEQ ID NO: 50293 - protein, 160 aa, Thermoactinomyces sp.
  REGION 1..160: note = tr|A0A1K1WAH0|A0A1K1WAH0_9BACL NADPH-dependent 7-cyano-7-deazaguanine reductase OS=Thermoactinomyces sp. DSM 45891 OX=1761907 GN=queF PE=3 SV=1
MAQHDLDLQLLGQKTNYHFEYNPDVLESFDNRHPDTDYFVKFNTPEFTSLCPITNQPDFATLYISYVPDQKLVESKSLKLYLFSFRNHGDFHENCIVVIMKDLVKLLDPKYIEVWGKFLPRGGVSIDPYANYGKPDTRWEAIAEQRLAQHDLYPETITNR

SEQ ID NO: 50294 - protein, 162 aa, Thermoactinomyces vulgaris; identical to SEQ ID NO: 46725
  REGION 1..162: note = tr|A0A0N0Y6W8|A0A0N0Y6W8_THEVU NADPH-dependent 7-cyano-7-deazaguanine reductase OS=Thermoactinomyces vulgaris OX=2026 GN=queF PE=3 SV=1

SEQ ID NO: 50295 - protein, 133 aa, Thermoanaerobacter brockii
  REGION 1..133: note = tr|E8UUC5|E8UUC5_THEBF NADPH-dependent 7-cyano-7-deazaguanine reductase OS=Thermoanaerobacter brockii subsp. finnii (strain ATCC 43586 / DSM 3389 / AKO-1) OX=509193GN=queF PE=3 SV=1
MTDKYKERRFDTYGYEKIDKEVLESIEYEYPEKNTIVEYITNEFSSVCPWTGLPDNAKLTIRYIPSKKLVELKSLKYYLTSYRNVGILQEHAINRILDDLVELLQPKFMEIIGEFQERGGIATRIVAKYEKEK

SEQ ID NO: 50296 - protein, 133 aa, Thermoanaerobacter ethanolicus; identical to SEQ ID NO: 50295
  REGION 1..133: note = tr|C7IQ13|C7IQ13_THEET NADPH-dependent 7-cyano-7-deazaguanine reductase OS=Thermoanaerobacter ethanolicus CCSD1 OX=589861 GN=queF PE=3 SV=1

SEQ ID NO: 50297 - protein, 133 aa, Thermoanaerobacter italicus
  REGION 1..133: note = tr|D3T844|D3T844_THEIA NADPH-dependent 7-cyano-7-deazaguanine reductase OS=Thermoanaerobacter italicus (strain DSM 9252 / Ab9) OX=580331 GN=queF PE=3; SV = 1
MTDKYKERRFDAYGYEKIDKEVLESIEYEYPEKNTIVEYITNEFSSVCPWTGLPDNAKLTIRYIPSKKLVELKSLKYYLTSYRNVGILQEHAINRILDDLVELLQPKFMEIIGEFQERGGIATRIVAKYEKEK

SEQ ID NO: 50298 - protein, 133 aa, Thermoanaerobacter kivui
  REGION 1..133: note = tr|A0A097AQN7|A0A097AQN7_THEKI NADPH-dependent 7-cyano-7-deazaguanine reductase OS=Thermoanaerobacter kivui OX=2325 GN=queF PE=3 SV=1
MTDKYKERRFDTYGYEKIDKEVLESIEYEYPEKNTIVEYITNEFSSVCPWTGLPDNAKLTIRYIPSKKLVELKSLKYYLTSYRNVGILQEHAINRILDDLVELLQPKFMEVIGEFQERGGIATRIVAKYEKEK

SEQ ID NO: 50299 - protein, 133 aa, Thermoanaerobacter mathranii; identical to SEQ ID NO: 50297
  REGION 1..133: note = tr|D7AN57|D7AN57_THEM3 NADPH-dependent 7-cyano-7-deazaguanine reductase OS=Thermoanaerobacter mathranii subsp. mathranii (strain DSM 11426 / CIP 108742 / A3) OX=5833 58 GN=queF PE=3 SV=1

SEQ ID NO: 50300 - protein, 133 aa, Thermoanaerobacter pseudethanolicus; identical to SEQ ID NO: 50295
  REGION 1..133: note = sp|B0KAC5|QUEF_THEP3 NADPH-dependent 7-cyano-7-deazaguanine reductase OS=Thermoanaerobacter pseudethanolicus (strain ATCC 33223 / 39E) OX=340099; GN = queF PE=3 SV=1

SEQ ID NO: 50301 - protein, 137 aa, Thermoanaerobacter siderophilus
  REGION 1..137: note = tr|I9AFD7|I9AFD7_9THEO NADPH-dependent 7-cyano-7-deazaguanine reductase OS=Thermoanaerobacter siderophilus SR4 OX=880478 GN=queF PE=3 SV=1
MTDKYKERRFDTYGYEKIDKEVLESIEYEYPEKNTIVEYITNEFSSVCPWTGLPDNAKLTIRYIPSKKLVELKSLKYYLTSYRNVGILQEHAINRILDDLVELLQPKFMEVIGEFQERGGIATRIVAKYEKEKSSRS

SEQ ID NO: 50302 - protein, 133 aa, Thermoanaerobacter sp.
  REGION 1..133: note = tr|A0A0B3BHU6|A0A0B3BHU6_9THEO NADPH-dependent 7-cyano-7-deazaguanine reductase OS=Thermoanaerobacter sp. YS13 OX=1511746 GN=queF PE=3 SV=1
MTDKYKERRFDTYGYEKIDKEVLESIEYEYPEKNTIVEYITNEFSSVCPWTGLPDNAKLTIKYIPFKKLVELKSLKYYLTSYRNVGILQEHAINRILDDLVELLQPKFMEVIGEFQERGGIATRIVAKYEKEK

SEQ ID NO: 50303 - protein, 133 aa, Thermoanaerobacter sp.; identical to SEQ ID NO: 50295
  REGION 1..133: note = sp|B0K421|QUEF_THEPX NADPH-dependent 7-cyano-7-deazaguanine reductase OS=Thermoanaerobacter sp. (strain X514) OX=399726 GN=queF PE=3 SV=1

SEQ ID NO: 50304 - protein, 133 aa, Thermoanaerobacter thermocopriae; identical to SEQ ID NO: 50295
  REGION 1..133: note = tr|A0A101D879|A0A101D879_9THEO NADPH-dependent 7-cyano-7-deazaguanine reductase OS=Thermoanaerobacter thermocopriae OX=29350 GN=queF PE=3 SV=1

SEQ ID NO: 50305 - protein, 137 aa, Thermoanaerobacter thermohydrosulfuricus
  REGION 1..137: note = tr|A0A1G7WH02|A0A1G7WH02_THETY NADPH-dependent 7-cyano-7-deazaguanine reductase OS=Thermoanaerobacter thermohydrosulfuricus OX=1516 GN=queF PE=3 SV=1
MTDKYKERRFDTYGYEKIDKEVLESIEYEYSEKNTIVEYITNEFSSVCPWTGLPDNAKLTIRYIPSKKLVELKSLKYYLTSYRNVGILQEHAINRILDDLVELLQPKFMEVIGEFQERGGIATRIVAKYEKEKSSRS

SEQ ID NO: 50306 - protein, 133 aa, Thermoanaerobacter thermohydrosulfuricus; identical to SEQ ID NO: 50298
  REGION 1..133: note = tr|M8DQ95|M8DQ95_THETY NADPH-dependent 7-cyano-7-deazaguanine reductase OS=Thermoanaerobacter thermohydrosulfuricus WC1 OX=1198630 GN=queF PE=3 SV=1

SEQ ID NO: 50307 - protein, 133 aa, Thermoanaerobacter uzonensis; identical to SEQ ID NO: 50302
  REGION 1..133: note = tr|A0A1M4Z5W9|A0A1M4Z5W9_9THEO NADPH-dependent 7-cyano-7-deazaguanine reductase OS=Thermoanaerobacter uzonensis DSM 18761 OX=1123369 GN=queF PE=3 SV=1

SEQ ID NO: 50308 - protein, 133 aa, Thermoanaerobacter wiegelii
  REGION 1..133: note = tr|G2MR17|G2MR17_9THEO NADPH-dependent 7-cyano-7-deazaguanine reductase OS=Thermoanaerobacter wiegelii Rt8.B1 OX=697303 GN=queF PE=3 SV=1
MTDKYKERRFDTYSYEKIDKEVLESIEYEYPEKNTIVEYITNEFFSVCPWTGLPDNAKLTIRYIPSKKLVELKSLKYYLTSYRNVGILQEHAINRILDDLVELLQPKFMEVIGEFQERGGIATRIVAKYEKEK

SEQ ID NO: 50309 - protein, 131 aa, unidentified
  source 1..131: note = Thermoanaerobacteraceae bacterium
  REGION 1..131: note = tr|A0A3A9JVL0|A0A3A9JVL0_9THEO NADPH-dependent 7-cyano-7-deazaguanine reductase; OS = Thermoanaerobacteraceae bacterium SP2 OX=2292448; GN = queF PE=3 SV=1
MDKYSEKRFDIYGYDKIDTDVLETMEYEYPEKDTIIEYHTEEFSSVCPWTGLPDNAKLTIRYIPGNKLVELKSLKYYLTSYRNIGILQEHAVNRILDDLVKLLAPKYMEIIGDFVARGGISTKVMAKYNGS

SEQ ID NO: 50310 - protein, 62 aa, unidentified
  source 1..62: note = Thermoanaerobacteraceae bacterium
  REGION 1..62: note = tr|A0A3A9KA60|A0A3A9KA60_9THEO Uncharacterized protein OS=Thermoanaerobacteraceae bacterium SP2; OX = 2292448 GN=DXT63_13265 PE=4 SV=1
MEYNTEEFSSVCPWTGLPDNAKLTINYIPDKKLVELKSLKYYLTSYRNVGILEEHAINTNID

SEQ ID NO: 50311 - protein, 131 aa, unidentified; identical to SEQ ID NO: 50309
  source 1..131: note = Thermoanaerobacterales bacterium
  REGION 1..131: note = tr|A0A3G2R7F8|A0A3G2R7F8_9FIRM NADPH-dependent 7-cyano-7-deazaguanine reductase OS=Thermoanaerobacterales bacterium SK-G1 OX=2316383 GN=queF PE=3 SV=1

SEQ ID NO: 50312 - protein, 62 aa, unidentified; identical to SEQ ID NO: 50310
  source 1..62: note = Thermoanaerobacterales bacterium
  REGION 1..62: note = tr|A0A3G2R7R8|A0A3G2R7R8_9FIRM Uncharacterized protein OS=Thermoanaerobacterales bacterium SK-G1; OX = 2316383 GN=D2962_14065 PE=4 SV=1

SEQ ID NO: 50313 - protein, 164 aa, Thermoanaerobacterium aotearoense
  REGION 1..164: note = tr|W9ECZ1|W9ECZ1_9FIRM NADPH-dependent 7-cyano-7-deazaguanine reductase OS=Thermoanaerobacterium aotearoense SCUT27 OX=1421016 GN=queF PE=3 SV=1
MPRDEKELNGLSQLGNKETKYIFDYDPSLLETFPNKHQENDYFVKFNCPEFTSLCPKTGQPDFATIYISYVPDKLMVESKSLKLYLFSFRNHGDFHEDCVNIIMKDLIKLLDPKYIEVWGKFTPRGGISIDPYCNYGKPGTKWEDVAQKRLFYHDMYPEKVDNR

SEQ ID NO: 50314 - protein, 164 aa, Thermoanaerobacterium saccharolyticum; identical to SEQ ID NO: 50313
  REGION 1..164: note = tr|I3VYD9|I3VYD9_THESW NADPH-dependent 7-cyano-7-deazaguanine reductase OS=Thermoanaerobacterium saccharolyticum (strain DSM 8691 / JW/SL-YS485) OX=1094508; GN = queF P E=3 SV=1

SEQ ID NO: 50315 - protein, 165 aa, Thermoanaerobacterium sp.
  REGION 1..165: note = tr|A0A285BHC9|A0A285BHC9_9FIRM NADPH-dependent 7-cyano-7-deazaguanine reductase OS=Thermoanaerobacterium sp. RBIITD OX=1550240 GN=queF PE=3 SV=1
MSERNRKELDELSLLGRKVAKYNYDYDPSVLETFINKHQENDYFVKFNCPEFTSLCPKTGQPDFATIYISYVPDKLMVESKSLKLYLFSFRNHGDFHEDCVNIIMKDLIKLLDPKYIEVWGKFTPRGGISIDPYCNYGKPGTKWENVAEKRLFYHDLYPEKIDNR

SEQ ID NO: 50316 - protein, 164 aa, Thermoanaerobacterium sp.
  REGION 1..164: note = tr|A0A1X2G1C8|A0A1X2G1C8_9FIRM NADPH-dependent 7-cyano-7-deazaguanine reductase OS=Thermoanaerobacterium sp. PSU-2 OX=1930849 GN=queF PE=3 SV=1
MSRDEKELNGLSQLGNKETKYIFDYDPSLLETFPNKHQENDYFVKFNCPEFTSLCPKTGQPDFATIYISYVPDKLMVESKSLKLYLFSFRNHGDFHEDCVNIIMKDLIKLLDPKYIEVWGKFTPRGGISIDPYCNYGRPGTKWEDVAQKRLFYHDMYPEKVDNR

SEQ ID NO: 50317 - protein, 165 aa, Thermoanaerobacterium thermosaccharolyticum
  REGION 1..165: note = tr|A0A231VL60|A0A231VL60_THETR NADPH-dependent 7-cyano-7-deazaguanine reductase OS=Thermoanaerobacterium thermosaccharolyticum OX=1517 GN=queF PE=3 SV=1
MSERDKKELDELSLLGKKDTKYIFDYDPSLLETFPNKHQENDYFVKFNCPEFTSLCPKTGQPDFATIYISYVPDKLMVESKSLKLYLFSFRNHGDFHEDCVNIIMKDLIKLLDPKYIEVWGKFTPRGGISIDPYCNYGRPGTKWADVAEKRLFYHDMYPEKVDNR

SEQ ID NO: 50318 - protein, 165 aa, Thermoanaerobacterium thermosaccharolyticum
  REGION 1..165: note = tr|L0ILE7|L0ILE7_THETR NADPH-dependent 7-cyano-7-deazaguanine reductase OS=Thermoanaerobacterium thermosaccharolyticum M0795 OX=698948 GN=queF PE=3 SV=1
MSERNKKELDELSLLGKKDTKYIFDYDPSLLETFPNKHQENDYFVKFNCPEFTSLCPKTGQPDFATIYISYVPDKLMVESKSLKLYLFSFRNHGDFHEDCVNIIMKDLIKLLDPKYIEVWGKFTPRGGISIDPYCNYGRPGTKWADVAEKRLFYHDMYPEKVDNR

SEQ ID NO: 50319 - protein, 164 aa, Thermoanaerobacterium xylanolyticum
  REGION 1..164: note = tr|F6BIR9|F6BIR9_THEXL NADPH-dependent 7-cyano-7-deazaguanine reductase OS=Thermoanaerobacterium xylanolyticum (strain ATCC 49914 / DSM 7097 / LX-11); OX = 858215 GN=qu eF PE=3 SV=1
MPRDEKELNGLSQLGNKETKYIFDYDPSLLETFPNKHQENDYFVKFNCPEFTSLCPKTGQPDFATIYISYVPDKLMVESKSLKLYLFSFRNHGDFHEDCVNIIMKDLIKLLDPKYIEVWGKFTPRGGISIDPYCNYGRPGTKWEDVAQKRLFYHDMYPEKVDNR

SEQ ID NO: 50320 - protein, 135 aa, unidentified; identical to SEQ ID NO: 44436
  source 1..135: note = Thermoanaerobaculum aquaticum
  REGION 1..135: note = tr|A0A062XRJ6|A0A062XRJ6_9BACT NADPH-dependent 7-cyano-7-deazaguanine reductase OS=Thermoanaerobaculum aquaticum OX=1312852 GN=queF PE=3 SV=1

SEQ ID NO: 50321 - protein, 165 aa, Thermobacillus composti
  REGION 1..165: note = tr|L0EL03|L0EL03_THECK NADPH-dependent 7-cyano-7-deazaguanine reductase OS=Thermobacillus composti (strain DSM 18247 / JCM 13945 / KWC4) OX=717605; GN = queF PE=3 SV=1
MAGRGPEDLQDLTLLGSRNTRYAYTYDPKLLETFENRHPGRDYFVKFNCPEFTSLCPMTGQPDFATIYISYIPDKRLVESKSLKLYLFSFRNHGDFHEDCVNIIMNDLIEAMDPKYIEVWGKFKPRGGISIDPYCNWGKPGTKYEAMAEHRLLHHDLYPEKVDNR

SEQ ID NO: 50322 - protein, 165 aa, Thermobacillus sp.
  REGION 1..165: note = tr|A0A3E0QYS6|A0A3E0QYS6_9BACL NADPH-dependent 7-cyano-7-deazaguanine reductase OS=Thermobacillus sp.; OX = 2108467 GN=queF PE=3 SV=1
MAGRGHEDLQDLTLLGSRNTRYAYTYDPKLLETFENKHPGRDYFVKFNCPEFTSLCPMTGQPDFATIYISYIPDKRLVESKSLKLYLFSFRNHGDFHEDCVNIIMNDLIEAMDPKYIEVWGKFTPRGGISIDPYCNWGKPGTKYEAMAEHRLLHHDLYPEKVDNR

SEQ ID NO: 50323 - protein, 125 aa, Thermocrinis albus
  REGION 1..125: note = tr|D3SMA4|D3SMA4_THEAH NADPH-dependent 7-cyano-7-deazaguanine reductase OS=Thermocrinis albus (strain DSM 14484 / JCM 11386 / HI 11/12) OX=638303; GN = queF PE=3 SV=1
MEKKYGELAIEQAQLEPWENPYPDRDYMIEITFPEFSCLCPRSGYPDYATIKIRYIPDKYIVELRSLKLWLNKFRNRYISHEAATNEIYNALYSLLRPRFLEVIGDFNPRGNVHTIVRVRSDSQY

SEQ ID NO: 50324 - protein, 126 aa, Thermocrinis minervae
  REGION 1..126: note = tr|A0A1M6SU34|A0A1M6SU34_9AQUI NADPH-dependent 7-cyano-7-deazaguanine reductase OS=Thermocrinis minervae; OX = 381751 GN=queF PE=3 SV=1
MEKKYGELAIEQAQLEPWENPTPERDYLIEITFPEFSCLCPRSGYPDYATIKIRYIPDKYIVELKSLKLWLNKFRNRYISHEQATNEIYTALYELLKPRFLEVIGDFNPRGNVHTVIRVRSDGKYV

SEQ ID NO: 50325 - protein, 125 aa, Thermocrinis ruber
  REGION 1..125: note = tr|W0DE51|W0DE51_9AQUI NADPH-dependent 7-cyano-7-deazaguanine reductase OS=Thermocrinis ruber; OX = 75906 GN=queF PE=3 SV=1
MEKKYGELAIEQAQLEVWENPSKERDYLIEITFPEFSCLCPRSGYPDYATIKIRYIPDQYIVELRSLKLWLNKFRNRYISHEQATNEIYQALYETLKPKFLEVIGDFNPRGNVHTVIKVRSDGNY

SEQ ID NO: 50326 - protein, 129 aa, unidentified
  source 1..129: note = Thermodesulfatator autotrophicus
  REGION 1..129: note = tr|A0A177EBB7|A0A177EBB7_9BACT NADPH-dependent 7-cyano-7-deazaguanine reductase OS=Thermodesulfatator autotrophicus OX=1795632 GN=queF PE=3 SV=1
MSEELKYGEKAILEAELEPWPNPYPDRDYLIEITFPEFTCLCPRSGYPDFATIKLSYIPDQKIVELKSLKLWLNKFRNRYISHEAATNEIFDALWKTLEPRYLKVIGDFHPRGNVHTVITVERRKNENT

SEQ ID NO: 50327 - protein, 126 aa, Thermodesulfatator indicus
  REGION 1..126: note = tr|F8ADL2|F8ADL2_THEID NADPH-dependent 7-cyano-7-deazaguanine reductase OS=Thermodesulfatator indicus (strain DSM 15286 / JCM 11887 / CIR29812); OX = 667014 GN=queF PE= 3 SV=1
MSDEIKYGEKAILEAELEPWSNPYPDRDYLIEITFPEFTCLCPRSGYPDFATIRLSYIPDQKIVELRSLKLWLNKFRNRYISHEAATNEIFDALWEKLEPRYLKVEGDFHPRGNVHTVITVEKHKE

SEQ ID NO: 50328 - protein, 127 aa, Thermodesulfatator sp.
  REGION 1..127: note = tr|A0A432UIV2|A0A432UIV2_9BACT NADPH-dependent 7-cyano-7-deazaguanine reductase OS=Thermodesulfatator sp.; OX = 1874629 GN=queF PE=3 SV=1
MAREEKRYGEKAIEEAQLEAWPNPYPDRDYLIEITFPEFTCLCPRSGYPDFATLKISYIPDQKIVELRSLKLWLNKFRSRYISHEAATNEIFDALWQLLKPRKLKVVGDFHPRGNVHTVVTVERSNS

SEQ ID NO: 50329 - protein, 123 aa, Thermodesulfatator sp.
  REGION 1..123: note = tr|A0A432UDU7|A0A432UDU7_9BACT NADPH-dependent 7-cyano-7-deazaguanine reductase OS=Thermodesulfatator sp.; OX = 1874629 GN=queF PE=3 SV=1
MKYGQEAIREARLEPWPNPSPERDYLVEISFPEFTCLCPRSGYPDFAVIRIKYVPDEFIVELKSLKLYLNSFRNKHISHEESTNRIFADIQGAIRPKSLEVVGDFHPRGNVHTVITVKQGEIS

SEQ ID NO: 50330 - protein, 132 aa, unidentified
  source 1..132: note = Thermodesulfobacteria bacterium
  REGION 1..132: note = tr|A0A496QKJ9|A0A496QKJ9_9BACT NADPH-dependent 7-cyano-7-deazaguanine reductase OS=Thermodesulfobacteria bacterium OX=2202153 GN=queF PE=3 SV=1
MKYGEKEIKNAGLESWPNPCPERDYTIEISFPEFTCLCPRSGYPDFATIRITYVPDRFIVELKSLKLYLNGYRDQYISHEEAVNKIFSDLTEVLSPRTIKVEGDFHPRGNVHTVIKVEGGPGLPSELVPRQK

SEQ ID NO: 50331 - protein, 126 aa, unidentified
  source 1..126: note = Thermodesulfobacteriales bacterium
  REGION 1..126: note = tr|A0A524JHJ2|A0A524JHJ2_9BACT NADPH-dependent 7-cyano-7-deazaguanine reductase; OS = Thermodesulfobacteriales bacterium OX=2528040 GN=queF; PE = 3 SV=1
MADKHSEILETFENQYPQREYEIIISCPEFTCVCPKTGQPDFATITLTYVPDKLCMELKSLKLYMFSYRDEGAFHEHVTNKILDDIVEACRPIRAQVTGDFNIRGGIKTVVKATYFKDKNAEAGFK

SEQ ID NO: 50332 - protein, 123 aa, Thermodesulfobacterium commune
  REGION 1..123: note = tr|A0A124FKQ3|A0A124FKQ3_9BACT NADPH-dependent 7-cyano-7-deazaguanine reductase OS=Thermodesulfobacterium commune OX=1741 GN=queF PE=3 SV=1
MSEKKYGELAIEQAELEAWPNPYPDRDYTITITFPEFTCLCPRSGYPDFAVIKIEYVPNEKIVELRSLKLWLNKFRNRYISHEAATNEIFDALWKVLEPKKLKVIGDFHPRGNVHTVITVEKP

SEQ ID NO: 50333 - protein, 123 aa, Thermodesulfobacterium commune; identical to SEQ ID NO: 50332
  REGION 1..123: note = tr|A0A075WRL0|A0A075WRL0_9BACT NADPH-dependent 7-cyano-7-deazaguanine reductase OS=Thermodesulfobacterium commune DSM 2178 OX=289377 GN=queF PE=3 SV=1

SEQ ID NO: 50334 - protein, 125 aa, unidentified
  source 1..125: note = Thermodesulfobacterium geofontis
  REGION 1..125: note = tr|A0A2N7QFU5|A0A2N7QFU5_9BACT NADPH-dependent 7-cyano-7-deazaguanine reductase OS=Thermodesulfobacterium geofontis OX=1295609 GN=queF PE=3 SV=1
MLNMEKKYGEIAIEEAQLEAWDNPYPDRDYFIEITFPEFTCLCPRSGYPDFAVIKISYVPKDKIVELRSLKLWLNKFRNRYISHEAATNEIFDALWKLLEPKKLKVIADFHPRGNVHTIVTVEKP

SEQ ID NO: 50335 - protein, 122 aa, unidentified
  source 1..122: note = Thermodesulfobacterium geofontis
  REGION 1..122: note = tr|F8C2C5|F8C2C5_THEGP NADPH-dependent 7-cyano-7-deazaguanine reductase OS=Thermodesulfobacterium geofontis (strain OPF15) OX=795359 GN=queF PE=3 SV=1
MEKKYGEIAIEEAQLEAWDNPYPDRDYLIEITFPEFTCLCPRSGYPDFAIIKISYIPKNKIVELKSLKLWLNKFRNRYISHEAATNEIFDALWNLLQPKKLKVVADFHPRGNVHTVVTVEKP

SEQ ID NO: 50336 - protein, 127 aa, unidentified
  source 1..127: note = Thermodesulfobium acidiphilum
  REGION 1..127: note = tr|A0A2R4W2K4|A0A2R4W2K4_9FIRM NADPH-dependent 7-cyano-7-deazaguanine reductase OS=Thermodesulfobium acidiphilum OX=1794699 GN=queF PE=3 SV=1
MPEASGKTFEFKDESHIKTDFLEGFSFSAEEYIKIETKEFSAVCPFSGLPDIGQLIIEYFPDGGICVELKSLKYYLTSFRNVGIYQEAATKRIYEDLKKLLKTDRLKVTLIYNTRGGINTLTSMGNL

SEQ ID NO: 50337 - protein, 127 aa, Thermodesulfobium narugense
  REGION 1..127: note = tr|M1E963|M1E963_9FIRM NADPH-dependent 7-cyano-7-deazaguanine reductase OS=Thermodesulfobium narugense DSM 14796 OX=747365 GN=queF PE=3 SV=1
MPEASGKTFEFKDESHIMTDFLEGFSFRAEEYIKIETKEFSAVCPFSGLPDIGRLIIEYFPDGGVCVELKSLKYYLTSFRNVGIYQEAVTKRIYEDLKRLLKTDRLKVTLIYNTRGGMDTLTSMGSL

SEQ ID NO: 50338 - protein, 127 aa, Thermodesulfobium narugense; identical to SEQ ID NO: 50336
  REGION 1..127: note = tr|A0A2J6XBI5|A0A2J6XBI5_9FIRM NADPH-dependent 7-cyano-7-deazaguanine reductase OS=Thermodesulfobium narugense OX=184064 GN=queF PE=3 SV=1

SEQ ID NO: 50339 - protein, 148 aa, Thermodesulforhabdus norvegica
  REGION 1..148: note = tr|A0A1I4SMH7|A0A1I4SMH7_9DELT NADPH-dependent 7-cyano-7-deazaguanine reductase OS=Thermodesulforhabdus norvegica OX=39841 GN=queF PE=3 SV=1
MSERVKRELSQLGRSASIPENPDKAVLETFENPHPDVHYVVRLKAPEFTCLCPITGQPDFATIIVDYVPGKWILESKSFKLFLGSFRNTGIFHEDGTVYIHKRLKEALDPVYLRVIGFWNVRGGISIDVAVESGRLPENCRPLPIRQD

SEQ ID NO: 50340 - protein, 122 aa, Thermodesulfovibrio aggregans
  REGION 1..122: note = tr|A0A2J6WH20|A0A2J6WH20_9BACT NADPH-dependent 7-cyano-7-deazaguanine reductase OS=Thermodesulfovibrio aggregans OX=86166 GN=queF PE=3 SV=1
MLYGEKAIKEAKLEAWDNPYPERDYRIEISFPEFTCLCPRSGYPDFATIRISYIPDKKIVELKSLKLYLNSYRDKYISHEAVTNKIYEDLYNLLQPRALEVIGDFNPRGNVKTVIKVSSESK

SEQ ID NO: 50341 - protein, 119 aa, Thermodesulfovibrio aggregans
  REGION 1..119: note = tr|A0A0U9HLP6|A0A0U9HLP6_9BACT NADPH-dependent 7-cyano-7-deazaguanine reductase OS=Thermodesulfovibrio aggregans OX=86166 GN=queF PE=3 SV=1
MLYGEKAIEEAKLEAWDNPYPDRDYRIEISFPEFTCLCPRSGYPDFATIKISYIPDKKIVELKSLKLYLNSYRDKYISHEAVTNKIYDDLHNLLKPRFLEVIGDFNPRGNVKTIIKVSS

SEQ ID NO: 50342 - protein, 122 aa, Thermodesulfovibrio sp.
  REGION 1..122: note = tr|A0A1C3FD16|A0A1C3FD16_9BACT NADPH-dependent 7-cyano-7-deazaguanine reductase OS=Thermodesulfovibrio sp. N1 OX=1871110 GN=queF PE=3 SV=1
MRYGEKAIEEAKLEAWDNPYPDRDYKIEITFPEFTCLCPRSGYPDFATIKINYIPDKKIIELKSLKLYLNSYRSQYISHEAATNKIFDDLKKILQPRFLEVIGDFNPRGNVKTIIKISSENK

SEQ ID NO: 50343 - protein, 128 aa, Thermodesulfovibrio sp.
  REGION 1..128: note = tr|A0A1G3XWQ5|A0A1G3XWQ5_9BACT NADPH-dependent 7-cyano-7-deazaguanine reductase OS=Thermodesulfovibrio sp. RBG_19FT_COMBO_41_18 OX=1802372 GN=queF PE=3 SV=1
MKYGEKIIKKAVLEIWNNPHPERDYEINISFPEFTCLCPRSGYPDFATIKINYKPGKKIVELKSLKLYLNFFRTTYISHEDVTNVIYTELKKKLRPKFLEVIGDFNPRGNVKTIVRVCSDSKVKVEKV

SEQ ID NO: 50344 - protein, 122 aa, Thermodesulfovibrio yellowstonii
  REGION 1..122: note = tr|B5YKP6|B5YKP6_THEYD NADPH-dependent 7-cyano-7-deazaguanine reductase OS=Thermodesulfovibrio yellowstonii (strain ATCC 51303 / DSM 11347 / YP87); OX = 289376 GN=queFPE=3 SV=1
MLYGEKAIKEALLEAWDNPYPDRDYKIEISFPEFTCLCPRSGYPDFATIKISYIPDKKIVELKSLKLYLNSYRDKYISHEAVTNKIYEDLHNLLKPRNLEVIGDFNPRGNVKTIIKVSSECK

SEQ ID NO: 50345 - protein, 162 aa, Thermoflavimicrobium dichotomicum
  REGION 1..162: note = tr|A0A1I3RNV7|A0A1I3RNV7_9BACL NADPH-dependent 7-cyano-7-deazaguanine reductase OS=Thermoflavimicrobium dichotomicum OX=46223 GN=queF PE=3 SV=1
MHKKPEEELTLLGNKGTEYVFEYDPSVLEAFSNRHPDTDYFVKFNCPEFTSLCPITGQPDFATIYISYVPDKKLVESKSLKLYLFSFRNHGDFHENCIVTIMKDLIKLLDPKYIEVWGKFLPRGGISIDPYVNYGKKGTKWEEIAKQRLANHDLYPERVDNR

SEQ ID NO: 50346 - protein, 162 aa, Thermoflavimicrobium sp.
  REGION 1..162: note = tr|A0A364K1E9|A0A364K1E9_9BACL NADPH-dependent 7-cyano-7-deazaguanine reductase OS=Thermoflavimicrobium sp. FBKL4.011 OX=2137476 GN=queF PE=3 SV=1
MHNKLDEELTLLGNQGTKYTFEYNPDILETFSNAHPDTDYFVKFNCPEFTTLCPITGQPDFATVYISYVPDEKLVESKSLKLYLFSFRNHGDFHENAVVVIMKDLIKLLDPKYIEVWGKFLPRGGISIDPYVNYGKKGTAWEDIAKRRLANHDLYPERVDNR

SEQ ID NO: 50347 - protein, 126 aa, unidentified
  source 1..126: note = Thermoflexus hugenholtzii
  REGION 1..126: note = tr|A0A2A9HIT2|A0A2A9HIT2_9CHLR NADPH-dependent 7-cyano-7-deazaguanine reductase OS=Thermoflexus hugenholtzii OX=1495650 GN=queF PE=3 SV=1
MNPKNTFRTDGTIDAFDNQFPGRDYVIEFIAPEFTSVCPMTGQPDFGTIRVTYVPDRKCIELRSFKFYLHAFRNRGIFYEDVVNTILEDIVAAVQPRSATVTGEFNTRGGISARVTASYPSRPSGA

SEQ ID NO: 50348 - protein, 155 aa, unidentified
  source 1..155: note = Thermogemmatispora argillosa
  REGION 1..155: note = tr|A0A455T565|A0A455T565_9CHLR NADPH-dependent 7-cyano-7-deazaguanine reductase OS=Thermogemmatispora argillosa OX=2045280 GN=queF PE=3 SV=1
MSEDQQQQQQQTRVPGRYGLDEIAANRLEAWPNPNPERDYVIHLEIPEFTCLCPRSGFPDFATVVIDYVPDRSVVELKSLKLYINGYRDRQISHEAATNTILNDLVALLEPRWMRVAGDFNVRGNIKTIIFAEYAAPGYSGPRPDYRRYMLGSTL

SEQ ID NO: 50349 - protein, 151 aa, unidentified
  source 1..151: note = Thermogemmatispora aurantia
  REGION 1..151: note = tr|A0A5J4K5J4|A0A5J4K5J4_9CHLR NADPH-dependent 7-cyano-7-deazaguanine reductase OS=Thermogemmatispora aurantia OX=2045279 GN=queF PE=4 SV=1
MSEEQQQTRVPGRYGLDEIAANRLEAWPNPNPERDYVVHLEIPEFTCLCPRSGFPDFATIVIDYVPDRSVVELKSLKLYINGYRDRQISHEAATNTILNDLVTLLGPRWMRVAGDFNVRGNIKTIIFAEYVAPNYSGPRPEYRRHMTGSSL

SEQ ID NO: 50350 - protein, 136 aa, unidentified
  source 1..136: note = Thermogemmatispora tikiterensis
  REGION 1..136: note = tr|A0A328VFH4|A0A328VFH4_9CHLR NADPH-dependent 7-cyano-7-deazaguanine reductase OS=Thermogemmatispora tikiterensis OX=1825093 GN=queF PE=3 SV=1
MDEIATNRLEAWPNPNPERDYVVHLEIPEFTCLCPRSGFPDFATIVIDYVPDRSVVELKSLKLYINGYRDRQISHEAATNTILNDLVTLLEPRWMRVAGDFNVRGNIKTIIFAEYAAPNYSGPRPEYRRHMTGSSL

SEQ ID NO: 50351 - protein, 124 aa, unidentified
  source 1..124: note = Thermogutta terrifontis
  REGION 1..124: note = tr|A0A286RM70|A0A286RM70_9PLAN NADPH-dependent 7-cyano-7-deazaguanine reductase OS=Thermogutta terrifontis OX=1331910 GN=queF PE=3 SV=1
MAQQAESFRHILETFENQYPDRDYTIEIICPEFTSVCPRTGQPDFGTITITYCPDKLCVELKSLKFYLQAYRNVGIFYEHVTNRILDDLVAVLRPRWMKVVADFRPRGGITTRVSAQYQVETAG

SEQ ID NO: 50352 - protein, 165 aa, Thermohydrogenium kirishiense
  REGION 1..165: note = tr|A0A4V2W8Y5|A0A4V2W8Y5_9FIRM NADPH-dependent 7-cyano-7-deazaguanine reductase OS=Thermohydrogenium kirishiense OX=937254 GN=queF PE=3 SV=1
MSERDKKELDELSLLGKKDTKYIFDYDPSLLETFPNKHQENDYFVKFNCPEFTSLCPKTGQPDFATIYILYVPDKLMVESKSLKLYLFSFRNHGDFHEDCVNIIMKDLIKLLDPKYIEVWGKFTPRGGISIDPYCNYGRPGTKWADVAEKRLFYHDMYPEKVDNR

SEQ ID NO: 50353 - protein, 165 aa, unidentified
  source 1..165: note = Thermolongibacillus altinsuensis
  REGION 1..165: note = tr|A0A4R1QFZ1|A0A4R1QFZ1_9BACI NADPH-dependent 7-cyano-7-deazaguanine reductase OS=Thermolongibacillus altinsuensis OX=575256 GN=queF PE=3 SV=1
MVGRKDEELKGCTLLGNQGTKYVFEYNPDILEVFDNKHPDRDYFVKFNCPEFTSLCPKTGQPDFATIYISYIPDKKCVESKSLKLYLFSFRNHGDFHEDCVNIIMNDLIRVMNPRYIEVWGKFTPRGGISIDPYCNWGRPGTKYEKMAEYRLMNHDLYPEKVDNR

SEQ ID NO: 50354 - protein, 128 aa, Thermomicrobium roseum
  REGION 1..128: note = sp|B9L0W9|QUEF_THERP NADPH-dependent 7-cyano-7-deazaguanine reductase OS=Thermomicrobium roseum (strain ATCC 27502 / DSM 5159 / P-2) OX=309801 GN=queF; PE = 3 SV=1
MPTQPSKELERIPNPKPERDYEIEITTNEFTCVCPRTGQPDFATITIRYVPDQWIVELKSLKLYLWSYRNEGHYHEEVTNTILDDLVRTLEPRRMTVIADFNIRGGLHTVVTARYERTAEGPARLAAD

SEQ ID NO: 50355 - protein, 273 aa, Thermomonas haemolytica
  REGION 1..273: note = tr|A0A4V2V2I7|A0A4V2V2I7_9GAMM NADPH-dependent 7-cyano-7-deazaguanine reductase OS=Thermomonas haemolytica OX=141949 GN=queF PE=3 SV=1
MSTQTPDGSPLGRDTAYPSAYDPGLLYPIPRAPARARLGLGAALPFVGHDRWQAFELSWLDARGKPCVATATLQVPADSPHLVESKSLKLYLNSLNATRFEHADAVRARIEADLSTAAGAPVALAFGLAPLQEDDGTAISIDGLDIAIDHYGPPDAALLQADATTVVEETLTSALLKSNCPVTGQPDWADVSIAYRGPRLDRAGLLRYIVSFREHAGFHEQCVEQLFVDLLTRCAPQWLSVEARYTRRGGLDINPWRGSPGCTPPPPRRSLRQ

SEQ ID NO: 50356 - protein, 273 aa, Thermomonas hydrothermalis
  REGION 1..273: note = tr|A0A1M4WM14|A0A1M4WM14_9GAMM NADPH-dependent 7-cyano-7-deazaguanine reductase OS=Thermomonas hydrothermalis OX=213588 GN=queF PE=3 SV=1
MTTHAPTDSPLGRHTHYPDRYDPGLLYPVPRAPARAALGIDAAALPFIGHDRWQAFELSWLDLRGKPCVACATLWVPATSPALIESKSLKLYLNSLNAHRFPDAEAVRACIEADLSGAAGAPVQLMFSLPPFETAAPGESIDVLDVTITSYGPPDASLLQADPDTIVEETLTSALLKSNCPVTGQPDWADVCIRYRGPRIDRASLLRYLVSFREHAGFHEQCVEQVFVDLMARCAPQRLSVEARYTRRGGLDINPWRATPGDTPPPPRRTLRQ

SEQ ID NO: 50357 - protein, 270 aa, Thermomonas sp.
  REGION 1..270: note = tr|A0A5B7ZRM6|A0A5B7ZRM6_9GAMM NADPH-dependent 7-cyano-7-deazaguanine reductase OS=Thermomonas sp. SY21; OX = 2202149 GN=queF PE=3 SV=1
MPAIEHSPLGREVAYPQRFDAGLLYPIPRAQGRAALGIAGAALPFVGNDRWHAYELSWLDARGKPQVATATFEVPADSPNLIESKSFKLYLNSCNAARFPGADALRMQVEADLSAAAGAPVSMAFGLPAMRAGEGDSIDALEIDIDRYGPPDASQLAADAADDVAETLASALLKSNCPVTGQPDWADLAIAYSGPRIDRAGLLRYLVSFRDHAEFHEQCVERIFIDLMARCRPRSLSVQARYTRRGGLDINPWRATPGEPAPAANRSERQ

SEQ ID NO: 50358 - protein, 291 aa, unidentified
  source 1..291: note = Thermophagus xiamenensis
  REGION 1..291: note = tr|A0A1I2F0E8|A0A1I2F0E8_9BACT 7-cyano-7-deazaguanine reductase OS=Thermophagus xiamenensis OX=385682 GN=SAMN05444380_12539 PE=4 SV=1
MNESKYLGKSVQYPQQYAPEMLVPVPRHLNREQYGLYNNQLPFTGYDVWHAYEFSFLTQKGLPVTGILKMVYPSDSPFLVESKSLKLYLNSLNMERYGATPREGIKEVISIIQKDISKVLQTEVTLHFFDAKESQYFDFWGYELLEKTGRIETVTFSEYREAPHLLCSEQSSSEKNILKVATHLLRSNCKVTFQPDWGSAFIYLKGKDIPDKIGLLKYLVSIRNENHFHEEICEMIYKRLWDRFTPEQLMVACLYTRRGGIDICPVRASQPHLLPQYLINPYKLTDKLLRQ

SEQ ID NO: 50359 - protein, 146 aa, unidentified
  source 1..146: note = Thermophagus xiamenensis
  REGION 1..146: note = tr|A0A1I2F3B9|A0A1I2F3B9_9BACT NADPH-dependent 7-cyano-7-deazaguanine reductase OS=Thermophagus xiamenensis OX=385682 GN=SAMN05444380_12612 PE=3 SV=1
MSEKVLTYKDIDKSILKALPNPVKKAYEIKIKIPEFTFLGVKNQPDFADVYITFYPTDKIIELKSLKLYVHALRNITVSYERLINVFYDHLMEVYEPDRIRIVMICNPRGGISSRLTIDSDWKARGGEEKYSDWKNHLDDTWNVTL

SEQ ID NO: 50360 - protein, 165 aa, Thermosinus carboxydivorans
  REGION 1..165: note = tr|A1HNW9|A1HNW9_9FIRM NADPH-dependent 7-cyano-7-deazaguanine reductase OS=Thermosinus carboxydivorans Nor1 OX=401526 GN=queF PE=3 SV=1
MAGRSEHELSGVTLLGSQETVYKYQYDPSILEAFVNKHPENDYFVKFNCPEFTSICPKTGQPDFATIYISYVPDKLLVESKSLKLYLMSFRNHGDFHEDCVNIIMKDLIRLLDPKYIEVWGKFTPRGGISIDPYCNYGKPGTKWEQVAEKRLFYHDMYPEKVDNR

SEQ ID NO: 50361 - protein, 130 aa, Thermosipho melanesiensis
  REGION 1..130: note = tr|A6LJH6|A6LJH6_THEM4 NADPH-dependent 7-cyano-7-deazaguanine reductase OS=Thermosipho melanesiensis (strain DSM 12029 / CIP 104789 / BI429); OX = 391009 GN=queF PE=3 S V=1
MPQAEGKKFSFVGEEHIRTDFLETIPFDRNEEKITIETEEFSAVCPFSGLPDIGKLIIEYYPDGGKIVELKSLKYYLVSFRNVGIYQEKATVRIYDDLKNILGTKRIKVKLIYNIRGGILTTTEVGSLEG

SEQ ID NO: 50362 - protein, 149 aa, Thermosporothrix hazakensis
  REGION 1..149: note = tr|A0A326U493|A0A326U493_9CHLR NADPH-dependent 7-cyano-7-deazaguanine reductase OS=Thermosporothrix hazakensis OX=644383 GN=queF PE=3 SV=1
MSEEQEKQRVPGRYGIDEIKTNKLEPWPNPHPESDYVVHFEIPEFTCLCPRSGFPDFATFVIDYVPDASVVELKSLKLYINGYRDRQISHESSVNTVLNDLVALLSPRWMRVVGDFTVRGNIKTIVFAEHAKEGYTGPRPEYRRYMQQV

SEQ ID NO: 50363 - protein, 149 aa, Thermosporothrix sp.
  REGION 1..149: note = tr|A0A455SEZ5|A0A455SEZ5_9CHLR NADPH-dependent 7-cyano-7-deazaguanine reductase OS=Thermosporothrix sp. COM3 OX=2490863 GN=queF PE=3 SV=1
MSEEQEKQRVPGRYGIDEIKANKLEPWPNPHPESDYVVHFEIPEFTCLCPRSGFPDFATFVIDYVPDASVVELKSLKLYINGYRDRQISHESSVNTVLNDLVALLSPRWMRVVGDFTVRGNIKTIVFAEHAKEGYTGPRPEYRRYMQQV

SEQ ID NO: 50364 - protein, 126 aa, Thermosulfidibacter takaii
  REGION 1..126: note = tr|A0A0S3QUW0|A0A0S3QUW0_THET7 NADPH-dependent 7-cyano-7-deazaguanine reductase OS=Thermosulfidibacter takaii (strain DSM 17441 / JCM 13301 / NBRC 103674 / ABI70S6)OX=1298851 GN=queF PE=3 SV=1
MSEVKRYGEIEIEKAQLEAWPNPSEKNYIIEITFPEFTCLCPRSGYPDFATIRIKYIPDKYIVELKSLKLYLNKYRNQYISHEAATNKIFDDLKKLLQPKFLEVVGDFNPRGNVKTIIKVSTEDNK

SEQ ID NO: 50365 - protein, 133 aa, unidentified
  source 1..133: note = Thermosulfurimonas dismutans
  REGION 1..133: note = tr|A0A179D585|A0A179D585_9BACT NADPH-dependent 7-cyano-7-deazaguanine reductase OS=Thermosulfurimonas dismutans OX=999894 GN=queF PE=3 SV=1
MAEEKRYGERAIEEAELEAWPNPYPDRDYRIDITFPEFTCLCPRSGYPDFATIKISYLPHKKIVELRSLKLWLNKFRGRYISHEAATNEIFDALWKLLEPRELKVVGDFNPRGNVHTVITVERRQGSSGSPTA

SEQ ID NO: 50366 - protein, 132 aa, unidentified
  source 1..132: note = Thermosynechococcus elongatus
  REGION 1..132: note = tr|A0A3B7MIY7|A0A3B7MIY7_9CYAN NADPH-dependent 7-cyano-7-deazaguanine reductase OS=Thermosynechococcus elongatus PKUAC-SCTE542 OX=2016101 GN=queF PE=3 SV=1
MQVSEMKYGERAIQEGQLITFPNPRPGRQYTIEITLPEFTCKCPFSGYPDFATLYVSYIPHEKVVELKAIKLYINSYRDRYISHEEAVNQVLDDLVAACDPLYMKIKGDFAPRGNVHTVITVEHHRQPDSSC

SEQ ID NO: 50367 - protein, 132 aa, unidentified
  source 1..132: note = Thermosynechococcus elongatus
  REGION 1..132: note = sp|Q8DMA3|QUEF_THEEB NADPH-dependent 7-cyano-7-deazaguanine reductase OS=Thermosynechococcus elongatus (strain BP-1) OX=197221 GN=queF PE=3 SV=1
MQVSEMKYGERAIQEGQLITFPNPRPGRQYTIEITLPEFTCKCPFSGYPDFATLYVSYIPHEKVVELKAIKLYINSYRDRYISHEEAVNQVLDDLVAACDPLYMKIKGDFAPRGNVHTVITVEHHRQTESLC

SEQ ID NO: 50368 - protein, 132 aa, unidentified; identical to SEQ ID NO: 50366
  source 1..132: note = Thermosynechococcus sp.
  REGION 1..132: note = tr|A0A5C2MAJ2|A0A5C2MAJ2_9CYAN NADPH-dependent 7-cyano-7-deazaguanine reductase OS=Thermosynechococcus sp. CL-1 OX=2583530 GN=queF PE=3 SV=1

SEQ ID NO: 50369 - protein, 132 aa, unidentified
  source 1..132: note = Thermosynechococcus sp.
  REGION 1..132: note = tr|V5V422|V5V422_9CYAN NADPH-dependent 7-cyano-7-deazaguanine reductase OS=Thermosynechococcus sp. NK55a OX=1394889 GN=queF PE=3 SV=1
MQVSEMKYGERAIQEGQLMTFPNPRPGRQYTIEITLPEFTCKCPFSGYPDFATLYVSYIPHEKVVELKAIKLYINSYRDRYISHEEAVNQVLDDLVAACDPLYMKIKGDFAPRGNVHTVITVEHHRQAVSSC

SEQ ID NO: 50370 - protein, 137 aa, Thermotoga maritima
  REGION 1..137: note = tr|G4FD33|G4FD33_THEMA NADPH-dependent 7-cyano-7-deazaguanine reductase OS=Thermotoga maritima (strain ATCC 43589 / MSB8 / DSM 3109 / JCM 10099); OX = 243274 GN=queF PE =3 SV=1
MPKAEGRIFDFKGHDAIRTDFLEAIDFDGKDEYIKIETDEFSAVCPFSGLPDIGRVIIEYYPDGGKIVELKSLKYYFVSFRNVGIYQEEATKRIYEDLKNLLKTDRIRVTVIYNIRGGIKTTTQMGSLEGKKSGEVE

SEQ ID NO: 50371 - protein, 137 aa, Thermotoga maritima; identical to SEQ ID NO: 50370
  REGION 1..137: note = sp|Q9WZP8|QUEF_THEMA NADPH-dependent 7-cyano-7-deazaguanine reductase OS=Thermotoga maritima (strain ATCC 43589 / MSB8 / DSM 3109 / JCM 10099); OX = 243274 GN=queF PE=3SV=1

SEQ ID NO: 50372 - protein, 137 aa, Thermotoga naphthophila; identical to SEQ ID NO: 50370
  REGION 1..137: note = tr|A0A101ERP7|A0A101ERP7_9THEM NADPH-dependent 7-cyano-7-deazaguanine reductase OS=Thermotoga naphthophila OX=93930 GN=queF PE=3 SV=1

SEQ ID NO: 50373 - protein, 137 aa, Thermotoga naphthophila; identical to SEQ ID NO: 50370
  REGION 1..137: note = tr|D2C5K8|D2C5K8_THENR NADPH-dependent 7-cyano-7-deazaguanine reductase OS=Thermotoga naphthophila (strain ATCC BAA-489 / DSM 13996 / JCM 10882 / RKU-10) OX=590168 G N=queF PE=3 SV=1

SEQ ID NO: 50374 - protein, 137 aa, Thermotoga neapolitana
  REGION 1..137: note = tr|B9KAI0|B9KAI0_THENN NADPH-dependent 7-cyano-7-deazaguanine reductase OS=Thermotoga neapolitana (strain ATCC 49049 / DSM 4359 / NS-E) OX=309803 GN=queF; PE = 3 SV=1
MPKAEGRIFDFKGHDAIRTDFLEAIDFDGKEEYIRIETEEFSAVCPFSGLPDIGKVIIEYYPDGGKIVELKSLKYYFVSFRNVGIYQEEATKRIYEDLKNLLKTDRLRVTVIYNIRGGIKTTTQIGSLEGRENGKAE

SEQ ID NO: 50375 - protein, 137 aa, Thermotoga petrophila; identical to SEQ ID NO: 50370
  REGION 1..137: note = sp|A5IIZ4|QUEF_THEP1 NADPH-dependent 7-cyano-7-deazaguanine reductase OS=Thermotoga petrophila (strain RKU-1 / ATCC BAA-488 / DSM 13995) OX=390874; GN = queF PE=3 SV=1

SEQ ID NO: 50376 - protein, 136 aa, Thermotoga sp.; identical to SEQ ID NO: 49045
  REGION 1..136: note = tr|A0A101ESB6|A0A101ESB6_9THEM NADPH-dependent 7-cyano-7-deazaguanine reductase OS=Thermotoga sp. 50_1627; OX = 1635260 GN=queF PE=3 SV=1

SEQ ID NO: 50377 - protein, 137 aa, Thermotoga sp.
  REGION 1..137: note = tr|A0A0A6MWB6|A0A0A6MWB6_9THEM NADPH-dependent 7-cyano-7-deazaguanine reductase OS=Thermotoga sp. Mc24; OX = 1231241 GN=queF PE=3 SV=1
MPKAEGRIFDFKGHDAIRTDFLEAIDFDGKDEYIKIETDEFSAVCPFSGLPDIGRVIIEYYPDGGKIVELKSLKYYFVSFRNVGIYQEEATKRIYEDLKNLLKTDRIRVTVIYNIRGGIKTTTQIGSLEGKESGKVE

SEQ ID NO: 50378 - protein, 128 aa, unidentified
  source 1..128: note = Thermotogae bacterium
  REGION 1..128: note = tr|A0A496QE62|A0A496QE62_9BACT NADPH-dependent 7-cyano-7-deazaguanine reductase OS=Thermotogae bacterium; OX = 2053689 GN=queF PE=3 SV=1
MPKAEGKSFNFEGKEKIRADFLEAVPFDGREEYIRIDTEEFSAVCPFSGLPDIAKVTIEYYPEGGKIVELKSLKYYFISFRNVGVYQEEATKIIYEDLKKLLQTNRIKVTMVYNIRGGILTTTTMGTL

SEQ ID NO: 50379 - protein, 164 aa, Thermovibrio ammonificans
  REGION 1..164: note = tr|E8T4D4|E8T4D4_THEA1 NADPH-dependent 7-cyano-7-deazaguanine reductase OS=Thermovibrio ammonificans (strain DSM 15698 / JCM 12110 / HB-1); OX = 648996 GN=queF PE=3 SV= 1
MERKDFGNISKLGRKTEYTFKYSPQLLERFPNRFPDRFYWVSFNCPEFTTLCPITGQPDFATIYIQYIPDRWLVESKSLKLYLFSFRDARDFHEDVVNRIADDLFNLLEPFYLEVYGEFNPRGGISIDPFVQRFRSELDWVKELASERFKLHRITPPPIRRNRG

SEQ ID NO: 50380 - protein, 163 aa, Thermovibrio guaymasensis
  REGION 1..163: note = tr|A0A420W710|A0A420W710_9BACT NADPH-dependent 7-cyano-7-deazaguanine reductase OS=Thermovibrio guaymasensis OX=240167 GN=queF PE=3 SV=1
MEKKPSGITKLGRKVDYVFDYSPQLLEKFENRFPDRIYWVSFNCPEFTTLCPITGQPDFATIYIQYIPDKWLVESKSLKLYLFSFRNAKGFHEDTVNRIADDLYNLLEPYYIEVYGEFNPRGGISIDPFVQRFRGGVDWVEELAKERFKLHKITPPDIRRNRG

SEQ ID NO: 50381 - protein, 129 aa, Thioalbus denitrificans
  REGION 1..129: note = tr|A0A369CHQ9|A0A369CHQ9_9GAMM NADPH-dependent 7-cyano-7-deazaguanine reductase OS=Thioalbus denitrificans OX=547122 GN=queF PE=3 SV=1
MSTQPSKDLETFPNPAPERDYTIRIRVPEFTCLCPKTGQPDFATLQLEYVPHDRCVELKSLKLYVWSFREEGAFHEAVTNRILADLVEACEPRFMRLTAEFNVRGGVYTTVVAEHRSDSWVAPSPVTLP

SEQ ID NO: 50382 - protein, 129 aa, Thioalkalivibrio denitrificans
  REGION 1..129: note = tr|A0A1V3NLX7|A0A1V3NLX7_9GAMM NADPH-dependent 7-cyano-7-deazaguanine reductase OS=Thioalkalivibrio denitrificans OX=108003 GN=queF PE=3 SV=1
MPSQPSKDLETFENPRPGRDYTIRIRIPEFTCLCPKTGQPDFATLHLEYVPRARCVELKALKLYVWSFREEGAFHEAVTNRILDDLVAATDPHFMRLTAEFNVRGGIYTTVVAEHRHPEWQAPAPVSLP

SEQ ID NO: 50383 - protein, 140 aa, Thioalkalivibrio halophilus
  REGION 1..140: note = tr|A0A1V2ZVR3|A0A1V2ZVR3_9GAMM NADPH-dependent 7-cyano-7-deazaguanine reductase OS=Thioalkalivibrio halophilus OX=252474 GN=queF PE=3 SV=1
MPSQPSKTLDTFDNPSPDNNFAIYIRIPEFTCLCPATGQPDFAELHLQYVADQRCVELKSLKNYMWSFRNEGAFHEAVTNQILNDLVAATDPRFMRLTANFYVRGGIYTTVVAEHRQEGWTPPESVTLPPPTRSPQGTEY

SEQ ID NO: 50384 - protein, 134 aa, Thioalkalivibrio nitratireducens
  REGION 1..134: note = tr|L0DVM6|L0DVM6_THIND NADPH-dependent 7-cyano-7-deazaguanine reductase OS=Thioalkalivibrio nitratireducens (strain DSM 14787 / UNIQEM 213 / ALEN2); OX = 1255043 GN=que F [H] PE=3 SV=1
MPSAPSKTLDTFPNPQPGRDYTIHMRIPEFTCLCPATGQPDFAELHLEYVPDTACVELKSLKLYIWSYRNEGAYHEAVTNRIVDDLVAAIQPRFMRLTADFNVRGGIFTQVVAEHRAPGWTPAAAVELPQPIPR

SEQ ID NO: 50385 - protein, 134 aa, Thioalkalivibrio paradoxus
  REGION 1..134: note = tr|W0DJ49|W0DJ49_9GAMM NADPH-dependent 7-cyano-7-deazaguanine reductase OS=Thioalkalivibrio paradoxus ARh 1 OX=713585 GN=queF PE=3 SV=1
MPSAPSKTLDTFPNPQPARDYTIHMRIPEFTCLCPATGQPDFAELHLEYVPDLTCVELKSLKLYIWSYRNEGAYHEAVTNRILDDLVAAIDPRFMRLTADFNVRGGIFTQVVAEHRAPGWTPAAAVELPQPIPR

SEQ ID NO: 50386 - protein, 140 aa, Thioalkalivibrio sp.
  REGION 1..140: note = tr|D3SAM0|D3SAM0_THISK NADPH-dependent 7-cyano-7-deazaguanine reductase OS=Thioalkalivibrio sp. (strain K90mix) OX=396595 GN=queF PE=3 SV=1
MPSQPSKTLDTFDNPAPENDFAIYIRIPEFTCLCPATGQPDFAELHLEYVADRKCVELKSLKNYMWSFRDEGAFHEAVTNRILADLVAATEPRFMRLTSYFNVRGGIYTSVVAEHRQPGWTPPERVTLPPPGRSPLHSGL

SEQ ID NO: 50387 - protein, 140 aa, Thioalkalivibrio sp.; identical to SEQ ID NO: 50383
  REGION 1..140: note = tr|A0A318VN07|A0A318VN07_9GAMM NADPH-dependent 7-cyano-7-deazaguanine reductase OS=Thioalkalivibrio sp. ALE21 OX=1158175 GN=queF PE=3 SV=1

SEQ ID NO: 50388 - protein, 129 aa, unidentified
  source 1..129: note = Thioalkalivibrio sulfidiphilus
  REGION 1..129: note = sp|B8GTL3|QUEF_THISH NADPH-dependent 7-cyano-7-deazaguanine reductase OS=Thioalkalivibrio sulfidiphilus (strain HL-EbGR7) OX=396588 GN=queF PE=3 SV=1
MSSQPSKDLETFENPQPGRDYTIRIRVPEFTCLCPKTGQPDFATLFLDYVPRARCVELKSLKLYVWAFRDQGAFHEKVTNEILNDLVAATDPNFMRLTAEFNVRGGVYTTVVAEHRHPDWQPPVPVTLP

SEQ ID NO: 50389 - protein, 140 aa, Thioalkalivibrio versutus
  REGION 1..140: note = tr|A0A0G3G0Q7|A0A0G3G0Q7_9GAMM NADPH-dependent 7-cyano-7-deazaguanine reductase OS=Thioalkalivibrio versutus OX=106634 GN=queF PE=3 SV=1
MPSQPSKTLETFDNPAPENDFAIYIRVPEFTCLCPATGQPDFAEIHIQYVADGKCVELKSLKNYMWSYRDEGAFHEAVTNRILADLVAATDPRYMRLTSYFNVRGGVYTTVVAEHRKPGWTPPEPVHLPAPTRSPLDMNG

SEQ ID NO: 50390 - protein, 140 aa, Thioalkalivibrio versutus
  REGION 1..140: note = tr|A0A1V3BRG3|A0A1V3BRG3_9GAMM NADPH-dependent 7-cyano-7-deazaguanine reductase OS=Thioalkalivibrio versutus OX=106634 GN=queF PE=3 SV=1
MPSQPSKTLETFDNPAPENDFAIYIRIPEFTCLCPATGQPDFAEIHIQYVADGKCVELKSLKNYMWSYRDEGAFHEAVTNRILADLVAATDPRYMRLTSYFNVRGGVYTTVVAEHRKPGWTPPEPVQLPAPTRSPLDMNG

SEQ ID NO: 50391 - protein, 129 aa, Thiobaca trueperi
  REGION 1..129: note = tr|A0A4R3N867|A0A4R3N867_9GAMM NADPH-dependent 7-cyano-7-deazaguanine reductase OS=Thiobaca trueperi; OX = 127458 GN=queF PE=3 SV=1
MPSLPSKALETFPNPQPERDYTIRIRVPEFTCLCPKTGQPDFAELTLEYVPDRLCAELKALKTYVWSYRDEGAFHEAVTNLILSDLVTAIAPRFMRLTADFNVRGGIYTTVVAEHRDPGWQPPEPVRLP

SEQ ID NO: 50392 - protein, 139 aa, Thiobacillus denitrificans
  REGION 1..139: note = tr|A0A106BLN7|A0A106BLN7_THIDE NADPH-dependent 7-cyano-7-deazaguanine reductase OS=Thiobacillus denitrificans OX=36861 GN=queF PE=3 SV=1
MPSTPTKTLETFPNPKVGRDFHIHMEVPEFTCLCPKTGQPDFATLILDYIPDKTCVELKSLKLYMWSFREEGHFHEDVTNRILDDLVKVTKPRFMRLTAKFYVRGGIFTNVVAEHRKKGWAPAPRVDLTQFEHQSNTRG

SEQ ID NO: 50393 - protein, 139 aa, Thiobacillus denitrificans
  REGION 1..139: note = sp|Q3SJI1|QUEF_THIDA NADPH-dependent 7-cyano-7-deazaguanine reductase OS=Thiobacillus denitrificans (strain ATCC 25259) OX=292415 GN=queF PE=3; SV = 1
MPSTPSKTLETFPNPKPGRDFHIHMEVPEFTCLCPKTGQPDFATLVLDYIPNQACVELKSLKLYMWSFRDEGHFHEDVTNRILDDLVAATDPRYMRLTAKFYVRGGIFTNVVAEHRKDGWQPAPRVDLTQFEHQSNTRG

SEQ ID NO: 50394 - protein, 139 aa, Thiobacillus sp.
  REGION 1..139: note = tr|A0A1Q4EJZ7|A0A1Q4EJZ7_9PROT NADPH-dependent 7-cyano-7-deazaguanine reductase OS=Thiobacillus sp. 0-1251 OX=1895858 GN=queF PE=3 SV=1
MPSTPAKTLETFPNPKPGRDFHIHMEVPEFTCLCPKTGQPDFATLILDYIPDKTCVELKSLKLYMWSFREEGHFHEDVTNRILDDLVKATKPRFMRLTAKFYVRGGIFTNVVAEHRKKGWQPAPRVDLTQFEHQSNTRG

SEQ ID NO: 50395 - protein, 139 aa, Thiobacillus sp.
  REGION 1..139: note = tr|A0A1Q4GVW2|A0A1Q4GVW2_9PROT NADPH-dependent 7-cyano-7-deazaguanine reductase OS=Thiobacillus sp. 65-29; OX = 1895862 GN=queF PE=3 SV=1
MPSTPSKTLETFPNPKPERDFHIHMEVPEFTCLCPKTGQPDFATLSIDYIPDKACVELKSLKLYMWSFRDEGHFHEDVTNRILDDLVKATKPRFMRLTAKFYVRGGIFTNVVAEHRKKGWQPAPRVDLTQFEHQSNILG

SEQ ID NO: 50396 - protein, 129 aa, Thiocapsa marina
  REGION 1..129: note = tr|F9U5P2|F9U5P2_9GAMM NADPH-dependent 7-cyano-7-deazaguanine reductase OS=Thiocapsa marina 5811; OX = 768671 GN=queF PE=3 SV=1
MSTAPSRALETFPNPQPERDYSIRIQIPEFTCLCPKTGQPDFAELTLEYVPEARCVELKALKLYVWTYRDQGAFHEAVTNEILGDLVAATEPRFMRLTAAFNVRGGIYTTVVAEHRAAGWRPADPVQLP

SEQ ID NO: 50397 - protein, 129 aa, Thiocapsa rosea
  REGION 1..129: note = tr|A0A495V2E8|A0A495V2E8_9GAMM NADPH-dependent 7-cyano-7-deazaguanine reductase OS=Thiocapsa rosea; OX = 69360 GN=queF PE=3 SV=1
MSTTPSRALETFPNPQPERDYSIRIQIPEFTCLCPKTGQPDFAELTLEYVPEARCVELKALKLYVWTYRDQGAFHEAVTNAILGDLVAATEPRFMRLTAAFNVRGGIYTTVVAEHRAAGWRPADPVQLP

SEQ ID NO: 50398 - protein, 129 aa, Thiocapsa roseopersicina
  REGION 1..129: note = tr|A0A1H2QSE9|A0A1H2QSE9_THIRO NADPH-dependent 7-cyano-7-deazaguanine reductase OS=Thiocapsa roseopersicina OX=1058 GN=queF PE=3 SV=1
MSTAPSRALETFPNPQPERDYSIRIQIPEFTCLCPKTGQPDFAELTLEYVPEARCVELKALKLYVWTYRDQGAFHEAVTNQILGDLVAATEPRFMRLTAAFNVRGGIYTTVVAEHRAAGWRPADPVQLP

SEQ ID NO: 50399 - protein, 129 aa, Thiocapsa sp.
  REGION 1..129: note = tr|A0A0U5IJE1|A0A0U5IJE1_9GAMM NADPH-dependent 7-cyano-7-deazaguanine reductase OS=Thiocapsa sp. KS1; OX = 610332 GN=queF PE=3 SV=1
MSTAPSRSLETFPNPQPERDYSIRIQIPEFTCLCPKTGQPDFAELTLEYVPEARCVELKALKLYVWTYRDQGAFHEAVTNQILGDLVAATEPRFMRLTAAFNVRGGIYTTVVAEHRAAGWRPADPVQLP

SEQ ID NO: 50400 - protein, 153 aa, unidentified
  source 1..153: note = Thioclava arenosa
  REGION 1..153: note = tr|A0A2A4CNH4|A0A2A4CNH4_9RHOB NADPH-dependent 7-cyano-7-deazaguanine reductase OS=Thioclava arenosa; OX = 1795308 GN=queF PE=3 SV=1
MSDIYSHLTQLGGPSALPASPEEAVLERVPNPEAGTDYCVRFTAPEFTSLCPITGQPDFAHLMIDYIPGEWLIESKALKLYLGSFRNHGAFHEACTVSIGKRLVEFLDPKWLRIGGYWYPRGGIPIDVFYQTGAAPAGVWIPEQGVPPYRGRG

SEQ ID NO: 50401 - protein, 153 aa, unidentified
  source 1..153: note = Thioclava atlantica
  REGION 1..153: note = tr|A0A085TV55|A0A085TV55_9RHOB NADPH-dependent 7-cyano-7-deazaguanine reductase OS=Thioclava atlantica; OX = 1317124 GN=queF PE=3 SV=1
MSTDVTGLTQLGQATDLPNAPEDAVLERVPQPREGERYLVRFTAPEFTSLCPLTGQPDFAHIMIDYVPKDWLVESKSLKLFLGSFRNHGAFHEDCSVMIGQRLRDLLEPEWLRIGAYWYPRGGIPIDVFWQTGPQPADMWIPDQGVPPYRGRG

SEQ ID NO: 50402 - protein, 153 aa, unidentified
  source 1..153: note = Thioclava dalianensis
  REGION 1..153: note = tr|A0A074TIB0|A0A074TIB0_9RHOB NADPH-dependent 7-cyano-7-deazaguanine reductase OS=Thioclava dalianensis; OX = 1185766 GN=queF PE=3 SV=1
MVSDASGLSQLGQSVDLPASPEAAVLERVPQPRAGERYLVRFTAPEFTSLCPLTAQPDFAHIMIDYVPRDWLVESKSLKLFLGSFRNHGAFHEDCSVMIGQRLRDLLEPEWLRIGAYWYPRGGIPIDVFWQTGPQPSDLWIPDQGVPPYRGRG

SEQ ID NO: 50403 - protein, 153 aa, unidentified
  source 1..153: note = Thioclava electrotropha
  REGION 1..153: note = tr|A0A1W9XRL7|A0A1W9XRL7_9RHOB NADPH-dependent 7-cyano-7-deazaguanine reductase OS=Thioclava electrotropha OX=1549850 GN=queF PE=3 SV=1
MSTDTSGLTQLGQSTDLPQTPEEAVLERVPQPRKGERYLVRFTAPEFTSLCPLTGQPDFAHIMIDYVPRDWLVESKSLKLFLGAFRNHGAFHEDCSVMIGQRLRDLLEPEWLRIGAYWYPRGGIPIDVFWQSAPKPEDMWIPDQGVPPYRGRG

SEQ ID NO: 50404 - protein, 153 aa, Thioclava pacifica
  REGION 1..153: note = tr|A0A074JJZ3|A0A074JJZ3_9RHOB NADPH-dependent 7-cyano-7-deazaguanine reductase OS=Thioclava pacifica DSM 10166 OX=1353537 GN=queF PE=3 SV=1
MSTDTSGLTQLGQATELPQSPEEAVLERVPQPRAGERYLVRFTAPEFTSLCPLTGQPDFAHIMIDYVPRDWLVESKSLKLFLGSFRNHGAFHEDCSVMIGQRLRDLLDPEWLRIGAYWYPRGGIPIDVFWQSGPQPTDLWIPDQGVPPYRGRG

SEQ ID NO: 50405 - protein, 153 aa, Thioclava sp.
  REGION 1..153: note = tr|A0A4V3ET57|A0A4V3ET57_9RHOB NADPH-dependent 7-cyano-7-deazaguanine reductase OS=Thioclava sp. ES.032; OX = 1798206 GN=queF PE=3 SV=1
MSTDTSGLTQLGQSTDLPQTPDEAVLERVPQPRAGERYLVRFTAPEFTSLCPLTGQPDFAHIMIDYVPRDWLVESKSLKLFLGAFRNHGAFHEDCSVMIGQRLRDLLEPEWLRIGAYWYPRGGIPIDVFWQSAPKPEDMWIPDQGVPPYRGRG

SEQ ID NO: 50406 - protein, 153 aa, Thioclava sp.
  REGION 1..153: note = tr|A0A1T2A471|A0A1T2A471_9RHOB NADPH-dependent 7-cyano-7-deazaguanine reductase OS=Thioclava sp. F28-4; OX = 1915315 GN=queF PE=3 SV=1
MSTDTSGLTQLGQSTDLPQTPDEAVLERVPQPRKGERYLVRFTAPEFTSLCPLTGQPDFAHIMIDYVPRDWLVESKSLKLFLGAFRNHGAFHEDCSVMIGQRLRDLLEPEWLRIGAYWYPRGGIPIDVFWQSAPKPEDMWIPDQGVPPYRGRG

SEQ ID NO: 50407 - protein, 129 aa, Thiocystis violascens
  REGION 1..129: note = tr|I3Y9V8|I3Y9V8_THIV6 NADPH-dependent 7-cyano-7-deazaguanine reductase OS=Thiocystis violascens (strain ATCC 17096 / DSM 198 / 6111) OX=765911 GN=queF; PE = 3 SV=1
MSSAPSKTLEIFPNPQTERDYTVRIRVPEFTCLCPKTGQPDFAELTLEYVPDRVCVELKSLKTYVWSYRDEGAFHEAVTNRILTDLIEAVEPRFMRLTADFNVRGGIYTTVVAEHRAAGWQPPVPVQLP

SEQ ID NO: 50408 - protein, 129 aa, Thioflavicoccus mobilis
  REGION 1..129: note = tr|L0H3K9|L0H3K9_9GAMM NADPH-dependent 7-cyano-7-deazaguanine reductase OS=Thioflavicoccus mobilis 8321 OX=765912 GN=queF PE=3 SV=1
MPTRPTKDLETFPNPEPSRDYTVRIRVPEFTCLCPKTGQPDFAELTLEYVPDALCVELKSLKLYVWSFRDEGAFHEAVTNRILADLVTALAPRFMRLRADFNVRGGIYTTIVAEHRDPDWAIPPRIELP

SEQ ID NO: 50409 - protein, 126 aa, unidentified
  source 1..126: note = Thioflexothrix psekupsii
  REGION 1..126: note = tr|A0A251XBI9|A0A251XBI9_9GAMM NADPH-dependent 7-cyano-7-deazaguanine reductase OS=Thioflexothrix psekupsii OX=1570016 GN=queF PE=3 SV=1
MPSVPSRELEVFANPHPQRDYTIEMKIPEFTCLCPKTGQPDFATLHVKYIPDLWCLELKALKLYCWSYRNEGAFHEAVTNQILTDLVAACAPRYLQLRAEFYVRGGIYTTVTAEYHQGEQKEQGQG

SEQ ID NO: 50410 - protein, 129 aa, unidentified
  source 1..129: note = Thiogranum longum
  REGION 1..129: note = tr|A0A4R1HB33|A0A4R1HB33_9GAMM NADPH-dependent 7-cyano-7-deazaguanine reductase OS=Thiogranum longum; OX = 1537524 GN=queF PE=3 SV=1
MSTQPSKALETFDNPHPQRDYTIRIRMPEFTCLCPKTGQPDFAELELEYVPHEYCVELKSLKMYIWSFRDEGAFHEDVTNQILDKLVSVCNPRFMRLTADFNVRGGVYTTIVAEHRDPVWKAPERVELP

SEQ ID NO: 50411 - protein, 129 aa, Thiohalobacter thiocyanaticus
  REGION 1..129: note = tr|A0A426QFY5|A0A426QFY5_9GAMM NADPH-dependent 7-cyano-7-deazaguanine reductase OS=Thiohalobacter thiocyanaticus OX=585455 GN=queF PE=3 SV=1
MPSQPSKDLETFDNPQPERDYTIRIRVPEFTCLCPKTGQPDFATLHLEYVPEYKCVELKSLKLYVWAFRDQGAFHEAVTNRILDDLVAAIQPRFMRLTAEFNVRGGIYTTVVAEHRAEHWQPAPPVTLP

SEQ ID NO: 50412 - protein, 129 aa, Thiohalobacter thiocyanaticus
  REGION 1..129: note = tr|A0A1Z4VRW0|A0A1Z4VRW0_9GAMM NADPH-dependent 7-cyano-7-deazaguanine reductase OS=Thiohalobacter thiocyanaticus OX=585455 GN=queF PE=3 SV=1
MPSQPSKDLETFDNPQPERDYTIRIRVPEFTCLCPKTGQPDFATLDLEYVPEHKCVELKSLKLYVWSFRDEGAFHEAVTNRILDDLVAAIQPRFMRLTAEFNVRGGIYTTVVAEYRAEYWQPAPPVSLP

SEQ ID NO: 50413 - protein, 129 aa, Thiohalomonas denitrificans
  REGION 1..129: note = tr|A0A1G5PII9|A0A1G5PII9_9GAMM NADPH-dependent 7-cyano-7-deazaguanine reductase OS=Thiohalomonas denitrificans OX=415747 GN=queF PE=3 SV=1
MPTQPSKTLETFDNPAPAMDYTIRIEIPEFTCLCPKTGQPDFATIYIDYVPDERCLELKALKLYIWSFREEGAFHEKVTNDMLADFIAACQPRFMRVTGRFNVRGGIYTSITAEHRKEGWQPPQPVTLP

SEQ ID NO: 50414 - protein, 129 aa, Thiohalophilus thiocyanatoxydans
  REGION 1..129: note = tr|A0A4R8INZ4|A0A4R8INZ4_9GAMM NADPH-dependent 7-cyano-7-deazaguanine reductase OS=Thiohalophilus thiocyanatoxydans OX=381308 GN=queF PE=3 SV=1
MPSQPSKTLETFDNPMPERDYTIRIEVPEFTCLCPKTGQPDFATLYLEYVPEAKCVELKSLKMYVWAYRDEGAFHEKVTNTILDDLVKATEPRFMRLTAKFNVRGGIYTSVVAEHRQSGWQAPEAVTLP

SEQ ID NO: 50415 - protein, 153 aa, Thiohalorhabdus denitrificans
  REGION 1..153: note = tr|A0A0N8PNH1|A0A0N8PNH1_9GAMM NADPH-dependent 7-cyano-7-deazaguanine reductase OS=Thiohalorhabdus denitrificans OX=381306 GN=queF PE=3 SV=1
MPDYHDLRYLGQTDSPLPESPEQTELEAVPDPHADIDYLVRFTVPEFTSLCPVTGQPDFAHLVVDYVPDGLIVESKSLKLFLGAFRNHGAFHEDCTLLIAKRIQAAIQPKWLRIGGYWYPRGGIPIDVFYQTGEPPAGVWIPDQGVPPYRGRG

SEQ ID NO: 50416 - protein, 132 aa, Thiohalospira halophila
  REGION 1..132: note = tr|A0A1I1N6L7|A0A1I1N6L7_9GAMM NADPH-dependent 7-cyano-7-deazaguanine reductase OS=Thiohalospira halophila DSM 15071 OX=1123397 GN=queF PE=3 SV=1
MTTQPSRDLETFPNPTPERDYTVRFVIPEFTCLCPKTGQPDFATFYIDYIPGTTCVELKSLKLYMWSFRDEGAFHEAVTNRITDDLVTAIVPRFLRVTGRFNVRGGIYTDVTTEHRAEGWQPAAPVQLPPRE

SEQ ID NO: 50417 - protein, 129 aa, unidentified
  source 1..129: note = Thiolapillus brandeum
  REGION 1..129: note = tr|W0TKG7|W0TKG7_9GAMM NADPH-dependent 7-cyano-7-deazaguanine reductase OS=Thiolapillus brandeum; OX = 1076588 GN=queF PE=3 SV=1
MPSQPSKELETFDNPQPERDYTIRIRIPEFTCLCPKTGQPDFAELHLEYVPDHLCVELKALKMYVWSFRDEGAFHEAVTNRILDDLVTATQPRFMRLTADFNVRGGIYTQVVAEYRDPDWQAPACVDLP

SEQ ID NO: 50418 - protein, 275 aa, unidentified
  source 1..275: note = Thiomicrorhabdus sp.
  REGION 1..275: note = tr|A0A4V1HI26|A0A4V1HI26_9GAMM NADPH-dependent 7-cyano-7-deazaguanine reductase OS=Thiomicrorhabdus sp. G1 OX=2580412 GN=queF PE=3 SV=1
MSSNKATDSLLGKTTPYCAEYDASLLFPIARKEKRDELGIDELNLPFTGLDIWTGYEISWLNAKGKPVVRIAEFAFQADSPNLVESKSFKLYLNSFNGSRFAGEAEVIQLMEKDLSEASGGPVVIDFKPLHGHELLFGDLPGENIDELDITVDAYQVDASLLKTLSNKVEQETINSHLLKSNCLVTAQPDWGSVVIRYSGQEIEVESLLKYLISFREHNEFHEQCVERIFMDISKHCQPTQLTVYARYVRRGGLDINPYRSNFEDEFDISRTMRQ

SEQ ID NO: 50419 - protein, 280 aa, unidentified
  source 1..280: note = Thiomicrospira aerophila
  REGION 1..280: note = tr|W0DYM9|W0DYM9_9GAMM NADPH-dependent 7-cyano-7-deazaguanine reductase OS=Thiomicrospira aerophila AL3 OX=717772 GN=queF PE=3 SV=1
MSDANGLVGDVAASQLGKATLYPQNYDAGLLFPIPRQTKRDELNISGQKLPFTGVDVWNAYEISWLNPKGKPMVAIGQFILRADTPNIIESKSFKLYLNSFNASRFDSQAAVAHIMEQDLSAAAGGKVKVHLSSLNQEPCLVSDIDRAECLDFQDLDIDTYQVNPGFLRAGNQYAEEAFYSHLLKSNCLVTGQPDWGTVVIRYRGPKIDRAGLLRYIISFRDHNEFHEQCVERMFCDIQRQCQPDALTVYARYVRRGGLDINPFRSNFQSEAVMPRLVRQ

SEQ ID NO: 50420 - protein, 280 aa, unidentified
  source 1..280: note = Thiomicrospira cyclica
  REGION 1..280: note = tr|F6DBH9|F6DBH9_THICA NADPH-dependent 7-cyano-7-deazaguanine reductase OS=Thiomicrospira cyclica (strain DSM 14477 / JCM 11371 / ALM1) OX=717773 GN=queF; PE = 3 SV=1
MSDAKVLVGDVAASQLGKTTVYPQQYDAGLLFPIPRQTKRDELAIDAQKLPFTGVDVWNAYEISWLNLKGKPMVAMGQFTLRADTPNIIESKSFKLYLNSFNASRFESQAAVAHTMERDLSAVAGGKVKVQLSSLNQEPCLVSDIDRAECLDFQDLEIDTYQVNPDFLRAGNQYAEEAFYSHLLKSNCLVTGQPDWGTVVIRYRGPKIDRAGLLRYIISFRDHNEFHEQCVERMFCDIQRQCQPDALTVYARYVRRGGLDINPFRSNFQSEAVMPRLVRQ

SEQ ID NO: 50421 - protein, 273 aa, Thiomicrospira sp.
  REGION 1..273: note = tr|A0A0X3T993|A0A0X3T993_9GAMM NADPH-dependent 7-cyano-7-deazaguanine reductase OS=Thiomicrospira sp. WB1; OX = 1685380 GN=queF PE=3 SV=1
MTRAEHSQLGRTTRYCNQYDPSLLFPIPRSEKRDELGIQAEALPFSGVDVWQAFEVSWLDAQGKPQVRLVRFEIPASSPNLIESKSFKLYLNSFNGTRFESEQAVTSLWQQDLSDAAGAPVGINVQSVSEPQTLIGGPEGICLDDESVTIERYQVTPDLLKADDSTRVGETLYSHLLKSNCLVTGQPDWGSVVIDYTGPKIDRAALLKYLVSFREHNEFHEQCVERVFTDLKRHCQPEKLTVYARYVRRGGLDINPYRSDWQTEFDLRRWVRQ

SEQ ID NO: 50422 - protein, 282 aa, Thiomicrospira sp.
  REGION 1..282: note = tr|A0A0X3TE89|A0A0X3TE89_9GAMM NADPH-dependent 7-cyano-7-deazaguanine reductase OS=Thiomicrospira sp. XS5; OX = 1775636 GN=queF PE=3 SV=1
MTNTLSPKSDSTANQSLLGQATPYCTQYDPSLLFPVPRQEKRDELGVSPDALPFSGQDVWTGFEISWLNDKGKPQVGWALFFFPAESPNLIESKSFKLYLNSFNGTRFASAEVVKQHWITDLSQACGGEVKVALYDLDEPQTLIGAPPGECLDDLDIEVSDYQIRPEWLTTVSSTPVSETLYSHLLKSNCLVTGQPDWGSIVIRYEGPKIDRENLLKYLVSFREHNEFHEQCVERVFVDLMHYCQPEKLTVYARYVRRGGLDINPYRSNFETDFDLRRLVRQ

SEQ ID NO: 50423 - protein, 150 aa, Thiomonas arsenitoxydans
  REGION 1..150: note = tr|D6CUG0|D6CUG0_THIA3 NADPH-dependent 7-cyano-7-deazaguanine reductase OS=Thiomonas arsenitoxydans (strain DSM 22701 / CIP 110005 / 3As); OX = 426114 GN=queF PE=3 SV=1
MNSEFQPNRKKMTTKPSKSLQTFPNPAPERDYHIHMQVPEFTCLCPLTGQPDFARFDIDFIPDKKCVELKSLKLYMWSYRDEGAFHEKVTNAILDDLVKAMSPRFLRVTARWYVRGGIYTNVVVEHRKRGWKPTPRVDLTQFDAAEPAAN

SEQ ID NO: 50424 - protein, 139 aa, Thiomonas bhubaneswarensis
  REGION 1..139: note = tr|A0A0K6HZ39|A0A0K6HZ39_9BURK NADPH-dependent 7-cyano-7-deazaguanine reductase OS=Thiomonas bhubaneswarensis OX=339866 GN=queF PE=3 SV=1
MTTKPSKTLQTFPNPAPGRDYHIHMQVPEFTCLCPLTGQPDFARFDIDFIPDKKCVELKSLKLYMWSYRDEGAFHEKVTNTILDDLVKAMSPRFLRVTARWYVRGGIYTSVVVEHRKRGWKPAPRVDLTQFDAADPTAA

SEQ ID NO: 50425 - protein, 141 aa, Thiomonas delicata
  REGION 1..141: note = tr|A0A238D7V9|A0A238D7V9_THIDL NADPH-dependent 7-cyano-7-deazaguanine reductase OS=Thiomonas delicata; OX = 364030 GN=queF PE=3 SV=1
MSTQPSKTLQTFPNPAPERDYHIHMQVPEFTCLCPLTGQPDFARIVLDIIPDKKCVELKSLKLYMWSYRNEGAFHEKVTNTILDDLVKALSPRFARVTAQWYVRGGIYTNVVVEHHKRGWKPKPRVDLGQFDPAQPAAMGG

SEQ ID NO: 50426 - protein, 139 aa, Thiomonas intermedia
  REGION 1..139: note = tr|D5X274|D5X274_THIK1 NADPH-dependent 7-cyano-7-deazaguanine reductase OS=Thiomonas intermedia (strain K12) OX=75379 GN=queF PE=3 SV=1
MTTKPSKSLQTFPNPAPERDYHIHMQVPEFTCLCPLTGQPDFARFDIDFIPDKKCVELKSLKLYMWSYRDEGAFHEKVTNAILDDLVKAMSPRFLRVTARWYVRGGIYTNVVVEHRKRGWKPTPRVDLTQFDAAEPAAN

SEQ ID NO: 50427 - protein, 141 aa, Thiomonas sp.; identical to SEQ ID NO: 50425
  REGION 1..141: note = tr|A0A259PBV9|A0A259PBV9_9BURK NADPH-dependent 7-cyano-7-deazaguanine reductase OS=Thiomonas sp. 15-66-11; OX = 1970452 GN=queF PE=3 SV=1

SEQ ID NO: 50428 - protein, 139 aa, Thiomonas sp.; identical to SEQ ID NO: 50426
  REGION 1..139: note = tr|A0A078BM10|A0A078BM10_9BURK NADPH-dependent 7-cyano-7-deazaguanine reductase OS=Thiomonas sp. CB2; OX = 554131 GN=queF PE=3 SV=1

SEQ ID NO: 50429 - protein, 130 aa, Thioploca ingrica
  REGION 1..130: note = tr|A0A090AJ65|A0A090AJ65_9GAMM NADPH-dependent 7-cyano-7-deazaguanine reductase OS=Thioploca ingrica; OX = 40754 GN=queF PE=3 SV=1
MPTQSSKILETFANPHWQRDYTIHIRIPEFTCLCPKTGQPDFATLFLDYVPDKLCLELKALKNYIWSYRNEGTFHETVTNQILTDLVQACPPRFMRLRAEFNVRGGIYTTIVVEHQAPGWIPPMPVHLPS

SEQ ID NO: 50430 - protein, 276 aa, unidentified
  source 1..276: note = Thiopseudomonas denitrificans
  REGION 1..276: note = tr|A0A4R6U6L9|A0A4R6U6L9_9GAMM NADPH-dependent 7-cyano-7-deazaguanine reductase OS=Thiopseudomonas denitrificans OX=1501432 GN=queF PE=3 SV=1
MLHPAEHSLLGKQTRYKSRYDASLLFAIERRVKWEQFGLDGSQLPYLGVDIWTAYELSWLLPSGKPVVAMAEVEVPADSPNIIESKSFKLYLNSFNQSVFADTHAVCSLMEHDLSAVAGAAVRVRMLDLDQATAQGLAVLPGACIDGLEIDIGQYHEPDAGLLQTSEQVAHEQLHSHLLRSCCPVTGQPDWGSVAIDYQGTKKLCRAGLLRYLVSFREHQDFHEQCVERIFLDLHRLLEPERLTVHARYLRRGGLDINPYRSTHQAPWDTGRLVRQ

SEQ ID NO: 50431 - protein, 129 aa, unidentified
  source 1..129: note = Thiorhodococcus drewsii
  REGION 1..129: note = tr|G2E1Z1|G2E1Z1_9GAMM NADPH-dependent 7-cyano-7-deazaguanine reductase OS=Thiorhodococcus drewsii AZ1 OX=765913 GN=queF PE=3 SV=1
MPSVPSKSLEIFPNPQPERDYTIRIRVPEFTCLCPKTGQPDFAELTLEYIAEQHCVELKSLKTYVWSYRDEGAFHEAVTNRILDDLVEATQPRFMRLTADFNVRGGIYTTVVAEHRASGWQAPTPVSLP

SEQ ID NO: 50432 - protein, 117 aa, Thiorhodospira sibirica
  REGION 1..117: note = tr|G4E267|G4E267_9GAMM NADPH-dependent 7-cyano-7-deazaguanine reductase OS=Thiorhodospira sibirica ATCC 700588 OX=765914 GN=queF PE=3 SV=1
MSASSTAVLETFPNPAPERDYTIEMRIPEFTCLCPKTGQPDFATLELSYIPDALCVELKSLKLYVWSFRDQGAFHEAITNRILEDLVTLLQPRFMRLSAIFNVRGGIYTTVTVEHRQ

SEQ ID NO: 50433 - protein, 129 aa, Thiorhodovibrio sp.
  REGION 1..129: note = tr|H8Z402|H8Z402_9GAMM NADPH-dependent 7-cyano-7-deazaguanine reductase OS=Thiorhodovibrio sp. 970 OX=631362 GN=queF PE=3 SV=1
MPSEPSKTLETFPNPQPQRDYSIRIQVPEFTCLCPKTGQPDFAELMIEYVPDALCVELKSLKLYVWSFRDEGHFHEDVTNRILDDVVAALSPRFIRLTAEFNVRGGIYTTVVAEHRAPGWTPAEPVRLS

SEQ ID NO: 50434 - protein, 129 aa, Thiothrix caldifontis
  REGION 1..129: note = tr|A0A1H3YB51|A0A1H3YB51_9GAMM NADPH-dependent 7-cyano-7-deazaguanine reductase OS=Thiothrix caldifontis; OX = 525918 GN=queF PE=3 SV=1
MSTRPSKDLETFPNPNPQRDYTIRIDMPEFTCICPKTGQPDFAQFKLEYVPDQKNVELKSLKLYMWSYREEGAFHEAVTNKILEDLVAATEPRFMRLTGVWNVRGGIYTTVVVEHHQAGWQPAPKVELP

SEQ ID NO: 50435 - protein, 129 aa, Thiothrix lacustris
  REGION 1..129: note = tr|A0A1Y1QKG0|A0A1Y1QKG0_9GAMM NADPH-dependent 7-cyano-7-deazaguanine reductase OS=Thiothrix lacustris; OX = 525917 GN=queF PE=3 SV=1
MSTRPSKELDTFPNPNPQRDYTIRIDLPEFTCVCPKTGQPDFAQFKLEYVAADKCVELKSLKLYMWSYREEGAFHEAVTNKILEDLVAATDPRFMRLTGVWNVRGGVYTTVIVEHRQAGWQPAPKVELP

SEQ ID NO: 50436 - protein, 129 aa, Thiothrix lacustris
  REGION 1..129: note = tr|A0A1Y1Q9V7|A0A1Y1Q9V7_9GAMM NADPH-dependent 7-cyano-7-deazaguanine reductase OS=Thiothrix lacustris; OX = 525917 GN=queF PE=3 SV=1
MSTRPSKDLETFPNPNPQRDYTIRIDLPEFTCICPKTGQPDFAQFKIEYVPDGKCVELKALKLYMWSYREEGAFHEAVTNKILEDLVAATEPRFMRLTGVWNVRGGVYTTVIVEHRKAGWQPAPKVELP

SEQ ID NO: 50437 - protein, 154 aa, Thiothrix sp.
  REGION 1..154: note = tr|A0A5C7QKV8|A0A5C7QKV8_9GAMM NADPH-dependent 7-cyano-7-deazaguanine reductase OS=Thiothrix sp. OX=1032; GN = queF PE=3 SV=1
MNELIYQNLSQLGSATKLPESPENAILESVQNPQADVNYVVRFTAPEFTSLCPITGQPDFAHLVIDYIPDQRLVESKSLKLFLGSFRNHGAFHEDCTISIARRLIAEIQPKWLRIGGYWYPRGGMPIDVFFAQGEIPKGVWIPEQGVAGYRGRG

SEQ ID NO: 50438 - protein, 154 aa, Thiothrix sp.
  REGION 1..154: note = tr|A0A5C7R6S7|A0A5C7R6S7_9GAMM NADPH-dependent 7-cyano-7-deazaguanine reductase OS=Thiothrix sp. OX=1032; GN = queF PE=3 SV=1
MNETIYQNLSQLGGATKLPESPETAVLESVQNPQADVDYVVRFTAPEFTSLCPITGQPDFAHLVIDYIPDQRLVESKSLKLFLGSFRNHGAFHEDCTVSIARRLIAEIKPKWLRIGGYWYPRGGIPIDVFFAQGEIPKGVWIPEQGVAGYRGRG

SEQ ID NO: 50439 - protein, 129 aa, unidentified
  source 1..129: note = Thiotrichaceae bacterium
  REGION 1..129: note = tr|A0A2A5GA00|A0A2A5GA00_9GAMM NADPH-dependent 7-cyano-7-deazaguanine reductase OS=Thiotrichaceae bacterium OX=2030882 GN=queF PE=3 SV=1
MASKPSKELEIFDNPTPERDYTIRISLPEFTCLCPKTGQPDFATLDLEYVPDKSCIELKALKMYIWSFRDEGTFHEAVTNSILSDLVAACDPRFMRLTAEFNVRGGVYTSIVAEHKNPDWTAPAVVTLP

SEQ ID NO: 50440 - protein, 129 aa, unidentified
  source 1..129: note = Thiotrichaceae bacterium
  REGION 1..129: note = tr|A0A2A4WIS5|A0A2A4WIS5_9GAMM NADPH-dependent 7-cyano-7-deazaguanine reductase OS=Thiotrichaceae bacterium OX=2030882 GN=queF PE=3 SV=1
MSSTPSKALETFENPNQDRDYTIRIRIPEFTCLCPKTGQPDFATINIDYVPEQSCIELKALKMYIWSFRDQGAFHEAVTNQMLNDFVAACDPRFMRVTAEFNVRGGVYTNVIAEHRHPDWIAPEPVHLP

SEQ ID NO: 50441 - protein, 271 aa, unidentified
  source 1..271: note = Thiotrichales bacterium
  REGION 1..271: note = tr|A0A259KC69|A0A259KC69_9GAMM NADPH-dependent 7-cyano-7-deazaguanine reductase OS=Thiotrichales bacterium 34-46-19 OX=1970605 GN=queF PE=3 SV=1
MSAIEQSQLGHHTHYPTHYDPSLLFAVPRALNRAQLSPSPMQGVDVWTAYELSWLNAQGLPQVAIAEFSIPASSPNLIESKSFKLYLNSLNAHKFSDSHAMMTQVTHDLSGCAGAMVTMRLHDVNHLSIGQLPGQCLDKLPVNINSYTPDPALLSLDPHLSGDGCWHSHLLKSNCPVTNQPDWGSVVIEMRALKLPKAESLLAYIVSYRDHQGFHEHCVESIYSDLWHTFQPERLTVYARYVRRGGLDINPWRCHDKHAPTWPVMPRLARQ

SEQ ID NO: 50442 - protein, 129 aa, unidentified; identical to SEQ ID NO: 50440
  source 1..129: note = Thiotrichales bacterium
  REGION 1..129: note = tr|A0A2A4RVE9|A0A2A4RVE9_9GAMM NADPH-dependent 7-cyano-7-deazaguanine reductase OS=Thiotrichales bacterium OX=2026796 GN=queF PE=3 SV=1

SEQ ID NO: 50443 - protein, 131 aa, unidentified
  source 1..131: note = Bathymodiolus puteoserpentis
  REGION 1..131: note = tr|A0A483ALA5|A0A483ALA5_9BACT NADPH-dependent 7-cyano-7-deazaguanine reductase OS=thiotrophic endosymbiont of Bathymodiolus puteoserpentis (Logatchev); OX = 343240 GN= queF PE=3 SV=1
MSSQASKTLEVFDNPNRARDYVIQIELPEFTCLCPKTGQPDFATLHLEYIADKDCVELKSLKMYVWSFRDEGAFHEAVTNQILEDLVAATNPRFMRLKAIFNVRGGVYTTVIAEHQQSGWQPKPSVDLKHI

SEQ ID NO: 50444 - protein, 126 aa, Thiovulum sp.
  REGION 1..126: note = tr|J0UY58|J0UY58_9HELI NADPH-dependent 7-cyano-7-deazaguanine reductase OS=Thiovulum sp. ES; OX = 1177931 GN=queF PE=3 SV=1
MKYGEKEIAEFNPETDLEIWENTNENRFAIKIELPEFSNLCPRSGYPDYATIYLEYIPNEFVVELKALKLYMNTFRNRYISHENSANEIFSILVKKLKPHYLKITADFYPRGNVHTVIEIDTDMQK

SEQ ID NO: 50445 - protein, 299 aa, unidentified
  source 1..299: note = Tibeticola sediminis
  REGION 1..299: note = tr|A0A3N4US04|A0A3N4US04_9BURK NADPH-dependent 7-cyano-7-deazaguanine reductase OS=Tibeticola sediminis; OX = 1917811 GN=queF PE=3 SV=1
MNPSPSKHPSESSSPAAQDLRPEQSPLGKPARYCDRYDPSLLFPLPRAPKRAEIGITGAPPFGGADLWTAYEVSWLNPRGKPQVAIAHITVPAESTHIVESKSFKLYLNSYNNTRFDDAEAVRTRLREDLSAAVWQGGPVRASVGVRLLGPEAFDAQPIHELDGLSLDRLDVECTHDTPAPELLRAAFDEQPVEETLVSHLLKSNCLVTGQPDWASVQIHYSGPQIDQEGLLRYLVSFRNHNEFHEQCVERIFMDLWTRCKPAKLTVYARYTRRGGLDINPWRSSHPAPLPANVRTARQ

SEQ ID NO: 50446 - protein, 165 aa, Tissierella creatinophila
  REGION 1..165: note = tr|A0A1U7M725|A0A1U7M725_TISCR NADPH-dependent 7-cyano-7-deazaguanine reductase OS=Tissierella creatinophila DSM 6911 OX=1123403 GN=queF PE=3 SV=1
MFERKAEELEGVTLLGNQGTSYDYNYNPSFLETFENKHRENDYFVKFNSPEFTSLCPKTGQPDFASIYISYVPDVLMVESKSLKLYLFSFRNHGDFHEDCMNIIMKDLIKLLDPKYIEVWGRFTPRGGISIDPYCNYGKKGTKWQDVAEKRLFYHDMNPENINNR

SEQ ID NO: 50447 - protein, 165 aa, Tissierella sp.
  REGION 1..165: note = tr|A0A265Q4T4|A0A265Q4T4_9FIRM NADPH-dependent 7-cyano-7-deazaguanine reductase OS=Tissierella sp. P1; OX = 1280483 GN=queF PE=3 SV=1
MSGRKEQELEGITLLGNQGTSYNYNYNPSVLETFENKHKENDYFVKFNCPEFTSLCPKTGQPDFASVYISYVPERLMVESKSLKLYLFSFRNHGDFHEDCMNIIMKDLISLLDPKYIEVWGKFTPRGGISIDPYCNYGKEGTKWKDVAEKRLFYHDMNPENINNR

SEQ ID NO: 50448 - protein, 151 aa, Tistlia consotensis
  REGION 1..151: note = tr|A0A1Y6CL22|A0A1Y6CL22_9PROT NADPH-dependent 7-cyano-7-deazaguanine reductase OS=Tistlia consotensis USBA 355 OX=560819 GN=queF PE=3 SV=1
MTGEELTQLGRSVQAPASPDEAVLERVPNGNPDLDFLARFTCPEFTALCPVTGQPDFAHLVIDYVPDRWLVESKSLKLYLAAFRNEGCFHEDTTLRIARRIVAAVAPRWLRIGGYWYPRGGIPIDVFWQSGPPPAGLWLPDQGVPPYRGRG

SEQ ID NO: 50449 - protein, 157 aa, Tistrella mobilis
  REGION 1..157: note = tr|I3TQ97|I3TQ97_TISMK NADPH-dependent 7-cyano-7-deazaguanine reductase OS=Tistrella mobilis (strain KA081020-065) OX=1110502 GN=queF PE=3 SV=1
MTGPSETIYAGLEQLGRSTDLPASPDQAVLERVANPHPGTRYAVRFVCPEFTSLCPITGQPDFAHLVIDYVPGDWLVESKSLKLYLHAFRNHGDFHEACTVGIGKRLAELLAPEWLRIGGYWYPRGGIPIDVFYATGPVPADLWIPDQGVPPYRGRG

SEQ ID NO: 50450 - protein, 159 aa, Tistrella mobilis
  REGION 1..159: note = tr|A0A161R5H3|A0A161R5H3_9PROT NADPH-dependent 7-cyano-7-deazaguanine reductase OS=Tistrella mobilis; OX = 171437 GN=queF PE=3 SV=1
MPVTGPSETIYAGLEQLGRSTDLPASPDQAVLERVANPHPGTRYAVRFVCPEFTSLCPITGQPDFAHLVIDYVPGDWLVESKSLKLYLHAFRNHGDFHEACTVGIGKRLAELLAPEWLRIGGYWYPRGGIPIDVFYATGPVPADLWIPDQGVPPYRGRG

SEQ ID NO: 50451 - protein, 157 aa, Tistrella sp.; identical to SEQ ID NO: 50449
  REGION 1..157: note = tr|A0A2D8QHC6|A0A2D8QHC6_9PROT NADPH-dependent 7-cyano-7-deazaguanine reductase OS=Tistrella sp.; OX = 2024861 GN=queF PE=3 SV=1

SEQ ID NO: 50452 - protein, 159 aa, Tistrella sp.; identical to SEQ ID NO: 50450
  REGION 1..159: note = tr|A0A2E3ETB1|A0A2E3ETB1_9PROT NADPH-dependent 7-cyano-7-deazaguanine reductase OS=Tistrella sp.; OX = 2024861 GN=queF PE=3 SV=1

SEQ ID NO: 50453 - protein, 283 aa, Tolumonas auensis
  REGION 1..283: note = sp|C4L9Z3|QUEF_TOLAT NADPH-dependent 7-cyano-7-deazaguanine reductase OS=Tolumonas auensis (strain DSM 9187 / TA4) OX=595494 GN=queF PE=3 SV=1
MSHASPYENNPLLANLTLGQKTDYIAEYSPQLLQPVPRQLNRDALNLAGNLPFHGEDLWTLYEISWLNNKGKPVVAIGEARIDAGSINLIESKSFKLYLNSFNQTRFADLATVRHTLEQDLSKCAEGAIKVALYPLSEAAHHIGTFPGECIDDLDIVIDEYHFSSDWLEQAGDNHTIVEETLHSHLLKSNCLVTGQPDWGSVVIHYKGPRINREKMLRYLISFRQHNEFHEQCVERIFVDLQRHCQPEKLTVYARYTRRGGLDINPFRSNWETAPANMRLIRQ

SEQ ID NO: 50454 - protein, 125 aa, unidentified
  source 1..125: note = Tolypothrix bouteillei
  REGION 1..125: note = tr|A0A0C1NC44|A0A0C1NC44_9CYAN NADPH-dependent 7-cyano-7-deazaguanine reductase OS=Tolypothrix bouteillei VB521301 OX=1479485 GN=queF PE=3 SV=1
MEMKYGERNIAEGELITFPNPRVGRRYNIDITLPEFTCKCPFSGYPDFATIYITYIPDERVVELKALKLYINNYRDRYISHEETANQILDDFVAVCDPLEVVVKADFAPRGNVHMVVEVKHQKNN

SEQ ID NO: 50455 - protein, 123 aa, unidentified
  source 1..123: note = Tolypothrix campylonemoides
  REGION 1..123: note = tr|A0A0C2LRR8|A0A0C2LRR8_9CYAN NADPH-dependent 7-cyano-7-deazaguanine reductase OS=Tolypothrix campylonemoides VB511288 OX=1245935 GN=queF PE=3 SV=1
MEMKYGERNIAEGQLITFPNPRIGRRYDINITLPEFTCKCPFSGYPDFATIHVSYIPNERVVELKALKLYINSYRDRYISHEETANQILDDFVAACDPLEVTVKADFTPRGNVHTVISVRHQK

SEQ ID NO: 50456 - protein, 134 aa, Tolypothrix sp.; identical to SEQ ID NO: 46075
  REGION 1..134: note = tr|A0A0D6KHX0|A0A0D6KHX0_9CYAN NADPH-dependent 7-cyano-7-deazaguanine reductase OS=Tolypothrix sp. PCC 7601 OX=1188 GN=queF PE=3 SV=1

SEQ ID NO: 50457 - protein, 136 aa, Tolypothrix sp.
  REGION 1..136: note = tr|A0A218QHG3|A0A218QHG3_9CYAN NADPH-dependent 7-cyano-7-deazaguanine reductase OS=Tolypothrix sp. NIES-4075 OX=2005459 GN=queF PE=3 SV=1
MTNSLPETASESSPEKKYGEREIAEGQLIIFPNPRVGRRYNINISLPEFTCKCPFSGYPDFATIYISYVPDERVVELKALKLYINSYRDRYISHEESANQILDDFVAACDPLEVTVKADFTPRGNVHTVVEVHHQK

SEQ ID NO: 50458 - protein, 131 aa, Tolypothrix tenuis; identical to SEQ ID NO: 44147
  REGION 1..131: note = tr|A0A1Z4MVN5|A0A1Z4MVN5_9CYAN NADPH-dependent 7-cyano-7-deazaguanine reductase OS=Tolypothrix tenuis PCC 7101 OX=231146 GN=queF PE=3 SV=1

SEQ ID NO: 50459 - protein, 281 aa, Trabulsiella guamensis
  REGION 1..281: note = tr|A0A085A8A8|A0A085A8A8_9ENTR NADPH-dependent 7-cyano-7-deazaguanine reductase OS=Trabulsiella guamensis ATCC 49490 OX=1005994 GN=queF PE=3 SV=1
MSSYENHQALAGLTLGKATDYRDTYDASLLQGVPRSLNRDPLGLHADNLPFHGADIWTLYELSWLNAKGLPQVAVGHVELDNTTVNLVESKSFKLYLNSFNQTRFADQEAVRTTLERDLSACAQGKVSVALYRLEEIEGQPVAHFNGTCIDDQDIDIDNYQFSADYLQGAASGKRTEETLVSHLLKSNCLITHQPDWGSVQIQYRGAKIDREKLLRYLVSFRHHNEFHEQCVERIFNDIMRFCQPETLSVYARYTRRGGLDINPWRSNTDFAPATGRLARQ

SEQ ID NO: 50460 - protein, 281 aa, Trabulsiella odontotermitis
  REGION 1..281: note = tr|A0A0L0H116|A0A0L0H116_9ENTR NADPH-dependent 7-cyano-7-deazaguanine reductase OS=Trabulsiella odontotermitis OX=379893 GN=queF PE=3 SV=1
MSSYENHQALAGLTLGKTTDYRDTYDASLLQGVPRSLNRDPLGLHADSLPFHGADIWTLYELSWLNAKGLPQVAVGHVELDDTTANLVESKSFKLYLNSFNQTRFADWDAVRSTLERDLSACAQGKVTVALYRLDEVEGQPVAHFHGTCIDSQDIEIDNYQFSADYLQDAASGHIVEETLVSHLLKSNCLITHQPDWGSVQIQYRGAKIDREKLLRYLVSFRHHNEFHEQCVERIFNDILRFCQPETLSVYARYTRRGGLDINPWRSNTDFSPATGRLARQ

SEQ ID NO: 50461 - protein, 154 aa, Tranquillimonas sp.
  REGION 1..154: note = tr|A0A438ALB8|A0A438ALB8_9RHOB NADPH-dependent 7-cyano-7-deazaguanine reductase OS=Tranquillimonas sp. M0103 OX=2486419 GN=queF PE=3 SV=1
MTDDIYADLTQLGGATRVPASPEAARLERVRNPQADVSYNVRFTAPEFTSLCPMTGQPDFAHLVIDYVPGDRLVESKSLKLYLTAFRNHGAFHEDCTISIARRLVACLDPLWLRIGGYWYPRGGIPIDVFWQTGPVPEGVWIPDQGVPPYRGRG

SEQ ID NO: 50462 - protein, 158 aa, Treponema saccharophilum
  REGION 1..158: note = tr|H7EGX6|H7EGX6_9SPIO NADPH-dependent 7-cyano-7-deazaguanine reductase OS=Treponema saccharophilum DSM 2985 OX=907348 GN=queF PE=3 SV=1
MRSESELSGVTLLGAGKTEYAYDYNPALLERFPNKHPGNDYMVTLNCPEFTSLCPKTGQPDFAEIRINYIPDQFIVESKSLKLYLFSFRNHGDFHEDCANIIMKDLVSLLEPKYIEVEGIFTPRGGISIYPFANYGKPDTPYELRARERLFSAIDRRR

SEQ ID NO: 50463 - protein, 161 aa, Treponema sp.
  REGION 1..161: note = tr|A0A353S7L0|A0A353S7L0_9SPIO NADPH-dependent 7-cyano-7-deazaguanine reductase OS=Treponema sp. OX=166; GN = queF PE=3 SV=1
MRSASELEGVTLLGGSTTYVTDYSPEILEKFPNKHPVNDYMVTFNCPEFTSLCPKTGQPDFAEIHINYIPDGFLVESKSLKLYLFSFRNHGDFHEDCVNIIMKDLVRLLEPKYLEVEGIFTPRGGISIYPFANYGRAGTRYASIAEERLFAAVDRRPVSHR

SEQ ID NO: 50464 - protein, 156 aa, Treponema sp.
  REGION 1..156: note = tr|A0A351Z1E5|A0A351Z1E5_9SPIO NADPH-dependent 7-cyano-7-deazaguanine reductase OS=Treponema sp. OX=166; GN = queF PE=3 SV=1
MRTDEELKGVTLLGGSTSYNRDYSPEILEKFPNKHPENDYMVTFNCPEFTSLCPKTGQPDFAEIKINYIPGPFLVESKSLKLYLFSFRNHGDFHEDCVNIIMKDLVKLLDPKYLEVKGIFTPRGGISIYPFANYAKKGSPYENTAKERLFSSLSSN

SEQ ID NO: 50465 - protein, 166 aa, Trichococcus collinsii
  REGION 1..166: note = tr|A0A143Z496|A0A143Z496_9LACT NADPH-dependent 7-cyano-7-deazaguanine reductase OS=Trichococcus collinsii; OX = 157076 GN=queF PE=3 SV=1
MTAGRNEADLNGITQLGNQQTKYPQDYDPKVLETFPNKHPDNDYFVKFNCPEFTSLCPMTGQPDFATIYISYVPGEIMVESKSLKLYLFSFRNHGDFHEDCMNIIMKDLIALMAPKYIEVWGKFTPRGGISIDPYCNYGKPGTKWADVAWQRLAQHDLYPEKVDNR

SEQ ID NO: 50466 - protein, 166 aa, Trichococcus flocculiformis
  REGION 1..166: note = tr|A0A143YS34|A0A143YS34_9LACT NADPH-dependent 7-cyano-7-deazaguanine reductase OS=Trichococcus flocculiformis OX=82803 GN=queF PE=3 SV=1
MTAGRNEADLNGITQLGNQQTKYPQDYDPKVLETFPNKHPDNDYFVKFNCPEFTSLCPMTGQPDFATIYISYVPGEIMVESKSLKLYLFSFRNHGDFHEDCMNIIMKDLIALMAPKYIEVWGKFTPRGGISIDPYCNYGKPDTRWADVAWQRLAQHDLYPEKVDNR

SEQ ID NO: 50467 - protein, 166 aa, unidentified
  source 1..166: note = Trichococcus ilyis
  REGION 1..166: note = tr|A0A143Z6I7|A0A143Z6I7_9LACT NADPH-dependent 7-cyano-7-deazaguanine reductase OS=Trichococcus ilyis; OX = 640938 GN=queF PE=3 SV=1
MTAGRNEADLNGITQLGNQQTKYPQDYAPEVLETFPNKHPDNDYFVKFNCPEFTSLCPMTGQPDFATIYISYVPGEIMVESKSLKLYLFSFRNHGDFHEDCMNIIMKDLIALMAPKYIEVWGKFTPRGGISIDPYCNYGKPDTKWADVAWQRLAQHDLYPEKVDNR

SEQ ID NO: 50468 - protein, 166 aa, Trichococcus palustris
  REGION 1..166: note = tr|A0A143YM30|A0A143YM30_9LACT NADPH-dependent 7-cyano-7-deazaguanine reductase OS=Trichococcus palustris; OX = 140314 GN=queF PE=3 SV=1
MPSGRKEKELTGITQLGNQQTKYQQDYAPEVLETFPNKHPDNDYFVKFNCPEFTSLCPMTGQPDFATIYISYVPGEIMVESKSLKLYLFSFRNHGDFHEDCMNIIMKDLITLMDPKYIEVWGKFTPRGGISIDPYCNYGKPGTKWEDVAWQRLSQHDLYPEKVDNR

SEQ ID NO: 50469 - protein, 166 aa, Trichococcus pasteurii
  REGION 1..166: note = tr|A0A1W1IDY2|A0A1W1IDY2_9LACT NADPH-dependent 7-cyano-7-deazaguanine reductase OS=Trichococcus pasteurii; OX = 43064 GN=queF PE=3 SV=1
MTAGRNEADLNGITQLGNQQTKYPQDYDPKVLETFPNKHPDNDYFVKFNCPEFTSLCPMTGQPDFATIYISYVPGEIMVESKSLKLYLFSFRNHGDFHEDCMNIIMKDLIALMAPKYIEVWGKFTPRGGISIDPYCNYGKPDTKWEDVAWQRLAQHDLYPEKVDNR

SEQ ID NO: 50470 - protein, 166 aa, Trichococcus patagoniensis
  REGION 1..166: note = tr|A0A2T5IBA1|A0A2T5IBA1_9LACT NADPH-dependent 7-cyano-7-deazaguanine reductase OS=Trichococcus patagoniensis OX=382641 GN=queF PE=3 SV=1
MTAGRNEADLNGITQLGNQQTKYPQDYDPKVLETFPNKHPDNDYFVKFNCPEFTSLCPMTGQPDFATIYISYVPGEIMVESKSLKLYLFSFRNHGDFHEDCMNIIMKDLIALMAPKYIEVWGKFTPRGGISIDPYCNYGKPDTKWADVAWQRLAQHDLYPEKVDNR

SEQ ID NO: 50471 - protein, 166 aa, Trichococcus sp.
  REGION 1..166: note = tr|A0A383TBS8|A0A383TBS8_9LACT NADPH-dependent 7-cyano-7-deazaguanine reductase OS=Trichococcus sp. ART1; OX = 2094020 GN=queF PE=3 SV=1
MTAGRNEADLNGITQLGNQQTKYPQDYDSKVLETFPNKHPDNDYFVKFNCPEFTSLCPMTGQPDFATIYISYVPGEIMVESKSLKLYLFSFRNHGDFHEDCMNIIMKDLIALMAPKYIEVWGKFTPRGGISIDPYCNYGQPGTKWADVAWQRLAQHDLYPEKVDNR

SEQ ID NO: 50472 - protein, 166 aa, Trichococcus sp.
  REGION 1..166: note = tr|A0A143Z2E3|A0A143Z2E3_9LACT NADPH-dependent 7-cyano-7-deazaguanine reductase OS=Trichococcus sp. ES5; OX = 872292 GN=queF PE=3 SV=1
MTAGRNEADLNGITQLGNQQTKYPQDYDPKVLETFPNKHPDNDYFVKFNCPEFTSLCPMTGQPDFATIYISYVPGEIMVESKSLKLYLFSFRNHGDFHEDCMNIIMKDLIALMVPKYIEVWGKFTPRGGISIDPYCNYGKPDTRWADVAWQRLAQHDLYPEKVDNR

SEQ ID NO: 50473 - protein, 141 aa, unidentified
  source 1..141: note = Trichodesmium erythraeum
  REGION 1..141: note = sp|Q113I7|QUEF_TRIEI NADPH-dependent 7-cyano-7-deazaguanine reductase OS=Trichodesmium erythraeum (strain IMS101) OX=203124 GN=queF PE=3 SV=1
MNYDETNNELFQESNMQELKYGERNILEGELITFPNPRIGRRYEINISLPEFTCKCPFSGYPDFATIHIKYIPNERVVELKAIKLYINSYRERYISHEESVNQILDDFVAACDPLEVKIKGDFLPRGNVHTTIEVEHYKAS

SEQ ID NO: 50474 - protein, 136 aa, unidentified; identical to SEQ ID NO: 47769
  source 1..136: note = Trichormus variabilis
  REGION 1..136: note = tr|A0A1Z4KT31|A0A1Z4KT31_ANAVA NADPH-dependent 7-cyano-7-deazaguanine reductase OS=Trichormus variabilis NIES-23 OX=1973479 GN=queF PE=3 SV=1

SEQ ID NO: 50475 - protein, 136 aa, unidentified
  source 1..136: note = Trichormus variabilis
  REGION 1..136: note = sp|Q3M4S2|QUEF_TRIV2 NADPH-dependent 7-cyano-7-deazaguanine reductase OS=Trichormus variabilis (strain ATCC 29413 / PCC 7937) OX=240292 GN=queF PE=3 SV=1
MSNSSPETVSQPSQEVKYGEREIAEGQLITFPNPRVGRRYDINITLPEFTCKCPFSGYPDFATIYITYVPDERVVELKALKLYINSYRDRYISHEESANQILDDFVAACDPLEATVKADFTPRGNVHTVVEVKHRK

SEQ ID NO: 50476 - protein, 274 aa, unidentified
  source 1..274: note = Trinickia caryophylli
  REGION 1..274: note = tr|A0A1X7ESD9|A0A1X7ESD9_TRICW NADPH-dependent 7-cyano-7-deazaguanine reductase OS=Trinickia caryophylli; OX = 28094 GN=queF PE=3 SV=1
MTPEQSPLGKASSYTEQYDPTLLFPIARGIAREQIGIGARLPFFGTDIWNAYELSWLNARGKPQIAIATFFVPAESPNIVESKSFKLYLGSFAQTRVESADALREMLKRDVSAACGATVSVRLAAPSEFHALEFDELDGLSLDRLDLEADVYHPDPALLTAAHDEAPIEETVFSNLLKSNCPVTGQPDWGSVQIHYVGPQIDHAGLLRYIISYRNHTGFHEQCVERIFIDILRECRPVKLAVYARYTRRGGLDINPFRTNYNLPMPDNARTARQ

SEQ ID NO: 50477 - protein, 274 aa, unidentified
  source 1..274: note = Trinickia soli
  REGION 1..274: note = tr|A0A2N7WBA4|A0A2N7WBA4_9BURK NADPH-dependent 7-cyano-7-deazaguanine reductase OS=Trinickia soli; OX = 380675 GN=queF PE=3 SV=1
MTPEHSPLGKSTTYTEQYDPALLFPIARGRAREAIGITAALPFFGTDIWNAYELSWLNARGKPQIAIATFFVPAESANIVESKSFKLYLGSFAQTRIESIDALRDTLKRDVSAACGATVSVRLSTPAEFAKLEFDELDGLSLDRLDLDADVYQPDPTLLKAALDEAPVEETLYSNLLKSNCPVTGQPDWGSVQIHYVGPQIDHAGLLRYIISYRSHTGFHEQCVERIFIDILRECRPVKLAVYARYTRRGGLDINPFRTNYNLPMPDNARTARQ

SEQ ID NO: 50478 - protein, 267 aa, unidentified
  source 1..267: note = Trinickia sp.
  REGION 1..267: note = tr|A0A4U1IG24|A0A4U1IG24_9BURK NADPH-dependent 7-cyano-7-deazaguanine reductase OS=Trinickia sp. 7GSK02; OX = 2571161 GN=queF PE=3 SV=1
MELGKTSVYESKYNPERLFAIPRRPKREELGITGELLPFVGYDLWNHYEVSWLDQRGKPQVATAQIAYPCDSEFIIESKSMKLYFNSLNNTRFESIDVLRDTIAADLSSRLKANVSVVVNPLQDQMHRIISPLEGVCIDDAEIDVEDFALNPQYLETERWQAEEMLYSNLLKSNCLVTGQPDWGSVWIKYRGKKISREGLLRYIVSFREHHEFHEQCVERIFVDIMRMCEPASLTVGARYTRRGGIDINPVRSTQNQKIANPRLIRQ

SEQ ID NO: 50479 - protein, 275 aa, unidentified
  source 1..275: note = Trinickia sp.
  REGION 1..275: note = tr|A0A4U1I880|A0A4U1I880_9BURK NADPH-dependent 7-cyano-7-deazaguanine reductase OS=Trinickia sp. 7GSK02; OX = 2571161 GN=queF PE=3 SV=1
MTPEHSPLGKTTTYSEQYDPTLLFPIPRSKAREEIGIGAQLPFFGTDIWNAYELSWLNPRGKPQIAIATFYIPADSPNIVESKSFKLYLGSFAQTQVESLDALRDMLKRDVSAAAGASVSVRLATPSAEFAKLKLEEFEGLSLDRLDLDADVYHPDPSLLKAALNEAPVEETLFSNLLKSNCPVTGQPDWGSVQVHYVGPQIDHAGLLRYIISYRSHTGFHEQCVERIFVDIMRECQPVKLAVYARYTRRGGLDINPFRTSYNLPMPDNARLARQ

SEQ ID NO: 50480 - protein, 274 aa, unidentified
  source 1..274: note = Trinickia symbiotica
  REGION 1..274: note = tr|A0A2T3XXL4|A0A2T3XXL4_9BURK NADPH-dependent 7-cyano-7-deazaguanine reductase OS=Trinickia symbiotica; OX = 863227 GN=queF PE=3 SV=1
MTPDQSPLGKPSSYTEQYDPTLLFPIARSLAREAIGIGAQLPFFGTDIWNAYELSWLNARGKPQIAIATFYVPAESPNIVESKSFKLYLGSFAQTRVESIDALREMLKRDVSAACGANVSVRLASPSEFGKLELDELDGLSLDRLDLETDVYHLEPSLLKAALEEAPVEETLFSNLLKSNCPVTGQPDWGSVQIHYVGPQIDQAGLLRYIISYRNHTGFHEQCVERMFVDILRECRPVKLAIYARYTRRGGLDINPFRTNFNLPMPDNARTARQ

SEQ ID NO: 50481 - protein, 274 aa, unidentified
  source 1..274: note = Trinickia symbiotica
  REGION 1..274: note = tr|A0A2N7X4A2|A0A2N7X4A2_9BURK NADPH-dependent 7-cyano-7-deazaguanine reductase OS=Trinickia symbiotica; OX = 863227 GN=queF PE=3 SV=1
MTPDQSPLGKPSSYTEQYDPTLLFPIARSLAREAIGIDAQVPFFGTDIWNAYELSWLNARGKPQIAIATFYVPAESPNIVESKSFKLYLGSFAQTRIESIDALREMLKRDVSAACGATVSVRLASPSEFGKLELDELDGLSLDRLDLETDVYHPESSLLKAALDEAPVEETLFSNLLKSNCPVTGQPDWGSVQIHYVGPQIDQAGLLRYIISYRNHTGFHEQCVERMFVDILRECRPVKLAIYARYTRRGGLDINPFRTNFNLPMPDNARTARQ

SEQ ID NO: 50482 - protein, 154 aa, Tropicibacter naphthalenivorans
  REGION 1..154: note = tr|A0A0P1G955|A0A0P1G955_9RHOB NADPH-dependent 7-cyano-7-deazaguanine reductase OS=Tropicibacter naphthalenivorans OX=441103 GN=queF PE=3 SV=1
MSEDIYSGLQQLGKQTEVPLAPEQAVLERVPNPEAGTRYCVRFTAPEFTSLCPMTGQPDFAHLVIDYVPGDWLVESKSLKLFLFSFRNHGAFHEACTVMIGKRIVDLLDPEWLRIGGYWYPRGGIPIDVFYQTGETPQGVWIPDQNVPTYRGRG

SEQ ID NO: 50483 - protein, 154 aa, unidentified
  source 1..154: note = Tropicibacter phthalicicus
  REGION 1..154: note = tr|A0A238JEX1|A0A238JEX1_9RHOB NADPH-dependent 7-cyano-7-deazaguanine reductase OS=Tropicibacter phthalicicus OX=1037362 GN=queF PE=3 SV=1
MTDSIYSNLKQLGGDTILPSDPSQAELERVQNPQADTAYNVRFVAPEFTSLCPMTGQPDFAHLVIDYVPGDWLVESKSLKLFLGSFRNHGAFHEDCTVSIGRRLAEFLDPQWLRIGGYWYPRGGIPIDVFWQTGPMPEAVWIPDQGVPPYRGRG

SEQ ID NO: 50484 - protein, 124 aa, unidentified
  source 1..124: note = Tumebacillus algifaecis
  REGION 1..124: note = tr|A0A223D4Q9|A0A223D4Q9_9BACL NADPH-dependent 7-cyano-7-deazaguanine reductase OS=Tumebacillus algifaecis OX=1214604 GN=queF PE=3 SV=1
MSTEPTKTLDPVPNPHPEREYEVEIRCPEFTALCPKTGQPDFATIIVRYVPGPHIIELKSLKLYLWAFRDEGHFHEDVTNIILNDLVKALEPRWMQVEGEFNVRGGIYTNVKVEHNPEFKRSRA

SEQ ID NO: 50485 - protein, 124 aa, unidentified
  source 1..124: note = Tumebacillus avium
  REGION 1..124: note = tr|A0A1Y0IQQ8|A0A1Y0IQQ8_9BACL NADPH-dependent 7-cyano-7-deazaguanine reductase OS=Tumebacillus avium; OX = 1903704 GN=queF PE=3 SV=1
MSTKPTKTLDPVPNPHPEREYEVEIRCPEFTALCPKTGQPDFATITVRYVPGPHIIELKSLKLYLWAFRDEGHFHEDVTNIILNDLVASLQPRWMQVEGEFNVRGGIYTNVKVEHNPEYKRSRA

SEQ ID NO: 50486 - protein, 124 aa, unidentified
  source 1..124: note = Tumebacillus flagellatus
  REGION 1..124: note = tr|A0A074LT01|A0A074LT01_9BACL NADPH-dependent 7-cyano-7-deazaguanine reductase OS=Tumebacillus flagellatus OX=1157490 GN=queF PE=3 SV=1
MSTKPSKELHPVPNPHPDRDYEVEIRCPEFTALCPVTGQPDFATITVRYVPGPKLIELKSLKLYLWTFREEGHFHEDVTNLILNDLVEALDPRWMEVEGDFNVRGGIYTKVKAEHNPEFRKTRG

SEQ ID NO: 50487 - protein, 124 aa, Tumebacillus permanentifrigoris
  REGION 1..124: note = tr|A0A316D6J7|A0A316D6J7_9BACL NADPH-dependent 7-cyano-7-deazaguanine reductase OS=Tumebacillus permanentifrigoris OX=378543 GN=queF PE=3 SV=1
MTTKPSKELHPVPNPHPDRDYEVEIRCPEFTALCPVTGQPDFATIIVRYVPGPKLIELKSLKLYLWTFREEGHFHEDVTNMILNDLIEALDPRWMEVEGDFNVRGGIYTKVRAEHNPEFRKTRG

SEQ ID NO: 50488 - protein, 124 aa, Tumebacillus sp.
  REGION 1..124: note = tr|A0A4R2R1H7|A0A4R2R1H7_9BACL NADPH-dependent 7-cyano-7-deazaguanine reductase OS=Tumebacillus sp. BK434; OX = 2512169 GN=queF PE=3 SV=1
MSTKPTKTLDPVPNPHPEREYEVEIRCPEFTALCPKTGQPDFATITVRYVPGPHIIELKSLKLYLWAFRDEGHFHEDVTNIILNDLVASLEPRWMQVEGEFNVRGGIYTNVRVEHNPEYKRSRA

SEQ ID NO: 50489 - protein, 165 aa, Turicibacter sanguinis
  REGION 1..165: note = tr|D4W841|D4W841_9FIRM NADPH-dependent 7-cyano-7-deazaguanine reductase OS=Turicibacter sanguinis PC909 OX=702450 GN=queF PE=3 SV=1
MSGRKQEELSEITLLGNQGTTYTYSYDPEILEVFNNKHPKNDYFVKFNCPEFTSLCPITGQPDFATIYISYIPGEKMVESKSLKLYLFSFRNHGDFHEDCMNIIMEDLIKLMDPKYIEVWGKFTPRGGISIDPYCNYGRPGTKFEEMAQYRLMNHDLYPEKVDNR

SEQ ID NO: 50490 - protein, 165 aa, Turicibacter sanguinis
  REGION 1..165: note = tr|A0A173ZSN8|A0A173ZSN8_9FIRM NADPH-dependent 7-cyano-7-deazaguanine reductase OS=Turicibacter sanguinis; OX = 154288 GN=queF PE=3 SV=1
MAGRTKEELKDITLLGNQGTTYQYSYDPTILEVFENKHPNNDYFVKFNCPEFTSLCPITGQPDFATIYISYIPGEKMVESKSLKLYLFSFRNHGDFHEDCMNIIMKDLVKLMDPKYIEVWGKFTPRGGISIDPYCNYGRPGTKYEQMANYRLMNHDLYPEKVDNR

SEQ ID NO: 50491 - protein, 165 aa, Turicibacter sp.
  REGION 1..165: note = tr|A0A0X8G3L6|A0A0X8G3L6_9FIRM NADPH-dependent 7-cyano-7-deazaguanine reductase OS=Turicibacter sp. H121; OX = 1712675 GN=queF PE=3 SV=1
MAGRTKEELKDITLLGNQGTTYQYSYDPTILEVFENKHPNNDYFVKFNCPEFTSLCPITGQPDFATIYISYIPGEKMVESKSLKLYLFSFRNHGDFHEDCMNIIMKDLVKLMDPKYIEVWGKFTPRGGISIDPYCNYGRPGTKYEEMANYRLMNHDLYPEKVDNR

SEQ ID NO: 50492 - protein, 139 aa, unidentified
  source 1..139: note = Turicimonas muris
  REGION 1..139: note = tr|A0A227KQI3|A0A227KQI3_9BURK NADPH-dependent 7-cyano-7-deazaguanine reductase OS=Turicimonas muris; OX = 1796652 GN=queF PE=3 SV=1
MPTQPSKTLETFDNPQPNRDYLIHIEIPEFTSLCPLTGQPDFATLFLDYIPDKKNVELKALKLYIWSFREEGAFHEAITNKILDDLVEALQPRYMRLKAKWWVRGGIYTTVVAEHRKPGWAPQPMVELPEFETNDPTRG

SEQ ID NO: 50493 - protein, 129 aa, Turneriella parva
  REGION 1..129: note = tr|I4B7Z2|I4B7Z2_TURPD NADPH-dependent 7-cyano-7-deazaguanine reductase OS=Turneriella parva (strain ATCC BAA-1111 / DSM 21527 / NCTC 11395 / H); OX = 869212 GN=queF PE =3 SV=1
MAETAYEGRQGHIRALDLPKIDVFENIYPDRDYNIRLEFPEFTAICPKTGLPDFGVVTINYSPDKYCLELKSLKEYFLSYRTVGIFHENVVNRVLDDIILAADMRSAEISVVYNPRGGITTTVSRSYSR

SEQ ID NO: 50494 - protein, 121 aa, unidentified
  source 1..121: note = Tychonema bourrellyi
  REGION 1..121: note = tr|A0A2G4EVV8|A0A2G4EVV8_9CYAN NADPH-dependent 7-cyano-7-deazaguanine reductase OS=Tychonema bourrellyi FEM_GT703 OX=2040638 GN=queF PE=3 SV=1
MKYGEREILDGELITFPNPRIGRRYFVNITLPEFTCKCPFSGYPDFAAIHITYVPDERVVELKALKLYINSYRDRYISHEESINQILDDFVAACSPLEATIKGDFLPRGNVHTVIEVRHEK

SEQ ID NO: 50495 - protein, 279 aa, Uliginosibacterium sp.
  REGION 1..279: note = tr|A0A2N4XS24|A0A2N4XS24_9RHOO NADPH-dependent 7-cyano-7-deazaguanine reductase OS=Uliginosibacterium sp. TH139 OX=2067453 GN=queF PE=3 SV=1
MNEKLVPENSPLGRATAYRSDYAPELLFPIPRKQKRDELGLDEAALPFTGEDLWNAYEISWLNPRGKPVVALGEFRVPAHSPRLIESKSLKLYLNSFNQTRMTDAEAVSATLARDLSQAAGASVRVSVQPLERRPRREIDYLQGECIDALDIEVAQYSPQPSLLRADPAQLVEDELLCSHLLKSNCLVTGQPDWGMVALRYSGPRIEREALLRYIISFREHNEFHEQCVERIFTDVLTRCAPRELAVWARYTRRGGLDINPFRSNRADWCAENLFEVRQ

SEQ ID NO: 50496 - protein, 279 aa, Umboniibacter marinipuniceus
  REGION 1..279: note = tr|A0A3M0A5H4|A0A3M0A5H4_9GAMM NADPH-dependent 7-cyano-7-deazaguanine reductase OS=Umboniibacter marinipuniceus OX=569599 GN=queF PE=3 SV=1
MSEINKIHEQIPLGKSTEYQSSYNPELLAPIPRELSRRNLEACQREMFGEDLWTAYEMSWLKPGGVPVVAVMRCYVPSTSSHIIESKSFKLYLNSYNGSEFESFGEVEGRLVADLSAAAGDTVHVVLESLALADSSLQVGTLTDVQCVDDLPITVSQYEPDASLLAVEQGTNVEEALCSHLLKSNCPVTSQPDWASVIIRYKGKKIVPESFLAYVISFREHQDFHEHCVERIYVDLMNRFNFDYLDVVARYTRRGGLDINPFRSSRADAPRIETRLVRQ

SEQ ID NO: 50497 - protein, 152 aa, unidentified
  source 1..152: note = Alphaproteobacteria bacterium
  REGION 1..152: note = tr|A0A212JLY9|A0A212JLY9_9PROT NADPH-dependent 7-cyano-7-deazaguanine reductase OS=uncultured Alphaproteobacteria bacterium OX=91750 GN=queF PE=3 SV=1
MTQETLTQLGHSAAAAARPEDAVLERVPWRGDDAPRTVVRFVCPEFTSLCPVTGQPDFAHLVIDYVPAQWLVESKSLKLFLQSFRNHGAFHESCTVMVGRRLVEVLDPVWLRIGGYWYPRGGIPIDVFWQTGPVPEGVWLPDQGVPPYRGRG

SEQ ID NO: 50498 - protein, 283 aa, Avibacterium sp.
  REGION 1..283: note = tr|A0A486XFW8|A0A486XFW8_9PAST NADPH-dependent 7-cyano-7-deazaguanine reductase OS=uncultured Avibacterium sp. OX=1936169 GN=queF PE=3 SV=1
MDYNHESLHALKLGQETKYAQHYDRTLLQAVPRQLNRAQLGIVENQPFTFGADIWTAYEISWLNPKGVPQVAIADVEIDFRSENLIESKSFKLYLNSFNQSHFDSFEQVQQLLQQDLADCAKGQVKVRLNSLQNYHRTFIDSLQGDCIDDQDIEIRDYQFNPNYLEHCTHAEQHAEQVEEHLVSHLLKSNCLITQQPDWGSLQIHYVGKRIDREKLLRYLVSFRQHNEFHEQCVERIYCDLMRFAQPEKLTVYARYTRRGGLDINPFRSNFKTVPHNARLARQ

SEQ ID NO: 50499 - protein, 100 aa, unidentified
  source 1..100: note = Unknown
  REGION 1..100: note = tr|K1YVZ0|K1YVZ0_9BACT NADPH-dependent 7-cyano-7-deazaguanine reductase (Fragment) OS=uncultured bacterium OX=77133 GN=ACD_75C01416G0003 PE=3 SV=1
MRKKLTTKSDLKHLTILGGKKGIPGRKLETFPNHHPERDYWVTMHTEEFTCVCPLTGQPDFAKLKIQYIPDKYVLESKSLKLYLRAFRNEGTFHEHVVNV

SEQ ID NO: 50500 - protein, 134 aa, unidentified
  source 1..134: note = Unknown
  REGION 1..134: note = tr|A0A059XD40|A0A059XD40_9BACT NADPH-dependent 7-cyano-7-deazaguanine reductase OS=uncultured bacterium; OX = 77133 GN=queF PE=3 SV=1
MPKPELLETFDNPYADRDYEIHMDCSEFTSLCPVGGIESDAAELALLKGGAPDFGTIRITYVPAAKCIELKSLKLYLWSFRNDGIFYERAVNRILDDLVASSSPKWMRVVGDFNLRGGIKSIITAVHGKAPIAK

SEQ ID NO: 50501 - protein, 151 aa, Bacteroides sp.
  REGION 1..151: note = tr|A0A1C6KVL7|A0A1C6KVL7_9BACE NADPH-dependent 7-cyano-7-deazaguanine reductase OS=uncultured Bacteroides sp. OX=162156 GN=queF PE=3 SV=1
MTELKDQLSLLGRKTEYKQDYAPEVLEAFDNKHPENDYWVRFNCPEFTSLCPITGQPDFAEIRISYIPDIKMVESKSLKLYLFSFRNHGAFHEDCVNIIMKDLIHLMNPKYIEVTGLFTPRGGISIYPYANYGRPGTKYEGIAEQRLMNRE

SEQ ID NO: 50502 - protein, 151 aa, Bacteroides sp.; identical to SEQ ID NO: 44503
  REGION 1..151: note = tr|A0A1C5U0E6|A0A1C5U0E6_9BACE NADPH-dependent 7-cyano-7-deazaguanine reductase OS=uncultured Bacteroides sp. OX=162156 GN=queF PE=3 SV=1

SEQ ID NO: 50503 - protein, 153 aa, unidentified
  source 1..153: note = Bacteroidetes bacterium
  REGION 1..153: note = tr|H5SNT7|H5SNT7_9BACT NADPH-dependent 7-cyano-7-deazaguanine reductase OS=uncultured Bacteroidetes bacterium OX=152509 GN=queF PE=3 SV=1
MYKPLGVSYLWAMPIRIADTRAEVRKPERRSILQTFPFQTEVPQVIHLHTEEFSAVCPGTGLPDIGTLDLWYIPKDRCIELKSLKLYLFSYRNEEIFQEPVADLIFEDLWAVLEPRYMRLSLRYNIRGGILTTVHLARGELVELPPEVRELLP

SEQ ID NO: 50504 - protein, 164 aa, Blautia sp.
  REGION 1..164: note = tr|A0A1C5TT98|A0A1C5TT98_9FIRM NADPH-dependent 7-cyano-7-deazaguanine reductase OS=uncultured Blautia sp.; OX = 765821 GN=queF PE=3 SV=1
MSRENLEKEGITLLGNQKVKYPDNYAPEVLETFLNKHPDNDYFVKFNCPEFTSLCPITGQPDFATITISYVPGEKMVESKSLKLYLFSFRNHGDFHEDCVNIIMKDLIRLMDPKYIEVWGKFTPRGGISIDPYCNYGKTGTRWEEIAWKRLTEHDMYPEKIDNR

SEQ ID NO: 50505 - protein, 165 aa, Blautia sp.; identical to SEQ ID NO: 44645
  REGION 1..165: note = tr|A0A1C5TSQ4|A0A1C5TSQ4_9FIRM NADPH-dependent 7-cyano-7-deazaguanine reductase OS=uncultured Blautia sp.; OX = 765821 GN=queF PE=3 SV=1

SEQ ID NO: 50506 - protein, 165 aa, Butyricicoccus sp.; identical to SEQ ID NO: 44870
  REGION 1..165: note = tr|A0A1C6GCP8|A0A1C6GCP8_9CLOT NADPH-dependent 7-cyano-7-deazaguanine reductase OS=uncultured Butyricicoccus sp. OX=1193532 GN=queF PE=3 SV=1

SEQ ID NO: 50507 - protein, 282 aa, Citrobacter sp.; identical to SEQ ID NO: 45328
  REGION 1..282: note = tr|A0A212ILG2|A0A212ILG2_9ENTR NADPH-dependent 7-cyano-7-deazaguanine reductase OS=uncultured Citrobacter sp. OX=200446 GN=queF PE=3 SV=1

SEQ ID NO: 50508 - protein, 160 aa, Clostridium sp.
  REGION 1..160: note = tr|A0A1C5TKT4|A0A1C5TKT4_9CLOT NADPH-dependent 7-cyano-7-deazaguanine reductase OS=uncultured Clostridium sp. OX=59620 GN=queF PE=3 SV=1
MREKENLTLLGNQQTEYSMDYNPSVLEAFQNKHPENDYFVKFNCPEFTSLCPITGQPDFATITISYVPDERLVESKSLKLYLFSFRNHGDFHEDVINIIMKDLVKLLKPKYIEVWGKFLPRGGLSIDPYCNYGKPGTDWEQVAWNRMSNHDMFPERVDNR

SEQ ID NO: 50509 - protein, 156 aa, Clostridium sp.; identical to SEQ ID NO: 46039
  REGION 1..156: note = tr|A0A1C5UC00|A0A1C5UC00_9CLOT NADPH-dependent 7-cyano-7-deazaguanine reductase OS=uncultured Clostridium sp. OX=59620 GN=queF PE=3 SV=1

SEQ ID NO: 50510 - protein, 164 aa, Coprococcus sp.
  REGION 1..164: note = tr|A0A1C5TLV4|A0A1C5TLV4_9FIRM NADPH-dependent 7-cyano-7-deazaguanine reductase OS=uncultured Coprococcus sp. OX=458253 GN=queF PE=3 SV=1
MGRTAEEMEDVTLLGNKNVKYSMDYAPEMLQTFINKHQDNDYFVKFNCPEFTSLCPITGQPDFATVYISYVPDVKMVESKSLKLYLFSFRNHGDFHEDCMNIIMKDLIKLMDPKYIEVWGKFTPRGGISIDPYCNYGRPGTKWEEVAWNRMSNHDLYPEKIDNR

SEQ ID NO: 50511 - protein, 172 aa, unidentified
  source 1..172: note = Unknown
  REGION 1..172: note = tr|A0A212JUA9|A0A212JUA9_9DELT NADPH-dependent 7-cyano-7-deazaguanine reductase OS=uncultured delta proteobacterium OX=34034 GN=queF PE=3 SV=1
MAATPKKKQKPVSPAKTAARSGAGKETAGLTKLGAPTSYRFDNPGPDLLEAFPNRYPDRDYVITFEHPEFTSLCPMTGQPDFATITVQYAPGTKCVESKSFKLYMCAFRNHGSFMESVTNKIADDLIAVLSPRRMTVIGQFNVRGGTDITVRVEHMDPALDKAAVQALRELW

SEQ ID NO: 50512 - protein, 151 aa, unidentified
  source 1..151: note = Desulfobacteraceae bacterium
  REGION 1..151: note = tr|A0A484HDN2|A0A484HDN2_9DELT NADPH-dependent 7-cyano-7-deazaguanine reductase OS=uncultured Desulfobacteraceae bacterium OX=218296 GN=queF PE=3 SV=1
MNASLKTCEERFAMTEKKAAPKPPYAIEDPGSVKAGILDPIDYAYSGKRDIDIVIRQPEFTSVCPMTGLPDYATISVRYTPDQKIIELKSLKYYLLQYRNVGIFYEHVVNRILDDLCERIKPKRMEVTGEFTARGGIGARVSAAYPASDGG

SEQ ID NO: 50513 - protein, 138 aa, unidentified
  source 1..138: note = Desulfobacteraceae bacterium
  REGION 1..138: note = tr|A0A484HIH0|A0A484HIH0_9DELT NADPH-dependent 7-cyano-7-deazaguanine reductase OS=uncultured Desulfobacteraceae bacterium OX=218296 GN=queF PE=3 SV=1
MTAKKAAPKPPYAIEDPGSVKAGILDPIDYAYSGKRDIDIVIRQPEFTSVCPMTGLPDYATISVRYTPDQKIIELKSLKYYLLQYRNVGIFYEHVVNRILDDLCERIKPKRMEVTGEFTARGGIDARVSAAYPASEGG

SEQ ID NO: 50514 - protein, 137 aa, Desulfobacterium sp.
  REGION 1..137: note = tr|E1Y8S0|E1Y8S0_9DELT NADPH-dependent 7-cyano-7-deazaguanine reductase OS=uncultured Desulfobacterium sp. OX=201089 GN=queF PE=3 SV=1
MAKNKKLKPDYNANSPEDIKIDILDSMDYKYRQKRDIDIEIRQPEFTSVCPMTGLPDFGTIVIKYTPDKKIIELKSLKYYLLQYRNVGIFYEHVVNHILDDLVEVLKPKQMEITGEFSARGGIITKAVAIYRLYAED

SEQ ID NO: 50515 - protein, 167 aa, Desulfovibrio sp.
  REGION 1..167: note = tr|A0A212JAD9|A0A212JAD9_9DELT NADPH-dependent 7-cyano-7-deazaguanine reductase OS=uncultured Desulfovibrio sp. OX=167968 GN=queF PE=3 SV=1
MSTRSQDQTQDLKVLGTGRLQSPEGGPSVALLEAFPNCFPQRPYVISISFPEFTSLCPVTGQPDCGTITVEYIPDELCVESKSFKLYMFAFRNHQSFMETITNNVLEDLRTLLNPCWCRVKGLFAPRGGTRIHVFAETFKDTMPEEQNRLVREAVAAWKSEPDPHRP

SEQ ID NO: 50516 - protein, 166 aa, Desulfovibrio sp.
  REGION 1..166: note = tr|A0A212L190|A0A212L190_9DELT NADPH-dependent 7-cyano-7-deazaguanine reductase OS=uncultured Desulfovibrio sp. OX=167968 GN=queF PE=3 SV=1
MTTRSQDQTQDLKVLGTGRLATPEGGPSVAQLEAFPNCFPQRPYVISISFPEFTSLCPVTGQPDCGTITVEYIPDELCVESKSFKLYMFAFRNHQSFMETITNNVLDDLRTLLNPCWCRVKGLFAPRGGTRIHVFAESFKDMPQEQNALVREVVRSWKSEPDPHRP

SEQ ID NO: 50517 - protein, 155 aa, Dysgonomonas sp.
  REGION 1..155: note = tr|A0A212JKB7|A0A212JKB7_9BACT NADPH-dependent 7-cyano-7-deazaguanine reductase OS=uncultured Dysgonomonas sp. OX=206096 GN=queF PE=3 SV=1
MTIEGLSHLGGKTEYKDNYAPEVLEAFENKHQSNDYWVTFNCPEFTSLCPITGQPDFATIHINYIPDVKMVESKSLKLYLFSFRNHGAFHEDCVNIMMKDLIELMNPKYIEVVGIFTPRGGISIYPFCNYGRPGTKFERLAEERLINHNPQQIYK

SEQ ID NO: 50518 - protein, 155 aa, Dysgonomonas sp.; identical to SEQ ID NO: 45790
  REGION 1..155: note = tr|A0A212JV07|A0A212JV07_9BACT NADPH-dependent 7-cyano-7-deazaguanine reductase OS=uncultured Dysgonomonas sp. OX=206096 GN=queF PE=3 SV=1

SEQ ID NO: 50519 - protein, 165 aa, Eubacterium sp.
  REGION 1..165: note = tr|A0A1C6FME1|A0A1C6FME1_9FIRM NADPH-dependent 7-cyano-7-deazaguanine reductase OS=uncultured Eubacterium sp. OX=165185 GN=queF PE=3 SV=1
MSGRNEKETEGITLLGNQGTKYPMDYAPEVLETFVNKHQDNDYFVKFNCPEFTSLCPITGQPDFATITISYVPDIKMVESKSLKLYLFSFRNHGDFHEDCVNVIMKDLIKLMNPKYIEVWGKFTPRGGISIDPYCNYGRKGTRWEEVAWNRMSNHDMYPEKVDNR

SEQ ID NO: 50520 - protein, 164 aa, Eubacterium sp.; identical to SEQ ID NO: 43989
  REGION 1..164: note = tr|A0A1C6BWQ6|A0A1C6BWQ6_9FIRM NADPH-dependent 7-cyano-7-deazaguanine reductase OS=uncultured Eubacterium sp. OX=165185 GN=queF PE=3 SV=1

SEQ ID NO: 50521 - protein, 131 aa, unidentified
  source 1..131: note = Gammaproteobacteria bacterium
  REGION 1..131: note = tr|A0A5E5QK45|A0A5E5QK45_9GAMM NADPH-dependent 7-cyano-7-deazaguanine reductase OS=uncultured Gammaproteobacteria bacterium OX=86473 GN=queF PE=3 SV=1
MSSQASKTLEVFDNPNRARDYVIQIELPEFTCLCPKTGQPDFATLHLEYIADRDCVELKSLKMYIWSFRDEGAFHEAVTNQILEDLVAATHPRFMRLKAIFNVRGGVYTTIIAEHQQSGWQPKPSVDLKHI

SEQ ID NO: 50522 - protein, 131 aa, unidentified; identical to SEQ ID NO: 44432
  source 1..131: note = Gammaproteobacteria bacterium
  REGION 1..131: note = tr|A0A5E5Q8T7|A0A5E5Q8T7_9GAMM NADPH-dependent 7-cyano-7-deazaguanine reductase OS=uncultured Gammaproteobacteria bacterium OX=86473 GN=queF PE=3 SV=1

SEQ ID NO: 50523 - protein, 164 aa, Megasphaera sp.
  REGION 1..164: note = tr|A0A1C5R8D0|A0A1C5R8D0_9FIRM NADPH-dependent 7-cyano-7-deazaguanine reductase OS=uncultured Megasphaera sp. OX=165188 GN=queF PE=3 SV=1
MNRTSEELSQLASLGSQHTTYRQDYDPGLLETFDNKHPGRDYFVKFNCPEFTSLCPKTGQPDYATIYISYVPDQKMVESKSLKLYLFSFRNRGDFHEDCVNIIMDDLIALMNPKYIEVWGKFLPRGGISIDPYCNYGRKGTPWEQVAWQRLSQHDLYPEKVDNR

SEQ ID NO: 50524 - protein, 136 aa, Prochlorococcus marinus
  REGION 1..136: note = tr|Q1PKD1|Q1PKD1_PROMR NADPH-dependent 7-cyano-7-deazaguanine reductase OS=uncultured Prochlorococcus marinus clone HF10-11D6 OX=379374 GN=queF; PE = 3 SV=1
MNTAKLGDSTQRPLYGERIIEESKIICFENPNKKRIYEIAIQLPEFTCKCPFSGYPDFATLNIIYQPNLRVYELKSLKLYINNFRDIKISHEEVVNRIMDDLVNEGSPHWIHLNAAFNPRGNVSMQLDIFSGQKKN

SEQ ID NO: 50525 - protein, 165 aa, Roseburia sp.
  REGION 1..165: note = tr|A0A1C5VXJ9|A0A1C5VXJ9_9FIRM NADPH-dependent 7-cyano-7-deazaguanine reductase OS=uncultured Roseburia sp. OX=512314 GN=queF PE=3 SV=1
MTGRNQEEVKGITLLGNQGTAYPDDYAPQVLETFVNKHPNHDYFVKFNCPEFTSLCPITGQPDFAAITISYVPGERMVESKSLKLYLFSFRNHGDFHEDCMNIIMNDLIRLMDPKYIEVWGKFTPRGGISIDPYCNYGKPGTRWEEVAWNRLANHDLYPEKIDNR

SEQ ID NO: 50526 - protein, 165 aa, Ruminococcus sp.
  REGION 1..165: note = tr|A0A1C6F3G6|A0A1C6F3G6_9FIRM NADPH-dependent 7-cyano-7-deazaguanine reductase OS=uncultured Ruminococcus sp. OX=165186 GN=queF PE=3 SV=1
MEGRTAEEKQGITLLGNQKTKYPDDYAPQMLETFINKHQDNDYFVKFNCPEFTSLCPITGQPDFATIYISYIPDVRMVESKSLKLYLYSFRNHGDFHEDCVNIIMKDLIKLMDPKYIEVWGKFTPRGGISIDPYCNYGRKGTKFEEMAMHRLMEHDMYPEKVDNR

SEQ ID NO: 50527 - protein, 162 aa, Ruminococcus sp.
  REGION 1..162: note = tr|A0A1C6DM27|A0A1C6DM27_9FIRM NADPH-dependent 7-cyano-7-deazaguanine reductase OS=uncultured Ruminococcus sp. OX=165186 GN=queF PE=3 SV=1
MDNREKENLTLLGNQQTKYPDNYAPEVLETFENKHQENDYFVKFNCPEFTSLCPITGQPDFATIYISYIPDVKMVESKSLKLYLFSYRNHGDFHEDCVNKIMKDLIDLMDPKYIEVWGKFTPRGGISIDPYCNYGKPGTKWEKLAENRLFNHDMYPEKIDNR

SEQ ID NO: 50528 - protein, 156 aa, Sphingopyxis sp.
  REGION 1..156: note = tr|A0A1Y5PWF0|A0A1Y5PWF0_9SPHN NADPH-dependent 7-cyano-7-deazaguanine reductase OS=uncultured Sphingopyxis sp. OX=310581 GN=queF PE=3 SV=1
MTDSTPTPLAPKHLGQSSELPASPEAAVLDYVPNPRTGELYLVRFAAPEFTSLCPVTGQPDFAHLVIDYAPGETIVESKSLKLFLGSFRNHAGFHEDCTVGIGRRLFDEMRPRWLRIGGYWYPRGGIPIDVFWQSGPPPEGLWLPDQGVAPYRGRG

SEQ ID NO: 50529 - protein, 133 aa, unidentified
  source 1..133: note = Unknown
  REGION 1..133: note = tr|A0A3P3XJC2|A0A3P3XJC2_9SPIR NADPH-dependent 7-cyano-7-deazaguanine reductase OS=uncultured spirochete; OX = 156406 GN=queF PE=3 SV=1
MAEYKFEILGKKVSEPMRKLETFPTPEHVKKVVLDCDEVTSLCPVTGQPDWETVRIEFEPDKFCIESKSLKLYLWSFREEGAFCESLSARIAQDIFDVCKPRWVKVTVAQKARGGIAITAESRIPDLEQGAGA

SEQ ID NO: 50530 - protein, 128 aa, unidentified
  source 1..128: note = Unknown
  REGION 1..128: note = tr|A0A3P3XMY1|A0A3P3XMY1_9SPIR NADPH-dependent 7-cyano-7-deazaguanine reductase OS=uncultured spirochete; OX = 156406 GN=queF PE=3 SV=1
MAEYEFKSLGKTTRAPSRELETFPTPPSVTKVVLESDEVTSLCPVTGQPDWETVRIEFEPGNLCIESKSLKLYLWSFREEGVFCEALAARIAKDVFDAIKPKSVAVSITQKPRGGITISAEARLPKIV

SEQ ID NO: 50531 - protein, 271 aa, Stenotrophomonas sp.
  REGION 1..271: note = tr|A0A1Y5Q4C6|A0A1Y5Q4C6_9GAMM NADPH-dependent 7-cyano-7-deazaguanine reductase OS=uncultured Stenotrophomonas sp. OX=165438 GN=queF PE=3 SV=1
MNTPQDSSLGREVAYPSQYDPGLLFPIPRAAARAEIGIDGGLPFSGNDRWHAYELGWLDGRGKPCVATATLQVPCDSPNLIESKSLKLYLNSLNATRFDSADAAWARIAADLSACAGATVRVEPGLPPVAGAGGESIDALEVDIDCYGPPDAGLLVADADADVLVTEMLVSDLLKSNCPVTGQPDWASVGIRYHGPRIDRAGLLRYLVSYRDHAEFHEQCVERIFLDLSRHCRCHWLEVEARYTRRGGLDINPRRATPGRPISAAFRDARQ

SEQ ID NO: 50532 - protein, 131 aa, unidentified
  source 1..131: note = Unknown
  REGION 1..131: note = tr|A0A482ZBV8|A0A482ZBV8_9GAMM NADPH-dependent 7-cyano-7-deazaguanine reductase OS=uncultured SUP05 cluster bacterium OX=655186 GN=queF PE=3 SV=1
MSSQPSKVLEVFDNPNTDRDYLIQIDTPEFTCLCPKTGQPDFATLHLEYIADKSCVELKSFKMYIWSFRDEGAFHEAVTNQILEDLVAVTNPRFMRLKAIFNVRGGVYTTIIAEHQQKGWQPNPIVDLQHL

SEQ ID NO: 50533 - protein, 132 aa, unidentified
  source 1..132: note = Unknown
  REGION 1..132: note = tr|D1KDX9|D1KDX9_9GAMM NADPH-dependent 7-cyano-7-deazaguanine reductase OS=uncultured SUP05 cluster bacterium OX=655186 GN=queF PE=3 SV=1
MPSKANKELEVFDNPNPNRNFVIQIDMPEFTCLCPKTGQPDFATLHLEYIADQSCVELKSLKMYIWSFRDEGAFHEAVTNQILDDLVSATNPRFMRLKAVFNVRGGVYTTVIAEHQQEGWVPQVVVDLKHLR

SEQ ID NO: 50534 - protein, 129 aa, Thiohalocapsa sp.; identical to SEQ ID NO: 45275
  REGION 1..129: note = tr|V4JTF1|V4JTF1_9GAMM NADPH-dependent 7-cyano-7-deazaguanine reductase OS=uncultured Thiohalocapsa sp. PB-PSB1 OX=1385625 GN=queF PE=3 SV=1

SEQ ID NO: 50535 - protein, 281 aa, Undibacterium parvum
  REGION 1..281: note = tr|A0A3S9HKW8|A0A3S9HKW8_9BURK NADPH-dependent 7-cyano-7-deazaguanine reductase OS=Undibacterium parvum; OX = 401471 GN=queF PE=3 SV=1
MNTNNHNQPEQSTLGKTASYTTQYDASLLFPIPRADKRQEIGISNNLPFFGMDIWNAYEVSWLNLRGKPQVAIATIMAPADSANIIESKSFKLYLNSFNQTKLADTDALLNLLRTDLSAGFGAGVQVSLLMQEDFSKLSMQELDGILIDRLDIEVDSYAPNPSLLKCDNLVAPVEETLVSHLLKSNCLVTGQPDWGSVQIRYVGAPIDQEGLLKYLIGFREHNEFHEQCVERIFTDIMQQCAPQKLSVYARYTRRGGLDINPWRSNFSSAQKPSNARNARQ

SEQ ID NO: 50536 - protein, 281 aa, Undibacterium pigrum
  REGION 1..281: note = tr|A0A318J5A1|A0A318J5A1_9BURK NADPH-dependent 7-cyano-7-deazaguanine reductase OS=Undibacterium pigrum; OX = 401470 GN=queF PE=3 SV=1
MTDSAPNTPEHSLLGKPATYKSEYDASLLFPISRSGKREEIGLGSSLPFFGVDIWNAYEISWLNMRGKPQVAIAAITVPADSPNIIESKSFKLYLNSFNQTRLAGTDALVSLLQADLSAGFGAAVQVKLTTPDQFDKLAMHELQGQLLDRLDVEVDSYTPNPTLLTANVDEPAVEETLISHLLKSNCLVTGQPDWGSVQIHYVGPQINQEGLLQYLIGFRDHNEFHEQCVERIFVDIMRHCKPQKLSVYARYTRRGGLDINPWRSNFSTGQGPDNRRNARQ

SEQ ID NO: 50537 - protein, 282 aa, Undibacterium sp.
  REGION 1..282: note = tr|A0A3S0PYJ6|A0A3S0PYJ6_9BURK NADPH-dependent 7-cyano-7-deazaguanine reductase OS=Undibacterium sp. S11R28 OX=2495591 GN=queF PE=3 SV=1
MTTPDHSNSPEQSTLGKAATYTSQYDASLLFPIPRADKREEIGITTSLPFFGMDIWNAYEVSWLNLRGKPQVAIATIMAPADSPNIIESKSFKLYLNSYNQTRLAGSDELLQRLRTDLSAGFGASVQVTLTTQEEFCKLSMQELDGMLLDRLDIEVDSYTPDPLLLKADNQVAPVEETLVSHLLKSNCLVTGQPDWGSVQIHYIGAPIDQESLLKYLIGFREHNEFHEQCVERIFIDIMQQCKPQKLSVYARYTRRGGLDINPWRSNFSTAQKPSNARNARQ

SEQ ID NO: 50538 - protein, 166 aa, Ureibacillus terrenus
  REGION 1..166: note = tr|A0A540UYD5|A0A540UYD5_9BACL NADPH-dependent 7-cyano-7-deazaguanine reductase OS=Ureibacillus terrenus; OX = 118246 GN=queF PE=3 SV=1
MSVRKFEDGLKDLTLLGNNKTVYPEKYAPEVLEAVDNLHSDRDYFVKFNCPEFTSLCPLTGQPDFATIYISYIPDKKLVESKSLKLYLFSFRNHGDFHEDCVNIIMNDLIQLLDPRYIEVWGKFTPRGGISIDPYCNYGRPGTKYEEMANYRLMNHDLYPEKVDNR

SEQ ID NO: 50539 - protein, 166 aa, Ureibacillus thermophilus
  REGION 1..166: note = tr|A0A4P6UU88|A0A4P6UU88_9BACL NADPH-dependent 7-cyano-7-deazaguanine reductase OS=Ureibacillus thermophilus OX=367743 GN=queF PE=3 SV=1
MSSRKLEDGLKDLTLLGNQKTNYPTKYAPEVLEAVNNLHSDRDYFVKFNCPEFTSLCPLTGQPDFATIYISYIPDKKLVESKSLKLYLFSFRNHGDFHEDCVNIITNDLIKLLDPRYIEVWGKFTPRGGISIDPYCNYGRPGTKYEEMANYRLMNHDLYPEKVDNR

SEQ ID NO: 50540 - protein, 157 aa, Uruburuella suis
  REGION 1..157: note = tr|A0A4R2MVG5|A0A4R2MVG5_9NEIS NADPH-dependent 7-cyano-7-deazaguanine reductase OS=Uruburuella suis; OX = 252130 GN=queF PE=3 SV=1
MSRNTEELGGLSLLGNQHTEYRADYAPEVLEAFPNKHPGNDYFVKFVCPEFTSLCPMTGQPDFATIYIRYIPDIQMVESKSLKLYLFSFRNHGDFHEDCVNIIMKDLIALMQPKYIEVFGEFTPRGGIAIHPFANWGRPDTRFAALAEERLFAHDMQ

SEQ ID NO: 50541 - protein, 130 aa, unidentified
  source 1..130: note = Vampirococcus sp.
  REGION 1..130: note = tr|A0A410P2U0|A0A410P2U0_9BACT NADPH-dependent 7-cyano-7-deazaguanine reductase OS=Vampirococcus sp. LiM; OX = 1930593 GN=queF PE=3 SV=1
MKKSSYENLQNHIRRLKTPEIEVWKNQYPDKRFAVHIEIPEFTCMCPKTGLPDFAVILIDYVPAEVCVELKSLKEYLVFYRNVGIFHEHFANKLMDDFVKAARPRWAKIVTRFNPRGGITTVVTREYRGR

SEQ ID NO: 50542 - protein, 150 aa, unidentified
  source 1..150: note = Variibacter gotjawalensis
  REGION 1..150: note = tr|A0A0S3PWN4|A0A0S3PWN4_9BRAD NADPH-dependent 7-cyano-7-deazaguanine reductase OS=Variibacter gotjawalensis OX=1333996 GN=queF PE=3 SV=1
MSKRPLQLGKPTALPASPDQAQLDRVPNPHPDTNYVARFTAPEFTTLCPITGQPDFAHLVIDYVPGKWLVESKSLKLYLASFRNHGGFHEDCTVGIGKELQKLLKPRWLRIGGYWYPRGGIPIDVFWQAGRLPAGVWVPDQGVAPYRGRG

SEQ ID NO: 50543 - protein, 293 aa, Variovorax boronicumulans
  REGION 1..293: note = tr|A0A1E7U5L0|A0A1E7U5L0_9BURK NADPH-dependent 7-cyano-7-deazaguanine reductase OS=Variovorax boronicumulans OX=436515 GN=queF PE=3 SV=1
MSHDPTNPNTNPNTPEQSQLGRASAYADKYDPSLLFPIARTTQREAMGIQAGALPFFGADLWTAFELSWLNPRGKPQVAIAHFTIPCETPNIIESKSFKLYLNSFNNSTFASIDAVREHLRTDLSEAAWRGSDQSAGIGVKLLTPDLFDREPVHEIDGLDLDRLDIECTHYQPAPELLSSDTTQVHVNETLTSRLLKSNCLVTGQPDWGSVQIRYSGPPIDQAGLLAYIVSFRNHNEFHEPCAERMFTDIWRQCQPTKLAVYARYTRRGGLDINPFRTSWPQALPPNIRTARQ

SEQ ID NO: 50544 - protein, 293 aa, Variovorax boronicumulans
  REGION 1..293: note = tr|A0A250DQJ2|A0A250DQJ2_9BURK NADPH-dependent 7-cyano-7-deazaguanine reductase OS=Variovorax boronicumulans OX=436515 GN=queF PE=3 SV=1
MSHDPTNPNTNPNTPEQSQLGRASAYADKYDPSLLFPIARTTQREAMGIQAGALPFFGADLWTAFELSWLNPRGKPQVAIAHFTIPCETPNIIESKSFKLYLNSFNNSTFASIDAVREHLRTDLAEAAWRGSDQSAGIGVKLLTPDLFDREPVHEIDGLDLDRLDIECTHYQPAPELLSSDTTQVHVNETLTSRLLKSNCLVTGQPDWGSVQIRYSGPPIDQAGLLAYIVSFRNHNEFHEPCAERMFTDIWRQCQPTKLAVYARYTRRGGLDINPFRTSWPQALPPNIRTARQ

SEQ ID NO: 50545 - protein, 289 aa, unidentified
  source 1..289: note = Variovorax gossypii
  REGION 1..289: note = tr|A0A3S0H1R9|A0A3S0H1R9_9BURK NADPH-dependent 7-cyano-7-deazaguanine reductase OS=Variovorax gossypii; OX = 1679495 GN=queF PE=3 SV=1
MSHDPHNPNTPEQSQLGRASAYADRYDPTLLFPIARATQREAMGIKTGALPFFGADLWTAFEVSWLNLRGKPQLAIAHFTIPCETPNIIESKSFKLYLNSFNNSQFASADAVRERLRADLSEAAWRGSDQQATIGVSLLAPDMFDREPVHELDGLDLDRLDIECTHYQPTPELLSSDTTQAPVNETLTSRLLKSNCLVTGQPDWGSVQIRYSGPPIDQAGLLAYIISFRNHNEFHEPCAERMFTDIWTRCKPNKLAVYARYTRRGGLDINPFRTSWPQALPPNIRTARQ

SEQ ID NO: 50546 - protein, 285 aa, unidentified
  source 1..285: note = Variovorax guangxiensis
  REGION 1..285: note = tr|A0A502DKU9|A0A502DKU9_9BURK NADPH-dependent 7-cyano-7-deazaguanine reductase OS=Variovorax guangxiensis OX=1775474 GN=queF PE=3 SV=1
MSLDNTPAQSQLGRASAYADRYDPTLLFPIARATQRTAMGIAENALPFFGADLWTAFELSWLNARGKPQVAIAHFTVPCETPNIIESKSFKLYLNSFNSSVFDSVDAVRERLRSDLAEAAWRGSDRSGGIGVKLLAPEAFDREPVHELDGLDLDRLDIECTHYQPAPELLSSDSSQPPVTETLTSRLLKSNCLVTGQPDWGSVRVSYSGPAIDQAGLLAYIVSFRNHNEFHEPCAERMFWDIWRHCKPTKLSVYARYTRRGGLDINPFRASWPQALPPNIRTARQ

SEQ ID NO: 50547 - protein, 294 aa, unidentified
  source 1..294: note = Variovorax guangxiensis
  REGION 1..294: note = tr|A0A433MN59|A0A433MN59_9BURK NADPH-dependent 7-cyano-7-deazaguanine reductase OS=Variovorax guangxiensis OX=1775474 GN=queF PE=3 SV=1
MSHDPNSTNPTNPNTPEQSQLGRASAYADHYDPTLLFPIARATQREAMGIKAGALPFFGADLWSAFEVSWLNLRGKPQLAIAHFTIPCETPNIIESKSFKLYLNSFNNSQFASVDAVRERLRADLSEAAWRGSDQQATIGVTLLAPDMFDREPVHELDGLDLDRLDIECSHYQPTPELLSSDATQAPVNETLTSRLLKSNCLVTGQPDWGSVQIRYSGPPIDQAGLLAYIVSFRNHNEFHEPCAERMFTDIWTRCKPNKLAVYARYTRRGGLDINPFRTSWPQALPANIRTARQ

SEQ ID NO: 50548 - protein, 291 aa, Variovorax paradoxus
  REGION 1..291: note = tr|E6V1G5|E6V1G5_VARPE NADPH-dependent 7-cyano-7-deazaguanine reductase OS=Variovorax paradoxus (strain EPS) OX=595537 GN=queF PE=3 SV=1
MSLDNHPDNPNTPEQSQLGRASAYADHYDPSLLFPIARATQREAMGIKTGALPFFGADLWTAFEVSWLNPRGKPQLAIAHFTIPCETPNIIESKSFKLYLNSFNNSTFASIEAVREHLRTDLAEAAWRGSDQSAGIGVKLLTPDLFDREPVHEIDGLDLDRLDIECTHYQPAPELLTSDTTQVHVNETLTSRLLKSNCLVTGQPDWGSVQIRYSGPPIDQAGLLAYIVSFRNHNEFHEPCAERMFTDIWNRCKPVKLAVYARYTRRGGLDINPFRTSWPQALPPNIRTARQ

SEQ ID NO: 50549 - protein, 292 aa, Variovorax paradoxus
  REGION 1..292: note = tr|A0A0P9BIB4|A0A0P9BIB4_VARPD NADPH-dependent 7-cyano-7-deazaguanine reductase OS=Variovorax paradoxus; OX = 34073 GN=queF PE=3 SV=1
MSHDASHTPNPNTPEQSQLGRASAYADRYDPTLLFPIARATQREAMGIAAGALPFFGADLWTAFELSWLNPRGKPQLAIAHFTVPCETPNIIESKSFKLYLNSFNNTAFADAEAVRERLRTDLAEALWRGSDRAAGIGVKLVAPELFDREPVHELDGLDLDRLDIECTHYQPAPELLSSDATQVPVTETLTSRLLKSNCLVTGQPDWGSVQIRYSGPPIDQAGLLAYIVSFRNHNEFHEPCAERMFTDIWKHCHPTKLAVYARYTRRGGLDINPFRTSWPQALPANVRTARQ

SEQ ID NO: 50550 - protein, 291 aa, Variovorax sp.
  REGION 1..291: note = tr|A0A0Q6MXA3|A0A0Q6MXA3_9BURK NADPH-dependent 7-cyano-7-deazaguanine reductase OS=Variovorax sp. Root318D1 OX=1736513 GN=queF PE=3 SV=1
MSLDNAPDNPNTPEQSQLGRASAYADKYDASLLFPISRATQREAMGITGAVLPFFGADLWTAFEVSWLNLRGKPQLAIAHFTVPCETPNIIESKSFKLYLNSFNSTAFASLDAVRERLRTDLSEALWRGSDQSAGIGVKLLAPDMFDREPVHELDGLDLDRLDIECTHYQPAPELLSSDTTQPPVNETLTSRLLKSNCLVTGQPDWGSVQIRYSGPAIDQAGLLAYIVSFRNHNEFHEPCVERMFTDIWRQCQPNKLAVYARYTRRGGLDINPFRTSWPQALPPNIRTARQ

SEQ ID NO: 50551 - protein, 285 aa, Variovorax sp.
  REGION 1..285: note = tr|A0A244EG15|A0A244EG15_9BURK NADPH-dependent 7-cyano-7-deazaguanine reductase OS=Variovorax sp. JS1663; OX = 1851577 GN=queF PE=3 SV=1
MSLDNTPEQSQLGRASAYVDRYDAGLLFPIPRATQREAMGIAAHPLPFFGADLWTAFELSWLNPRGKPQLAIAHFTIPCETPNIIESKSFKLYLNSFNSTVFASAEAVRERLRADLSEAVWRGADRSAAIGVKLMASDLFDREQVQELDGVDLDRLDIECTQYLPAPELLSSDTTQAPVSEALCSRLLKSNCLVTGQPDWGSVQIRYSGPQIDQAGLLAYIVSFRNHNEFHEPCAERMFQDIWQRCQPTKLAVYARYTRRGGLDINPFRTSWPQALPANIRTARQ

SEQ ID NO: 50552 - protein, 154 aa, unidentified
  source 1..154: note = Varunaivibrio sulfuroxidans
  REGION 1..154: note = tr|A0A4R3J9X5|A0A4R3J9X5_9PROT NADPH-dependent 7-cyano-7-deazaguanine reductase OS=Varunaivibrio sulfuroxidans OX=1773489 GN=queF PE=3 SV=1
MSDYSQTNLSQLGHAAAAPDNPEDAVLEAVPNPQAGTDFLARFTVPEFTSVCPVTGQPDFAHLVIDIVPDALLIESKSLKLYLTSFRNHGAFHEDCTVAIAQKIIAAAHPKWLRIGGYWFPRGGIPIDVFYQYGDAPQGVWIPDQGVSPYRGRG

SEQ ID NO: 50553 - protein, 165 aa, Veillonella atypica
  REGION 1..165: note = tr|A0A380N1P1|A0A380N1P1_9FIRM NADPH-dependent 7-cyano-7-deazaguanine reductase OS=Veillonella atypica; OX = 39777 GN=queF_1 PE=3 SV=1
MASGRSEKELQGVTMLGHKTDYPTDYAPQVLEAFDNKHPDNDYFVKFNCPEFTSLCPMTGQPDFATIYISYIPDKKMVESKSLKLYLFSFRNHGDFHEDCINIIMKDLIKLMDPKYIEVWGKFTPRGGLSIDPYANYGKPGTDWEKTAKERLHFHDMQPERVAYR

SEQ ID NO: 50554 - protein, 165 aa, Veillonella atypica
  REGION 1..165: note = tr|E1LAX7|E1LAX7_9FIRM NADPH-dependent 7-cyano-7-deazaguanine reductase OS=Veillonella atypica ACS-134-V-Col7a OX=866778 GN=queF PE=3 SV=1
MASGRSEKELQGVTMLGHKTDYPTDYAPQVLEAFDNKHPDNDYFVKFNCPEFTSLCPMTGQPDFATIYISYVPDKKMVESKSLKLYLFSFRNHGDFHEDCINIIMKDLIKLMNPKYIEVWGKFTPRGGLSIDPYANYGKPGTDWEKTAKERLHFHDMQPERVAYR

SEQ ID NO: 50555 - protein, 165 aa, Veillonella criceti
  REGION 1..165: note = tr|A0A380NMM0|A0A380NMM0_9FIRM NADPH-dependent 7-cyano-7-deazaguanine reductase OS=Veillonella criceti; OX = 103891 GN=queF PE=3 SV=1
MASGRTSEELQGVHGLGQTTKYPTDYAPEVLESFPNKHPNNDYFVKFNCPEFTSLCPMTGQPDFATIYISYVPDERLVESKSLKLYLFSFRNHGDFHEDCVNIIMKDLIALMSPKYIEVWGKFTPRGGLAIDPYANYGKPGTEWENVAKERLHFHDMQPERVAYR

SEQ ID NO: 50556 - protein, 165 aa, Veillonella denticariosi
  REGION 1..165: note = tr|A0A2S7ZCI3|A0A2S7ZCI3_9FIRM NADPH-dependent 7-cyano-7-deazaguanine reductase OS=Veillonella denticariosi JCM 15641 OX=1298594 GN=queF PE=3 SV=1
MASGRSEQELQGVTMLGHQTDYPTDYAPQVLEAFENKHPDNDYFVKFNCPEFTSLCPMTGQPDFATIYISYVPDKRMVESKSLKLYLFSFRNHGDFHEDCINIIMKDLVKLMDPKYIEVWGKFTPRGGLSIDPYANYGKSGTEWEKTAKERLHFHDMQPERVAYR

SEQ ID NO: 50557 - protein, 165 aa, Veillonella dispar
  REGION 1..165: note = tr|W1UW68|W1UW68_9FIRM NADPH-dependent 7-cyano-7-deazaguanine reductase OS=Veillonella dispar DORA_11 OX=1403949 GN=queF PE=3 SV=1
MASGRSEKELQGVTMLGHKTDYPTDYAPQVLEAFDNKHPDNDYFVKFNCPEFTSLCPMTGQPDFATIYISYVPDKKMVESKSLKLYLFSFRNHGDFHEDCINIIMKDLVKLMDPKYIEVWGKFTPRGGLSIDPYANYGKPGTEWEKTAKERLHFHDMQPERVAYR

SEQ ID NO: 50558 - protein, 165 aa, Veillonella dispar
  REGION 1..165: note = tr|C4FS11|C4FS11_9FIRM NADPH-dependent 7-cyano-7-deazaguanine reductase OS=Veillonella dispar ATCC 17748 OX=546273 GN=queF PE=3 SV=1
MASGRSEKELQGVTMLGHKTDYPTDYAPQVLEAFDNKHPDNDYFVKFNCPEFTSLCPMTGQPDFATIYISYVPDKKMVESKSLKLYLFSFRNHGDFHEDCINIIMKDLIKLMDPKYIEVWGKFTPRGGLSIDPYANYGKPGTEWEKTAKERLHFHDMQPERVAYR

SEQ ID NO: 50559 - protein, 165 aa, Veillonella montpellierensis
  REGION 1..165: note = tr|A0A096AIN6|A0A096AIN6_9FIRM NADPH-dependent 7-cyano-7-deazaguanine reductase OS=Veillonella montpellierensis DNF00314 OX=1401067 GN=queF PE=3 SV=1
MSTGRTTEELHGVTGLGHTTTYPTDYAPQVLEAFDNKHPDNDYFVKFNCPEFTSLCPMTKQPDFATIYISYVPDKKMVESKSLKLYLFSFRNHGDFHEDCINIIMKDLIRLMDPKYIEVWGKFTPRGGLSIDPFANYGKPGTDWEQTAKERLHFHDMQPERVAYR

SEQ ID NO: 50560 - protein, 165 aa, Veillonella parvula
  REGION 1..165: note = tr|A0A418PKQ0|A0A418PKQ0_9FIRM NADPH-dependent 7-cyano-7-deazaguanine reductase OS=Veillonella parvula; OX = 29466 GN=queF PE=3 SV=1
MASGRSEKELQGVTMLGHKTDYPTDYAPQVLEAFDNKHPDNDYFVKFNCPEFTSLCPMTGQPDFATIYISYVPDKKMVESKSLKLYLFSFRNHGDFHEDCINIIMKDLVKLMDPKYIEVWGKFTPRGGLSIDPYANYGKPGTEWEKTAKERLHFHDMHPERVAYR

SEQ ID NO: 50561 - protein, 165 aa, Veillonella parvula; identical to SEQ ID NO: 50557
  REGION 1..165: note = tr|D1BQL4|D1BQL4_VEIPT NADPH-dependent 7-cyano-7-deazaguanine reductase OS=Veillonella parvula (strain ATCC 10790 / DSM 2008 / JCM 12972 / Te3) OX=479436; GN = queF PE= 3 SV=1

SEQ ID NO: 50562 - protein, 165 aa, Veillonella rodentium
  REGION 1..165: note = tr|A0A239Y932|A0A239Y932_9FIRM NADPH-dependent 7-cyano-7-deazaguanine reductase OS=Veillonella rodentium; OX = 248315 GN=queF PE=3 SV=1
MASGRSEQELQGVTMLGHQTDYPTDYAPQVLEAFENKHPDNDYFVKFNCPEFTSLCPMTGQPDFATIYISYVPDKRMVESKSLKLYLFSFRNHGDFHEDCINIIMKDLVKLMDPKYIEVWGKFTPRGGLSIDPYANYGKPGSEWEKTAKERLHFHDMQPERVAYR

SEQ ID NO: 50563 - protein, 165 aa, Veillonella rogosae; identical to SEQ ID NO: 50557
  REGION 1..165: note = tr|A0A2S7Z134|A0A2S7Z134_9FIRM NADPH-dependent 7-cyano-7-deazaguanine reductase OS=Veillonella rogosae JCM 15642 OX=1298595 GN=queF PE=3 SV=1

SEQ ID NO: 50564 - protein, 166 aa, unidentified
  source 1..166: note = Veillonella seminalis
  REGION 1..166: note = tr|K9DJK4|K9DJK4_9FIRM NADPH-dependent 7-cyano-7-deazaguanine reductase OS=Veillonella seminalis ACS-216-V-Col6b OX=883156 GN=queF PE=3 SV=1
MASGRTSEELQGVHGLGSQQTKYPMDYAPEVLESFVNKHPGNDYFVKFNCPEFTSLCPMTGQPDFATIYISYVPDERLVESKSLKLYLFSFRNHGDFHEDCVNIIMKDLIKLMEPKYIEVWGRFTPRGGLAIDPYANYGKPGTEWEKVAKERLHFHDMQPERVAYR

SEQ ID NO: 50565 - protein, 165 aa, Veillonella sp.
  REGION 1..165: note = tr|A0A2S7ZF55|A0A2S7ZF55_9FIRM NADPH-dependent 7-cyano-7-deazaguanine reductase OS=Veillonella sp. T34266-5 OX=2027457 GN=queF PE=3 SV=1
MASGRSEKELQGVTMLGHKTDYPTDYAPQVLEAFDNKHPDNDYFVKFNCPEFTSLCPMTGQPDFATIYISYVPDKKMVESKSLKLYLFSFRNHGDFHEDCINIIMKDLIKLMEPKYIEVWGKFTPRGGLSIDPYANYGKPGTEWEKTAKERLHFHDMQPERVAYR

SEQ ID NO: 50566 - protein, 165 aa, Veillonella sp.
  REGION 1..165: note = tr|F9N4B0|F9N4B0_9FIRM NADPH-dependent 7-cyano-7-deazaguanine reductase OS=Veillonella sp. oral taxon 780 str. F0422 OX=944564 GN=queF PE=3 SV=1
MSSGRNAAELQGVHALGSHTDYPTDYAPQVLEAFPNKHPGNDYFVKFNCPEFTSLCPMTGQPDFATIYISYVPDEKLVESKSLKLYLFSFRNHGDFHEDCINIIMKDLVALMEPKYIEVWGEFTPRGGLSIDPYANYGKPGTDWEATAKERLHFHDMQPKRVAYR

SEQ ID NO: 50567 - protein, 165 aa, unidentified; identical to SEQ ID NO: 50554
  source 1..165: note = Veillonella tobetsuensis
  REGION 1..165: note = tr|A0A480BF24|A0A480BF24_9FIRM NADPH-dependent 7-cyano-7-deazaguanine reductase OS=Veillonella tobetsuensis OX=1110546 GN=queF PE=3 SV=1

SEQ ID NO: 50568 - protein, 165 aa, unidentified
  source 1..165: note = Veillonella tobetsuensis
  REGION 1..165: note = tr|A0A480AYI4|A0A480AYI4_9FIRM NADPH-dependent 7-cyano-7-deazaguanine reductase OS=Veillonella tobetsuensis OX=1110546 GN=queF PE=3 SV=1
MASGRSEKELQGITMLGHKTDYPTDYAPQVLEAFDNKHPDNDYFVKFNCPEFTSLCPMTGQPDFATIYISYVPDKKMVESKSLKLYLFSFRNHGDFHEDCINIIMKDLIKLMNPKYIEVWGKFTPRGGLSIDPYANYGKPGTDWEKTAKERLHFHDMQPERVAYR

SEQ ID NO: 50569 - protein, 163 aa, unidentified
  source 1..163: note = Veillonellaceae bacterium
  REGION 1..163: note = tr|A0A134CK21|A0A134CK21_9FIRM NADPH-dependent 7-cyano-7-deazaguanine reductase OS=Veillonellaceae bacterium DNF00626 OX=1588754 GN=queF PE=3 SV=1
MEHREGIEKLHALGNQETKYAYDYDPSVLEKIPNKHKDNDYFVKFNCPEFTSLCPKTGQPDFATVYISYIPDEYIVESKSLKLYLFSYRNHGDFHEDCVNMILHDLVQLLQPRYMEVWGKFLPRGGLSIDPYANYGKPGTDWVEFARYRLLHHDLSPEMVRNR

SEQ ID NO: 50570 - protein, 163 aa, unidentified
  source 1..163: note = Veillonellaceae bacterium
  REGION 1..163: note = tr|A0A316LHH8|A0A316LHH8_9FIRM NADPH-dependent 7-cyano-7-deazaguanine reductase OS=Veillonellaceae bacterium OX=2049049 GN=queF PE=3 SV=1
MEKREGLDELTLLGNQHTHYEYDYNPDYLERIPNKHKDRDYFIKFNCPEFTSLCPKTGQPDFATIYISYIPGDFMVESKSLKLYLFSFRNHGDFHEDCVNIIMDDLINLLHPRYIEVWGKFLPRGGLSIDPYCNHGMKGTKWEEFAAYRLREHDIYPETIHNR

SEQ ID NO: 50571 - protein, 281 aa, Verminephrobacter eiseniae
  REGION 1..281: note = sp|A1WS75|QUEF_VEREI NADPH-dependent 7-cyano-7-deazaguanine reductase OS=Verminephrobacter eiseniae (strain EF01-2) OX=391735 GN=queF PE=3 SV=1
MNPPESSPLGKASACVDQYDATLLFPIARADQRAELGISGAAPFFGADLWTAFELSWLNQRGKPQVALAHITVPCETPRIVESKSFKLYLNSFSNTRFADAAQVQARIRADVSAAVWRGAASAGSVGVTLLGPDRFAQELMQELDGLSLDRLDVQCTQYQPAPELLSAQHDAAPVSERLTSQLLKSNCPVTGQPDWASVQIAYRGPPIDQEGLLQYLVSFRNHSGFHEQCVERIFMDLWTRCQPIELTVYARYTRRGGLDINPLRTSHPQGLPRNMRTARQ

SEQ ID NO: 50572 - protein, 140 aa, unidentified
  source 1..140: note = Verrucomicrobia bacterium
  REGION 1..140: note = tr|A0A1Z8U3Z7|A0A1Z8U3Z7_9BACT NADPH-dependent 7-cyano-7-deazaguanine reductase OS=Verrucomicrobia bacterium TMED56 OX=1986792 GN=queF PE=3 SV=1
MSETNPEHSNLTKLGEGGTQPKRELETFPNRNPERDYVVELNTSEFTCICPKTGQPDFAEIMIRYVPDQKIVESKSLKLYLWTFRDEGTFHEHFANRLLDDLVTALDPRWCRVEVNFNARGGIGIIVSAEHGTPPSIAYA

SEQ ID NO: 50573 - protein, 150 aa, unidentified
  source 1..150: note = Verrucomicrobia bacterium
  REGION 1..150: note = tr|A0A2V6ND18|A0A2V6ND18_9BACT NADPH-dependent 7-cyano-7-deazaguanine reductase OS=Verrucomicrobia bacterium OX=2026799 GN=queF PE=3 SV=1
MLGRSEARVPASPAEATLETFPNPARCNYRIHFETSDFTSLCPITGQADFAKIEIDYTPGKLCIESKSLKFYLASFRNERGFNEAITNRILDDFVRACEPREANVTASFSARGGIALTVRASFPDRSVGRDSVEPAKIDGSAERHPSAGR

SEQ ID NO: 50574 - protein, 132 aa, unidentified
  source 1..132: note = Verrucomicrobia subdivision
  REGION 1..132: note = tr|A0A0R2RH68|A0A0R2RH68_9BACT NADPH-dependent 7-cyano-7-deazaguanine reductase OS=Verrucomicrobia subdivision 6 bacterium BACL9 MAG-120507-bin52 OX=1655590; GN = queFPE=3 SV=1
MSRLSLLGRKAVVPANPSLARLETFPNPKPNRPFAITFSTSEFTSLCPVTGQPDFATITIHYTPKKKCVESKSLKLYLHSFRNVGSFAEAVTNRILDDLVRAISPAHAVVTGDFAARGGVALKVSASFGKTR

SEQ ID NO: 50575 - protein, 131 aa, unidentified
  source 1..131: note = Verrucomicrobia subdivision
  REGION 1..131: note = tr|A0A520Q534|A0A520Q534_9BACT NADPH-dependent 7-cyano-7-deazaguanine reductase OS=Verrucomicrobia subdivision 3 bacterium OX=2052186 GN=queF PE=3 SV=1
MKDLKQLGQITEVPAIRDAATLEKIDNPSPNRFYEVKLHSKEFTSLCPVTGQADFGEITISYSPDRHLIETKSLKMYLASYRNEKLFNEQTVNTILDDLIEVLNPKSICIQGVFSQRGGIQLTVKASYPDS

SEQ ID NO: 50576 - protein, 142 aa, unidentified
  source 1..142: note = Verrucomicrobiaceae bacterium
  REGION 1..142: note = tr|A0A4V1SB50|A0A4V1SB50_9BACT NADPH-dependent 7-cyano-7-deazaguanine reductase OS=Verrucomicrobiaceae bacterium OX=2026800 GN=queF PE=3 SV=1
MENSPPITLLGSSARLPQSPEEARLECFPNRTPGRPFWIHLDYPEFSSLCPVTGQPDSSRLRICYVPDQLCLETKSLKYYLASWRNTAAFNEDIVNRLLDELSAACSPRQMIVRGDFSPRGGIRLTAQASLPPGIVDNPFGL

SEQ ID NO: 50577 - protein, 121 aa, unidentified
  source 1..121: note = Verrucomicrobiaceae bacterium
  REGION 1..121: note = tr|A0A4Q2Y6S8|A0A4Q2Y6S8_9BACT NADPH-dependent 7-cyano-7-deazaguanine reductase OS=Verrucomicrobiaceae bacterium OX=2026800 GN=queF PE=3 SV=1
MPSSPDEAKLEIFPNKRPGRKYWITLNTSEFSSLCPVTGQPDSARIEIRYVPGETIVETKSLKYYLASFRNQPAFNEEIVNRILDDLVAALSPRQLIVRGEFAPRGGIQLTTEATYPEDNS

SEQ ID NO: 50578 - protein, 126 aa, unidentified
  source 1..126: note = Verrucomicrobiae bacterium
  REGION 1..126: note = tr|B5JRC9|B5JRC9_9BACT NADPH-dependent 7-cyano-7-deazaguanine reductase OS=Verrucomicrobiae bacterium DG1235 OX=382464 GN=queF PE=3 SV=1
MESKYLGKTVQQPIDELDTFEAPEGVTTVTMTSDELTSSCPITGQPDFYNVSIEYAPKELCIESKSLKLFLWGFRDKAMFAEKIAAVICDRVVQDISPRRCRVMTFQKARGGIEIESVAEFPRATD

SEQ ID NO: 50579 - protein, 143 aa, unidentified
  source 1..143: note = Verrucomicrobiae bacterium
  REGION 1..143: note = tr|A0A2A2YFH3|A0A2A2YFH3_9BACT NADPH-dependent 7-cyano-7-deazaguanine reductase OS=Verrucomicrobiae bacterium AMD-G2 OX=1982328 GN=queF PE=3 SV=1
MSDTLTLLGNSQTSWPQSPEQAKLETFPNRSPQAHYWVHLDFPEFSSLCPVTGQPDTARIQIRYIPSENCIETKSLKFYLTSFRNHQAFNEEIVNRILRDIVSAVNPREAVVRGDFSPRGGISLTAQASHPQAQWNGLSIDEK

SEQ ID NO: 50580 - protein, 119 aa, unidentified
  source 1..119: note = Verrucomicrobiales bacterium
  REGION 1..119: note = tr|A0A358ELZ7|A0A358ELZ7_9BACT NADPH-dependent 7-cyano-7-deazaguanine reductase OS=Verrucomicrobiales bacterium OX=2026801 GN=queF PE=3 SV=1
MPSSRKEAIIETFANPSPGRDYWIELHTQEYTSKCPVTNQPDFGSITIRYIPKDLCIETKSLKFYLSSYRNEECFNEMAVNWMLDDLVKACAPTKMVVKGEFASRGGIRVVVEASHPDN

SEQ ID NO: 50581 - protein, 144 aa, unidentified
  source 1..144: note = Verrucomicrobiales bacterium
  REGION 1..144: note = tr|A0A3D3LGF7|A0A3D3LGF7_9BACT NADPH-dependent 7-cyano-7-deazaguanine reductase OS=Verrucomicrobiales bacterium OX=2026801 GN=queF PE=3 SV=1
MSDLNELSLLGRSEHRLPASPDEAELETFPNRTPGRNYTIHLTAPDFSSLCPVTGQPDAAHVEIIYIPDERCVETKSLKFYLASYRNHAAFNEAIVNRILDDLVKACAPRQARVRGRFAPRGGIQLTCEACHPDRDAALGWPAA

SEQ ID NO: 50582 - protein, 152 aa, unidentified
  source 1..152: note = Verticiella sediminum
  REGION 1..152: note = tr|A0A556AVD3|A0A556AVD3_9BURK NADPH-dependent 7-cyano-7-deazaguanine reductase OS=Verticiella sediminum; OX = 1247510 GN=queF PE=3 SV=1
MSQTDHLTQLGQAAAPAASPEHAVLERVPNPHPDTDYVARFTAPEFTSLCPVTGQPDFAHLVIDYVPDQWLVESKSLKLYLTSFRNHGAFHEDCTVGIGRRLQALLEPRWLRIGGYWYPRGGIPIDVFWQTGEPPKGIWLPDTGVAAYRGRG

SEQ ID NO: 50583 - protein, 132 aa, unidentified
  source 1..132: note = Vesicomyosocius okutanii
  REGION 1..132: note = sp|A5CWU3|QUEF_VESOH NADPH-dependent 7-cyano-7-deazaguanine reductase OS=Vesicomyosocius okutanii subsp. Calyptogena okutanii (strain HA) OX=412965; GN = queF PE=3 SV=1
MSSQPNKNLKVFDNPNIERNFIIQINMPEFTCLCPKTGQPDFATLYLEYIADKVCIELKSLKMYIWSYRSKGEFHEAVTNKILDDLIQISNPRFMRLKAIFNVRGGIYTTIIAEYQQKNWTFKTKIDLQYQG

SEQ ID NO: 50584 - protein, 281 aa, unidentified
  source 1..281: note = Vespertiliibacter pulmonis
  REGION 1..281: note = tr|A0A3N4WJ27|A0A3N4WJ27_9PAST NADPH-dependent 7-cyano-7-deazaguanine reductase OS=Vespertiliibacter pulmonis OX=1443036 GN=queF PE=3 SV=1
MNYEHHSLNTLKLGKSTNYADQYDPTLLQGVPRKLNRDDLAITEKQPFTNGTDLWTAYEISWLNVKGLPQVAIADIKLDFRSENLIESKSFKLYLNSFNQTKFSSMEEVRRIIEKDLVNCANGNVSVTLYSLPYYTNQRIIALDGVCIDDQDIEISDYTFSPELLMNITNESEEIVQEKLVSHLLKSNCLITQQPDWGTVQIHYVGKRLDREKLLRYLVSFRQHNEFHEQCVERIFCDLMKFAAPEKLTVYARYTRRGGLDINPFRSNFEQLSENYRLARQ

SEQ ID NO: 50585 - protein, 273 aa, Vibrio aerogenes
  REGION 1..273: note = tr|A0A1M5ZM76|A0A1M5ZM76_9VIBR NADPH-dependent 7-cyano-7-deazaguanine reductase OS=Vibrio aerogenes CECT 7868 OX=1216006 GN=queF_2 PE=3 SV=1
MNTAYSKNLGKKTSYISTYSPELLDPIPRAYGRENITDCQNHCFSGYDLWTGYELSWLNLKGKPMVAVAEFIIPANSLNLIESKSFKLYLNSLNQTRISSEDELVSMLVRDLSQAAEGDVEVKLLNVNRDFSPRVNTTFECIDDLDIEVNSYDYDENLLQGSVSETHAEESLCSHLLKSNCLVTHQPDWGSVYIKYKGKAINREKLLRYIISFREHNEFHEQCVERIFSDIKRCCSPDQLTVFARYTRRGGLDINPFRSNFEDEMSVEREYRQ

SEQ ID NO: 50586 - protein, 281 aa, Vibrio aerogenes
  REGION 1..281: note = tr|A0A1M5Z2M7|A0A1M5Z2M7_9VIBR NADPH-dependent 7-cyano-7-deazaguanine reductase OS=Vibrio aerogenes CECT 7868 OX=1216006 GN=queF_1 PE=3 SV=1
MSKYSDDKALAGLTLGKTTHYKAHYDPSLLQPVPRSLNRDDLQLNSSLPFTGCDLWTLYELSWLNHNGLPQIAIGHVSVPAESPALIESKSFKLYLNSYNQSRFDSIQAVQKQLENDLSACAGAPVSVILSKVTDFTGEAITPMQGECIDDTDILIDCYDFNPSLLDNATGHEWVEETLHSHLLKSNCLITSQPDWGSIEIHYQGHKINREALLRYLISFREHNEFHEQCVERIFTDIKKYCAPKKLTVYARYTRRGGLDINPYRSSENKAPINTGRMARQ

SEQ ID NO: 50587 - protein, 272 aa, Vibrio agarivorans
  REGION 1..272: note = tr|A0A2K1CEV2|A0A2K1CEV2_9VIBR NADPH-dependent 7-cyano-7-deazaguanine reductase OS=Vibrio agarivorans; OX = 153622 GN=queF PE=3 SV=1
MTTYNKNLGKKTEYVSHYDPELLDPIPRQRGRNEIKEIQMASHMGFDLWTAFEVSWLNLKGKPVVAIAEFIFPHTSANLIESKSFKLYLNSFNQTRLESADVVMEKMALDLSKAAGAEVNVSFLDVAIPQELTVSRDFDCIDHLDITVDDFSYDEDALLGSTTDAQVTESLCSHLLKSNCLVTNQPDWGSVYIRYTGAKIDQERLLKYLISFREHNEFHEQCVERIYSDIKRCCAPEKLTVFARYTRRGGLDINPYRSDFEAEICSGRNPRQ

SEQ ID NO: 50588 - protein, 281 aa, Vibrio agarivorans
  REGION 1..281: note = tr|A0A2K1CFF8|A0A2K1CFF8_9VIBR NADPH-dependent 7-cyano-7-deazaguanine reductase OS=Vibrio agarivorans; OX = 153622 GN=queF PE=3 SV=1
MSKYSDAKELADLTLGKKTEYTNQFDPALLQPVPRSLNRDDLNLGDSLPFVGYDIWTLYELSWLNSKGLPQVALGEVYIPATSTNLIESKSFKLYLNSYNQTCFASWEEVTQHLTQDLSACAGEQVLVNVYPVTHYTNQPIVIMDGECIDNQDIEINDYQFNPALLENASEPERVEEVLHSHLLKSNCLITNQPDWGSIEIRYQGNKINREKLLRYLVSFREHNEFHEQCVERIFSDLMKYCQPEKLTVFARYTRRGGLDINPYRSSHQDKPLHNQRLARQ

SEQ ID NO: 50589 - protein, 281 aa, unidentified
  source 1..281: note = Vibrio alfacsensis
  REGION 1..281: note = tr|A0A347US81|A0A347US81_9VIBR NADPH-dependent 7-cyano-7-deazaguanine reductase OS=Vibrio alfacsensis; OX = 1074311 GN=queF PE=3 SV=1
MSKYSDAKELAGLTLGKKTEYANQYDASLLQPVPRSLNRDDLELGDSLPFLGHDIWTLYELSWLNGKGLPQVAVGEVYIPATSANLIESKSFKLYLNSYNQTRFTSWEEVTERLIQDLSACAGERVLVEVNPVNHYTNQPIVTMEGECIDDQDIEITDYDFDATLLEGAAGEEQVEEILHSHLLKSNCLITNQPDWGSVEIRYQGAKLNREKLLRYLVSFREHNEFHEQCVERIFTDLMKYGQPNKLTVFARYTRRGGLDINPYRSTEQDKPTHNNRMARQ

SEQ ID NO: 50590 - protein, 281 aa, Vibrio alginolyticus
  REGION 1..281: note = tr|D0WU02|D0WU02_VIBAL NADPH-dependent 7-cyano-7-deazaguanine reductase OS=Vibrio alginolyticus 40B OX=674977 GN=queF PE=3 SV=1
MSKYSDAKELAGLTLGKTTEYANQYDPSLLQPVPRSLNRDDLQLGDTLPFMGHDIWTLYELSWLNSKGLPQVAVGEVYIPATSANLIESKSFKLYLNSYNQTRFASWEEVTERLTQDLSECAGEKVLVEVNPVTHYTNQPIVTMDGECIDDQDINITSYDFDADLLEGAAGEVQVEEVLHSHLLKSNCLITNQPDWGSVEIRYQGAKIDREKLLRYLVSFREHNEFHEQCVERIFTDLMKYCQPSKLTVFARYTRRGGLDINPYRSTEQDKPAHNHRMARQ

SEQ ID NO: 50591 - protein, 281 aa, Vibrio alginolyticus
  REGION 1..281: note = tr|A0A2L1Y3X1|A0A2L1Y3X1_VIBAL NADPH-dependent 7-cyano-7-deazaguanine reductase OS=Vibrio alginolyticus; OX = 663 GN=queF PE=3 SV=1
MSKYSDAKELAGLTLGKTTEYANQYDPSLLQPVPRSLNRDDLQLGDTLPFMGHDIWTLYELSWLNSKGLPQVAVGEVYIPATSANLIESKSFKLYLNSYNQTRFASWEEVTERLTQDLSECAGEKVLVEVNPVTHYTNQPIVTMDGECIDDQDIDITSYDFDADLLEGAAGEVQVEEVLHSHLLKSNCLITNQPDWGSVEIRYQGAKIEREKLLRYLVSFREHNEFHEQCVERIFTDLMKYCQPSKLTVFARYTRRGGLDINPYRSTEQDKPAHNHRMARQ

SEQ ID NO: 50592 - protein, 289 aa, unidentified
  source 1..289: note = Vibrio algivorus
  REGION 1..289: note = tr|A0A557PA86|A0A557PA86_9VIBR NADPH-dependent 7-cyano-7-deazaguanine reductase OS=Vibrio algivorus; OX = 1667024 GN=queF PE=3 SV=1
MTHSSKQTKYANAKELQGLTLGQATQYSHDYDASLLQPVPRSLNRDDLGLKDSAELPFVGSDIWTLYELSWLNIKGLPQVAIGDVILPPTSPNLIESKSFKLYLNSFNQTRFESWQQVKQIIAQDLSHCAGEAVEVTLHSLSHYTQQPITTMQGQCIDDQDIEISDYQFDESYLKGSTFPKKVSECLHSHLLKSNCLITNQPDWGSVEIEYTGNKINQEALLRYLVSFREHNEFHEQCVERIFCDIMKYCQPEKLSVYARYTRRGGLDINPFRSTHLSKPSQMTRMARQ

SEQ ID NO: 50593 - protein, 281 aa, Vibrio anguillarum
  REGION 1..281: note = tr|A0A290PVG4|A0A290PVG4_VIBAN NADPH-dependent 7-cyano-7-deazaguanine reductase OS=Vibrio anguillarum; OX = 55601 GN=queF PE=3 SV=1
MSKYSDAKALAGLTLGKKTDYAKQYDPSLLQPVPRSLNRDDLHLGDSLPFKGCDIWTLYELSWLNEKGLPQVAIGEVSIPATSASLIESKSFKLYLNSYNQSKVASWDEVTQRLTNDLSACAGAPVSVTLNPVSDYTGQAIVTMQGECIDGQDIEIESYQFDASLLKSAARGEQVNETLHSHLLKSNCLITNQPDWGSVEIHYQGPQIDREALLRYLVSFREHNEFHEQCVERIFTDIMQYCQPTQLTVYARYTRRGGLDINPFRSTEQERPTHNQRMARQ

SEQ ID NO: 50594 - protein, 281 aa, Vibrio anguillarum
  REGION 1..281: note = tr|F7YMW4|F7YMW4_VIBA7 NADPH-dependent 7-cyano-7-deazaguanine reductase OS=Vibrio anguillarum (strain ATCC 68554 / 775) OX=882102 GN=queF PE=3 SV=1
MSKYSDAKALAGLTLGKKTDYAKQYDPSLLQPVPRSLNRDDLHLGDSLPFKGCDIWTLYELSWLNEKGLPQVAIGEVSIPATSASLIESKSFKLYLNSYNQSKIASWDEVTQRLTNDLSACAGAPVSVTLNPVTDYTGQAIVTMQGECIDGQDIEIESYQFDASLLKSAARGEQVNETLHSHLLKSNCLITNQPDWGSVEIHYQGQQIDREALLRYLVSFREHNEFHEQCVERIFTDIMQYCQPTQLTVYARYTRRGGLDINPFRSTEQERPTHNQRMARQ

SEQ ID NO: 50595 - protein, 281 aa, unidentified
  source 1..281: note = Vibrio antiquarius
  REGION 1..281: note = tr|A7K612|A7K612_VIBAE NADPH-dependent 7-cyano-7-deazaguanine reductase OS=Vibrio antiquarius (strain Ex25) OX=150340 GN=queF PE=3 SV=1
MSKYSDAKELAGLTLGKKTEYANQYDPSLLQPVPRSLNRDDLQLGDSLPFMGHDIWTLYELSWLNSKGLPQVAVGEVYIPATSANLIESKSFKLYLNSYNQTRFSSWEEVEERLTQDLSECAGEKVLVEVNPVTHYTNQPIVTMEGECIDDQDIDITSYDFDADLLEGAAGEEQVEEILHSHLLKSNCLITNQPDWGSVEIRYQGAKIDREKLLRYLVSFREHNEFHEQCVERIFTDLMKYCQPNKLTVFARYTRRGGLDINPYRSTEQDKPDHNHRMARQ

SEQ ID NO: 50596 - protein, 281 aa, Vibrio atlanticus
  REGION 1..281: note = tr|A0A1C3J1R3|A0A1C3J1R3_9VIBR NADPH-dependent 7-cyano-7-deazaguanine reductase OS=Vibrio atlanticus; OX = 693153 GN=queF PE=3 SV=1
MSKYSDAKELAGLTLGQKTEYSNQYDASLLQPVPRSLNRNDLALNGELPFVGHDIWTMYELSWLNTNGLPQVAVGEVFIPATSQNLIESKSFKLYLNSYNQTQFENWDQVTERLTQDLSACAGESVIVNVNSVTDYTNQPIVTMEGDCIDNQDIQITSYDFEASLLEGAAGEQEVEETLHSHLLKSNCLITNQPDWGSVEIAYSGKQIDREALLRYLVSFREHNEFHEQCVERIFTDIMKYCAPSKLTVFARYTRRGGLDINPYRSTEQDRPSHNKRMARQ

SEQ ID NO: 50597 - protein, 281 aa, Vibrio atlanticus
  REGION 1..281: note = tr|A0A558H3Q3|A0A558H3Q3_9VIBR NADPH-dependent 7-cyano-7-deazaguanine reductase OS=Vibrio atlanticus; OX = 693153 GN=queF PE=3 SV=1
MSKYSDAKELAGLTLGQKTEYSNQYDASLLQPVPRSLNRDDLALNGDLPFVGHDIWTMYELSWLNTNGLPQVAVGEVFIPATSPNLIESKSFKLYLNSYNQTQFQNWDQVTERLTQDLSACAGEAVIVNVNSVTDYTNQPIVTMEGDCIDNQDIQITSYDFEASLLEGAAGEQDVEETLHSHLLKSNCLITNQPDWGSVEIAYSGKKIDRESLLRYLVSFREHNEFHEQCVERIFTDIMKYCAPSKLTVFARYTRRGGLDINPYRSTEQDRPSHNKRMARQ

SEQ ID NO: 50598 - protein, 272 aa, Vibrio azureus
  REGION 1..272: note = tr|U3A657|U3A657_9VIBR NADPH-dependent 7-cyano-7-deazaguanine reductase OS=Vibrio azureus NBRC 104587 OX=1219077 GN=queF PE=3 SV=1
MTTYNKNLGKKTEYVSHYAPELLDPIPRQRGRDEIKEIQMASHAGFDLWTAFEVSWLNMKGKPVVAIAEFIFPHTSANLIESKSFKLYLNSFNQTRLESADVVMEKMVHDLSQAAGAEVSVSFSDVATPQELTVSRDFDCIDHLDITVDDFSYDEDALLGSTTDEQVTESLCSHLLKSNCLVTNQPDWGSVYIRYTGAKIDQERLLKYLISFREHNEFHEQCVERIYSDIKRCCAPEKLTVFARYTRRGGLDINPYRSDFEAEICSGRNPRQ

SEQ ID NO: 50599 - protein, 281 aa, Vibrio azureus
  REGION 1..281: note = tr|U3ANR7|U3ANR7_9VIBR NADPH-dependent 7-cyano-7-deazaguanine reductase OS=Vibrio azureus NBRC 104587 OX=1219077 GN=queF PE=3 SV=1
MSKYSDAKELAGLTLGKKTEYASQFDPSLLQPVPRSLNRDDLNLGDSLPFVGYDIWTLYELSWLNSKGLPQVALGEVYIPATSTNLIESKSFKLYLNSYNQTRFASWEEITQRLTQDLSACAGEQVLVNVFPVTHYTDQPIVTMDGECIDNQDIEISDYQFNPELLDNAAESEQVEEVLHSHLLKSNCLITNQPDWGSVEIRYQGNKINREKLLRYLVSFREHNEFHEQCVERIFSDLMKYCQPEKLTVFARYTRRGGLDINPYRSSYQDKPLHNHRLARQ

SEQ ID NO: 50600 - protein, 281 aa, unidentified
  source 1..281: note = Vibrio barjaei
  REGION 1..281: note = tr|A0A1J4R1C0|A0A1J4R1C0_9VIBR NADPH-dependent 7-cyano-7-deazaguanine reductase OS=Vibrio barjaei; OX = 1676683 GN=queF PE=3 SV=1
MSKYSNAKELSGLTLGQKTEYANHYDANLLQPVPRSLNRDDLELGETLPFQGCDIWTLYEISWLNTKGLPQVAVGEVSIPATSANLIESKSFKLYLNSYNQTRFATWEQVQSTIAADLSNCAGETVSVKLIPVADFENTNIVGMAGECIDDQDITIDNYEFDAELLKDAADDEIVEEALHSHLLKSNCLITNQPDWGSVEIQYQGAKINREALLRYLVSFREHNEFHEQCVERIFTDLMQYCNPTKLTVYARYTRRGGLDINPYRSNQYQAPEHNARMARQ

SEQ ID NO: 50601 - protein, 281 aa, unidentified
  source 1..281: note = Vibrio bivalvicida
  REGION 1..281: note = tr|A0A177XWD6|A0A177XWD6_9VIBR NADPH-dependent 7-cyano-7-deazaguanine reductase OS=Vibrio bivalvicida; OX = 1276888 GN=queF PE=3 SV=1
MSKYSDAKELTGLTLGQKTEYSNQYDSSLLQPVPRSLNRDDLNLGDSLPFRGCDIWTLYELSWLNDKGLPQVAVGEVSIPATSANLIESKSFKLYLNSLNQTRFPSWDHVEQTLVQDLSACAGETVSVTVRSVVDYTDSVVVTMDGECIDEQDIEITNYDFDRTLIQGAAIGELVEESLHSHLLKSNCLITNQPDWGSVEIQYKGKQIDREALLRYLVSFREHNEFHEQCVERIFTDIMEFCQPETLTVYARYTRRGGLDINPYRSNVNSQPSHNQRMARQ

SEQ ID NO: 50602 - protein, 281 aa, Vibrio brasiliensis
  REGION 1..281: note = tr|E8LPF7|E8LPF7_9VIBR NADPH-dependent 7-cyano-7-deazaguanine reductase OS=Vibrio brasiliensis LMG 20546 OX=945543 GN=queF PE=3 SV=1
MSKYSDAKELAGLTLGQKTEYSNQYDPSLLQPVPRSLNRDDLDLGDTLPFQGCDIWTLYELSWLNEKGLPQVAIGEVSIPATSTNLIESKSFKLYLNSFNQTRFASWDEVERALVKDLSHCAGEEVSVTIRSVVDYTDSVVVTMDGDCIDDQDIEITSYDFDRTLIQGAATGDIVEESLHSHLLKSNCLITNQPDWGSVEIQYKGKQIDREALLRYIVSFREHNEFHEQCVERIFTDIMEFCQPESLTVYARYTRRGGLDINPYRSNVNGQPNHNQRMARQ

SEQ ID NO: 50603 - protein, 284 aa, Vibrio breoganii
  REGION 1..284: note = tr|A0A193KDR2|A0A193KDR2_9VIBR NADPH-dependent 7-cyano-7-deazaguanine reductase OS=Vibrio breoganii; OX = 553239 GN=queF PE=3 SV=1
MSKYSDAKELAGLTLGQKTQYASLYDPELLQAVPRSLNRDDLELGDTLPFKGQDIWTLYELSWLNANGLPQVAVGEVSIPASSPNLIESKSFKLYLNSYNQTKFSDWDAVKNQLSVDLSACAGGEVSVTLSRVQDFNQQPIVDMQGACIDEQDISITEYEFSTDYLKGSVSEESVDEVLHSHLLKSNCLITNQPDWGSVEIRYSGKKINQEALLRYLVSFREHNEFHEQCVERIFTDIMHFCQPKTLSVYARYTRRGGLDINPYRTSLDSESNAPDSTLRLARQ

SEQ ID NO: 50604 - protein, 284 aa, Vibrio breoganii
  REGION 1..284: note = tr|A0A4U2GPS6|A0A4U2GPS6_9VIBR NADPH-dependent 7-cyano-7-deazaguanine reductase OS=Vibrio breoganii; OX = 553239 GN=queF PE=3 SV=1
MSKYSDAKELAGLTLGQKTQYASLYDPELLQAVPRSLNRDDLELGDTLPFKGQDIWTLYELSWLNANGLPQVAVGEVSIPASSPNLIESKSFKLYLNSYNQTKFSDWDAVKNQLSVDLSACAGGEVSVTLSRVQDFNQQPIVDMQGACIDEQDISITEYEFSTDYLKGSVSEESVGEVLHSHLLKSNCLITNQPDWGSVEIRYSGKKINQEALLRYLVSFREHNEFHEQCVERIFTDIMHFCQPKSLSVYARYTRRGGLDINPYRTSLDSESNAPDSTLRLARQ

SEQ ID NO: 50605 - protein, 281 aa, Vibrio campbellii
  REGION 1..281: note = sp|A7MYB6|QUEF_VIBCB NADPH-dependent 7-cyano-7-deazaguanine reductase OS=Vibrio campbellii (strain ATCC BAA-1116 / BB120) OX=338187 GN=queF PE=3 SV=1
MSKYSDAKELAGLTLGKKTEYANQYDASLLQPVPRSLNRDDLELGDSLPFLGHDIWTLYELSWLNSKGLPQVAVGEVYIPATSANLIESKSFKLYLNSYNQTRFATWEEVTERLTQDLSACAGEAVLVEVNPVNHYTNQPIVTMEGECIDDQDIEITSYDFNAALLEGAAGDEQVEEILHSHLLKSNCLITNQPDWGSVEIRYQGAKLDREKLLRYLVSFREHNEFHEQCVERIFTDLMKYCQPTKLTVFARYTRRGGLDINPYRSTEQDKPAHNNRMARQ

SEQ ID NO: 50606 - protein, 281 aa, Vibrio campbellii
  REGION 1..281: note = tr|A0A1P8MG94|A0A1P8MG94_9VIBR NADPH-dependent 7-cyano-7-deazaguanine reductase OS=Vibrio campbellii; OX = 680 GN=queF PE=3 SV=1
MSKYSDAKELAGLTLGKKTEYANQYDASLLQPVPRSLNRDDLELGDSLPFLGHDIWTLYELSWLNSKGLPQVAVGEVYIPATSANLIESKSFKLYLNSYNQTRFATWEEVTERLTQDLSACAGEAVLVEVNPVNHYTNQPIVTMEGECIDDQDIEITSYDFDAALLQGAAGDEQVEEILHSHLLKSNCLITNQPDWGSVEIRYQGAKLDREKLLRYLVSFREHNEFHEQCVERIFTDLMKYCQPTKLTVFARYTRRGGLDINPYRSTEQDKPAHNNRMARQ

SEQ ID NO: 50607 - protein, 281 aa, unidentified
  source 1..281: note = Vibrio caribbeanicus
  REGION 1..281: note = tr|E3BPQ4|E3BPQ4_9VIBR NADPH-dependent 7-cyano-7-deazaguanine reductase OS=Vibrio caribbeanicus ATCC BAA-2122 OX=796620 GN=queF PE=3 SV=1
MSKYSNAQELAGLTLGQKTEYSNQYDPNLLHPVPRSLNRDDLYLGDTLPFIGCDLWTMYEVSWLNKNGLPQVAIGEVSVPATSSNLIESKSFKLYLNSFNQTHFSDWDEVERIMTKDLSACAGEQVGVTLRALEDYTDTLIVSMDGECIDNQDITIDNYDLTRELLQNSATGEVIEESLHSHLLKSNCLITNQPDWGSVEIQYKGKKINREALLRYIVSFREHNEFHEQCVERIFTDIMEFCQPSELTVFARYTRRGGLDINPYRSNIRAQPNHNQRMARQ

SEQ ID NO: 50608 - protein, 281 aa, unidentified
  source 1..281: note = Vibrio caribbeanicus
  REGION 1..281: note = tr|A0A0A6QLP0|A0A0A6QLP0_9VIBR NADPH-dependent 7-cyano-7-deazaguanine reductase OS=Vibrio caribbeanicus; OX = 701175 GN=queF PE=3 SV=1
MSKYSDAKELAGLTLGQKTDYSNQYDPSLLQPVPRSLNRDDLNLGDELPFQGCDIWTLYELSWLNEKGLPQVAVGEVSIPATSANLIESKSFKLYLNSFNQTRFSSWDEVENTLIQDLSQCAGETVAVTLRSVVDYTDSVIVSMDGECIDDQDIKITHYDFDETLLQNATDNEVVEESLHSHLLKSNCLITNQPDWGSVEIRYRGNKINREALLRYIVSFREHNEFHEQCVERIFTDIMKFCQPQQLTVYARYTRRGGLDINPYRSNQDAQPAHNQRMARQ

SEQ ID NO: 50609 - protein, 288 aa, Vibrio casei
  REGION 1..288: note = tr|A0A368LLQ7|A0A368LLQ7_9VIBR NADPH-dependent 7-cyano-7-deazaguanine reductase OS=Vibrio casei OX=673372; GN = queF PE=3 SV=1
MTHSTQTKYANAKELQGLTLGQTTQYSHDYDPRLLQPVPRSLNRNDLGLTDNQKLPFIGCDIWTMYELSWLNSKGLPQVAVGDVMLPVTSENLIESKSFKLYLNSLNQTRFESWQQVQATIEKDLSQCAGEHVFVQLHPLSHYTEQLITTMKGHCIDEQDIEIKNYNFDDAYLNGAVSSHVVTETLHSHLLKSNCLITNQPDWGSVEIEYTGKQINQEALLRYLVSFREHNEFHEQCVERIFCDLMQYCQPEQLSVYARYTRRGGLDINPFRSTNLKQPHMMTRMARQ

SEQ ID NO: 50610 - protein, 281 aa, Vibrio celticus
  REGION 1..281: note = tr|A0A1C3JFG5|A0A1C3JFG5_9VIBR NADPH-dependent 7-cyano-7-deazaguanine reductase OS=Vibrio celticus; OX = 446372 GN=queF PE=3 SV=1
MSKYSDAKELAGLTLGQKTEYSNQYDASLLQPVPRSLNRDDLALNGELPFVGHDIWTMYELSWLNTNGLPQVAVGEVFIPATSPNLIESKSFKLYLNSYNQTQFENWDQVTERLTQDLSACSGETVIVNVNSVTDYTNQPIVTMEGDCIDNQDIQITSYDFEASLLEGAAGEQDVEETLHSHLLKSNCLITNQPDWGSVEIAYSGKQIDREALLRYLVSFREHNEFHEQCVERIFTDIMKYCAPSKLTVFARYTRRGGLDINPYRSTEQDRPSHNKRMARQ

SEQ ID NO: 50611 - protein, 281 aa, Vibrio chagasii
  REGION 1..281: note = tr|A0A2S7VIJ6|A0A2S7VIJ6_9VIBR NADPH-dependent 7-cyano-7-deazaguanine reductase OS=Vibrio chagasii; OX = 170679 GN=queF PE=3 SV=1
MSKYSDAKELAGLTLGQKTEYSNQYDASLLQPVPRSLNRDDLALNGELPFVGHDIWTMYELSWLNTNGLPQVAVGEVFIPATSPNLIESKSFKLYLNSYNQTQFENWEQVTERLTQDLSACAGEAVIVNVNSVTDYTNQPIVTMEGECIDNQDIQITSYDFEASLLEGATGEQEVEETLHSHLLKSNCLITNQPDWGSVEIAYSGKQIDREALLRYLVSFREHNEFHEQCVERIFTDIMKYCAPSKLTVFARYTRRGGLDINPYRSTEQDRPSHNKRMARQ

SEQ ID NO: 50612 - protein, 281 aa, Vibrio cholerae
  REGION 1..281: note = sp|Q9KTK0|QUEF_VIBCH NADPH-dependent 7-cyano-7-deazaguanine reductase OS=Vibrio cholerae serotype O1 (strain ATCC 39315 / El Tor Inaba N16961); OX = 243277 GN=queF PE=1SV=2
MSKYSDAKELASLTLGKKTEYANQYDPSLLQPVPRSLNRNDLHLSATLPFQGCDIWTLYELSWLNQKGLPQVAIGEVSIPATSANLIESKSFKLYLNSYNQTRFASWDEVQTRLVHDLSACAGETVTVNVKSLNEYTAEPIVTMQGECIDDQDIEIANYEFDDALLQGAAQGEEVSEVLHSHLLKSNCLITNQPDWGSVEIAYHGAKMNREALLRYLVSFREHNEFHEQCVERIFTDIMRYCQPQSLTVYARYTRRGGLDINPFRSSHQSAPNHNQRMARQ

SEQ ID NO: 50613 - protein, 281 aa, Vibrio cholerae; identical to SEQ ID NO: 50612
  REGION 1..281: note = tr|A0A4S3QLI6|A0A4S3QLI6_VIBCL NADPH-dependent 7-cyano-7-deazaguanine reductase OS=Vibrio cholerae O1 biovar El Tor OX=686 GN=queF PE=3 SV=1

SEQ ID NO: 50614 - protein, 281 aa, unidentified
  source 1..281: note = Vibrio cidicii
  REGION 1..281: note = tr|A0A151KX16|A0A151KX16_9VIBR NADPH-dependent 7-cyano-7-deazaguanine reductase OS=Vibrio cidicii; OX = 1763883 GN=queF PE=3 SV=1
MSKYSDAKELAGLTLGKKTEYATQYDASLLQPVPRSLNRDDLQLGANLPFVGHDIWTLYELSWLNSKGLPQVAVGEVSIPATSPNLIESKSFKLYLNSYNQTRFSTWQAVIERLTSDLSACAGEPVAVKVNPLSHYTQQPIVTMAGECIDDQDIEIENYDFDQSLLQDAAGETVVQETLHSHLLKSNCLITNQPDWGSVEIAYHGKQIDREKLLRYLVSFREHNEFHEQCVERIFTDIMKYCAPQSLTVYARYTRRGGLDINPYRSTQQAKPAHNQRMARQ

SEQ ID NO: 50615 - protein, 281 aa, unidentified
  source 1..281: note = Vibrio cidicii
  REGION 1..281: note = tr|A0A151JJT0|A0A151JJT0_9VIBR NADPH-dependent 7-cyano-7-deazaguanine reductase OS=Vibrio cidicii; OX = 1763883 GN=queF PE=3 SV=1
MSKYSDAKELAGLTLGKKTEYATQYDASLLQPVPRSLNRDDLQLGANLPFVGHDIWTLYELSWLNSKGLPQVAVGEVSIPATSPNLIESKSFKLYLNSYNQTRFATWQAVIERLTSDLSACAGEPVAVKVNPLSHYTQQPIVTMAGECIDDQDIEIESYDFDQSLLQDAAGETVVQETLHSHLLKSNCLITNQPDWGSVEIAYHGKQIDREKLLRYLVSFREHNEFHEQCVERIFTDIMKYCAPQSLTVYARYTRRGGLDINPYRSTQQAKPAHNQRMARQ

SEQ ID NO: 50616 - protein, 282 aa, Vibrio cincinnatiensis
  REGION 1..282: note = tr|A0A1T4RX84|A0A1T4RX84_VIBCI NADPH-dependent 7-cyano-7-deazaguanine reductase OS=Vibrio cincinnatiensis DSM 19608 OX=1123491 GN=queF PE=3 SV=1
MMSKYSEAKELAELTLGKKTDYTHQYDPKLLQPVPRRLNREQLNLHESLPFIGCDLWTLYEISWLNDKGLPQVAIGEVSIPATSTNLIESKSFKLYLNSLNQTQFSSWQAVHECLTHDLSQCAGETVSVQLFPLSHYTHQPIVNMQGECIDEQEIAITDYQFNPEVLCQATSEIIVEETLHSHLLKSNCLITNQPDWGSVEITYQGPQIHREALLRYIVSFREHNEFHEQCVERIFTDIQRYCHPEHLTVMARYTRRGGLDINPFRSTHQATPTHHFRMARQ

SEQ ID NO: 50617 - protein, 284 aa, Vibrio comitans
  REGION 1..284: note = tr|A0A4Y3IKW2|A0A4Y3IKW2_9VIBR NADPH-dependent 7-cyano-7-deazaguanine reductase OS=Vibrio comitans NBRC 102076 OX=1219078 GN=queF PE=3 SV=1
MSKYSDAKELAGLTLGQKTQYASLYDPKLLQAVPRSLNRDDLELGDALPFKGQDIWTLYELSWLNANGLPQVAVGEVSIPASSPNLIESKSFKLYLNSYNQTKFSNWDEVQEQLAIDLSACAGGKVSVTLSRVQDFNQQPIVDMQGTCIDEQDISITEYEFSTDYLKGSVSEKSVDEVLHSHLLKSNCLITNQPDWGSVEIRYSGKKINQEALLRYLVSFREHNEFHEQCVERIFTDIMLFCKPQSLSVYARYTRRGGLDINPYRTSLNSESSAPDSTLRLARQ

SEQ ID NO: 50618 - protein, 272 aa, Vibrio coralliilyticus
  REGION 1..272: note = tr|A0A1V0IDN9|A0A1V0IDN9_9VIBR NADPH-dependent 7-cyano-7-deazaguanine reductase OS=Vibrio coralliilyticus; OX = 190893 GN=queF PE=3 SV=1
MTTYDKNLGKKSEYISQYQPELLDPIPRQKGRDEIKDLKVATHAGYDLWTAFEVSWLNNKGKPIVAIAEFIIPHTSNNLIESKSFKLYLNSFNQTRFESKDIVIEKMQSDLTNAASAEVTVSFMDVDEPQQTSINKQFDCIDGLDITVDSFEYDADSLSGSTVDEYVSESLCSHLLKSNCLVTNQPDWGSVYIRYTGAKINHESLLKYLISFREHNEFHEQCVERIYSDIKRCCAPEKLTVFARYTRRGGLDINPYRSDFESEICSGRNPRQ

SEQ ID NO: 50619 - protein, 281 aa, Vibrio coralliilyticus
  REGION 1..281: note = tr|A0A2A2CQ98|A0A2A2CQ98_9VIBR NADPH-dependent 7-cyano-7-deazaguanine reductase OS=Vibrio coralliilyticus; OX = 190893 GN=queF PE=3 SV=1
MSKYSDAKELAGLTLGQKTEYANQYDASLLQPVPRSLNRDDLNLGDELPFQGCDTWTLYELSWLNEKGLPQVAIGDVSIPATSANLIESKSFKLYLNSFNQTRFSSWDQVEQTLAKDLSHCAGEEVSVTIRSVVDYTDSVVVTMDGDCIDDQDIEIESYEFDTSLLEGAAEQEHVSESLHSHLLKSNCLITNQPDWGSVEIQYQGQKINREALLRYLVSFREHNEFHEQCVERIFTDIMKYCQPEKLTVYARYTRRGGLDINPYRSTEQAQPTHNQRMARQ

SEQ ID NO: 50620 - protein, 281 aa, Vibrio crassostreae
  REGION 1..281: note = tr|A0A560YIW9|A0A560YIW9_9VIBR NADPH-dependent 7-cyano-7-deazaguanine reductase OS=Vibrio crassostreae; OX = 246167 GN=queF PE=3 SV=1
MSKYSDAKELAGLTLGQKTEYSNQYDASLLQPVPRSLNRDDLALNGELPFVGHDIWTMYELSWLNTNGLPQVAVGEVFIPATSPNLIESKSFKLYLNSYNQSQFENWEQVTERLTQDLSACAGETVIVNVNSVTDYTNQPIVTMEGECIDNQDIHITSYDFEASLLEGAAGEQEVEETLHSHLLKSNCLITNQPDWGSVEIAYSGKQIDREALLRYLVSFREHNEFHEQCVERIFTDIMKYCGPSKLTVFARYTRRGGLDINPYRSTEQDRPSHNKRMARQ

SEQ ID NO: 50621 - protein, 281 aa, Vibrio crassostreae
  REGION 1..281: note = tr|A0A0T7CVH8|A0A0T7CVH8_9VIBR NADPH-dependent 7-cyano-7-deazaguanine reductase OS=Vibrio crassostreae; OX = 246167 GN=queF PE=3 SV=1
MSKYSDAKELAGLTLGQKTEYSNQYDASLLQPVPRSLNRDDLALNGELPFVGHDIWTMYELSWLNTNGLPQVAVGEVFIPATSPNLIESKSFKLYLNSYNQTQFENWEQVTERLTQDLSACAGETVIVNVNSVTDYTNQPIVTMEGECIDNQDIHITSYDFEASLLEGAAGEQEVEETLHSHLLKSNCLITNQPDWGSVEIAYSGKQIDREALLRYLVSFREHNEFHEQCVERIFTDIMKYCGPSKLTVFARYTRRGGLDINPYRSTEQDRPSHNKRMARQ

SEQ ID NO: 50622 - protein, 281 aa, Vibrio diabolicus
  REGION 1..281: note = tr|A0A2L2K404|A0A2L2K404_9VIBR NADPH-dependent 7-cyano-7-deazaguanine reductase OS=Vibrio diabolicus; OX = 50719 GN=queF PE=3 SV=1
MSKYSDAKELAGLTLGKKTEYANQYDPSLLQPVPRSLNRDDLQLGDSLPFMGHDIWTLYELSWLNSKGLPQVAVGEVYIPATSANLIESKSFKLYLNSYNQTRFASWEEVEERLTQDLSECAGEKVLVEVNPVTHYTNQPIVTMEGECIDDQDIDITSYDFDADLLEGAAGEEQVEEILHSHLLKSNCLITNQPDWGSVEIRYQGAKIDREKLLRYLVSFREHNEFHEQCVERIFTDLMKYCQPSKLTVFARYTRRGGLDINPYRSTEQDKPDRNHRMARQ

SEQ ID NO: 50623 - protein, 281 aa, Vibrio diazotrophicus
  REGION 1..281: note = tr|A0A2J8I695|A0A2J8I695_VIBDI NADPH-dependent 7-cyano-7-deazaguanine reductase OS=Vibrio diazotrophicus; OX = 685 GN=queF PE=3 SV=1
MSKYSDAKELAGLTLGKKTDYSHQYDPTLLQPVPRSLNRDDLNLGSELPFKGCDIWTLYELSWLNTKGLPQVAIGEVAIPATSANLIESKSFKLYLNSFNQTKFENWQQVEQHLITDLSACAGETVEVKVKPLSDYTAEPIVTMKGDCIDNQDIEIDSYDFDESLLEGAAEDTIVSETLHSHLLKSNCLITNQPDWGSVEIEYRGPKINREALLRYIVSFREHNEFHEQCVERIFTDITRFCKPEQLTVFARYTRRGGLDINPYRSTEQAAPQDNKRMARQ

SEQ ID NO: 50624 - protein, 281 aa, Vibrio diazotrophicus
  REGION 1..281: note = tr|A0A329E7F6|A0A329E7F6_VIBDI NADPH-dependent 7-cyano-7-deazaguanine reductase OS=Vibrio diazotrophicus; OX = 685 GN=queF PE=3 SV=1
MSKYSDAKELAGLTLGKKTDYSHLYDPTLLQPVPRSLNRDDLNLGSELPFKGCDIWTLYELSWLNTKGLPQVAIGEVAIPATSANLIESKSFKLYLNSFNQTKFENWQQVEQHLITDLSACAGETVEVKVKPLSDYTAEPIVTMKGDCIDDQDIEIDSYDFDESLLEEAAEDTIVSETLHSHLLKSNCLITNQPDWGSVEIEYRGPKINREALLRYIVSFREHNEFHEQCVERIFTDITRFCKPEQLTVFARYTRRGGLDINPFRSTEQAAPQDNKRMARQ

SEQ ID NO: 50625 - protein, 281 aa, unidentified
  source 1..281: note = Vibrio europaeus
  REGION 1..281: note = tr|A0A178JC97|A0A178JC97_9VIBR NADPH-dependent 7-cyano-7-deazaguanine reductase OS=Vibrio europaeus; OX = 300876 GN=queF PE=3 SV=1
MSKYSDAKELAGLTLGQKTEYSNQYDASLLQPVPRSLNRDDLNLGDSLPFQGCDIWTLYELSWLNEKGLPQVAIGEVSIPATSANLIESKSFKLYLNSFNQTRFSSWDQVEQTLIKDLSACAGETVSVTVRSVVDYTDSVVVTMDGDCIDEQEIEITSYEFDHTLIQGAATGEVVEESLHSHLLKSNCLITNQPDWGSVEIQYKGKQIDREALLRYLVSFREHNEFHEQCVERIFTDIMEFCQPESLTVYARYTRRGGLDINPYRSNVNGQPSHNQRMARQ

SEQ ID NO: 50626 - protein, 284 aa, Vibrio ezurae
  REGION 1..284: note = tr|U3CAL1|U3CAL1_9VIBR NADPH-dependent 7-cyano-7-deazaguanine reductase OS=Vibrio ezurae NBRC 102218 OX=1219080 GN=queF PE=3 SV=1
MSKYSDAKELAGLTLGQKTQYSSSYDPKLLQAVPRSLNRDDLELGDTLPFKGHDIWTLYELSWLNNNGLPQVAVGHVVIPANTPNLIESKSFKLYLNSYNQTQFAHWDDVQTQLIQDLSACAGGDVSVTLSKVQDFNQQPIIDMQGTCIDEQEIRVTSYEFNADYLKDSVSEEWVTETLHSHLLKSNCLITNQPDWGSVEIRYTGKKINREALLRYLVSFREHNEFHEQCVERIFTDIRSLCQPKELSVYARYTRRGGLDINPFRTSLHSENSSPDNTLRLARQ

SEQ ID NO: 50627 - protein, 281 aa, Vibrio fluvialis
  REGION 1..281: note = tr|A0A0X8LN70|A0A0X8LN70_VIBFL NADPH-dependent 7-cyano-7-deazaguanine reductase OS=Vibrio fluvialis; OX = 676 GN=queF PE=3 SV=1
MSKYSDAKELAGLTLGKKTEYANQYDPSLLQPVPRSLNRNDLNLGNELPFLGCDIWTLYELSWLNDKGLPQVAIGEVAIPATSANLIESKSFKLYLNSFNQTRFADWAEVQACLQKDLSACAGESVQVEVKSLAAYTTQPIVTMQGECIDDQDIEISSYDFDDTLLAEASSDEIVEETLHSHLLKSNCLITNQPDWGSVEIAYRGPKIDREALLRYIVSFREHNEFHEQCVERIFTDISRYCHPEHLTVLARYTRRGGLDINPFRSSHQAAPANNQRMARQ

SEQ ID NO: 50628 - protein, 281 aa, Vibrio fluvialis
  REGION 1..281: note = tr|S7IBI8|S7IBI8_VIBFL NADPH-dependent 7-cyano-7-deazaguanine reductase OS=Vibrio fluvialis PG41; OX = 1336752 GN=queF PE=3 SV=1
MSKYSDAKELAGLTLGKKTEYANQYDPSLLQPVPRSLNRNDLNLGNELPFLGCDIWTLYELSWLNDKGLPQVAIGEVAIPATSANLIESKSFKLYLNSFNQTRFADWAEVQACLQKDLSACAGESVQVEVKSLAAYTAQPIVTMQGECIDDQDIEISSYDFDDTLLAEASSDEIVEETLHSHLLKSNCLITNQPDWGSVEIAYRGPKIDREALLRYIVSFREHNEFHEQCVERIFTDISRYCHPEHLTVLARYTRRGGLDINPFRSSHQAAPANNQRMARQ

SEQ ID NO: 50629 - protein, 281 aa, Vibrio fortis
  REGION 1..281: note = tr|A0A066UVR2|A0A066UVR2_9VIBR NADPH-dependent 7-cyano-7-deazaguanine reductase OS=Vibrio fortis; OX = 212667 GN=queF PE=3 SV=1
MSKYSDAKELAGLTLGQKTEYANQYDVSLLQPVPRSLNRDDLALGDELPFIGHDIWTMYELSWLNDKGLPQVAVGEVFIPATSPNLIESKSFKLYLNSYNQTRFSDWEAVTERLTQDLSACAGETVLVNVNKVTDYTNQPIVTMQGDCIDEQDIEITSYDFEASILEGAAEQEHVEETLHSHLLKSNCLITNQPDWGSVEIAYTGSKINREALLRYLVSFREHNEFHEQCVERIFTDIMKYCAPTKLTVFARYTRRGGLDINPYRSTEQDKPAHNMRMARQ

SEQ ID NO: 50630 - protein, 281 aa, Vibrio furnissii
  REGION 1..281: note = tr|F0LVK9|F0LVK9_VIBFN NADPH-dependent 7-cyano-7-deazaguanine reductase OS=Vibrio furnissii (strain DSM 14383 / NCTC 11218 / VL 6966) OX=903510; GN = queF PE=3 SV=1
MSKYSDAKELAGLTLGKKTEYANQYDPSLLQPVPRSLNRNDLHLGDTLPFLGCDLWTLYELSWLNDNGLPQVAIGEVAIPATSANLIESKSFKLYLNSFNQTRFSTWADVQARLQHDLSACAGETVHVEVKPLAAYTAQPIVTMQGDCIDDQDITITSYAFDDTLLADATSDDVVEETLHSHLLKSNCLITNQPDWGSVEITYRGPKINREALLRYIVSFREHNEFHEQCVERIFTDITRYCHPEHLTVLARYTRRGGLDINPYRSTEQAAPSHNQRMARQ

SEQ ID NO: 50631 - protein, 281 aa, Vibrio furnissii; identical to SEQ ID NO: 50630
  REGION 1..281: note = tr|A0A0Q2MVW5|A0A0Q2MVW5_VIBFU NADPH-dependent 7-cyano-7-deazaguanine reductase OS=Vibrio furnissii; OX = 29494 GN=queF PE=3 SV=1

SEQ ID NO: 50632 - protein, 281 aa, unidentified
  source 1..281: note = Vibrio galatheae
  REGION 1..281: note = tr|A0A0F4NLM4|A0A0F4NLM4_9VIBR NADPH-dependent 7-cyano-7-deazaguanine reductase OS=Vibrio galatheae; OX = 579748 GN=queF PE=3 SV=1
MSKYSDAKELAGLTLGQKTEYATQYDSSLLQPVPRSLNRDDLNLGDTLPFEGCDIWTLYELSWLNEKGLPQVAIGEVSIPATSANLIESKSFKLYLNSFNQTRFSSWDEVEQTLVKDLSQCAGETVAVTVRSVVDYTDSLIVTMDGECIDDQDIAISSYDFDRTLIQGAANGEIIEESLHSHLLKSNCLITNQPDWGSVEIQYKGNKIDREALLRYIVSFREHNEFHEQCVERIFTDIMEFCQPESLTVYARYTRRGGLDINPYRSNVNSQPSHNQRMARQ

SEQ ID NO: 50633 - protein, 281 aa, Vibrio gazogenes
  REGION 1..281: note = tr|A0A1Z2SHF4|A0A1Z2SHF4_VIBGA NADPH-dependent 7-cyano-7-deazaguanine reductase OS=Vibrio gazogenes; OX = 687 GN=queF PE=3 SV=1
MSKYSDTEALADLKLGQDTVYASHYDPSLLQAVPRSLNRDDLQLSEPLPFQGCDLWTLYELSWLNTKGLPQVAIGYVSIPATSPNLIESKSFKLYLNSLNQTKFDDWQTVQTKLRADLSHCAGEEVTVNLRHVNDFTHQHIITMEGECIDEQDIEIDQYAFNAAYLEQATTETFVEETLHSHLLKSNCLITNQPDWGSVEIHYRGRQINREALLRYLISFREHNEFHEQCVERIFTDLMKYCAPQSLTVYARYTRRGGLDINPYRSTEDHQPASVLRMARQ

SEQ ID NO: 50634 - protein, 281 aa, Vibrio gazogenes
  REGION 1..281: note = tr|A0A1M5DGK0|A0A1M5DGK0_VIBGA NADPH-dependent 7-cyano-7-deazaguanine reductase OS=Vibrio gazogenes DSM 21264 = NBRC 103151 OX=1123492 GN=queF PE=3 SV=1
MSKYSDTKALADLKLGQDTVYASHYDPSLLQAVPRSLNRNDLHLSEPLPFQGCDLWTLYELSWLNTKGLPQVAIGYVSIPATSPNLIESKSFKLYLNSLNQTKFDDWRTVQTRLSADLSHCAGEEVTVNLRHVNDFTHQHIITMEGECIDEQDIEIDQYAFNAAYLEQATAETFVEETLHSHLLKSNCLITNQPDWGSVEIHYRGRQINREALLRYLISFREHNEFHEQCVERIFTDLMKYCAPQSLTVYARYTRRGGLDINPYRSTEDHQPASVLRMARQ

SEQ ID NO: 50635 - protein, 281 aa, unidentified
  source 1..281: note = Vibrio genomosp.
  REGION 1..281: note = tr|A0A1B9QXL1|A0A1B9QXL1_9VIBR NADPH-dependent 7-cyano-7-deazaguanine reductase OS=Vibrio genomosp. F10; OX = 723171 GN=queF PE=3 SV=1
MSKYSNAKELAGLTLGQKTQYTNHYDASLLQPVPRSLNRDDLHLGASLPFQGCDIWTMYELSWLNENGLPQVAIGEVAIPATSANLIESKSFKLYLNSYNQTTFESWDQVSKQLQDDLSACAGETVALNIYPVTNYTQQPIVTMSGECIDAQDIKIESYDFDATLLDGATSDEIIEETLHSHLLKSNCLITNQPDWGSVEIQYQGQKINREALLRYIVSFREHNEFHEQCVERIFTDIMKYCQPTRLTVYARYTRRGGLDINPYRSSESSKPAHNQRMARQ

SEQ ID NO: 50636 - protein, 281 aa, unidentified
  source 1..281: note = Vibrio genomosp.
  REGION 1..281: note = tr|A0A4U1Y539|A0A4U1Y539_9VIBR NADPH-dependent 7-cyano-7-deazaguanine reductase OS=Vibrio genomosp. F6; OX = 723172 GN=queF PE=3 SV=1
MSKYSDAKELAGLTLGQKTEYASQYDPSLLQPVPRSLNRDDLELGDELPFMGHDIWTLYELSWLNNKGLPQVAVAEVYIPATSSNLIESKSFKLYLNSYNQTRFNDWSSVQASLAKDLSQCAGEAVEVEVNPVTQYTNQAIVTMEGDCIDGQDIEITSYDFDATLLSGAAGTNIVEESLHSHLLKSNCLITNQPDWGSVEIQYKGKQINRESLLRYLVSFREHNEFHEQCVERIFTDIMKYCQPSKLTVFARYTRRGGLDINPYRSTEQAKPSHNCRMARQ

SEQ ID NO: 50637 - protein, 284 aa, Vibrio halioticoli
  REGION 1..284: note = tr|V5FGI4|V5FGI4_9VIBR NADPH-dependent 7-cyano-7-deazaguanine reductase OS=Vibrio halioticoli NBRC 102217 OX=1219072 GN=queF PE=3 SV=1
MSKYSDAKELAGLTLGQKTQYSSSYDPKLLQAVPRSLNRDDLKLGDTLPFKGQDIWTLYELSWLNNNGLPQVAVGHVVIPANTPNLIESKSFKLYLNSYNQTQFSDWDKVQALLVKDLSACAGGEVSVSLSKVQDFNQQPIVDMQGSCIDEQDITITAYEFNADYLKDSVSDELVTETLHSNLLKSNCLITNQPDWGSVEIRYTGKKINREALLRYIVSFREHNEFHEQCVERIFTDIMLLCQPEELSVYARYTRRGGLDINPFRTSLHNPDSLPDSTLRLARQ

SEQ ID NO: 50638 - protein, 281 aa, Vibrio hangzhouensis
  REGION 1..281: note = tr|A0A1H5UPK2|A0A1H5UPK2_9VIBR NADPH-dependent 7-cyano-7-deazaguanine reductase OS=Vibrio hangzhouensis; OX = 462991 GN=queF PE=3 SV=1
MSKYSNAKELSGLTLGQKTEYANQYDASLLQPVPRSLNRDDLELGDTLPFQGCDIWTLYEISWLNAKGLPQVAVGEAYIPATSANLIESKSFKLYLNSYNQTRFESWDIVEATIAKDLSACAGEPVVVKLLAVDKFEHSHIAAMAGECIDHQDISIDSYEFDAELLANATSDEVVEEALHSHLLKSNCLITNQPDWGSVEIQYQGPKINREALLRYLVSFREHNEFHEQCVERIFTDIMTYCKPSKLTVYARYTRRGGLDINPYRSNQSGAPAHNTRMARQ

SEQ ID NO: 50639 - protein, 281 aa, Vibrio harveyi
  REGION 1..281: note = tr|A0A2S0S410|A0A2S0S410_VIBHA NADPH-dependent 7-cyano-7-deazaguanine reductase OS=Vibrio harveyi OX=669; GN = queF PE=3 SV=1
MSKYSDAKELAGLTLGKKTEYANQYDASLLQPVPRSLNRDDLELGDSLPFMGHDIWTLYELSWLNSKGLPQVAVGEVYIPATSANLIESKSFKLYLNSYNQTRFATWEEVTERLAQDLSACAGEKVLVEVNPVSHYTNQPIVTMEGECIDDQDIEITSYDFDAALLDGAAGNEQVEEVLHSHLLKSNCLITNQPDWGSVEIRYQGAKLDREKLLRYLVSFREHNEFHEQCVERIFTDLMKYCQPTKLTVFARYTRRGGLDINPYRSTEQDKPAHNNRMARQ

SEQ ID NO: 50640 - protein, 281 aa, Vibrio harveyi
  REGION 1..281: note = tr|D0XDA0|D0XDA0_VIBH1 NADPH-dependent 7-cyano-7-deazaguanine reductase OS=Vibrio harveyi (strain 1DA3) OX=673519 GN=queF PE=3 SV=1
MSKYSDAKELAGLTLGKKTEYANQYDASLLQPVPRSLNRDDLELGDSLPFMGHDIWTLYELSWLNSKGLPQVAVGEVYIPATSANLIESKSFKLYLNSYNQTRFATWEEVTERLTQDLSACAGEQVLVEVNPVTHYTNQPIVTMEGECIDDQDIEITSYDFDPALLEGAAGDEQVEEILHSHLLKSNCLITNQPDWGSVEIRYQGAKLDREKLLRYLVSFREHNEFHEQCVERIFTDLMKYCQPTKLTVFARYTRRGGLDINPYRSTEQDKPAHNNRMARQ

SEQ ID NO: 50641 - protein, 281 aa, Vibrio hepatarius
  REGION 1..281: note = tr|A0A0M0HYC1|A0A0M0HYC1_9VIBR NADPH-dependent 7-cyano-7-deazaguanine reductase OS=Vibrio hepatarius; OX = 171383 GN=queF PE=3 SV=1
MSKYSDAKELAGLTLGQKTEYANQYDPTLLQPVPRSLNRNDLELGEQLPFKGCDIWTLYELSWLNEKGLPQVAVGEVSIPATSDNLIESKSFKLYLNSFNQTRFASWDEVEATLKKDLSACAGEEVGVTVRSVVDYTDSVIVTMDGDCIDDQDIEILSYDFDDSLLQGATSEQIVEESLHSHLLKSNCLITNQPDWGSVEIQYRGQQIDREALLRYIVSFREHNEFHEQCVERIFTDIMKYCQPEKLTVYARYTRRGGLDINPYRSTEQAQPNHNQRMARQ

SEQ ID NO: 50642 - protein, 281 aa, Vibrio ichthyoenteri
  REGION 1..281: note = tr|F9RXA2|F9RXA2_9VIBR NADPH-dependent 7-cyano-7-deazaguanine reductase OS=Vibrio ichthyoenteri ATCC 700023 OX=870968 GN=queF PE=3 SV=1
MSKYSNAKELAGLTLGQKTEYASLYNPSLLQPVPRSLNRDDLELGETLPFHGCDIWTLYELSWLNDKGLPQVAVGDVAIPATSANLIESKSFKLYLNSLNQTRFACWDDVEATLIKDLSACAGETVSVTLRSVEDYTDSVIVTMAGECIDHQDIEISHYEFDATLLDGAAEQEIVTESLHSHLLKSNCLITNQPDWGSVEIQYHGQKINREALLRYIVSFREHNEFHEQCVERIFTDIMTYCQPEHLTVYARYTRRGGLDINPYRSTEQTQPSHNQRMARQ

SEQ ID NO: 50643 - protein, 284 aa, Vibrio inusitatus
  REGION 1..284: note = tr|A0A4Y3HSN2|A0A4Y3HSN2_9VIBR NADPH-dependent 7-cyano-7-deazaguanine reductase OS=Vibrio inusitatus NBRC 102082 OX=1219070 GN=queF PE=3 SV=1
MSKYSDAKELAGLTLGQKTQYASLYDPELLQAVPRSLNRDDLELGDTLPFKGQDIWTLYELSWLNANGLPQVAVGEVSIPASSPNLIESKSFKLYLNSYNQTKFNSWDAVQQQLVRDLSACAGGEVSVILSRVQDFNQQPIVDMQGTCIDDQDISITEYEFSTDYLIGSVSEEFVDEVLHSHLLKSNCLITNQPDWGSVEICYSGKKINQEFLLRYLVSFREHNEFHEQCVERIFTDITHFCQPQSLSVYARYTRRGGLDINPYRTSLNSVSNAPDSTLRLARQ

SEQ ID NO: 50644 - protein, 284 aa, unidentified
  source 1..284: note = Vibrio ishigakensis
  REGION 1..284: note = tr|A0A0B8Q7V3|A0A0B8Q7V3_9VIBR NADPH-dependent 7-cyano-7-deazaguanine reductase OS=Vibrio ishigakensis; OX = 1481914 GN=queF PE=3 SV=1
MHFKMSKYSDAKELAGLTLGQKTEYASQYDPSLLQPVPRSLNRDDLELGDELPFVGEDIWTLYELSWLNSNGLPQVAVGTVSIPADSPNLVESKSFKLYLNSYNQTRFANWAEVQAQLAKDLSACAGGNVSVEVQKVQEFNQQPIVDMQGECIDEQDIVISDYEFKADYLEGATSEEEVSETLHSHLLKSNCLITNQPDWGSVEINYTGNKIDREALLRYLVSFREHNEFHEQCVERIFTDITRYCKPSSLSVYARYTRRGGLDINPIRSSSPINVNKQRLARQ

SEQ ID NO: 50645 - protein, 284 aa, unidentified
  source 1..284: note = Vibrio ishigakensis
  REGION 1..284: note = tr|A0A0B8NYC6|A0A0B8NYC6_9VIBR NADPH-dependent 7-cyano-7-deazaguanine reductase OS=Vibrio ishigakensis; OX = 1481914 GN=queF PE=3 SV=1
MHFKMSKYSDAKELAGLTLGQKTEYASQYDPSLLQPVPRSLNRDDLELGDELPFVGEDIWTLYELSWLNSNGLPQVAVGTVSIPADSPNLVESKSFKLYLNSYNQTRFANWTEVQAQLAKDLSACAGGNVSVEVQKVQEFNQQPIVDMQGECIDEQDIVISDYEFKADYLEGATSEEEVSETLHSHLLKSNCLITNQPDWGSVEINYTGKKIDREALLRYLVSFREHNEFHEQCVERIFTDITRYCKPSSLSVYARYTRRGGLDINPIRSSSPINVNKQRLARQ

SEQ ID NO: 50646 - protein, 281 aa, unidentified
  source 1..281: note = Vibrio jasicida
  REGION 1..281: note = tr|A0A2S7VLM2|A0A2S7VLM2_9VIBR NADPH-dependent 7-cyano-7-deazaguanine reductase OS=Vibrio jasicida; OX = 766224 GN=queF PE=3 SV=1
MSKYSDAKELAGLTLGKKTEYANQYDASLLQPVPRSLNRDDLELGDSLPFMGHDIWTLYELSWLNSKGLPQVAVGEVYIPATSANLIESKSFKLYLNSYNQTRFATWEEVTERLTQDLSACAGEQVLVEVNPVTHYTNQPIVTMEGECIDAQDIEITSYDFDAALLEGAAGDEQVEEILHSHLLKSNCLITNQPDWGSVEIRYQGAKLDREKLLRYLVSFREHNEFHEQCVERIFTDLMKYCQPTKLTVFARYTRRGGLDINPYRSTEQDKPAHNNRMARQ

SEQ ID NO: 50647 - protein, 281 aa, Vibrio kanaloae
  REGION 1..281: note = tr|A0A1E5DPJ3|A0A1E5DPJ3_9VIBR NADPH-dependent 7-cyano-7-deazaguanine reductase OS=Vibrio kanaloae 5S-149; OX = 1191299 GN=queF PE=3 SV=1
MSKYSDAKELTGLTLGEKTEYANQYDASLLQPVPRSLNRDDLALNGELPFVGHDIWTMYELSWLNSNGLPQVAVGEVFIPATSPNLIESKSFKLYLNSYNQTQFENWNQVTERLTQDLSACAGETVTVNVNSVTDYTNQPIVTMKGDCIDNQDIKITSYDFDASLLEGAAGEQGVEETLHSHLLKSNCLITNQPDWGSVEIEYSGKQINREALLRYLVSFREHNEFHEQCVERIFTDIMKHCEPSKLTVFARYTRRGGLDINPYRSTEQDRPSHNKRMARQ

SEQ ID NO: 50648 - protein, 281 aa, Vibrio kanaloae
  REGION 1..281: note = tr|A0A2N7J876|A0A2N7J876_9VIBR NADPH-dependent 7-cyano-7-deazaguanine reductase OS=Vibrio kanaloae; OX = 170673 GN=queF PE=3 SV=1
MSKYSDAKELTGLTLGEKTEYANQYDASLLQPVPRSLNRDDLELNGELPFVGHDIWTMYELSWLNSNGLPQVAVGEVFIPATSPNLIESKSFKLYLNSYNQTQFENWNQVTERLTQDLSACAGETVTVNVNSVTDYTNQPIVTMKGDCIDNQDIKITSYDFDASLLEGAAGEQGVEETLHSHLLKSNCLITNQPDWGSVEIEYSGKQINREALLRYLVSFREHNEFHEQCVERIFTDIMKHCEPSKLTVFARYTRRGGLDINPYRSTEQDRPSHNKRMARQ

SEQ ID NO: 50649 - protein, 281 aa, Vibrio lentus
  REGION 1..281: note = tr|A0A1B9PSM4|A0A1B9PSM4_9VIBR NADPH-dependent 7-cyano-7-deazaguanine reductase OS=Vibrio lentus; OX = 136468 GN=queF PE=3 SV=1
MSKYSDAKELAGLTLGQKTEYSNQYDASLLQPVPRSLNRDDLALNGDLPFVGHDIWTMYELSWLNSNGLPQVAVGEVFIPATSPNLIESKSFKLYLNSYNQTQFENWDQVTERLTQDLSACAGETVIVNVNSVTDYTNQPIVTMEGDCIDNQDIQITSYDFEASLLEGAAGGQDVEEILHSHLLKSNCLITNQPDWGSVEIAYSGKQIDREALLRYLVSFREHNEFHEQCVERIFTDIMKYCGPSKLTVFARYTRRGGLDINPYRSTEQDRPSHNKRMARQ

SEQ ID NO: 50650 - protein, 272 aa, Vibrio lentus
  REGION 1..272: note = tr|A0A1B9QKH5|A0A1B9QKH5_9VIBR NADPH-dependent 7-cyano-7-deazaguanine reductase OS=Vibrio lentus; OX = 136468 GN=queF PE=3 SV=1
MTTYDKNLGKRSEYISQYQPELLDPIPRKKGRDEIKDLKVANHAGYDLWTAFEVSWLNNKGKPIVAIAEFMVPHTSDNLIESKSFKLYLNSFNQTRFESKEIVIEKMQSDLANAAGAEVTVSFTDVDEPQQTSINKQFNCIDNLDITVDSFEYDADSLSGSTVDEYVSESLCSHLLKSNCLVTNQPDWGSVYIRYKGAKINHESLLKYLVSFREHNEFHEQCVERIYSDIKRCCAPENLTVFARYTRRGGLDINPYRSDFESKICSARNPRQ

SEQ ID NO: 50651 - protein, 281 aa, Vibrio mangrovi
  REGION 1..281: note = tr|A0A1Y6IUW7|A0A1Y6IUW7_9VIBR NADPH-dependent 7-cyano-7-deazaguanine reductase OS=Vibrio mangrovi; OX = 474394 GN=queF_1 PE=3 SV=1
MSKYSDTEALADLKLGQNTQYSSHYDPSLLQAVPRSLNRDDLQLSAPLPFQGCDLWTLYELSWLNSKGLPQVAIGYVSIPATSPNLIESKSFKLYLNSYNQTKFTDWQEVQSRLSADLSDCAGEEVTVNLRHVADFTHQHIVTMEGECIDEQEIEIEQYAFNAAYLEQATGENFVDETLHSHLLKSNCLITSQPDWGSVEIHYRGKQINREALLRYLVSFREHNEFHEQCVERIFTDLMKYCQPQSLTVYARYTRRGGLDINPYRSTEDSHPASVLRMARQ

SEQ ID NO: 50652 - protein, 273 aa, Vibrio mangrovi
  REGION 1..273: note = tr|A0A1Y6IWB6|A0A1Y6IWB6_9VIBR NADPH-dependent 7-cyano-7-deazaguanine reductase OS=Vibrio mangrovi; OX = 474394 GN=queF_2 PE=3 SV=1
MDTTYSKNLGKKTDYISTYTPELLDPIPRARGRGNITACDSDAFTGYDLWTGYELSWLNTKGKPMVAVAEFMIPCTSPNLIESKSFKLYLNSLNQTPFVSEQVLIETLTKDLSATSGGDVRVKLSRVDEEQDIRSDRSFVCIDDLDIEIDSYEYDEDLLLGAASETVVEERICSHLLKSNCLVTNQPDWGSVYIRYQGAEIDREKLLRYIISFRGHNEFHEQCVERIFSDIKRCCQPEKLTVFARYTRRGGLDINPFRSDFEEEMPVGREYRQ

SEQ ID NO: 50653 - protein, 246 aa, Vibrio maritimus
  REGION 1..246: note = tr|A0A090RWT4|A0A090RWT4_9VIBR NADPH-dependent 7-cyano-7-deazaguanine reductase OS=Vibrio maritimus; OX = 990268 GN=queF PE=3 SV=1
MSKYSNAKELSGLTLGQKTDYANQYDASLLQPVPRSLNRDDLELGDSLPFQGCDIWTMYEISWLNANGLPQVAVGEAYIPATSANLIESKSFKLYLNSYNQTRFDSWDEVQNTIAGDLSNCAGETVTVKLIPVGDFENTQIVGMKGECIDNQDIRIDSYDFDAALLEGAAGEEVVEEALHSHLLKSNCLITNQPDWGSVEIQYHGAKIDREALLRYLVSFREHNEFHEQCVERIFTDIMAYCKQQS

SEQ ID NO: 50654 - protein, 281 aa, Vibrio maritimus
  REGION 1..281: note = tr|A0A090SYR4|A0A090SYR4_9VIBR NADPH-dependent 7-cyano-7-deazaguanine reductase OS=Vibrio maritimus; OX = 990268 GN=queF PE=3 SV=1
MSKYSNAKELSGLTLGQKTDYANQYDASLLQPVPRSLNRDDLELGDSLPFQGCDIWTMYEISWLNANGLPQVAVGEAYIPATSANLIESKSFKLYLNSYNQTRFDSWGEVESTIAGDLSNCAGETVTVKLIPVGDFENTQIVGMKGECIDNQDIRIDSYDFDAALLKGAAGEEVVEEALHSHLLKSNCLITNQPDWGSVEIQYHGAKIDREALLRYLVSFREHNEFHEQCVERIFTDIMSYCKPSKLTVYARYTRRGGLDINPYRSNQDSAPSHNMRMARQ

SEQ ID NO: 50655 - protein, 281 aa, Vibrio mediterranei
  REGION 1..281: note = tr|A0A3G4VBH1|A0A3G4VBH1_9VIBR NADPH-dependent 7-cyano-7-deazaguanine reductase OS=Vibrio mediterranei; OX = 689 GN=queF PE=3 SV=1
MSKYSNAKELSGLTLGQKTEYANHYDATLLQPVPRSLNRDDLELGKTLPFQGCDIWTLYEISWLNAKGLPQVAVGEVSIPATSANLIESKSFKLYLNSYNQTRFATWEQVQSTIATDLSNCAGETVSVKLIPVADFENTKIVGMAGECIDDQDITIDNYEFDAELLKDAAGDEIVEEALHSHLLKSNCLITNQPDWGSVEIQYQGAKIDREALLRYLVSFREHNEFHEQCVERIFTDLMQYCNPTKLTVYARYTRRGGLDINPYRSNQYQAPEHNARMARQ

SEQ ID NO: 50656 - protein, 281 aa, Vibrio mediterranei
  REGION 1..281: note = tr|A0A2C9PBS9|A0A2C9PBS9_9VIBR NADPH-dependent 7-cyano-7-deazaguanine reductase OS=Vibrio mediterranei; OX = 689 GN=queF PE=3 SV=1
MSKYSNAKELSGLTLGQKTEYANHYDATLLQPVPRSLNRDDLELGETLPFQGCDIWTLYEISWLNAKGLPQVAVGEVSIPATSANLIESKSFKLYLNSYNQTRFATWEQVQSTIATDLSNCAGETVSVKLIPVADFENTKIVGMAGECIDDQDITIDNYEFDAELLKDAASDEIVEEALHSHLLKSNCLITNQPDWGSVEIQYQGAKIDREALLRYLVSFREHNEFHEQCVERIFTDLMQYCNPTKLTVYARYTRRGGLDINPYRSNQYQAPEHNARMARQ

SEQ ID NO: 50657 - protein, 281 aa, unidentified
  source 1..281: note = Vibrio metoecus
  REGION 1..281: note = tr|A0A0Q0PWC6|A0A0Q0PWC6_9VIBR NADPH-dependent 7-cyano-7-deazaguanine reductase OS=Vibrio metoecus; OX = 1481663 GN=queF PE=3 SV=1
MSKYSDAKELAGLTLGKKTEYANHYDPTLLQPVPRRLNRDDLHLGATLPFQGCDIWTLYELSWLNQKGLPQVAIGEVSIPATSANLIESKSFKLYLNSYNQTRFESWNEVQARLVHDLSACAGETVTVHVKSLHEYTAEPIVTMQGECIDDQNIEIKDYEFDHTLLQGAAQGDEVHEVLHSHLLKSNCLITNQPDWGSVEIAYHGSKINREALLRYIVSFREHNEFHEQCVERIFTDLMRYCQPHTLTVYARYTRRGGLDINPFRSNCQSAPEHNQRMARQ

SEQ ID NO: 50658 - protein, 281 aa, unidentified
  source 1..281: note = Vibrio metoecus
  REGION 1..281: note = tr|A0A0Q0KKQ1|A0A0Q0KKQ1_9VIBR NADPH-dependent 7-cyano-7-deazaguanine reductase OS=Vibrio metoecus; OX = 1481663 GN=queF PE=3 SV=1
MSKYSDAKELAGLTLGKKTEYANHYDPTLLQPVPRSLNRDDLHLGATLPFQGCDIWTLYELSWLNQKGLPQVAIGEVSIPATSANLIESKSFKLYLNSYNQTRFESWNEVQARLVHDLSACAGETVTVHVKSLHEYTAEPIVTMQGECIDDQDIEIKDYEFDHTLLQGAAQGDEVHEVLHSHLLKSNCLITNQPDWGSVEIAYHGSKINREALLRYIVSFREHNEFHEQCVERIFTDLMRYCQPHTLTVYARYTRRGGLDINPFRSNCQSAPEHNQRMARQ

SEQ ID NO: 50659 - protein, 281 aa, Vibrio metschnikovii
  REGION 1..281: note = tr|C9P627|C9P627_VIBME NADPH-dependent 7-cyano-7-deazaguanine reductase OS=Vibrio metschnikovii CIP 69.14 OX=675813 GN=queF PE=3 SV=1
MSKYSDAKELSGLTLGKATAYASQYDPSLLQPVPRSLNRNDLDLGETLPFQGCDIWTLYELSWLNSNGLPQVAIGEVRIPATSANLIESKSFKLYLNSFNQSRFQDWQTVQTHLINDLSACAGETVEVRLFSLDHYTNQPIVSMQGECIDQQDIEIEHYQFDASLLEQATDAEIVTETLHSHLLKSNCLITNQPDWGSVEITYHGPKIQREALLRYIVSFREHNEFHEQCVERIFHDLCRYCQPKQLTVLARYTRRGGLDINPFRSTERPSPEHNLRMARQ

SEQ ID NO: 50660 - protein, 282 aa, Vibrio metschnikovii
  REGION 1..282: note = tr|A0A380NVF0|A0A380NVF0_VIBME NADPH-dependent 7-cyano-7-deazaguanine reductase OS=Vibrio metschnikovii; OX = 28172 GN=queF PE=3 SV=1
MMSKYSDAKELSGLTLGKATAYASQYDPSLLQPVPRSLNRNDLDLGETLPFQGCDIWTLYELSWLNSNGLPQVAIGEVRIPATSANLIESKSFKLYLNSFNQSRFQDWQTVQTHLINDLSACAGETVEVRLFSLDHYTNQPIVSMQGECIDQQDIEIEHYQFDASLLEQATDAEIVTETLHSHLLKSNCLITNQPDWGSVEITYHGPKIQREALLRYIVSFREHNEFHEQCVERIFHDLCRYCQPKQLTVLARYTRRGGLDINPFRSTERPSPEHNLRMARQ

SEQ ID NO: 50661 - protein, 281 aa, Vibrio mimicus
  REGION 1..281: note = tr|A0A2J9V1Z2|A0A2J9V1Z2_VIBMI NADPH-dependent 7-cyano-7-deazaguanine reductase OS=Vibrio mimicus OX=674; GN = queF PE=3 SV=1
MSKYSDAKELAGLTLGKKTDYANQYDPTLLQPVPRSLNRDDLHLGDTLPFQGCDIWTLYELSWLNEKGLPQVAIGEVSIPATSANLIESKSFKLYLNSYNQTRFASWDDVQARLVQDLSACAGETVTVKVKSLSEYTAEPIVTMQGECIDEQDIEIKGYEFDDALLQGAAQGEEISEVLHSHLLKSNCLITNQPDWGSVEIAYHGAKINREALLRYIVSFREHNEFHEQCVERIFTDIMRYCQPKNLTVYARYTRRGGLDINPFRSNCYSAPEHNQRMARQ

SEQ ID NO: 50662 - protein, 281 aa, Vibrio mimicus
  REGION 1..281: note = tr|A0A5B6XGH2|A0A5B6XGH2_VIBMI NADPH-dependent 7-cyano-7-deazaguanine reductase OS=Vibrio mimicus OX=674; GN = queF PE=3 SV=1
MSKYSDAKELASLTLGKKTDYTNQYDPTLLQPVPRSLNRDDLHLGDTLPFQGCDIWTLYELSWLNEKGLPQVAIGEVSIPATSANLIESKSFKLYLNSYNQTRFASWDDVQARLVQDLSACAGETVTVKVKSLSEYTAEPIVTMQGECIDEQDIEIKGYEFDDALLQGAAQGEEISEVLHSHLLKSNCLITNQPDWGSVEIAYHGAKINREALLRYIVSFREHNEFHEQCVERIFTDIMRYCQPKTLTVYARYTRRGGLDINPFRSNCHSAPEHNQRMARQ

SEQ ID NO: 50663 - protein, 281 aa, Vibrio mytili
  REGION 1..281: note = tr|A0A0C3HS90|A0A0C3HS90_9VIBR NADPH-dependent 7-cyano-7-deazaguanine reductase OS=Vibrio mytili OX=50718; GN = queF PE=3 SV=1
MSKYSDAKELAGLTLGKKTEYSNQYDASLLQPVPRSLNRDDLQLGDELPFVGHDIWTLYELSWLNSKGLPQVAVGEVYIPATSANLIESKSFKLYLNSYNQTHFASWEAVADRLTQDLSECAGEQVFVEVNPVTHYTNQPIVTMAGECIDDQDINITNYEFDPTLLEGAAGKAHVEESLHSHLLKSNCLITNQPDWGSVEIHYQGAKIDREKLLRYIVSFREHNEFHEQCVERIFTDLMKYCQPSKLTVFARYTRRGGLDINPYRSTEQDKPTHNHRMARQ

SEQ ID NO: 50664 - protein, 281 aa, Vibrio natriegens
  REGION 1..281: note = tr|A0A1B1EAD4|A0A1B1EAD4_VIBNA NADPH-dependent 7-cyano-7-deazaguanine reductase OS=Vibrio natriegens; OX = 691 GN=queF PE=3 SV=1
MSKYSNAKELAGLTLGKKTEYANQYDASLLQPVPRSLNRDDLELGEALPFMGHDIWTLYELSWLNSKGLPQVAVAEVYIPATSANLIESKSFKLYLNSYNQTRFASWQDVTERLVQDLSACAGEQVIVEVNPVTHYTNQPIVTMEGECIDDQDIEINSYDFDASLLEGAAGEEQVEETLHSHLLKSNCLITNQPDWGSVEIRYQGAKLDREKLLRYLVSFREHNEFHEQCVERIFTDLMKYCHPSKLTVFARYTRRGGLDINPYRSTENAKPEHNHRMARQ

SEQ ID NO: 50665 - protein, 281 aa, Vibrio navarrensis
  REGION 1..281: note = tr|A0A099LTE4|A0A099LTE4_9VIBR NADPH-dependent 7-cyano-7-deazaguanine reductase OS=Vibrio navarrensis; OX = 29495 GN=queF PE=3 SV=1
MSKYSDAKELAGLTLGKKTEYATQYDASLLQPVPRSLNRDDLQLGANLPFVGHDIWTLYELSWLNSKGLPQVAVGEVYIPATSPNLIESKSFKLYLNSYNQTRFATWQAVVERLTSDLSSCAGEPVTVEVNPLSHYTQQPIVTMAGECIDDQDIEIERYDFDQSLLQDAAGETVVQETLHSHLLKSNCLITNQPDWGSVEIAYHGKQIDREKLLRYLVSFREHNEFHEQCVERIFTDIMKYCAPQSLTVYARYTRRGGLDINPYRSTQQAKPAHNQRMARQ

SEQ ID NO: 50666 - protein, 281 aa, unidentified
  source 1..281: note = Vibrio neocaledonicus
  REGION 1..281: note = tr|A0A4P8FXX4|A0A4P8FXX4_9VIBR NADPH-dependent 7-cyano-7-deazaguanine reductase OS=Vibrio neocaledonicus; OX = 1208308 GN=queF PE=3 SV=1
MSKYSDAKELAGLTLGKTTEYANQYDPSLLQPVPRSLNRDDLQLGDTLPFMGHDIWTLYELSWLNSKGLPQVAVGEVYIPATSANLIESKSFKLYLNSYNQTRFASWEEVTERLTQDLSECAGEKVLVEVNPVTHYTNQPIVTMDGECVDDQDIDITSYDFDADLLEGAAGKIQVEEVLHSHLLKSNCLITNQPDWGSVEIRYQGAKIDREKLLRYLVSFREHNEFHEQCVERIFTDLMKYCQPSKLTVFARYTRRGGLDINPYRSTEQDKPAHNHRMARQ

SEQ ID NO: 50667 - protein, 281 aa, Vibrio neptunius
  REGION 1..281: note = tr|A0A0F4PAF2|A0A0F4PAF2_9VIBR NADPH-dependent 7-cyano-7-deazaguanine reductase OS=Vibrio neptunius; OX = 170651 GN=queF PE=3 SV=1
MSKYSDAKELAGLTLGQKTEYANQYDASLLQPVPRSLNRDDLNLGDELPFQGCDIWTLYELSWLNEKGLPQVAIGDVSIPATSANLIESKSFKLYLNSFNQTRFSSWDQVEQTLVKDLSHCAGEEVSVTLRSVVDYTDSVVVTMDGDCIDDQDIEIESYEFDTSLLEGAVKQEHVSESLHSHLLKSNCLITNQPDWGSVEIQYQGQKINREALLRYLVSFREHNEFHEQCVERIFTDMMKYCQPEKLTVYARYTRRGGLDINPYRSTEHAQPAHNQRMARQ

SEQ ID NO: 50668 - protein, 272 aa, Vibrio neptunius
  REGION 1..272: note = tr|A0A0F4NUE4|A0A0F4NUE4_9VIBR NADPH-dependent 7-cyano-7-deazaguanine reductase OS=Vibrio neptunius; OX = 170651 GN=queF PE=3 SV=1
MTTYDKNLGKKSEYISQYQPELLDPIPRQRGRNEIKDLKVATHAGFDLWTAFEVSWLNNKGKPIVAIAEFIIPHTSNNLIESKSFKLYLNSFNQTCFESQDIVIETMQSDLTNAAGAEVTVSFMEVDEPQQTSINKQFDCIDGLDITVDSFEYDADALCGSTVDEYVSESLCSHLLKSNCLVTNQPDWGSVYIRYTGAKINHESLLKYLISFREHNEFHEQCVERIYSDIKRCCAPEKLTVFARYTRRGGLDINPYRSDFEDEICSGRNPRQ

SEQ ID NO: 50669 - protein, 281 aa, Vibrio nereis
  REGION 1..281: note = tr|A0A0M0HPT5|A0A0M0HPT5_VIBNE NADPH-dependent 7-cyano-7-deazaguanine reductase OS=Vibrio nereis OX=693; GN = queF PE=3 SV=1
MSKYSDAKELAGLTLGQKTEYANQYDPSLLQPVPRSLNRNDLNLGEELPFKGCDIWTLYELSWLNEKGLPQVAVGEVSIPATSENLIESKSFKLYLNSFNQTRFASWDEVEATLKKDLSECAGEEVSVTVRSVVDYTDSVIVTMDGECIDEQDIEILSYDFDDALLKGATSEQIVEESLHSHLLKSNCLITNQPDWGSVEIQYTGKQINREALLRYIVSFREHNEFHEQCVERIFTDVMKYCQPEKLTVYARYTRRGGLDINPYRSTEQAQPTHNQRMARQ

SEQ ID NO: 50670 - protein, 281 aa, Vibrio nigripulchritudo
  REGION 1..281: note = tr|U4KGC5|U4KGC5_9VIBR NADPH-dependent 7-cyano-7-deazaguanine reductase OS=Vibrio nigripulchritudo OX=28173 GN=queF PE=3 SV=1
MSKYSNAEELAGLTLGQKTEYSSQYDPSLLQGVPRSLNRDDIQLTGDLPFVGVDIWTLYELSWLNRNGLPQVAVGEVMLPATSPNLVESKSFKLYLNSYNQTQFDSWEQVQASLVKDLSECAGEPVEVVINPVSHYDNQPIVSLQGECIDEQDITIESYEFDPELLRNASSDEMVTETLVSNLLKSNCLITNQPDWGSVSIEYTGSRIDREALLRYLVSFREHNEFHEQCVERIFTDIQKYCAPTSLTVFARYTRRGGLDINPYRSTEQSKPDNNLRLARQ

SEQ ID NO: 50671 - protein, 281 aa, Vibrio nigripulchritudo
  REGION 1..281: note = tr|U4E8H7|U4E8H7_9VIBR NADPH-dependent 7-cyano-7-deazaguanine reductase OS=Vibrio nigripulchritudo FTn2 OX=1238441 GN=queF PE=3 SV=1
MSKYSNAEELAGLTLGQKTEYSSQYDPSLLQGVPRSLNRDDIQLTGELPFVGVDIWTLYELSWLNRNGLPQVAVGEVMLPATSPNLVESKSFKLYLNSYNQTQFDSWEQVQASLVKDLSECAGEPVEVVINPVSHYDNQPIVSLQGECIDDQDIKIESYEFDPELLRNASSDEMVTETLVSNLLKSNCLITNQPDWGSVSIEYTGSRIDREALLRYLVSFREHNEFHEQCVERIFTDIQKYCAPTSLTVFARYTRRGGLDINPYRSTEQSKPDNNLRLARQ

SEQ ID NO: 50672 - protein, 281 aa, Vibrio orientalis
  REGION 1..281: note = tr|C9QJC3|C9QJC3_VIBOR NADPH-dependent 7-cyano-7-deazaguanine reductase OS=Vibrio orientalis CIP 102891 = ATCC 33934 OX=675816 GN=queF PE=3 SV=1
MSKYSDAKELAGLTLGQKTEYANQYDPSLLQPVPRSLNRDDLNLGDTLPFQGCDIWTLYELSWLNDKGLPQVAVGEVSIPATSANLIESKSFKLYLNSFNQTRFSTWDDVEKTLIKDLSHCAGEEVGVTVRSVVDYTDSVIVTMAGECIDDQDIEIASYDFDRTLLEGAASGDQVEESVHSHLLKSNCLITNQPDWGSVEISYSGKQIDREALLRYLVSFREHNEFHEQCVERIFTDIMEFCQPSALTVYARYTRRGGLDINPYRSNVNAQPNHNQRMARQ

SEQ ID NO: 50673 - protein, 281 aa, Vibrio owensii
  REGION 1..281: note = tr|A0A0C1VWQ1|A0A0C1VWQ1_9VIBR NADPH-dependent 7-cyano-7-deazaguanine reductase OS=Vibrio owensii CAIM 1854 = LMG 25443 OX=1229493 GN=queF PE=3 SV=1
MSKYSDAKELAGLTLGKKTEYANQYDASLLQPVPRSLNRDDLELGDSLPFMGHDIWTLYELSWLNSKGLPQVAVGEVYIPATSANLIESKSFKLYLNSYNQTRFATWEEVTERLTQDLSACAGEQVLVEVNPVTHYTNQPIVTMEGECIDDQDIEITSYDFDAALLEGAAGDEQVEEILHSHLLKSNCLITNQPDWGSVEIRYQGAKLDREKLLRYLVSFREHNEFHEQCVERIFTDLMKYCQPTKLTVFARYTRRGGLDINPYRSTEQDKPAHNNRMARQ

SEQ ID NO: 50674 - protein, 281 aa, Vibrio owensii
  REGION 1..281: note = tr|A0A3G2PYM5|A0A3G2PYM5_9VIBR NADPH-dependent 7-cyano-7-deazaguanine reductase OS=Vibrio owensii; OX = 696485 GN=queF PE=3 SV=1
MSKYSDAKELAGLTLGKKTEYANQYDASLLQPVPRSLNRDDLELGDSLPFMGHDIWTLYELSWLNSKGLPQVAVGEVYIPATSANLIESKSFKLYLNSYNQTRFATWEEVTERLMQDLSACAGEQVLVEVNPVTHYTNQPIVTMEGECIDDQDIEITSYDFDAALLEGAAGDEQVEEILHSHLLKSNCLITNQPDWGSVEIRYQGAKLDREKLLRYLVSFREHNEFHEQCVERIFTDLMKYCQPTKLTVFARYTRRGGLDINPYRSTEQDKPAHNNRMARQ

SEQ ID NO: 50675 - protein, 281 aa, unidentified
  source 1..281: note = Vibrio palustris
  REGION 1..281: note = tr|A0A1R4B183|A0A1R4B183_9VIBR NADPH-dependent 7-cyano-7-deazaguanine reductase OS=Vibrio palustris; OX = 1918946 GN=queF PE=3 SV=1
MSKYSDAKELTGLTLGKGTAYTSHYDVTLLQGVPRSLNRDDLNLGTELPFKGCDVWTLYELSWLNQRGLPQVAVAQATLPATSPNLIESKSFKLYLNSFNQTRFSSIDDVRQTLVNDLSACAGEAVSVEIFPVTHFTNQPIVNMQGENIDDQDIEITHYEFDENLLQGATNDMVVTERLNSHLLKSNCLITSQPDWGSVEIRYTGKQIDREALLRYLVSFREHNEFHEQCVERIFTDIQRFCQPDSLTVYARYTRRGGLDINPFRSTHNLGPTHNYRLARQ

SEQ ID NO: 50676 - protein, 281 aa, unidentified
  source 1..281: note = Vibrio panuliri
  REGION 1..281: note = tr|A0A1Q9HM43|A0A1Q9HM43_9VIBR NADPH-dependent 7-cyano-7-deazaguanine reductase OS=Vibrio panuliri; OX = 1381081 GN=queF PE=3 SV=1
MSKYSNAKELAGLTLGQKTEYANQYDPTLLQPVPRSLNRDDLNLGSELPFLGCDIWTLYELSWLNEKGLPQVAVGEVSIPATSANLIESKSFKLYLNSFNQTRFSNWEQVEQTLVRDLSACAGETVSVTVRSVVDYTDSVIVTMQGECIDEQDIEINSYDFDDTLLADATGTEWVEEALHSHLLKSNCLITNQPDWGSVEIQYQGQKIDREALLRYIVSFREHNEFHEQCVERIFTDIMKYCQPQKLTVYARYTRRGGLDINPYRSTEQLQPNHNQRMARQ

SEQ ID NO: 50677 - protein, 281 aa, Vibrio parahaemolyticus
  REGION 1..281: note = sp|Q87RS6|QUEF_VIBPA NADPH-dependent 7-cyano-7-deazaguanine reductase OS=Vibrio parahaemolyticus serotype O3:K6 (strain RIMD 2210633); OX = 223926 GN=queF PE=3 SV=1
MSKYSDAKELAGLTLGKKTEYANQYDASLLQPVPRSLNRDDLELGDTLPFLGHDIWTLYELSWLNSKGLPQVAVGEVYIPATSANLIESKSFKLYLNSYNQTRFASWEEVAERLTQDLSACAGEKVLVEVNPVGHYTNQPIVTMEGECIDDQDIEINSYDFDADLLAGAAGEDQVEEVLHSHLLKSNCLITNQPDWGSVEIRYQGAKIDREKLLRYLVSFREHNEFHEQCVERIFTDLMKYCQPNKLTVFARYTRRGGLDINPYRSTEQDKPAHNHRMARQ

SEQ ID NO: 50678 - protein, 281 aa, Vibrio parahaemolyticus
  REGION 1..281: note = tr|A0A0D1EC84|A0A0D1EC84_VIBPH NADPH-dependent 7-cyano-7-deazaguanine reductase OS=Vibrio parahaemolyticus 49 OX=1288779 GN=queF PE=3 SV=1
MSKYSDAKELAGLTLGKKTEYANQYDASLLQPVPRSLNRDDLELGDTLPFLGHDIWTLYELSWLNSRGLPQVAVGEVYIPATSANLIESKSFKLYLNSYNQTRFASWEEVAERLTQDLSACAGEKVLVEVNPVGHYTNQPIVTMEGECIDDQDIEINSYDFDADLLAGSAGEEQVEEVLHSHLLKSNCLITNQPDWGSVEIRYQGAKIDREKLLRYLVSFREHNEFHEQCVERIFTDLMKYCQPNKLTVFARYTRRGGLDINPYRSTEQDKPAHNHRMARQ

SEQ ID NO: 50679 - protein, 281 aa, Vibrio penaeicida
  REGION 1..281: note = tr|A0A432DJ50|A0A432DJ50_9VIBR NADPH-dependent 7-cyano-7-deazaguanine reductase OS=Vibrio penaeicida; OX = 104609 GN=queF PE=3 SV=1
MSKYSNAEELAGLTLGQITEYSSQYDPSLLQGVPRSLNRNDIQLTDDLPFIGVDIWTLYELSWLNENGLPQVAVGEVILPATSPNLVESKSFKLYLNSFNQTRFSHWDEVKKALVKDLSECAGEAVDVVINPVTFYDNQPIVSFKGECIDNQDIKIEHYEFDAALLQNSTSDDLVSETLVSNLLKSNCLITNQPDWGSVSIQYTGKKINRESLLRYLVSFREHNEFHEQCVERIFTDIQKYCAPTSLTVFARYTRRGGLDINPYRSTEQSRPDNNLRLARQ

SEQ ID NO: 50680 - protein, 281 aa, Vibrio ponticus
  REGION 1..281: note = tr|A0A090PBY1|A0A090PBY1_9VIBR NADPH-dependent 7-cyano-7-deazaguanine reductase OS=Vibrio ponticus; OX = 265668 GN=queF PE=3 SV=1
MSKYSNAKELAGLTLGQKTEYASQYDPSLLQPVPRSLNRDDLELGDSLPFKGCDVWTLYELSWLNEKGLPQVAVGDVSIPATSANLIESKSFKLYLNSFNQTRFACWDDVEKTLVNDLSACAGEEVTVTVRSVVDYTDSLIVTMHGECIDEQDIEITNYEFDASLLADSTSDEVVEEALHSHLLKSNCLITNQPDWGSVEIQYQGQKIDREALLRYIVSFREHNEFHEQCVERIYTDIMKYCRPEKLTVYARYTRRGGLDINPFRSSELTQPNHNQRMARQ

SEQ ID NO: 50681 - protein, 281 aa, Vibrio ponticus
  REGION 1..281: note = tr|A0A3N3DZD8|A0A3N3DZD8_9VIBR NADPH-dependent 7-cyano-7-deazaguanine reductase OS=Vibrio ponticus; OX = 265668 GN=queF PE=3 SV=1
MSKYSDAKELAGLTLGQKTEYASQYNPSLLQPVPRSLNRDDLELGDSLPFKGCDIWTLYELSWLNDKGLPQVAVGEVSIPATSANLIESKSFKLYLNSFNQTRFSSWDDVEKTLVKDLSACAGEEVSVTVRSVVDYTDSLIVTMQGDCIDEQDIEITSYEFDASLLANAAGKEVVEEALHSHLLKSNCLITNQPDWGSVEIQYQGQKINREALLRYIVSFREHNEFHEQCVERIFTDIMKYCQPEKLTVYARYTRRGGLDINPFRSTEQQQPNHNQRMARQ

SEQ ID NO: 50682 - protein, 281 aa, Vibrio proteolyticus
  REGION 1..281: note = tr|U3BQ96|U3BQ96_VIBPR NADPH-dependent 7-cyano-7-deazaguanine reductase OS=Vibrio proteolyticus NBRC 13287 OX=1219065 GN=queF PE=3 SV=1
MSKYSNAKELAGLTLGQKTEYASQYDPSLLQPVPRSLNRNDLNLEAPLPFQGCDIWTLYELSWLNDKGLPQVAVGEVALPATSPNLIESKSFKLYLNSYNQTHFPDWQQVQARLAQDLSACAGEAVSVTLHPVTAFTNQPIVTMGGECIDEQDITISGYDFDETLLKDAATGEQVSETLHSHLLKSNCLITNQPDWGSVEIRYQGKQIDREALLRYIVSFREHNEFHEQCVERIFTDIMNFCQPDSLTVYARYTRRGGLDINPFRSTEQATPAHNHRMARQ

SEQ ID NO: 50683 - protein, 281 aa, unidentified
  source 1..281: note = Vibrio qinghaiensis
  REGION 1..281: note = tr|A0A223MVZ8|A0A223MVZ8_9VIBR NADPH-dependent 7-cyano-7-deazaguanine reductase OS=Vibrio qinghaiensis; OX = 2025808 GN=queF PE=3 SV=1
MSKYSDAKALAGLTLGKKTDYAKQYDPSLLQPVPRSLNRDDLHLGDSLPFKGCDIWTLYELSWLNAKGLPQVAIGEVSIPATSANLIESKSFKLYLNSYNQSKIANWDEVTQRLTRDLSACAGAPVSVTLNPVSDYTDQAIVTMQGECIDEQDIEIESYQFDASLLKSAARGEQVNETLHSHLLKSNCLITNQPDWGSVEIHYQGQQIDREALLRYLVSFREHNEFHEQCVERIFTDIMQYCQPTQLTVYARYTRRGGLDINPFRSTEQERPTHNQRMARQ

SEQ ID NO: 50684 - protein, 281 aa, unidentified
  source 1..281: note = Vibrio quintilis
  REGION 1..281: note = tr|A0A1M7YQ52|A0A1M7YQ52_9VIBR NADPH-dependent 7-cyano-7-deazaguanine reductase OS=Vibrio quintilis; OX = 1117707 GN=queF_2 PE=3 SV=1
MSKYSDAKALAGLTLGKNTHYKAHYDPSLLQPVPRSLNRDDLQLSSPLPFTGCDLWTLYELSWLNQNGLPQVAIGHVSVPAESPALIESKSFKLYLNSYNQSRFDTIQTVQKQLETDLSACAGAPVLVELKTVSDFTGEAIVPMQGECIDDTEIQIDCYDFNASLLENATSDEWIEETLHSHLLKSNCLITSQPDWGSIEIHYQGHKINREALLRYLISFREHNEFHEQCVERIFTDVMKYCAPKSLTVYARYTRRGGLDINPYRSSENKAPIHTGRMARQ

SEQ ID NO: 50685 - protein, 273 aa, unidentified
  source 1..273: note = Vibrio quintilis
  REGION 1..273: note = tr|A0A1M7YPE4|A0A1M7YPE4_9VIBR NADPH-dependent 7-cyano-7-deazaguanine reductase OS=Vibrio quintilis; OX = 1117707 GN=queF_1 PE=3 SV=1
MNTAYSKNLGKKTSYISTYAPDLLDPIPREFGRKNITECQQNCFSGYDLWTGYELSWLNSKGKPKVAVAEFMIPSDSVNLIESKSFKLYLNSLNQTRIASEEELVSMLIRDLSKAAEGDVKVKLLDVNQDFSPRAEATFECVDDLDIEVNSYEYDENILMNSTSELLAEENLCSHLLKSNCLVTHQPDWGSVYIRYKGKAIDREKLLRYVISFREHNEFHEQCVERIFSDIKRCCSPEKLTVFARYTRRGGLDINPFRSDFEHEMCVEREYRQ

SEQ ID NO: 50686 - protein, 281 aa, unidentified
  source 1..281: note = Vibrio renipiscarius
  REGION 1..281: note = tr|A0A0C2NKT6|A0A0C2NKT6_9VIBR NADPH-dependent 7-cyano-7-deazaguanine reductase OS=Vibrio renipiscarius; OX = 1461322 GN=queF PE=3 SV=1
MSKYSNAKELAGLTLGQKTEYASLYNPSLLQPVPRSLNRDDLELGETLPFHGCDIWTLYELSWLNNNGLPQVAVGDVTIPATSANLIESKSFKLYLNSLNQTRFASWDEVEATLIKDLSACAGEAVSVTLRSVEDYTDSVVVTMAGECIDHQDIEITHYEFDATLLDGAAEQEIVSESLHSHLLKSNCLITNQPDWGSVEIQYHGQKINREALLRYIVSFREHNEFHEQCVERIFTDIMTYCKPDSLTVYARYTRRGGLDINPYRSTEHTQPSHNQRMARQ

SEQ ID NO: 50687 - protein, 281 aa, Vibrio rotiferianus
  REGION 1..281: note = tr|A0A510I3E5|A0A510I3E5_9VIBR NADPH-dependent 7-cyano-7-deazaguanine reductase OS=Vibrio rotiferianus; OX = 190895 GN=queF PE=3 SV=1
MSKYSDAKELAGLTLGKKTEYANQYDASLLQPVPRSLNRDDLELGDSLPFMGHDIWTLYELSWLNSKGLPQVAVGEVYIPATSANLIESKSFKLYLNSYNQTRFATWEEVTERLAQDLSACAGEQVLVEVNPVTHYTNQPIVTMEGECIDGQDIEITSYDFDAALLEGAAGEEQVEETLHSHLLKSNCLITNQPDWGSVEIRYQGAKLDREKLLRYLVSFREHNEFHEQCVERIFTDLMQYCQPTKLTVFARYTRRGGLDINPYRSTEQDKPAHNNRMARQ

SEQ ID NO: 50688 - protein, 281 aa, Vibrio rotiferianus
  REGION 1..281: note = tr|A0A2K7SW96|A0A2K7SW96_9VIBR NADPH-dependent 7-cyano-7-deazaguanine reductase OS=Vibrio rotiferianus; OX = 190895 GN=queF PE=3 SV=1
MSKYSDAKELAGLTLGKKTEYANQYDASLLQPVPRSLNRDDLELGDSLPFMGHDIWTLYELSWLNSKGLPQVAVGEVYIPATSANLIESKSFKLYLNSYNQTRFATWEEVTERLTQDLSACAGEQVLVEVNPVTHYTNQPIVTMEGECIDGQDIEITSYDFDAALLEGAAGEEQVEETLHSHLLKSNCLITNQPDWGSVEIRYQGAKLDREKLLRYLVSFREHNEFHEQCVERIFTDLMKYCQPTKLTVFARYTRRGGLDINPYRSTEQDKPAHNNRMARQ

SEQ ID NO: 50689 - protein, 281 aa, Vibrio ruber
  REGION 1..281: note = tr|A0A1R4LAT7|A0A1R4LAT7_9VIBR NADPH-dependent 7-cyano-7-deazaguanine reductase OS=Vibrio ruber DSM 16370; OX = 1123498 GN=queF_2 PE=3 SV=1
MSKYSDTEALADLKLGQETVYASHYDPSLLQGVPRSLNRDDLQLSEPLPFQGCDLWTLYELSWLNNKGLPQVAIGYVSIPATSPNLIESKSFKLYLNSFNQTKFDDWQTVHSRLCTDLSHCAGEAVTVNLRHVNDFTHQHIITMEGECIDEQDIEIDQYAFNPAYLEQATGETFVEETLHSHLLKSNCLITNQPDWGSVEIRYRGQQINREALLRYLISFREHNEFHEQCVERIFTDLMKYCEPQSLTVYARYTRRGGLDINPYRSTEDHQPASVLRMARQ

SEQ ID NO: 50690 - protein, 273 aa, Vibrio ruber
  REGION 1..273: note = tr|A0A1R4L8M6|A0A1R4L8M6_9VIBR NADPH-dependent 7-cyano-7-deazaguanine reductase OS=Vibrio ruber DSM 16370; OX = 1123498 GN=queF_1 PE=3 SV=1
MDTTYSKNLGKKTDYISTYTPQLLDPIPRARGRGNITACDSAAFSGYDLWTGYELSWLNTKGKPMVAVAEFMIPCTSPNLIESKSFKLYLNSLNQTPFASEQAVVETLIQDLSAASGGDVQVKLIPVDETLEIRADKSFTCIDHLDIEISSYAYDEDLLLGATSTNIVEEKLCSHLLKSNCLVTNQPDWGSVYIHYQGAEIDRETLLRYIISFREHNEFHEQCVERIFADIKRCCKPEKLTVFARYTRRGGLDINPFRSDFEEVMLVGRAYRQ

SEQ ID NO: 50691 - protein, 299 aa, Vibrio rumoiensis
  REGION 1..299: note = tr|A0A1E5E0H2|A0A1E5E0H2_9VIBR NADPH-dependent 7-cyano-7-deazaguanine reductase OS=Vibrio rumoiensis 1S-45 OX=1188252 GN=queF PE=3 SV=1
MTHSTQTKYANAKELQGLTLGQTTQYSHNYDPSLLQAVPRSLNRNDLGLTDAQNLPFVGTDIWTMYELSWLNNKGLPQVAIGDVMLPVTSPNLIESKSFKIYLNSLNQTKFESWQQVQDTIAKDLSQCAGDPVSVELHSLQHYTQQPITTMQGHCIDDQDIEINDYQFDESYLEGAVTDRSISTNQEDPQNHITETLHSHLLKSNCLITNQPDWGSVEIEYTGKQINQEALLRYLVSFREHNEFHEQCVERIFCDIMKYCQPEQLSVYARYTRRGGLDINPFRSTHLKQPQMLTRMARQ

SEQ ID NO: 50692 - protein, 272 aa, Vibrio sagamiensis; identical to SEQ ID NO: 50587
  REGION 1..272: note = tr|A0A511QED8|A0A511QED8_9VIBR NADPH-dependent 7-cyano-7-deazaguanine reductase OS=Vibrio sagamiensis NBRC 104589 OX=1219064 GN=queF PE=3 SV=1

SEQ ID NO: 50693 - protein, 281 aa, Vibrio sagamiensis; identical to SEQ ID NO: 50588
  REGION 1..281: note = tr|A0A511QGN1|A0A511QGN1_9VIBR NADPH-dependent 7-cyano-7-deazaguanine reductase OS=Vibrio sagamiensis NBRC 104589 OX=1219064 GN=queF PE=3 SV=1

SEQ ID NO: 50694 - protein, 281 aa, Vibrio scophthalmi
  REGION 1..281: note = tr|A0A1E3WNY4|A0A1E3WNY4_9VIBR NADPH-dependent 7-cyano-7-deazaguanine reductase OS=Vibrio scophthalmi; OX = 45658 GN=queF PE=3 SV=1
MSKYSNAKELAGLTLGQKTEYASLYNPSLLQPVPRSLNRDDLELGDTLPFHGCDIWTLYELSWLNDKGLPQVAVGDVSIPATSANLIESKSFKLYLNSLNQTRFACWDDVEATLIKDLSHCAGETVSVTLRSVEDYTDTVIVTMAGECIDHQDIEITHYEFDATLLEGAAEQEIVTESLHSHLLKSNCLITNQPDWGSVEIQYHGQKINREALLRYIVSFREHNEFHEQCVERIFTDIMTYCQPEKLTVYARYTRRGGLDINPYRSTEQAQPNHNQRMARQ

SEQ ID NO: 50695 - protein, 281 aa, Vibrio scophthalmi
  REGION 1..281: note = tr|A0A1B1NQX0|A0A1B1NQX0_9VIBR NADPH-dependent 7-cyano-7-deazaguanine reductase OS=Vibrio scophthalmi; OX = 45658 GN=queF PE=3 SV=1
MSKYSNAKELAGLTLGQKTEYASLYNPSLLQPVPRSLNRDDLELGDTLPFHGCDIWTLYELSWLNDKGLPQVAVGDVSIPATSANLIESKSFKLYLNSLNQTRFTCWDDVEATLIKDLSHCAGETVSVTLRSVEDYTDTVIVTMAGECIDHQDIEITHYEFDASLLEGAAEQEIVTESLHSHLLKSNCLITNQPDWGSVEIQYHGQKINREALLRYIVSFREHNEFHEQCVERIFTDIMTYCQPEKLTVYARYTRRGGLDINPYRSTEQAQPNHNQRMARQ

SEQ ID NO: 50696 - protein, 281 aa, Vibrio shilonii
  REGION 1..281: note = tr|A6D8T2|A6D8T2_9VIBR NADPH-dependent 7-cyano-7-deazaguanine reductase OS=Vibrio shilonii AK1; OX = 391591 GN=queF PE=3 SV=1
MSKYSNAKELSGLTLGQKTEYANHYDATLLQPVPRSLNRDDLELGKTLPFQGCDIWTLYEISWLNAKGLPQVAVGEVSIPATSANLIESKSFKLYLNSYNQTRFATWEQVQSTIATDLSNCAGETVSVKLTPVADFENTKIVGMAGECIDDQDIAIDNYEFDAELLKDAAGDEIVEEALHSHLLKSNCLITNQPDWGSVEIQYQGAKIDREALLRYLVSFREHNEFHEQCVERIFTDLMQYCNPTKLTVYARYTRRGGLDINPYRSNQYQAPEHNARMARQ

SEQ ID NO: 50697 - protein, 281 aa, Vibrio sinaloensis
  REGION 1..281: note = tr|E8M9J2|E8M9J2_9VIBR NADPH-dependent 7-cyano-7-deazaguanine reductase OS=Vibrio sinaloensis DSM 21326 OX=945550 GN=queF PE=3 SV=1
MSKYSDAKELAGLTLGQKTDYANQYDASLLQPVPRSLNRDDLNLGDELPFKGCDIWTLYELSWLNNKGLPQVAVGEVSIPATSANLIESKSFKLYLNSFNQTRFASWEEVEKTLVNDLSQCAGETVSVTVRSVVDYTDSVIVTMEGDCIDEQDIEINSYEFDEALLEGAAKGERVEESLHSHLLKSNCLITNQPDWGSVEIRYSGQQIDREALLRYLVSFREHNEFHEQCVERIFTDIMKYCQPETLTVYARYTRRGGLDINPYRSNQTSEPAHNQRMARQ

SEQ ID NO: 50698 - protein, 281 aa, Vibrio sinaloensis
  REGION 1..281: note = tr|A0A0A5I0I8|A0A0A5I0I8_9VIBR NADPH-dependent 7-cyano-7-deazaguanine reductase OS=Vibrio sinaloensis; OX = 379097 GN=queF PE=3 SV=1
MSKYSDAKELAGLTLGQKTDYSNQYDPSLLQPVPRSLNRDDLNLGDELPFQGCDIWTLYELSWLNEKGLPQVAVGEVSIPATSANLIESKSFKLYLNSFNQTRFSSWDEVENTLIQDLSQCAGETVAVTLRSVVDYTDSVIVSMDGECIDDQDIEITHYDFDETLLQNATDNQVVEESLHSHLLKSNCLITNQPDWGSVEIRYRGNKINREALLRYIVSFREHNEFHEQCVERIFTDIMKFCQPQQLTVYARYTRRGGLDINPYRSNQDAQPAHNQRMARQ

SEQ ID NO: 50699 - protein, 281 aa, Vibrio sp.
  REGION 1..281: note = tr|A0A3N9TDZ3|A0A3N9TDZ3_9VIBR NADPH-dependent 7-cyano-7-deazaguanine reductase OS=Vibrio sp. LJC006; OX = 2487322 GN=queF PE=3 SV=1
MSKYSNSKELEGLTLGKYTEYSTSYDASLLQPVPRKLNRDDINVTEPLPFLGSDVWTLYELSWLNSKGLPQVAVGYVTIPATSANLIESKSFKLYLNSFNQTKFASWEEVHDTLVTDLSNCAGEAVSVEIHSVDDFTHQRIVSMEGTCLDDQDIEVNHYQFDDTLLRNSTVDINVQETVHSHLLKSNCLITNQPDWGSVEITYEGKKINHEALLRYIVSFREHNEFHEQCVERIFTDIMRYCSPEKLTVYARYTRRGGLDINPFRSTESATPSNWLRMARQ

SEQ ID NO: 50700 - protein, 281 aa, Vibrio sp.; identical to SEQ ID NO: 50696
  REGION 1..281: note = tr|A0A084TED8|A0A084TED8_9VIBR NADPH-dependent 7-cyano-7-deazaguanine reductase OS=Vibrio sp. ER1A; OX = 1517681 GN=queF PE=3 SV=1

SEQ ID NO: 50701 - protein, 273 aa, unidentified
  source 1..273: note = Vibrio spartinae
  REGION 1..273: note = tr|A0A1N6M9R9|A0A1N6M9R9_9VIBR NADPH-dependent 7-cyano-7-deazaguanine reductase OS=Vibrio spartinae; OX = 1918945 GN=queF_2 PE=3 SV=1
MDTTYSKNLGKKTDYVSTYTPQLLDPIPRARGRGNITACDSAAFSGYDLWTGYELSWLNSKGKPMVAVAEFMIPCTSPNLIESKSFKLYLNSLNQTSFVSEQELVETLTQDLSATSGGDVQVKLIPVDETLEIRADKSFTCIDDLDIEIDSYEYDEDRLSGATSANIVEEKLCSHLLKSNCLVTNQPDWGSVYIHYQGAEIDRETLLRYIISFREHNEFHEQCVERIFADIKRCCNPEKLTVLARYTRRGGLDINPFRSDFEDVMLVGREYRQ

SEQ ID NO: 50702 - protein, 281 aa, unidentified
  source 1..281: note = Vibrio spartinae
  REGION 1..281: note = tr|A0A1N6M857|A0A1N6M857_9VIBR NADPH-dependent 7-cyano-7-deazaguanine reductase OS=Vibrio spartinae; OX = 1918945 GN=queF_1 PE=3 SV=1
MSKYSDTEALADLKLGQDTIYASHYDPSLLQAVPRSLNRDDLHLSEALPFQGCDLWTLYELSWLNTKGLPQVAIGYVSIPATSPNLIESKSFKLYLNSLNQTKFDDWQTVHARLSADLSHCAGEDVTVNLRHVNDFTHQHIITMEGECIDEQDIEIDQYAFNAAYLEQATTETFVEETLHSHLLKSNCLITNQPDWGSVEIHYRGRQINREALLRYLISFREHNEFHEQCVERIFTDLMKYCAPQSLTVYARYTRRGGLDINPYRSTEDNQPASVLRMARQ

SEQ ID NO: 50703 - protein, 281 aa, Vibrio splendidus
  REGION 1..281: note = tr|A0A2N7L0W5|A0A2N7L0W5_VIBSP NADPH-dependent 7-cyano-7-deazaguanine reductase OS=Vibrio splendidus; OX = 29497 GN=queF PE=3 SV=1
MSKYSDAKELAGLTLGQKTEYSNQYDASLLQPVPRSLNRDDLALNGELPFVGHDIWTMYELSWLNTNGLPQVAVGEVFIPATSQNLIESKSFKLYLNSYNQTQFEDWAQVTERLTQDLSACAGEPVIVNVNSVTDYTNQPIVTMEGDCIDNQDIQITSYDFEASLLEGAAGEQEVEETLHSHLLKSNCLITNQPDWGSVEIAYSGKQIDREALLRYLVSFREHNEFHEQCVERIFTDIMKYCAPSKLTVFARYTRRGGLDINPYRSTEQDRPSHNKRMARQ

SEQ ID NO: 50704 - protein, 281 aa, Vibrio splendidus
  REGION 1..281: note = tr|A0A2G4B4P8|A0A2G4B4P8_VIBSP NADPH-dependent 7-cyano-7-deazaguanine reductase OS=Vibrio splendidus; OX = 29497 GN=queF PE=3 SV=1
MSKYSDAKELAGLTLGQKTEYSNQYDASLLQPVPRSLNRDDLALNGELPFVGHDIWTMYELSWLNTNGLPQVAVGEVFIPATSQNLIESKSFKLYLNSYNQTQFESWAQVTERLTQDLSACAGEPVVVNVNSVTDYTNQPIVTMEGDCIDNQDIQITSYDFEASLLEGAAGEQKVEETLHSHLLKSNCLITNQPDWGSVEIAYSGKQIDREALLRYLVSFREHNEFHEQCVERIFTDIMKYCAPSKLTVFARYTRRGGLDINPYRSTEQDRPSHNKRMARQ

SEQ ID NO: 50705 - protein, 284 aa, Vibrio superstes
  REGION 1..284: note = tr|A0A511QQ63|A0A511QQ63_9VIBR NADPH-dependent 7-cyano-7-deazaguanine reductase OS=Vibrio superstes NBRC 103154 OX=1219062 GN=queF PE=3 SV=1
MSKYSDAKELAGLTLGQKTQYASLYDPELLQAVPRSLNRDDLELGDTLPFKGQDIWTLYELSWLNANGLPQVAVGEVSIPASSPNLIESKSFKLYLNSYNQTKFNDWDAVQEQLVVDLSACAGGKVSVTLSRVQDFNQQPIVDMQGACIDEQDISITAYEFSTDYLKGSLSEESVDEVLHSHLLKSNCLITNQPDWGSVEIRYSGKKINQEALLRYLVSFREHNEFHEQCVERIFTDIMHFCQPKSLSVYARYTRRGGLDINPYRTSLHSESSAPDSTLRLARQ

SEQ ID NO: 50706 - protein, 281 aa, Vibrio tapetis
  REGION 1..281: note = tr|A0A2N8ZEJ8|A0A2N8ZEJ8_9VIBR NADPH-dependent 7-cyano-7-deazaguanine reductase OS=Vibrio tapetis subsp. tapetis OX=1671868 GN=queF PE=3 SV=1
MSKYSNAKELAGLTLGQKTEYSSQYAPSLLQAVPRSLNRDDINLGEVLPFHGVDIWTLYELSWLNEKGLPQVAVGDVTLPATSPNLIESKSFKLYLNSFNQTKFSSWDEVKSALIKDLSACAGEPVEVSIQAVQHYDQQHIVPMNGICIDDQDIEITDYEFDASILQDSTSDDVITESLVSNLLKSNCLITNQPDWGSVMIEYTGPKINQETLLRYLVSFREHNEFHEQCVERIFMDIMQYCHPSSLTVYARYTRRGGLDINPYRSTSTAMPTQNLRLARQ

SEQ ID NO: 50707 - protein, 281 aa, Vibrio tasmaniensis; identical to SEQ ID NO: 50596
  REGION 1..281: note = sp|B7VIV4|QUEF_VIBTL NADPH-dependent 7-cyano-7-deazaguanine reductase OS=Vibrio tasmaniensis (strain LGP32) OX=575788 GN=queF PE=3 SV=1

SEQ ID NO: 50708 - protein, 281 aa, Vibrio tasmaniensis; identical to SEQ ID NO: 50596
  REGION 1..281: note = tr|A0A2N7I4E1|A0A2N7I4E1_9VIBR NADPH-dependent 7-cyano-7-deazaguanine reductase OS=Vibrio tasmaniensis; OX = 212663 GN=queF PE=3 SV=1

SEQ ID NO: 50709 - protein, 281 aa, unidentified
  source 1..281: note = Vibrio thalassae
  REGION 1..281: note = tr|A0A240EFQ4|A0A240EFQ4_9VIBR NADPH-dependent 7-cyano-7-deazaguanine reductase OS=Vibrio thalassae; OX = 1243014 GN=queF PE=3 SV=1
MSKYSNAKELSGLTLGQKTEYANHYDASLLQPVPRSLNRDDLELGDTLPFQGCDIWTLYEISWLNAKGLPQVAIGEVSIPATSANLIESKSFKLYLNSYNQTRFDSWEQVQTTLATDLSNCAGETVSVTLIPVADFENSKIVGMAGDCIDDQDITIDNYEFDAELLKGAAGDEVVEEALHSHLLKSNCLITNQPDWGSVEIQYQGAKINREALLRYLVSFREHNEFHEQCVERIFTDLMQYYNPTKLTVYARYTRRGGLDINPYRSNQHQAPEHNARMARQ

SEQ ID NO: 50710 - protein, 281 aa, unidentified
  source 1..281: note = Vibrio toranzoniae
  REGION 1..281: note = tr|A0A125P5B4|A0A125P5B4_9VIBR NADPH-dependent 7-cyano-7-deazaguanine reductase OS=Vibrio toranzoniae; OX = 1194427 GN=queF PE=3 SV=1
MSKYSDAKELTGLTLGQKTEYANQYDASLLQPVPRSLNRDDLALNGELPFVGHDIWTMYELSWLNSNGLPQVAVGEVFIPATSPNLIESKSFKLYLNSYNQTQFENWDQVTERLTQDLSACAGETVTVNVNSVTDYTNQPIVTMKGDCIDNQDIKITSYDFEASLLEGSTGEQEVNETLHSHLLKSNCLITNQPDWGSVEIEYSGKQIDREALLRYLVSFREHNEFHEQCVERIFTDIMKHCEPSKLTVFARYTRRGGLDINPYRSTEQDRPSHNKRMARQ

SEQ ID NO: 50711 - protein, 281 aa, Vibrio tubiashii
  REGION 1..281: note = tr|F9T4V9|F9T4V9_9VIBR NADPH-dependent 7-cyano-7-deazaguanine reductase OS=Vibrio tubiashii ATCC 19109 OX=1051646 GN=queF PE=3 SV=1
MSKYSDAKELAGLTLGQKTEYSNQYDASLLQPVPRSLNRDDLNLGDSLPFQGCDIWTLYELSWLNEKGLPQVAIGEVSIPATSANLIESKSFKLYLNSFNQTRFSSWDQVEQTLIKDLSACAGETVSVTVRSVVDYTDSVVVTMDGDCIDEQDIEITSYDFDRTLIQGAATGEVVEESLHSHLLKSNCLITNQPDWGSVEIQYKGKQIDREALLRYLVSFREHNEFHEQCVERIFTDIMEFCQPESLTVYARYTRRGGLDINPYRSNVNSQPSHNQRMARQ

SEQ ID NO: 50712 - protein, 281 aa, Vibrio tubiashii
  REGION 1..281: note = tr|A0A0A5K144|A0A0A5K144_9VIBR NADPH-dependent 7-cyano-7-deazaguanine reductase OS=Vibrio tubiashii; OX = 29498 GN=queF PE=3 SV=1
MSKYSDAKELAGLTLGQKTEYSNQYDPNLLQPVPRSLNRDDLNLGDALPFQGCDIWTLYELSWLNEKGLPQVAIGEVSIPATSANLIESKSFKLYLNSFNQSRFASWDEVEQTLAKDLSACAGEAVTVTVRCVEDYTDSLIVTMDGECIDEQDIEITSYEFDRNLLAEAASEQMVEETLHSHLLKSNCLITNQPDWGSVEIHYKGKQINRESLLRYLVSFREHNEFHEQCVERIFTDIMEFCQPERLTVYARYTRRGGLDINPYRSNVSRQPNHNQRMARQ

SEQ ID NO: 50713 - protein, 281 aa, Vibrio variabilis
  REGION 1..281: note = tr|A0A090SGZ2|A0A090SGZ2_9VIBR NADPH-dependent 7-cyano-7-deazaguanine reductase OS=Vibrio variabilis; OX = 990271 GN=queF PE=3 SV=1
MSKYSNAKELSGLTLGQKTDYANQYDASLLQPVPRSLNRDDLELGDSLPFQGCDIWTMYEISWLNANGLPQVAVGEAYIPATSANLIESKSFKLYLNSYNQTRFDSWDEVQSTIAADLSNCAGETVTVKLIPVGDFENTQIVGMKGECIDNQDIRIDSYDFDAALLEGAAGEEVVEEALHSHLLKSNCLITNQPDWGSVEIQYHGAKIDREALLRYLVSFREHNEFHEQCVERIFTDIMAYCKPTELTVYARYTRRGGLDINPYRSNQDSAPAHNLRMARQ

SEQ ID NO: 50714 - protein, 281 aa, Vibrio vulnificus
  REGION 1..281: note = sp|Q7MN30|QUEF_VIBVY NADPH-dependent 7-cyano-7-deazaguanine reductase OS=Vibrio vulnificus (strain YJ016) OX=196600 GN=queF PE=3 SV=1
MSKYSDAKELAGLTLGKKTDYANQYDPSLLQPVPRSLNRDDLQLGDELPFMGHDIWTLYELSWLNNKGLPQVAVGEVYIPATSANLIESKSFKLYLNSYNQTRFDSWEEVRQRLITDLSHCAGEAVEVAVNSVTHYTQQPIVTMEGECIDEQDIDISSYDFDDRLLEGAAGEEWVTETLHSHLLKSNCLITNQPDWGSVEIRYQGHKIDREKLLRYLVSFREHNEFHEQCVERIFTDLMKYCQPESLTVFARYTRRGGLDINPYRSTEQAKPDHNHRMARQ

SEQ ID NO: 50715 - protein, 281 aa, Vibrio vulnificus
  REGION 1..281: note = tr|A0A4Q7IDY1|A0A4Q7IDY1_VIBVL NADPH-dependent 7-cyano-7-deazaguanine reductase OS=Vibrio vulnificus; OX = 672 GN=queF PE=3 SV=1
MSKYSDAKELAGLTLGKKTDYANQYDPSLLQPVPRSLNRDDLQLGDELPFMGHDIWTLYELSWLNSKGLPQVAVGEVYIPATSANLIESKSFKLYLNSYNQTRFDSWEEVRQRLITDLSHCAGEAVEVAVNSVTHYTQQPIVTMEGECIDEQDIDISSYDFDDRLLEGAAGEEWVTETLHSHLLKSNCLITNQPDWGSVEIRYQGHKIDREKLLRYLVSFREHNEFHEQCVERIFTDLMKYCQPETLTVFARYTRRGGLDINPYRSTEQAKPDHNHRMARQ

SEQ ID NO: 50716 - protein, 281 aa, unidentified
  source 1..281: note = Vibrio xiamenensis
  REGION 1..281: note = tr|A0A1G8H5L9|A0A1G8H5L9_9VIBR NADPH-dependent 7-cyano-7-deazaguanine reductase OS=Vibrio xiamenensis; OX = 861298 GN=queF PE=3 SV=1
MSKYSGAKELAGLTLGQKTEYATQYQPSLLQPVPRSLNRDDLNLGADLPFQGCDIWTLYELSWLNSKGLPQVAIGEVAIPATSANLIESKSFKLYLNSFNQTRFDSWQAVEQALIQDLSNCAGETVSVSVKPVSAYTDEPIVTMQGECIDDQDIEIADYQFNPDYLKDAAGPLDVSETLHSHLLKSNCLITNQPDWGSVEICYQGKQINREALLRYIVSFREHNEFHEQCVERIFTDIMTYCQPTQLTVYARYTRRGGLDINPYRSNQQPKPAHNHRMARQ

SEQ ID NO: 50717 - protein, 281 aa, unidentified; identical to SEQ ID NO: 50636
  source 1..281: note = Vibrionales bacterium
  REGION 1..281: note = tr|A0A366XJI8|A0A366XJI8_9GAMM NADPH-dependent 7-cyano-7-deazaguanine reductase OS=Vibrionales bacterium C3R12 OX=2267228 GN=queF PE=3 SV=1

SEQ ID NO: 50718 - protein, 281 aa, unidentified
  source 1..281: note = Vibrionales bacterium
  REGION 1..281: note = tr|A5L5V5|A5L5V5_VIBBS NADPH-dependent 7-cyano-7-deazaguanine reductase OS=Vibrionales bacterium (strain SWAT-3) OX=391574 GN=queF PE=3 SV=1
MSKYSDAKELAGLTLGQKTEYSNQYDASLLQPVPRSLNRDDLALNGELPFVGHDIWTMYELSWLNKNGLPQVAVGEVFIPATSPNLIESKSFKLYLNSYNQTQFENWEQVTERLTQDLSACAGETVIVNVNSVTDYTNQPIVTMEGECIDNQDIQITSYDFEASLLEGAAGEQEVEETLHSHLLKSNCLITNQPDWGSVEIAYSGKQIDREALLRYLVSFREHNEFHEQCVERIFTDIMKYCAPSKLTVFARYTRRGGLDINPYRSTEQDSPSHNKRMARQ

SEQ ID NO: 50719 - protein, 144 aa, unidentified
  source 1..144: note = Victivallales bacterium
  REGION 1..144: note = tr|A0A2S0KUI8|A0A2S0KUI8_9BACT NADPH-dependent 7-cyano-7-deazaguanine reductase OS=Victivallales bacterium CCUG 44730 OX=2094242 GN=queF PE=3 SV=1
MNSEKNRERFRDLTLLSASERNYPNSPDAARLEAFENVYADRDYVIEFDCPEYTSLCPVTGQPDFGHIIVRYVPDKKCIESKSLKLYLYSFRNTNTFHEESVNTILDAVVKTCSPRRAEVIGRFRPRGGIAINVKATYGDKIDE

SEQ ID NO: 50720 - protein, 142 aa, Victivallis vadensis
  REGION 1..142: note = tr|A0A2U1BA49|A0A2U1BA49_9BACT NADPH-dependent 7-cyano-7-deazaguanine reductase OS=Victivallis vadensis; OX = 172901 GN=queF PE=3 SV=1
MDKSSKERFDGLTLLSASERNYPTRPEEARLEAFRNVYADRDYIIEFDCPEYTSLCPVTGQPDFGHIILRYVPDKLCIESKSLKLYLYSFRNTNTFHEESVNTILDAVVKTCAPRKAEVIGRFRPRGGIAINVKATYGGAIE

SEQ ID NO: 50721 - protein, 162 aa, unidentified
  source 1..162: note = Virgibacillus indicus
  REGION 1..162: note = tr|A0A265N836|A0A265N836_9BACI NADPH-dependent 7-cyano-7-deazaguanine reductase OS=Virgibacillus indicus; OX = 2024554 GN=queF PE=3 SV=1
MKEQDVSGLTLLGNQGTKYDFDYNPEVLETFENNHPDRDYFVKLNCPEFTTLCPITGQPDFATVYISYIPDVNMVESKALKLYLFSFRNHGGFHEDSMNIIMNDLIKLMDPRYIEVWGKFTPRGGISIDPYCNYGKPGTKFEQMAEHRMMNHDMYPEKIDNR

SEQ ID NO: 50722 - protein, 165 aa, Virgibacillus marismortui
  REGION 1..165: note = tr|A5LIG7|A5LIG7_9BACI NADPH-dependent 7-cyano-7-deazaguanine reductase OS=Virgibacillus marismortui OX=79660 GN=mtrA PE=3 SV=1
MASRSNDELTGVTQLGSQGTMYAFDYTPDVLEVFDNKHPGRDYFVKFNCPEFTTLCPKTNQPDFGTVYISYIPDKKMVESKSLKLYLFSFRNHGDFHEDSINIIMNDLIDLMAPRYIEVWGKFTPRGGISIDPYCNYGKAGTKFEKMADQRLMNHDLYPENIDNR

SEQ ID NO: 50723 - protein, 165 aa, unidentified
  source 1..165: note = Virgibacillus massiliensis
  REGION 1..165: note = tr|A0A024QG72|A0A024QG72_9BACI NADPH-dependent 7-cyano-7-deazaguanine reductase OS=Virgibacillus massiliensis OX=1462526 GN=queF PE=3 SV=1
MSGRSNDELHGVTLLGSQGTNYAFDYTPEVLEVFDNKHPNRNYIVKFNCPEFTTLCPKTGQPDFGTVYISYIPDQKMVESKSLKLYLFSFRNHGDFHEDSMNIIMNDLIHLMEPRYIEVWGKFTPRGGISIDPYCNYGKPGTKFEQMAEHRLLNHDMYPEKIDNR

SEQ ID NO: 50724 - protein, 165 aa, Virgibacillus necropolis
  REGION 1..165: note = tr|A0A221MAI6|A0A221MAI6_9BACI NADPH-dependent 7-cyano-7-deazaguanine reductase OS=Virgibacillus necropolis OX=163877 GN=queF PE=3 SV=1
MEGRRDADLTDLTLLGSQGTTYQFDYTPEVLEAFENKHQKRDYFVKLNCPEFTTLCPKTGQPDFGAVYISYIPDIKMVESKSLKLYLFSFRNHGDFHEDSMNIIMNDLIDLMDPRYIEVWGKFTPRGGISIDPYCNYGKPGTKFEQMAEHRMMNHDLYPEKIDNR

SEQ ID NO: 50725 - protein, 165 aa, unidentified
  source 1..165: note = Virgibacillus phasianinus
  REGION 1..165: note = tr|A0A220U2T7|A0A220U2T7_9BACI NADPH-dependent 7-cyano-7-deazaguanine reductase OS=Virgibacillus phasianinus OX=2017483 GN=queF PE=3 SV=1
MKGRQDNDLTDLTLLGNQETTYQFDYTPEVLETFDNQHQNRDYFVKLNCPEFTTLCPKTGQPDFGTVYISYIPNIKMVESKSLKLYLFSFRNHGDFHEDSMNIIMNDLIELMEPRFIEVWGKFTPRGGISIDPYCNYGKPGTKFEQMADHRMMNHDLYPEKIDNR

SEQ ID NO: 50726 - protein, 166 aa, unidentified
  source 1..166: note = Virgibacillus profundi
  REGION 1..166: note = tr|A0A2A2I9I9|A0A2A2I9I9_9BACI NADPH-dependent 7-cyano-7-deazaguanine reductase OS=Virgibacillus profundi; OX = 2024555 GN=queF PE=3 SV=1
MSGRGEEQGLKDLTLLGNTKTNYRTDYTPEVLESVDNIHSNRDYFVKFNCPEFTSLCPITGQPDFATMYISYIPDQKIVESKSLKLYLFSFRNHGDFHEDCVNIIMNDLIELLDPRYIEVWGKFTPRGGISIDPWCNYGKPKTKYEDMAMHRLMNHDLNPEKIDNR

SEQ ID NO: 50727 - protein, 165 aa, Virgibacillus salarius; identical to SEQ ID NO: 50722
  REGION 1..165: note = tr|A6BMA1|A6BMA1_9BACI NADPH-dependent 7-cyano-7-deazaguanine reductase OS=Virgibacillus salarius; OX = 447199 GN=mtrA PE=3 SV=1

SEQ ID NO: 50728 - protein, 165 aa, Virgibacillus soli; identical to SEQ ID NO: 44267
  REGION 1..165: note = tr|A0A0Q9XWU8|A0A0Q9XWU8_9BACI NADPH-dependent 7-cyano-7-deazaguanine reductase OS=Virgibacillus soli; OX = 480284 GN=queF PE=3 SV=1

SEQ ID NO: 50729 - protein, 165 aa, Virgibacillus sp.
  REGION 1..165: note = tr|A0A268I7P6|A0A268I7P6_9BACI NADPH-dependent 7-cyano-7-deazaguanine reductase OS=Virgibacillus sp. 7505; OX = 2022548 GN=queF PE=3 SV=1
MAGRNPEEMTDVTLLGNQNNVYDFDYKPEVLETFDNKHTYRDYFVKFNCPEFTTLCPITNQPDFGTVYISYIPDEKMVESKSLKLYLFSFRNHGDFHEDCINIILNDLKELMNPRYIEVWGKFTPRGGISIDPYVNYGRPGTKYEQMADHRMMNHDMYPEKVDNR

SEQ ID NO: 50730 - protein, 166 aa, Viridibacillus sp.
  REGION 1..166: note = tr|A0A2N0F0Y4|A0A2N0F0Y4_9BACL NADPH-dependent 7-cyano-7-deazaguanine reductase OS=Viridibacillus sp. OK051 OX=1884360 GN=queF PE=3 SV=1
MSGRSHEEGLKDLTLLGNQHTQYSFEYAPEVLEAVDNLHSNRDYFVKFNCPEFTSLCPMTHQPDFATMYISYVPDQKLVESKSLKLYLFSFRNHGDFHEDCVNIIMNDLIQLLDPRYIEVWGKFTPRGGLSIDPWCNYGKPGTKYEEMAHFRLMNHDLYPEKIDNR

SEQ ID NO: 50731 - protein, 133 aa, unidentified
  source 1..133: note = Vitiosangium sp.
  REGION 1..133: note = tr|A0A2T4VQS2|A0A2T4VQS2_9DELT NADPH-dependent 7-cyano-7-deazaguanine reductase OS=Vitiosangium sp. GDMCC 1.1324 OX=2138576 GN=queF PE=3 SV=1
MPSQPSKDLQTFPNPAPDRDYEIAFDVPEFTCLCPLTGQPDFAKFKIRYVPDQLCVELKSLKLYMWAYRNEGAFHEKVTNTIADDIVRAIQPRKLTVEGDFFVRGGIGTLVTVTHEKKGRGAKAKKSAPARRK

SEQ ID NO: 50732 - protein, 163 aa, Vitreoscilla filiformis
  REGION 1..163: note = tr|A0A221KGL0|A0A221KGL0_VITFI NADPH-dependent 7-cyano-7-deazaguanine reductase OS=Vitreoscilla filiformis OX=63 GN=queF PE=3 SV=1
MVFFPHAMAHSDELIPAPQQRPVPVNPPSAPSKELYVFPNPAPERDYVIQFQIPEFTCHCPLTGQPDFAHFTIDMVADQLCVELKSLKMYMWSFRNEGAFHEKVTNDILSKIVSVTNPRYARITARWYVRGGIYTNVIAEHRQPGWAGDAVVPAPHLPHATGL

SEQ ID NO: 50733 - protein, 280 aa, Vogesella indigofera
  REGION 1..280: note = tr|A0A495BRP1|A0A495BRP1_VOGIN NADPH-dependent 7-cyano-7-deazaguanine reductase OS=Vogesella indigofera; OX = 45465 GN=queF PE=3 SV=1
MMNPSYTPEFSPLGKKVDYQDQYDASLLFPIARQQKRDEVGVAEGALPFAGVDLWTGYEVSWLNARGKPQVAIATFRIPADSPRLIESKSFKLYLNSYNQTRIASWQQVAAQLELDLSNAAGRKVQVSLRSPADFGGERIAELAGDCIDELDIEVSSYAPCPEALRADAANVVSETLTSQLLKSNCLVTGQPDWGSVAISYTGPQIDRETLLRYLIGFRQHNEFHEQCVERIFVDVLRACAPSRLTVYARYTRRGGLDINPWRSNDPAAVAPDNTRTARQ

SEQ ID NO: 50734 - protein, 279 aa, Vogesella sp.
  REGION 1..279: note = tr|A0A1C6LJL4|A0A1C6LJL4_9NEIS NADPH-dependent 7-cyano-7-deazaguanine reductase OS=Vogesella sp. LIG4; OX = 1192162 GN=queF PE=3 SV=1
MTPTYTPEFSPLGKKVDYQDHYDASLLFPIARQQKRDEIGVTADALPFAGVDLWTGYELSWLNGKGKPQVAIATFRIPADSPRLIESKSFKLYLNSYNQTRIDSWQQVAAQLELDLSNAAGAKVVVSLLSPAEFGREQIVELAGESIDELDIAVDNYAPCPDTLKADAANMVSETLTSQLLKSNCLVTGQPDWGSVAISYTGPQIDRETLLRYLIGFRQHNEFHEQCVERIFVDVLRACAPQRLTVYARYTRRGGLDINPWRSNDPAAQTPDNVRTARQ

SEQ ID NO: 50735 - protein, 280 aa, Vogesella sp.
  REGION 1..280: note = tr|A0A0J5GDZ8|A0A0J5GDZ8_9NEIS NADPH-dependent 7-cyano-7-deazaguanine reductase OS=Vogesella sp. EB; OX = 1526735 GN=queF PE=3 SV=1
MMNPSYTPEFSPLGKKVDYQDQYDASLLFPIARQQKRDEIGVTEDALPFGGVDLWTGYEVSWLNARGKPQVAIATFRIPADSPRLIESKSFKLYLNSYNQTRIASWQQVAAQLELDLSNAAGGKVQVSLLSPADFGRERIVELAGDCIDELDIEVSSYAPCPEALRADAVNVVSETLTSQLLKSNCLVTGQPDWGSVQISYTGPQIDRETLLRYLIGFRQHNEFHEQCVERIFVDVLRACAPSRLTVYARYTRRGGLDINPWRSNDPAAVAPDNTRTARQ

SEQ ID NO: 50736 - protein, 281 aa, Volucribacter psittacicida
  REGION 1..281: note = tr|A0A4V2PCL9|A0A4V2PCL9_9PAST NADPH-dependent 7-cyano-7-deazaguanine reductase OS=Volucribacter psittacicida OX=203482 GN=queF PE=3 SV=1
MTYQHHSLDQLKLGQAHTQYEHHYDPQLLQAVPRHLNRHALGIENRLPFQFGADLWTAFEISWLNQQGLPQVAIGDIQLDFRSQNLIESKSFKLYLNSLNQHKFDSMQTLEKTIAQDLAHCAKGEVKVRLHKLNDFTGQTIHQLQGTCIDEQDIHIENYQFNANYLQDCTIKGQKVEEYLVSHLLKSNCLITQQPDWGSLQIHYIGNKIQAEPLLRYIISFRQHNEFHEQCVERIFHDIMHFARPEKLSVYARYTRRGGLDINPFRSNFEEIPLNLRLARQ

SEQ ID NO: 50737 - protein, 269 aa, unidentified
  source 1..269: note = Vulcaniibacterium tengchongense
  REGION 1..269: note = tr|A0A3N4VE53|A0A3N4VE53_9GAMM NADPH-dependent 7-cyano-7-deazaguanine reductase OS=Vulcaniibacterium tengchongense OX=1273429 GN=queF PE=3 SV=1
MTQELPLGRHVDYPREYDAALLFPIARALGRDPLGLDAGAPPFVGEDRWHAYELSWLDGRGKPCVATATITVPAASPRLIESKSLKLYLNSFNATRFADAEAVRARIAADLSQAAGAGVAVAFGLPPVDAAANGTDIDALEIDIDDYGPPNPAHLRADAGAPVEETLSSALLKSNCPVTGQPDWARVRIAYRGPRLDRAGLLRYLVSFRDHAEFHEQCVERIFVDLLRHARPEALSVEARYTRRGGLDINPWRATPGHPRPPVGRDERQ

SEQ ID NO: 50738 - protein, 119 aa, unidentified
  source 1..119: note = Vulgatibacter incomptus
  REGION 1..119: note = tr|A0A0K1PGZ6|A0A0K1PGZ6_9DELT NADPH-dependent 7-cyano-7-deazaguanine reductase OS=Vulgatibacter incomptus OX=1391653 GN=queF PE=3 SV=1
MSTKPQKNLDTFPNPKPGRPYEIFFDAPEFTCLCPLTGQPDFAHIKIRYIPDETCVELKSLKLYLWSYRDEGAFHEAVTNKICDDVIAAIDPLFVEVVGDFFVRGGIRTVVTARHEKAK

SEQ ID NO: 50739 - protein, 267 aa, Waddlia chondrophila
  REGION 1..267: note = tr|D6YUC7|D6YUC7_WADCW NADPH-dependent 7-cyano-7-deazaguanine reductase OS=Waddlia chondrophila (strain ATCC VR-1470 / WSU 86-1044) OX=716544 GN=queF PE=3; SV = 1
MVQVQDSVLGKKTFYKDRYDPSLLFPIVRSDKRKEIGIGTKLPFHGEDVWFGYELSWLNAKGKPAITLAVFTFPCESSHLIESKSFKLYLNSFNQTRFESSDDVLQTLIEDLSKACGMGVGVQFIDRLPQNDFKGISLDLLDIEADTYQVDPSLLKCGGDHVQESIHTNLFKSNCLVTGQPDWASLFIHYQGPHIDHECLLRYIVSYRQHLEFHEQCIERIFIDLMRECCCEKLTVFGKFTRRGGLDINPFRSNFEQSLPHFQTARQ

SEQ ID NO: 50740 - protein, 267 aa, Waddlia chondrophila; identical to SEQ ID NO: 50739
  REGION 1..267: note = tr|F8LB92|F8LB92_9BACT NADPH-dependent 7-cyano-7-deazaguanine reductase OS=Waddlia chondrophila 2032/99 OX=765953 GN=queF PE=3 SV=1

SEQ ID NO: 50741 - protein, 274 aa, unidentified
  source 1..274: note = Waddliaceae bacterium
  REGION 1..274: note = tr|A0A2E3LUK1|A0A2E3LUK1_9BACT NADPH-dependent 7-cyano-7-deazaguanine reductase QueF OS=Waddliaceae bacterium OX=2026802 GN=CMO81_01215 PE=3 SV=1
MTNQYLLDAPLGKTSEYISEYTPSLLFPIPREGKREEISVFQPLPFKGVDIWNAFEISCLNSKGKPQVYVATFIVPCESPCIFESKSLKLYLNSFNQSIFDTKESLQTTIENDLSATAEAPVQVTLWPLEQGQWIMANRMDGTNIDHLDVEIHDYNVNPELLVTSDEIVEETLSSDLLKSNCLATGQPDWASITIKYKGPQICHSSLLKYIISYRQHSEFHEQCVERIFMDLRHHCQTEELSVYARYTRRGGIDLNPFRSTEAVYPTNHRHFRQ

SEQ ID NO: 50742 - protein, 129 aa, unidentified
  source 1..129: note = Wenzhouxiangella marina
  REGION 1..129: note = tr|A0A0K0XWH3|A0A0K0XWH3_9GAMM NADPH-dependent 7-cyano-7-deazaguanine reductase OS=Wenzhouxiangella marina OX=1579979 GN=queF PE=3 SV=1
MPSQPSRELEVFPNPQPDSDYTIRIRIPEFTCLCPKTGQPDFAELHLSYVPDRLCVELKALKNYVWSFREEGAFHEAVTNRILGDLVEATQPRFMRLKAEFNVRGGIYTTVVVEHRAEGWIAPERVDLP

SEQ ID NO: 50743 - protein, 129 aa, unidentified
  source 1..129: note = Wenzhouxiangella sediminis
  REGION 1..129: note = tr|A0A3E1KC00|A0A3E1KC00_9GAMM NADPH-dependent 7-cyano-7-deazaguanine reductase OS=Wenzhouxiangella sediminis OX=1792836 GN=queF PE=3 SV=1
MAIEASRNLETFPNPQPARDYTIRIRIPEFTCLCPKTGQPDFAELLIEYVPEAECVELKALKGYVWSYRDEGAFHEAVTNRILADLVETVQPRFMRLRAEFNVRGGIYTTVVAEHRAEGWQATQRVDLP

SEQ ID NO: 50744 - protein, 129 aa, unidentified
  source 1..129: note = Wenzhouxiangella sp.
  REGION 1..129: note = tr|A0A372BX91|A0A372BX91_9GAMM NADPH-dependent 7-cyano-7-deazaguanine reductase OS=Wenzhouxiangella sp. 15181 OX=2301224 GN=queF PE=3 SV=1
MAIEPSRNLETFPNPQPARDYTIRIRIPEFTCLCPKTGQPDFAELLLEYVPEAECVELKALKGYVWSFRNEGAFHEAVTNRILADLVEAVQPRFMRLTAEFNVRGGIYTTVVAEHRVEGWQAPDPVALP

SEQ ID NO: 50745 - protein, 140 aa, unidentified; identical to SEQ ID NO: 47257
  source 1..140: note = Westiellopsis prolifica
  REGION 1..140: note = tr|A0A4V2JNT9|A0A4V2JNT9_9CYAN NADPH-dependent 7-cyano-7-deazaguanine reductase OS=Westiellopsis prolifica IICB1 OX=1970206 GN=queF PE=3 SV=1

SEQ ID NO: 50746 - protein, 267 aa, unidentified
  source 1..267: note = Woeseia oceani
  REGION 1..267: note = tr|A0A193LE45|A0A193LE45_9GAMM NADPH-dependent 7-cyano-7-deazaguanine reductase OS=Woeseia oceani; OX = 1548547 GN=queF PE=3 SV=1
MKDTLLGRSSDYPDTLTAELLYPVARADGRAALKLGDALPFTGVDLWTAWEMSWLDTAGRPVVAVLSLAVPADSPALIESKSLKLYLNSYAMSRFASADEVANRLREDLGQCVQSTVQVQLQPGGATAGFSELPGICIDREDVVCNRYELDATLLRSGGATVRETLHSHVLRSLCPVTGQPDTGSVMIRYRGPRIDRGALLAYIVSFRRHSDFHELCVERIFSDLQSRCAAEELTVYARYNRRGGIDINPFRSNVDSDAPDLRLWRQ

SEQ ID NO: 50747 - protein, 266 aa, unidentified
  source 1..266: note = Woeseia sp.
  REGION 1..266: note = tr|A0A2E6ECL4|A0A2E6ECL4_9GAMM NADPH-dependent 7-cyano-7-deazaguanine reductase OS=Woeseia sp. OX=1980636; GN = CMO98_12535 PE=3 SV=1
MLLGIPADYPAEYAPEVLHSVPRADARKVLGIGQALPFHGTDIWNGWELSWIDSNGKPTVGTAHLTVDASSPNIVESKSLKLYLGSFAMTQYHGVADIANVISTDLENLVGLPVKIEIYCGAEPTTSVLSTLPGDCVDNFPLKNADDSVNANALYADGKTVEGALNSHLLRSLCPVTNQPDIGSVLIRYKGPRIDPSSFLSYIVSFRKHHDFHESCIERMFIDIKRVCKTEKLTVHGFYNRRGGIDINPFRSDFENTPQQIRLWRQ

SEQ ID NO: 50748 - protein, 120 aa, unidentified
  source 1..120: note = Woeseiaceae bacterium
  REGION 1..120: note = tr|A0A2D9M0Z8|A0A2D9M0Z8_9GAMM NADPH-dependent 7-cyano-7-deazaguanine reductase OS=Woeseiaceae bacterium; OX = 2026806 GN=queF PE=3 SV=1
  VARIANT 4: note = Xaa can be any naturally occurring amino acid
  VARIANT 13: note = Xaa can be any naturally occurring amino acid
  VARIANT 41: note = Xaa can be any naturally occurring amino acid
  VARIANT 86: note = Xaa can be any naturally occurring amino acid
  VARIANT 116: note = Xaa can be any naturally occurring amino acid
MPDXPIETFPNPXPERDYEIVIRCPEFTSVCPKTGLPDFGXITITYSPDQRCIELKALKYYLIEYRNRGIFYEAATNQILDDLVAXCQPRRMVVIGEFSVRGGLTTSVSARYVAQXGLDG

SEQ ID NO: 50749 - protein, 160 aa, Wohlfahrtiimonas chitiniclastica
  REGION 1..160: note = tr|A0A165HFD3|A0A165HFD3_9GAMM NADPH-dependent 7-cyano-7-deazaguanine reductase OS=Wohlfahrtiimonas chitiniclastica OX=400946 GN=queF PE=3 SV=1
MSNTEGLTLLGNQKTEYVDQYNPKVLEAFPNSHPDRNTFVKFNCPEFTALCPMTGQPDFATIYISYIPDTKMVESKSLKLYLFSFRNTGSFHEDCVNKMLNDLVDLLDPRYMEIWGKFTPRGGISIDPYVNYGKPNTSWAEFAKTRLVNHDLYPEKVDNR

SEQ ID NO: 50750 - protein, 160 aa, Wohlfahrtiimonas chitiniclastica
  REGION 1..160: note = tr|A0A256BV38|A0A256BV38_9GAMM NADPH-dependent 7-cyano-7-deazaguanine reductase OS=Wohlfahrtiimonas chitiniclastica OX=400946 GN=queF PE=3 SV=1
MSNTEGLTLLGNQKTEYADQYNPKVLEAFPNSHPDRNTFVKFNCPEFTALCPMTGQPDFATIYISYIPDTKMVESKSLKLYLFSFRNTGSFHEDCVNKMLNDLVDLLDPRYMEIWGKFTPRGGISIDPYVNYGKPNTSWAEFAKTRLVNHDLYPEKVDNR

SEQ ID NO: 50751 - protein, 160 aa, Wohlfahrtiimonas sp.
  REGION 1..160: note = tr|A0A256C6I3|A0A256C6I3_9GAMM NADPH-dependent 7-cyano-7-deazaguanine reductase OS=Wohlfahrtiimonas sp. G9077 OX=1980118 GN=queF PE=3 SV=1
MSNTEGLTLLGNQKTEYADQYNPKVLEAFPNSHPDRNTFVKFNCPEFTALCPMTGQPDFATIYISYIPDTKMVESKSLKLYLFSFRNTGSFHEDCVNKMLNDLVDLLDPRYMEIWGKFTPRGGISIDPYVNYGKPNTSWAEFAQTRLVNHDLYPEKVDNR

SEQ ID NO: 50752 - protein, 124 aa, Wolinella succinogenes
  REGION 1..124: note = sp|Q7MSY1|QUEF_WOLSU NADPH-dependent 7-cyano-7-deazaguanine reductase OS=Wolinella succinogenes (strain ATCC 29543 / DSM 1740 / LMG 7466 / NCTC 11488 / FDC 602W) OX= 273121 GN=queF PE=3 SV=1
MRYGEMEVKNFNPEEIEVWPNRNDRHYTIKITLPEFSCLCPRSGYPDYATVYIEYVPSSLVVELKAIKLYINSFRDRHVSHEDSANEIYDLLYKKLSPKELYLKMDFNPRGNVHTIIEIDSKKN

SEQ ID NO: 50753 - protein, 150 aa, Xanthobacter autotrophicus
  REGION 1..150: note = tr|A7INB5|A7INB5_XANP2 NADPH-dependent 7-cyano-7-deazaguanine reductase OS=Xanthobacter autotrophicus (strain ATCC BAA-1158 / Py2) OX=78245; GN = queF PE=3 SV=1
MTDRPLQLGVSAALPASPEEAVLDRVPNPHPDVDYVARFTCPEFTSLCPVTGQPDFAHIVIDYVPDQFLVESKSLKLYLGSFRNHGAFHEDCTVAVGKRLVDLLKPRFLRIAGYWYPRGGIPIDVFWQTGKLAEGVWLPDTGVAPYRGRG

SEQ ID NO: 50754 - protein, 150 aa, Xanthobacter tagetidis
  REGION 1..150: note = tr|A0A3L6ZYM2|A0A3L6ZYM2_9RHIZ NADPH-dependent 7-cyano-7-deazaguanine reductase OS=Xanthobacter tagetidis; OX = 60216 GN=queF PE=3 SV=1
MTEQPLQLGSQTALPPSPDAAVLDRVPNPHPDTDYVARFTCPEFTSLCPVTGQPDFAHLVIDYVPDRFLVESKSLKLYLAAFRNHGAFHEDCTVAIGKRLAGLLEPRFLRIAGYWYPRGGIPIDVFWQTGTLPKGAWLPETGVAPYRGRG

SEQ ID NO: 50755 - protein, 150 aa, unidentified
  source 1..150: note = Xanthobacteraceae bacterium
  REGION 1..150: note = tr|A0A521W156|A0A521W156_9RHIZ NADPH-dependent 7-cyano-7-deazaguanine reductase OS=Xanthobacteraceae bacterium OX=2021379 GN=queF PE=3 SV=1
MARKPLQLGRPAALPASPARAQLDRVPNPHPETNYLARFTAPEFTTLCPITGQPDFAHLVIDYVPGRWLVESKSLKLYLASFRNHGGFHEDCTISVGQRLATLIKPKWLRIGGYWYPRGGIPIDVFWQTGRLPKDVWVPDQGVSPYRGRG

SEQ ID NO: 50756 - protein, 274 aa, unidentified
  source 1..274: note = Xanthomonadaceae bacterium
  REGION 1..274: note = tr|A0A2M9EGM9|A0A2M9EGM9_9GAMM NADPH-dependent 7-cyano-7-deazaguanine reductase OS=Xanthomonadaceae bacterium NML95-0200 OX=2032577 GN=queF PE=3 SV=1
MNPNRPETSQLGRETAYPDRYDAGLLFPIPRQSARDAIGIAGDALPFIGFDAWNAYELSWLDARGKPRVAVARITVPADSPNLIESKSFKLYLNSFNAERMASQAALAERLCQDLSAAAGAPVSLQFGLPPMAPIAADSHESIDDIEIDIDDYGPPNPAYLSVSDAIVQQALSSQLLKSNCPVTGQPDWATVIIRYHGARIDPAGLLRYLVSFRNHREFHEQCVERIFIEIMQHCRPQQLSVGARYTRRGGLDINPWRATPGYPPPVAQRDLRQ

SEQ ID NO: 50757 - protein, 274 aa, unidentified
  source 1..274: note = Xanthomonadaceae bacterium
  REGION 1..274: note = tr|A0A2M9DYU9|A0A2M9DYU9_9GAMM NADPH-dependent 7-cyano-7-deazaguanine reductase OS=Xanthomonadaceae bacterium NML03-0222 OX=2032581 GN=queF PE=3 SV=1
MNPNRPETSQLGRETAYPDRYDAGLLFPIPRQSARDAIGIAGDALPFIGFDAWNAYELSWLDARGKPRVAVARITVPADSPNLIESKSFKLYLNSFNAERMASQAALAERLCQDLSAAAGAPVSLQFGLPPMALIAAESHESIDDIEIDIDDYGPPNPAYLSISDAIVQQALSSHLLKSNCPVTGQPDWATVIIRYHGARIDPAGLLRYLVSFRNHREFHEQCVERIFIEIMQHCRPQQLSVEARYTRRGGLDINPWRATPGYPPPVAQRDLRQ

SEQ ID NO: 50758 - protein, 277 aa, unidentified
  source 1..277: note = Xanthomonadales bacterium
  REGION 1..277: note = tr|A0A1Q4FGW3|A0A1Q4FGW3_9GAMM NADPH-dependent 7-cyano-7-deazaguanine reductase OS=Xanthomonadales bacterium 63-13 OX=1895867 GN=queF PE=3 SV=1
MNPAAHDSPLGKQVAGSAVHDADLLFPIPRAAGRGAMGLAEPLPFHGVDIWNAWELSWLDRRGKPQVAIGEFRIPASSPNLIESKSFKLYLNSLNQTRFADAEAVLAVLLADLSAAAGMPIEVVLLAVDPPRSAPIRRLDGDCIDDLDIDIDQYGPPQSGFLRVDAAAEPVTEMLVSHLLKSNCPVTGQPDWASVQIRYHGKRIDRAGLLRYLVSYRNHDDFHEQCVERIFRDLLARCAPQQLTVHARYTRRGGLDINPWRSNVDAATADNPRQQRQ

SEQ ID NO: 50759 - protein, 275 aa, unidentified
  source 1..275: note = Xanthomonadales bacterium
  REGION 1..275: note = tr|A0A1Q4FR37|A0A1Q4FR37_9GAMM NADPH-dependent 7-cyano-7-deazaguanine reductase OS=Xanthomonadales bacterium 69-70 OX=1895869 GN=queF PE=3 SV=1
MTSAEHSLLGKSVAYRDEYDASLLFPIPRAGKRAELGLSGALPFHGVDIWNAYELSWLDPRGKPVVALAEFRVPAASPNIIESKSFKLYLNTFAQTRLDGADAVAQRLRTDLSAAAGAAVEVRLQTAAGFAQETLHELDGDCIDGVEVDIDDYDAPRPDYLHGDAAGIVEETLVSHLLKSNCPVTGQPDWASLQIRYRGPRIDRAGLLRYLVSFRRHSDFHEQCVERIWCDLHARCAPHYLAVYARYTRRGGLDINPFRSSEAGEAPGNPRGARQ

SEQ ID NO: 50760 - protein, 272 aa, Xanthomonas albilineans
  REGION 1..272: note = tr|D2UFP8|D2UFP8_XANAP NADPH-dependent 7-cyano-7-deazaguanine reductase OS=Xanthomonas albilineans (strain GPE PC73 / CFBP 7063) OX=380358; GN = queF PE=3 SV=1
MNTPQDSSLGREVTYPEKYDPALLFPIPRAAARTEIGIDAGALPFFGLDRWHAYELSWLDPRGKPCVATATLHVPCTSPSLIESKSLKLYLNSLNAMRFNSAEALRSCIVTDLSARAGADVAMEFGLPPLETVAQGESLDILDIAIDNYGPPHPEFLFAAADEVVEETLTSALLKSNCPVTGQPDWASLYLRYRGGRIDRAGLLRYLVSFREHAGFHEQCVERIFQDIMSRCHPQSLQVEARYTRRGGLDINPWRATPDVVAPLTFLRDPRQ

SEQ ID NO: 50761 - protein, 271 aa, Xanthomonas alfalfae
  REGION 1..271: note = tr|A0A1S1XMJ3|A0A1S1XMJ3_9XANT NADPH-dependent 7-cyano-7-deazaguanine reductase OS=Xanthomonas alfalfae; OX = 366650 GN=queF PE=3 SV=1
MNTPEDSTLGREVAYPSGYDPSLLFPIPRAAGRQAIGLTGELPFIGRDRWHAYELSWLDAQGKPCVATATLHVPCDSPSLIESKSLKLYLNSLNATRFNSAEAVRTRIATDLSTRAGADVAVEFGLPPIDAVGEGESIDALDVSIDDYGPPNAAYLCARAQPAVEEVLTSALLKSNCPVTGQPDWASVTLHYRGAPIDREGLLRYLVSFRDHAEFHEQCVERIFNDVLTQCAPQWLVVEARYTRRGGLDINPLRSSASVPTPLSIFRDLRQ

SEQ ID NO: 50762 - protein, 271 aa, Xanthomonas arboricola
  REGION 1..271: note = tr|A0A2S6ZVA5|A0A2S6ZVA5_9XANT NADPH-dependent 7-cyano-7-deazaguanine reductase OS=Xanthomonas arboricola pv. guizotiae OX=487867 GN=queF PE=3 SV=1
MNTPEDSTLGREVAYPSGYDPSLLFPIPRAAGREAIGLSGALPFIGRDRWHAYELSWLDAHGKPCVATATLHVPHDSPALIESKSLKLYLNSLNATRFNSAEAVRTRIASDLSTRAGADVVVEFGLPPIDAVGEGESIDALDVSIDDYGPPNAAYLAAHAQPVVEEVLTSALLKSNCPVTGQPDWASVTLRYRGAPIDRQGLLRYLVSFRDHAEFHEQCVERIFHDVLLRCAPEWLVVEARYTRRGGLDINPLRSSPSVPTPLSIFRDLRQ

SEQ ID NO: 50763 - protein, 271 aa, Xanthomonas arboricola
  REGION 1..271: note = tr|A0A2S7BI30|A0A2S7BI30_9XANT NADPH-dependent 7-cyano-7-deazaguanine reductase OS=Xanthomonas arboricola; OX = 56448 GN=queF PE=3 SV=1
MNTPEDSTLGREVAYPSGYDPSLLFPIPRAAGREAIGLTGALPFIGRDRWHAYELSWLDAQGKPCVATATLHVPSESPSLIESKSLKLYLNSLNATRFNSAEAVRTRIASDLSTRAGADVAVEFGLPPIDAVGEGESIDALDVSIDDYGPPNAAYLTAHAQPVVEEVLTSALLKSNCPVTGQPDWASVTLRYRGAPIDREGLLRYLVSFRDHAEFHEQCVERIFHDVLLRCAPEWLVVEARYTRRGGLDINPLRSSPSVPTPLSIFRDLRQ

SEQ ID NO: 50764 - protein, 271 aa, Xanthomonas axonopodis
  REGION 1..271: note = sp|Q8PFX6|QUEF_XANAC NADPH-dependent 7-cyano-7-deazaguanine reductase OS=Xanthomonas axonopodis pv. citri (strain 306) OX=190486 GN=queF PE=3 SV=1
MNTPEDSTLGREVAYPSGYDPSLLFPIPRAAGRQAIGLTGDLPFIGRDRWHAYELSWLDAQGKPCVATATLHVPCDSPSLIESKSLKLYLNSLNATRFNSAEAVRTRIATDLSTRAGADVAVEFGLPPIDAVGEGESIDALDLSIDDYGPPNAAYLCAHAQPVVEEVLTSALLKSNCPVTGQPDWASVTLRYRGAPIDREGLLRYLVSFRDHAEFHEQCVERIFNDVLTQCAPQWLVVEARYTRRGGLDINPLRSSASVPTPLSIFRDLRQ

SEQ ID NO: 50765 - protein, 271 aa, Xanthomonas axonopodis; identical to SEQ ID NO: 50764
  REGION 1..271: note = tr|M4UFV8|M4UFV8_9XANT NADPH-dependent 7-cyano-7-deazaguanine reductase OS=Xanthomonas axonopodis Xac29-1 OX=1304892 GN=queF PE=3 SV=1

SEQ ID NO: 50766 - protein, 271 aa, Xanthomonas bromi
  REGION 1..271: note = tr|A0A1C3NM99|A0A1C3NM99_9XANT NADPH-dependent 7-cyano-7-deazaguanine reductase OS=Xanthomonas bromi; OX = 56449 GN=queF PE=3 SV=1
MNTPEDSTLGREVAYPSGYDPSLLFPIPRAAGREAIGLSGVLPFIGRDRWHAYELSWLDAQGKPCVATATLHVPCESPSLIESKSLKLYLNSLNATRFNSAEAVRTRIATDLSTRAGTDVSVEFGLPPIDVVGEGESIDTLDVSIDDYGPPNAAYLSAHAQPVVEEVLTSALLKSNCPVTGQPDWASVTLRYRGAPIDREGLLRYLVSFRDHAEFHEQCVERMFNDVLTHCAPEWLVVEARYTRRGGLDINPLRRSPSVPTPLSIFRDLRQ

SEQ ID NO: 50767 - protein, 271 aa, Xanthomonas campestris
  REGION 1..271: note = sp|Q8P4C5|QUEF_XANCP NADPH-dependent 7-cyano-7-deazaguanine reductase OS=Xanthomonas campestris pv. campestris (strain ATCC 33913 / DSM 3586 / NCPPB 528 / LMG 568 /P 25) OX=190485 GN=queF PE=3 SV=1
MNTPEDSSLGREVAYPSGYDPSLLFPIPRAAGRAAIGLRGALPFVGRDRWHAYELSWLDAHGKPCVATATLHVPCESPALIESKSLKLYLNSLNATRFNSAEAVRARIATDLSTRAGADVSVEFGLPPIDAVGEGESIDALDIAIDDYGPPKADYLATHAGTVVEEVLASALLKSNCPVTGQPDWASVTLRYRGAPIDREGLLRYLVSFRDHADFHEQCVERIFQDLLVRCAPQWLVVEARYTRRGGLDINPVRTSPQMPTPLSIFRDLRQ

SEQ ID NO: 50768 - protein, 271 aa, Xanthomonas campestris
  REGION 1..271: note = sp|B0RWU6|QUEF_XANCB NADPH-dependent 7-cyano-7-deazaguanine reductase OS=Xanthomonas campestris pv. campestris (strain B100) OX=509169 GN=queF PE=3 SV=1
MNTPEDSSLGREVAYPSGYDPSLLFPIPRAAGRAAVGLSGALPFVGRDRWHAYELSWLDAHGKPCVATATLHVPCESPALIESKSLKLYLNSLNATRFNSAEAVRARIATDLSTRAGADVSVEFGLPPIDAVGEGESIDALDIAIDDYGPPKADYLATHAGTVVEEVLASALLKSNCPVTGQPDWASVTLRYRGAPIDREGLLRYLVSFRDHADFHEQCVERIFQDLLVRCAPQWLVVEARYTRRGGLDINPVRTSPQMPTPLSIFRDLRQ

SEQ ID NO: 50769 - protein, 271 aa, unidentified
  source 1..271: note = Xanthomonas cannabis
  REGION 1..271: note = tr|A0A0B2CRR4|A0A0B2CRR4_9XANT NADPH-dependent 7-cyano-7-deazaguanine reductase OS=Xanthomonas cannabis pv. cannabis OX=1885894 GN=queF PE=3 SV=1
MNTPEDSTLGREVAYPSGYDPSLLFPIPRAAGRQAIGLTGALPFIGRDRWHAYELSWLDAQGKPCVATATVHVPCDSPSLIESKSLKLYLNSLNATRFNSAEAVRTRIATDLSTRAGADVSVEFGLPPIDAVGEGESIDTLDVSIDDYGPPNADYLRAHAGAAVDEVLTSALLKSNCPVTGQPDWASVTLRYRGAPIDREGLLRYLVSFRDHAEFHEQCVERIFNDVLIRCAPEWLVVEARYTRRGGLDISPLRSSPSVPTPLSIFRDLRQ

SEQ ID NO: 50770 - protein, 271 aa, Xanthomonas citri
  REGION 1..271: note = tr|A0A2D2UGZ4|A0A2D2UGZ4_XANCI NADPH-dependent 7-cyano-7-deazaguanine reductase OS=Xanthomonas citri pv. phaseoli var. fuscans OX=473423 GN=queF PE=3 SV=1
MNTPEDSTLGREVAYPSGYDPSLLFPIPRAAGREAIGLTGELPFIGRDRWHAYELSWLDAQGKPCVATATLHVPCDSPSLIESKSLKLYLNSLNATRFNSAEAVRTRIATDLSTRAGADVAVEFGLPPIDAVGEGESIDALDVSIDDYGPPNAAYLCAHAQPVVEEVLTSALLKSNCPVTGQPDWASVTLRYRGAPIDREGLLRYLVSFRDHAEFHEQCVERIFNDVLTQCAPQWLVVEARYTRRGGLDINPLRSSASVPTPLSIFRDLRQ

SEQ ID NO: 50771 - protein, 271 aa, Xanthomonas citri; identical to SEQ ID NO: 50770
  REGION 1..271: note = tr|A0A220WCY4|A0A220WCY4_XANCI NADPH-dependent 7-cyano-7-deazaguanine reductase OS=Xanthomonas citri pv. vignicola OX=473426 GN=queF PE=3 SV=1

SEQ ID NO: 50772 - protein, 271 aa, Xanthomonas codiaei
  REGION 1..271: note = tr|A0A2S7CJ47|A0A2S7CJ47_9XANT NADPH-dependent 7-cyano-7-deazaguanine reductase OS=Xanthomonas codiaei; OX = 56463 GN=queF PE=3 SV=1
MNTPEDSTLGREVAYPSGYDPSLLFPIPRAAGREAIGLTGALPFIGRDRWHAYELSWLDAQGKPCVATATLHVPCDSPSLIESKSLKLYLNSLNATRFNSAEAVRTRIATDLSTRAGADVVVEFGLPPIDAVGEGESIDALDVSIDDYGPPNAAYLHALAQPAVEEVLTSALLKSNCPVTGQPDWASVSVRYRGAPIDREGLLRYLVSFRDHAEFHEQCVERIFNDVMQRCAPEWLVVEARYTRRGGLDINPLRSSPGLPTPLSIFRDLRQ

SEQ ID NO: 50773 - protein, 271 aa, Xanthomonas cucurbitae
  REGION 1..271: note = tr|A0A2S7DQB9|A0A2S7DQB9_9XANT NADPH-dependent 7-cyano-7-deazaguanine reductase OS=Xanthomonas cucurbitae; OX = 56453 GN=queF PE=3 SV=1
MNTPEESTLGREVAYPSGYDLSLLFPIPRAAGRAAIGLAGALPFIGRDRWHAYELSWLDAHGKPCVATATLHVPCDSPSLIESKSLKLYLNSLNATRFNSAEAVRTRIATDLSTRAGADVVVEFGLPPIDAVGEGESIDALDISIDDYGPPNAAYLHAHAGAAVEEVLTSALLKSNCPVTGQPDWASLSLRYRGAPIDREGLLRYLVSFRDHAEFHEQCVERIFNDLLQRCAPEWLVVEARYTRRGGLDINPLRSSPGVPLPLSIFRDLRQ

SEQ ID NO: 50774 - protein, 271 aa, Xanthomonas cynarae
  REGION 1..271: note = tr|A0A2S7BTH2|A0A2S7BTH2_9XANT NADPH-dependent 7-cyano-7-deazaguanine reductase OS=Xanthomonas cynarae; OX = 109214 GN=queF PE=3 SV=1
MNTPEDSSLGREVAYPSGYDPSLLFPIPRAAGREAIGLTGALPFIGRDRWHAYELGWLDAQGKPCVATATLHVPSDSPSLIESKSLKLYLNSLNATRFNSAEAVRTRIASDLSTRAGADVAVEFGLPPIDAVGEGESIDALDVSIDDYGPPNVAYLSAHAQPIVEEVLTSALLKSNCPVTGQPDWASVTLRYRGAPIDREGLLRYLVSFRDHAEFHEQCVERIFHDVLIRCAPEWLVVEARYTRRGGLDINPLRSSPSVPTPLSIFRDLRQ

SEQ ID NO: 50775 - protein, 271 aa, Xanthomonas dyei
  REGION 1..271: note = tr|A0A2S7C336|A0A2S7C336_9XANT NADPH-dependent 7-cyano-7-deazaguanine reductase OS=Xanthomonas dyei; OX = 743699 GN=queF PE=3 SV=1
MNTPEESTLGREVAYPSGYDPSLLFPIPRAAGREAIGLTGALPFIGRDRWHAYELSWLDAQGKPCVATATLHVPFDSPSLIESKSFKLYLNSLNATRFNSAEAVRTRIVTDLSTRAGADVSVEFGLPPIDAVGEGESIDTLDVSIDDYGPPNAAYLRAQTAAAVEEVLTSALLKSNCPVTGQPDWASVTLRYRGAPIDREGLLRYLVSFRDHAEFHEQCVERIFNDVLTRCAPEWLVVEARYTRRGGLDINPLRSSPSVPTPLSIFRDLRQ

SEQ ID NO: 50776 - protein, 271 aa, Xanthomonas euvesicatoria
  REGION 1..271: note = tr|A0A4U0T333|A0A4U0T333_XANEU NADPH-dependent 7-cyano-7-deazaguanine reductase OS=Xanthomonas euvesicatoria pv. citrumelonis OX=189396 GN=queF PE=3 SV=1
MNTPEDSTLGREVAYPSGYDPSLLFPIPRAAGRQAIGLTGDLPFIGRDRWHAYELSWLDAQGKPCVATATLHVPCDSPSLIESKSLKLYLNSLNATRFNSAEAVRTRIATDLSTRAGADVAVEFGLPPIDAVGEGESIDALDVSIDDYGPPNAAYLCARAQPAVEEVLTSALLKSNCPVTGQPDWASVTLRYRGAPIDREGLLRYLVSFRDHAEFHEQCVERIFNDVLTQCAPQWLVVEARYTRRGGLDINPLRSSASVPTPLSIFRDLRQ

SEQ ID NO: 50777 - protein, 271 aa, Xanthomonas euvesicatoria; identical to SEQ ID NO: 50761
  REGION 1..271: note = tr|A0A2S7E9S9|A0A2S7E9S9_XANEU NADPH-dependent 7-cyano-7-deazaguanine reductase OS=Xanthomonas euvesicatoria pv. citrumelonis OX=189396 GN=queF PE=3 SV=1

SEQ ID NO: 50778 - protein, 271 aa, unidentified
  source 1..271: note = Xanthomonas floridensis
  REGION 1..271: note = tr|A0A1A9MD86|A0A1A9MD86_9XANT NADPH-dependent 7-cyano-7-deazaguanine reductase OS=Xanthomonas floridensis OX=1843580 GN=queF PE=3 SV=1
MNTPEDSTLGREVAYPSGYDPSLLFPIPRAAGREAIGLTGALPFIGRDRWHAYELSWLDAQGKPCVATATLHVPCDSPSLIESKSLKLYLNSLNATRFNSAEAVRTRIATDLSTRAGADVAVEFGLPPIDAVGEGESIDALDISIDDYGPPNAAYLSAHAQPVVEEVLTSALLKSNCPVTGQPDWASVTLRYRGAPIDREGLLRYLVSFRDHAEFHEQCVERIFNDVMLRCAPEWLVVEARYTRRGGLDINPLRSSPSVPMPLSIFRDLRQ

SEQ ID NO: 50779 - protein, 271 aa, Xanthomonas fragariae
  REGION 1..271: note = tr|A0A1Y6H516|A0A1Y6H516_9XANT NADPH-dependent 7-cyano-7-deazaguanine reductase OS=Xanthomonas fragariae; OX = 48664 GN=queF PE=3 SV=1
MNTPEDSTLGRETAYPSGYDPSLLFPIPRAAGREAIGLTGALPFIGCDRWHAYELSWLNAHGKPCVATATLHVPSDSPSLIESKSLKLYLNSLNATRFTSAEAVRTRIANDLSTRAGADVSVDFGLPPVDAVGEGESIDTLDVSIDDYGPPNAAYLLAHAQATVEEVLTSALLKSNCPVTGQPDWASVTLRYRGAPIHRDGLLRYLVSFRNHAEFHEQCVERIFNDVLTRCAPEWLVVEARYTRRGGLDINPLRSSPSVPAPLSIFRDLRQ

SEQ ID NO: 50780 - protein, 271 aa, Xanthomonas gardneri; identical to SEQ ID NO: 50774
  REGION 1..271: note = tr|F0CD21|F0CD21_9XANT NADPH-dependent 7-cyano-7-deazaguanine reductase OS=Xanthomonas gardneri ATCC 19865 OX=925777 GN=queF PE=3 SV=1

SEQ ID NO: 50781 - protein, 271 aa, Xanthomonas gardneri; identical to SEQ ID NO: 50774
  REGION 1..271: note = tr|A0A0G8LE13|A0A0G8LE13_9XANT NADPH-dependent 7-cyano-7-deazaguanine reductase OS=Xanthomonas gardneri; OX = 90270 GN=queF PE=3 SV=1

SEQ ID NO: 50782 - protein, 271 aa, Xanthomonas hortorum
  REGION 1..271: note = tr|V7ZAP4|V7ZAP4_9XANT NADPH-dependent 7-cyano-7-deazaguanine reductase OS=Xanthomonas hortorum pv. carotae str. M081 OX=863365 GN=yqcD PE=3 SV=1
MNTPEDSSLGREVAYPSGYDPSLLFPIPRAAGREAIGLTGALPFIGRDRWHAYELGWLDAQGKPCVATATLHVPSDSPSLIESKSLKLYLNSLNATRFNSAEAVRTRIASDLSTRAGADVAVEFGLPPIDAVGEGESIDALDVSIDDYGPPNAAYLSAHAQPIVEEVLTSALLKSNCPVTGQPDWASVTLRYRGAPIDREGLLRYLVSFRDHAEFHEQCVERIFHDVLIRCAPEWLVVEARYTRRGGLDINPLRSSPSVPTPLSIFRDLRQ

SEQ ID NO: 50783 - protein, 271 aa, Xanthomonas hortorum; identical to SEQ ID NO: 50782
  REGION 1..271: note = tr|A0A2S7E4Q1|A0A2S7E4Q1_9XANT NADPH-dependent 7-cyano-7-deazaguanine reductase OS=Xanthomonas hortorum pv. hederae OX=453603 GN=queF PE=3 SV=1

SEQ ID NO: 50784 - protein, 272 aa, unidentified
  source 1..272: note = Xanthomonas hyacinthi
  REGION 1..272: note = tr|A0A2S7EVY6|A0A2S7EVY6_9XANT NADPH-dependent 7-cyano-7-deazaguanine reductase OS=Xanthomonas hyacinthi; OX = 56455 GN=queF PE=3 SV=1
MNTPQDSSLGREVAYPSQYDPALLFPIPRAGGRAEIGLDAAPLPFFGLDRWHAYELSWLDAHGKPCVATATLQVPCTSPQLIESKSLKLYLNALNAMRFNSAEAVRACIVTDLSARAGADVTMEFGLPPVDPLGEGDSLDALDIAIDCYGPPRPQFLLAAADDIVEETLSSALLKSNCPVTGQPDWATLCVRYRGGRIDREGLLRYLISFREHAGFHEQCVEQVFHDLLTRCRPQSLQVEARYTRRGGLDINPWRATPDVAEPIAFHRDPRQ

SEQ ID NO: 50785 - protein, 271 aa, unidentified
  source 1..271: note = Xanthomonas manihotis
  REGION 1..271: note = tr|A0A0W7XLD8|A0A0W7XLD8_XANMN NADPH-dependent 7-cyano-7-deazaguanine reductase OS=Xanthomonas manihotis; OX = 43353 GN=queF PE=3 SV=1
MNTPEDSTLGREVAYPSGYDPSLLFPIPRAAGREAIGLVGELPFIGRDRWHAYELSWLDAQGKPCVATATLHVPCDSPSLIESKSLKLYLNSLNATRFNSAEAVRTRIATDLSTRAGADVAVEFGLPPIDAVGEGESIDTLDVSIDDYGPPNAAYLCALAQPVVEEVLTSALLKSNCPVTGQPDWASVTLRYRGAPIDREGLLRYLVSFRDHAEFHEQCVERIFNDVLTQCAPQWLVVEARYTRRGGLDINPLRSSASVPMPLSIFRDLRQ

SEQ ID NO: 50786 - protein, 271 aa, Xanthomonas melonis
  REGION 1..271: note = tr|A0A2S7DMP0|A0A2S7DMP0_9XANT NADPH-dependent 7-cyano-7-deazaguanine reductase OS=Xanthomonas melonis; OX = 56456 GN=queF PE=3 SV=1
MNTPADSTLGREVAYPSGYDPSLLFPIPRAAGRDAIGLAGALPFIGRDRWHAYELSWLDAQGKPCVATATLHVPCDSPSLIESKSLKLYLNSLNATRFNSAEAVRTRIATDLSTRAGADVTVEFGLPPIDTVGEGESIDALDVSIDDYGPPNAGYLRAHAQDVVEQVLTSALLKSNCPVTGQPDWASVTLRYRGAPIDREGLLRYLVSFRDHAEFHEQCVERIFNDVMQRCAPEWLVVEARYTRRGGLDINPLRSSPTVPVPLSIFRDLRQ

SEQ ID NO: 50787 - protein, 271 aa, unidentified
  source 1..271: note = Xanthomonas nasturtii
  REGION 1..271: note = tr|A0A3E1KLL4|A0A3E1KLL4_9XANT NADPH-dependent 7-cyano-7-deazaguanine reductase OS=Xanthomonas nasturtii; OX = 1843581 GN=queF PE=3 SV=1
MNTPEDSTLGREIAYPSGYDPSLLFPIPRAAGREAIGLTDALPFIGRDRWHAYELSWLDAQGKPCVATATVHVPCESPSLIESKSLKLYLNSLNATRFNSAEAVRTRIATDLSTRAGADVSVEFGLPPVDAVGEGESIDTLDVSIDDYGPPNAAYLSAHAQPVVEEVLTSALLKSNCPVTGQPDWASVTLRYRGAPIDREGLLRYLVSFRDHAEFHEQCVERVFNDVLIRCAPEWLVVEARYTRRGGLDINPLRSSPNIPTPLSIFRDLRQ

SEQ ID NO: 50788 - protein, 271 aa, Xanthomonas oryzae
  REGION 1..271: note = sp|B2SKC6|QUEF_XANOP NADPH-dependent 7-cyano-7-deazaguanine reductase OS=Xanthomonas oryzae pv. oryzae (strain PXO99A) OX=360094 GN=queF PE=3 SV=1
MNTPEDSTLGREVAYPSGYDPSLLFPIPRAAGREAIGLTGALPFTGRDRWHAYELSWLDAHGKPCVATATLHVPHDSPALIESKSLKLYLNSLNATRFNSAEAVRTRIVTDLSTRAGADVSVEFGLPPIDGVGDGESIDALDVSIDDYGPPNAAYLTAQAQPVVEEVLTSALLKSNCPVTGQPDWASVTLHYRGAPIEREGLLRYLVSFRDHAEFHEQCVERIFHDVLLRCAPEWLVVEARYTRRGGLDINPLRSSLSVPAPLSVFRDLRQ

SEQ ID NO: 50789 - protein, 271 aa, Xanthomonas oryzae
  REGION 1..271: note = tr|A0A0C5V507|A0A0C5V507_9XANT NADPH-dependent 7-cyano-7-deazaguanine reductase OS=Xanthomonas oryzae pv. oryzicola OX=129394 GN=queF PE=3 SV=1
MNTPEDSSLGREVAYPSGYDPSLLFPIPRAAGREAIGLTGALPFTGRDRWHAYELSWLDAHGKPCVATATLHVPHDSPALIESKSLKLYLNSLNATRFNSAEAVRTRIVTDLSTRAGADVSVEFGLPPIDAVGDGESIDALDVSIDDYGPPNAAYLTAQAQPMVEEVLTSALLKSNCPVTGQPDWASVTLHYRGAPIEREGLLRYLVSFRDHAEFHEQCVERIFHDVLLRCAPEWLVVEARYTRRGGLDINPLRSSRSVPVPLSVFRDLRQ

SEQ ID NO: 50790 - protein, 271 aa, Xanthomonas perforans
  REGION 1..271: note = tr|A0A0G8Y4W7|A0A0G8Y4W7_9XANT NADPH-dependent 7-cyano-7-deazaguanine reductase OS=Xanthomonas perforans; OX = 442694 GN=queF PE=3 SV=1
MNTPEDSTLGREVAYPSGYDPSLLFPIPRAAGRQAIGLTGELPFIGRDRWHAYELSWLDAQGKPCVATATLHVPCDSPSLIESKSLKLYLNSLNATRFNSAEAVRTRIATDLSTRAGADVAVEFGLPPIDAVGEGESIDALDVSIDDYGPPNAAYLCARAQPAVEEVLTSALLKSNCPVTGQPDWASVTLRYRGAPIDREGLLRYLVSFRDHAEFHEQCVERIFNDVLTQCAPQWLVVEARYTRRGGLDINPLRSSASVPTPLSIFRDLRQ

SEQ ID NO: 50791 - protein, 271 aa, Xanthomonas phaseoli
  REGION 1..271: note = tr|A0A1V9HDW4|A0A1V9HDW4_9XANT NADPH-dependent 7-cyano-7-deazaguanine reductase OS=Xanthomonas phaseoli pv. syngonii LMG 9055 OX=1437878 GN=queF PE=3 SV=1
MNTPEDSTLGREVAYPSGYDPSLLFPIPRAAGREAIGLTGELPFIGRDRWHAYELSWLDAQGKPCVATATLHVPCDSPSLIESKSLKLYLNSLNAIRFNSAEAVRTRIATDLSTRAGADVAVEFGLPPIDAVGEGESIDTLDVSIDDYGPPNAAYLCALAQPVVEEVLTSALLKSNCPVTGQPDWASVTLRYRGAPIDREGLLRYLVSFRDHAEFHEQCVERIFNDVLTQCAPQWLVVEARYTRRGGLDINPLRSSASVPMPLSIFRDLRQ

SEQ ID NO: 50792 - protein, 271 aa, Xanthomonas phaseoli
  REGION 1..271: note = tr|A0A1V9H7H5|A0A1V9H7H5_9XANT NADPH-dependent 7-cyano-7-deazaguanine reductase OS=Xanthomonas phaseoli pv. dieffenbachiae OX=92828 GN=queF PE=3 SV=1
MNTPEDSTLGREVAYPSGYDPSLLFPIPRAAGREAIGLVGELPFIGRDRWHAYELSWLDAQGKPCVATATLHVPCDSPSLIESKSLKLYLNSLNATRFNSAEAVRTRIATDLSTRAGADVAVEFGLPPIDAVGEGESVDTLDVSIDDYGPPNAAYLCALAQPVVEEVLTSALLKSNCPVTGQPDWASVTLRYRGAPIDREGLLRYLVSFRDHAEFHEQCVERIFNDVLTQCAPQWLVVEARYTRRGGLDINPLRSSASVPMPLSIFRDLRQ

SEQ ID NO: 50793 - protein, 271 aa, Xanthomonas pisi
  REGION 1..271: note = tr|A0A2S7D2L3|A0A2S7D2L3_9XANT NADPH-dependent 7-cyano-7-deazaguanine reductase OS=Xanthomonas pisi; OX = 56457 GN=queF PE=3 SV=1
MNTPEESTLGREVAYPSGYDPSLLFPIPRAAGREAIGLTGALPFIGRDRWHAYELSWLDAQGKPCVATATLHVPCESPSLIESKSLKLYLNSLNATRFNSAEAVRTRIATDLSTRAGADVAVEFGLPPIDAVGEGESIDALDVSIDDYGPPNAAYLSAHAQPVVEEVLTSALLKSNCPVTGQPDWASVTLRYRGAPIDREGLLRYLVSFRDHAEFHEQCVERIFSDVLLRCAPEWLVVEARYTRRGGLDINPLRSSPSVPTPLSIFRDLRQ

SEQ ID NO: 50794 - protein, 271 aa, Xanthomonas populi
  REGION 1..271: note = tr|A0A2S7ECE2|A0A2S7ECE2_9XANT NADPH-dependent 7-cyano-7-deazaguanine reductase OS=Xanthomonas populi; OX = 53414 GN=queF PE=3 SV=1
MNTPEDSSLGREVAYPSGYDPSLLFPIPRAAGRAAIGLTGAVPFIGRDRWHAYELGWLDVQGKPCVATATLHVPSDSPSLIESKSLKLYLNSLNATRFNSAEAVRTRIATDLSTRAGADVAVEFGLPPIDAVGEGESIDALDVSIEDYGPPNAAYLSAHAQPIVEEVLTSALLKSNCPVTGQPDWASVTLRYRGAPIDREGLLRYLVSFRDHAEFHEQCVERIFNDVLIRCAPEWLMVEARYTRRGGLDINPLRRSPSLPTPLSIFRDPRQ

SEQ ID NO: 50795 - protein, 271 aa, unidentified
  source 1..271: note = Xanthomonas prunicola
  REGION 1..271: note = tr|A0A2N3RQ41|A0A2N3RQ41_9XANT NADPH-dependent 7-cyano-7-deazaguanine reductase OS=Xanthomonas prunicola; OX = 2053930 GN=queF PE=3 SV=1
MNTPEESTLGREVAYPSGYDPSLLFPIPRAAGREAIGLTGALPFIGRDRWHAYELSWLDAQGKPCVATATLHVPCDSPSLIESKSLKLYLNSLNATRFNSAEAVRTRIATDLSTRAGADVAVEFGLPPIDAVGEGESIDALDVSIDDYGPPNAAYLSAQAQPVVEEVLTSALLKSNCPVTGQPDWASVTLRYRGAPIDREGLLRYLVSFRDHAEFHEQCVERIFNDVLAQCAPEWLVVEARYTRRGGLDINPLRSSPSVPTPLSIFRDLRQ

SEQ ID NO: 50796 - protein, 272 aa, Xanthomonas sacchari
  REGION 1..272: note = tr|A0A2P5Z4Y2|A0A2P5Z4Y2_9XANT NADPH-dependent 7-cyano-7-deazaguanine reductase OS=Xanthomonas sacchari; OX = 56458 GN=queF PE=3 SV=1
MNTPQDSSLGREVAYPSQYDPALLFPIPRAAARTEIGLDPAALPFFGVDRWHAYELSWLDAQGKPCVATATLQVPCASPNLIESKSLKLYLNSLNAMRFNSAEALRSCIVTDLSARAGADVAMEFGLPPMDTLGEGESLDALDIAIDCYGPPRPDFLSAADGEVVEETLTSELLKSNCPVTGQPDWASLHLRYRGGRIDREGLLRYLISFREHAGFHEQCVERIFHDLMTHCRPQSLQVEARYTRRGGLDINPWRATADVAEPLSFLRDLRQ

SEQ ID NO: 50797 - protein, 272 aa, Xanthomonas sacchari
  REGION 1..272: note = tr|A0A5D1AAF9|A0A5D1AAF9_9XANT NADPH-dependent 7-cyano-7-deazaguanine reductase OS=Xanthomonas sacchari; OX = 56458 GN=queF PE=3 SV=1
MNTPQDSSLGREVAYPSQYDPALLFPIPRAAARTEIGLDPAALPFFGVDRWHAYELSWLDAQGKPCVATATLHVPCASPNLIESKSLKLYLNSLNAMRFNSAEALRSCIVTDLSARAGADVAMEFGLPPMDTLGEGESLDALDIAIDCYGPPRPDFLSAADGDVVEETLTSELLKSNCPVTGQPDWASLHLRYRGGRIDREGLLRYLISFREHAGFHEQCVERIFHDLMTRCRPQSLQVEARYTRRGGLDINPWRATADVAEPLSFLRDLRQ

SEQ ID NO: 50798 - protein, 271 aa, Xanthomonas sp.
  REGION 1..271: note = tr|A0A0Q5J2M7|A0A0Q5J2M7_9XANT NADPH-dependent 7-cyano-7-deazaguanine reductase OS=Xanthomonas sp. Leaf148 OX=1736275 GN=queF PE=3 SV=1
MNTPEDSTLGREVAYPSGYDPSLLFPIPRAAGREAIGLTGALPFIGRDRWHAYELSWLDAQGKPCVATATLHVPFDSPSLIESKSLKLYLNSLNATRFNSAEAVRTRIVTDLSTRAGADVSVEFGLPPIDAVGEGESIDTLDVSIDDYGPPNAAYLRAQTAAAVEEMLTSALLKSNCPVTGQPDWASVTLRYRGAPIDREGLLRYLVSFRDHAEFHEQCVERIFNDVLTRCAPEWLVVEARYTRRGGLDINPLRSSPSVPTPLSIFRDLRQ

SEQ ID NO: 50799 - protein, 272 aa, Xanthomonas sp.
  REGION 1..272: note = tr|A0A0J6FZ58|A0A0J6FZ58_9XANT NADPH-dependent 7-cyano-7-deazaguanine reductase OS=Xanthomonas sp. NCPPB 1128 OX=1775876 GN=queF PE=3 SV=1
MNTPQDSSLGREVAYPSQYDPALLFPIPRAAARTEIGLDPAALPFFGLDRWHAYELSWLDAQGKPCVATATLQVPCASPNLIESKSLKLYLNSLNAMRFNSAEALRSCIVTDLSARAGADVAMEFGLPPMDTVGEGESLDALDIAIDCYGPPRPEFLSAADGDVVEETLTSALLKSNCPVTGQPDWASLHLRYRGGRIDREGLLRYLISFREHAGFHEQCVERIFHDLMTRCRPQSLQVEARYTRRGGLDINPWRATADVAEPLSFLRDVRQ

SEQ ID NO: 50800 - protein, 272 aa, Xanthomonas theicola
  REGION 1..272: note = tr|A0A2S6ZD32|A0A2S6ZD32_9XANT NADPH-dependent 7-cyano-7-deazaguanine reductase OS=Xanthomonas theicola; OX = 56464 GN=queF PE=3 SV=1
MNTPQDSSLGREVAYPSHYDPALLFPIPRAGGRAEIGLDAAPLPFYGLDRWHAYELGWLDARGKPCIATATLLVPCSSPQLIESKSLKLYLNSLNAMRFNSAEALRTCIVTDLSARTGADATMEFGLPPVDPLGEGDSLDALDIAIDCYGPPRAQFLLAAAEDIVEETLRSELLKSNCPVTGQPDWATLYLRYRGGRIDREGLLRYLVSFREHAGFHEQCVERIFHDLMTRCRPQSLQVEARYTRRGGLDINPWRATPDVAGPIAFHRDPRQ

SEQ ID NO: 50801 - protein, 272 aa, Xanthomonas translucens
  REGION 1..272: note = tr|A0A1M4IRW0|A0A1M4IRW0_XANCT NADPH-dependent 7-cyano-7-deazaguanine reductase OS=Xanthomonas translucens pv. graminis OX=134874 GN=queF PE=3 SV=1
MNTPQDSSLGREVAYPAQYDPALLFPIPRAGGRAEIGLETAPLPFFGLDRWHAYELGWLDAQGKPCVATATLQVPCTSPQLIESKSLKLYLNSLNAMRFNSAEAVRACIVTDLSARAGADVRMEFGLPPVDPLGEGDSLDVLDIAIDCYGPPRPQFLLAAADDIVEETLSSALLKSNCPVTGQPDWATLCVCYRGGRIDREGLLRYLISFREHAGFHEQCVEQIFHDLLIRCRPQSLQVEARYTRRGGLDINPWRATPDVAEPIAFHRDPRQ

SEQ ID NO: 50802 - protein, 272 aa, Xanthomonas translucens
  REGION 1..272: note = tr|A0A514EHL8|A0A514EHL8_XANCT NADPH-dependent 7-cyano-7-deazaguanine reductase OS=Xanthomonas translucens pv. cerealis OX=152263 GN=queF PE=3 SV=1
MNTPQDSSLGREVAYPSQYDPALLFPIPRAGGRAEIGLDAAPLPFFGLDRWHAYELGWLDAQGKPCVATATLQVPCTSPQLIESKSLKLYLNSLNAMRFNSAEAVRACIVSDLSARAGADVTMEFGLPPVDPLGEGDSLDVLDIAIDCYGPPRPQFLFAAADDIVEETLSSALLKSNCPVTGQPDWATLCVRYRGGRIDREGLLRYLISFREHAGFHEQCLEQIFHDLLIRCRPQSLQVEARYTRRGGLDINPWRATPDMAEPIAFHRDPRQ

SEQ ID NO: 50803 - protein, 271 aa, Xanthomonas vasicola
  REGION 1..271: note = tr|A0A2P5ZND1|A0A2P5ZND1_XANVA NADPH-dependent 7-cyano-7-deazaguanine reductase OS=Xanthomonas vasicola; OX = 56459 GN=queF PE=3 SV=1
MNTPEDSTLGREVAYPSGYDPSLLFPIPRAAGREAIGLSGDLPFIGRDRWHAYELSWLDAQGKPCVATATLHVPCDSPALIESKSLKLYLNSLNATRFNSAEAVRTRIATDLSTRAGADVAVEFGLPPIDAVGEGESIDALDVSIDDYGPPNAAYLAAHAQPVVEEVLTSALLKSNCPVTGQPDWASVTLRYRGTPIDREGLLRYLVSFRDHAEFHEQCVERIFNDVLTQCAPEWLVVEARYTRRGGLDINPLRSSPSVPTPLSFFRDLRQ

SEQ ID NO: 50804 - protein, 271 aa, Xanthomonas vesicatoria
  REGION 1..271: note = tr|F0B7H9|F0B7H9_9XANT NADPH-dependent 7-cyano-7-deazaguanine reductase OS=Xanthomonas vesicatoria ATCC 35937 OX=925775 GN=queF PE=3 SV=1
MNTPEDSALGREVAYPSGYDPSLLFPIPRAAGREAIGLTGALPFIGRDRWHAYELSWLDAQGKPCVATATLHVPCDSPSLIESKSLKLYLNSLNATRFNSAEAVRTRIATDLSTRAGADVSVEFGLPPIDTVGEGESIDTLDITIDDYGPPNAAYLRAQAGSAVEEVLTSALLKSNCPVTGQPDWASVTLRYRGTRIDREGLLRYLVSFRDHAEFHEQCVERIFNDVLTRCAPEWLVVEARYTRRGGLDINPLRSSPSVPMPLSIFRDLRQ

SEQ ID NO: 50805 - protein, 271 aa, Xanthomonas vesicatoria
  REGION 1..271: note = tr|A0A1L5QSM3|A0A1L5QSM3_9XANT NADPH-dependent 7-cyano-7-deazaguanine reductase OS=Xanthomonas vesicatoria OX=56460 GN=queF PE=3 SV=1
MNTPEDSALGREVAYPSGYDPSLLFPIPRAAGREAIGLTGSLPFIGRDRWHAYELSWLDAQGKPCVATATLHVPCDSPSLIESKSLKLYLNSLNATRFNSAEAVRTRIATDLSTRAGADVSVEFGLPPIDTVGEGESIDTLDITIDDYGPPNAAYLRAQAGSAVEEVLTSALLKSNCPVTGQPDWASVTLRYRGTRIDREGLLRYLVSFRDHAEFHEQCVERIFNDVLTRCAPEWLVVEARYTRRGGLDINPLRSSPSVPMPLSIFRDLRQ

SEQ ID NO: 50806 - protein, 136 aa, Xenococcus sp.
  REGION 1..136: note = tr|L8M241|L8M241_9CYAN NADPH-dependent 7-cyano-7-deazaguanine reductase OS=Xenococcus sp. PCC 7305 OX=102125 GN=queF PE=3 SV=1
MSNATENDITKEVKYGERAIAEGELITFPNPRMGRRYKVDISLPEFTCKCPFSGYPDFATIKVTYYPDEKVVELKALKLYINSYRDRYISHEEVINQILDDFVAACDPLEANIVGDFSPRGNVHTVVEVSHVKTGN

SEQ ID NO: 50807 - protein, 277 aa, Xenophilus sp.
  REGION 1..277: note = tr|A0A254VLA6|A0A254VLA6_9BURK NADPH-dependent 7-cyano-7-deazaguanine reductase OS=Xenophilus sp. AP218F; OX = 2014876 GN=queF PE=3 SV=1
MNHLTPEHSPLGKTVSYQDQYDPSLLFPIARQTKRQEIGVDEAALPFSGVDIWTGFELSWLNGRGKPQVGIATFRIPATSPRLIESKSFKLYLNSYNQTRMESPDALAAQLARDLSAAAGAEVAVSILLPPAFAAERVRELDGEYIDDLDIEVDRYAPCPDILRADPAAIVSETLCSNLLKSNCLVTGQPDWGSVSIRYTGPKMDREALLRYLIGFRQHNEFHEQCVERIFVDLLRACAPAQLTVYARYTRRGGLDINPWRSNFETPPQDNVRAARQ

SEQ ID NO: 50808 - protein, 281 aa, Xenorhabdus beddingii
  REGION 1..281: note = tr|A0A1Y2SLV3|A0A1Y2SLV3_9GAMM NADPH-dependent 7-cyano-7-deazaguanine reductase OS=Xenorhabdus beddingii; OX = 40578 GN=queF PE=3 SV=1
MPLYQDSQALSQLTLGKPTPYRDHYDPTLLQAVPRSMNREPLGLYPENLPFHGADIWTLYELSWLNARGVPQVAIGHVSLDAASENLIESKSFKLYLNSFNQTRFADWETVQKTLQKDLSACAKGDIEVVLQPLHDFSQQPIAEFDGKCIDNQDIEIDDYQFNRDYLNHAATGPVIEETLVSHLLKSNCLITHQPDWGSVMIRYKGPGIDQEKLLRYLVSFRHHNEFHEQCVERIFNDLMTLCAPEKLSVYARYTRRGGLDINPWRSNEPFVPTIGRLARQ

SEQ ID NO: 50809 - protein, 278 aa, Xenorhabdus beddingii
  REGION 1..278: note = tr|A0A1Y2SP83|A0A1Y2SP83_9GAMM NADPH-dependent 7-cyano-7-deazaguanine reductase OS=Xenorhabdus beddingii; OX = 40578 GN=queF PE=3 SV=1
MDIKESLTLLGTKTDYIQSYSPELLETLPRSLGRNDIGINSDSLPFQGFDLWTAWEISWLNGKGKPVVAIGEFIIPATSPGLIESKSFKLYLNSFNQTKFETTDDVAHAMKKDLSLIAGQSVDVKLYSHLDGYCHEISQLSGQLLDDLDIEIESYDFDATVLADAASVRNNIVCETLHSNLLKSNCLVTNQPDWGSVIIQYEGAKIDHEKLLRYLISFRTHNEFHEQCVERIYSDIMRYCQPEKLTVFARYTRRGGLDINPFRSNCENTPLTGRLIRQ

SEQ ID NO: 50810 - protein, 281 aa, Xenorhabdus bovienii
  REGION 1..281: note = tr|A0A077NVT1|A0A077NVT1_XENBV NADPH-dependent 7-cyano-7-deazaguanine reductase OS=Xenorhabdus bovienii str. oregonense OX=1398202 GN=queF PE=3 SV=1
MSLYQDNQTLAQLTLGKPTPYRDHYDPTLLQAVPRSMNREPLGLLPDNLPFHGADIWTLYELSWLNSRGVPQVAIGHVSLSAASVNLIESKSFKLYLNSFNQTRFADWDTVQKTLQQDLSVCANGEVNVVLHPLHDFSQQPIAEFEGKCIDNQDIEIDDYQFSRDYLNGAATGSVVDEILVSHLLKSNCLITHQPDWGSVQIRYKGPKIDQEKLLRYLVSFRHHNEFHEQCVERIFNDLIALCAPEKLTVYARYTRRGGLDINPWRSNETFIPETGRLARQ

SEQ ID NO: 50811 - protein, 281 aa, Xenorhabdus bovienii
  REGION 1..281: note = tr|A0A077PRQ6|A0A077PRQ6_XENBV NADPH-dependent 7-cyano-7-deazaguanine reductase OS=Xenorhabdus bovienii str. kraussei Becker Underwood OX=1398204 GN=queF PE=3 SV=1
MSLYQDNQALAQLTLGKPTPYCDHYDPTLLQAVPRSMNREPLGLFPDNLPFHGADIWTMYELSWLNSRGVPQVAIGHVSLSAASVNLVESKSFKLYLNSFNQTRFADWDTVQKTLQQDLSVCANGDVHVVLHPLHDFSQQPIAEFEGKCIDNQDIEIDDYQFSRDYLNDAAAGSVVDEILVSHLLKSNCLITHQPDWGSVQIRYKGPKIDQEKLLRYLVSFRHHNEFHEQCVERIFNDLIALCAPEKLTVYARYTRRGGLDINPWRSNEAFIPETGRLARQ

SEQ ID NO: 50812 - protein, 281 aa, Xenorhabdus budapestensis
  REGION 1..281: note = tr|A0A2D0J3K1|A0A2D0J3K1_XENBU NADPH-dependent 7-cyano-7-deazaguanine reductase OS=Xenorhabdus budapestensis OX=290110 GN=queF PE=3 SV=1
MSLYQNNQTLTELTLGKPTSYCDTYGPSLLQAVPRSMNREPLGLSPDNLPFHGADIWTMYELSWLNSRGVPQVAIGHVSLNATSENLIESKSFKLYLNSFNQTRFTDWETVQKTLQQDLSACAKGDIEVVLYPLHDVNQQPITDFEGKCIDNQDIEINDYEFNRDYLNNAATGPVVEEILVSHLLKSNCLITNQPDWGSVQIRYKGPKIDQEKLLRYLVSFRHHNEFHEQCVERIFNDLIELCGPEKLTVYARYTRRGGLDINPWRSNDTFVPTTGRLARQ

SEQ ID NO: 50813 - protein, 281 aa, Xenorhabdus cabanillasii
  REGION 1..281: note = tr|A0A3D9UCQ2|A0A3D9UCQ2_9GAMM NADPH-dependent 7-cyano-7-deazaguanine reductase OS=Xenorhabdus cabanillasii OX=351673 GN=queF PE=3 SV=1
MSLYQNNQALTELTLGKPTSYCDTYEPSLLQAVPRSMNREPLGLFPDNLPFHGADIWTMYELSWLNSRGVPQVAIGHVSLNAASENLIESKSFKLYLNSFNQTRFTDWETVQKTLQQDLSACAKGDIEVVLHPLHGFNQQPITDFEGKCIDNQDIEIDDYEFNRDYLNNAATGPVVEEILVSHLLKSNCLITNQPDWGSVQIRYKGPKIDQEKLLRYLVSFRHHNEFHEQCVERIFNDLIELCGPEKLTVYARYTRRGGLDINPWRSNDTFVPTTGRLARQ

SEQ ID NO: 50814 - protein, 281 aa, Xenorhabdus cabanillasii
  REGION 1..281: note = tr|W1IKS4|W1IKS4_9GAMM NADPH-dependent 7-cyano-7-deazaguanine reductase OS=Xenorhabdus cabanillasii JM26 OX=1427517 GN=queF PE=3 SV=1
MSLYQNNQALTELTLGKPTSYCDTYEPSLLQAVPRSMNREPLGLFPDNLPFHGADIWTMYELSWLNSRGIPQVAIGHVSLNAASENLIESKSFKLYLNSFNQTRFTDWETVQKTLQQDLSACAKGDIEVVLHPLHGFNQQPITDFEGKCIDNQDIEIDDYEFNRDYLNNAATGPVVEEILVSHLLKSNCLITNQPDWGSVQIRYKGPKIDQEKLLRYLVSFRHHNEFHEQCVERIFNDLIELCGPEKLTVYARYTRRGGLDINPWRSNDTFVPTTGRLARQ

SEQ ID NO: 50815 - protein, 281 aa, Xenorhabdus doucetiae
  REGION 1..281: note = tr|A0A068QYU5|A0A068QYU5_9GAMM NADPH-dependent 7-cyano-7-deazaguanine reductase OS=Xenorhabdus doucetiae; OX = 351671 GN=queF PE=3 SV=1
MSLYQDNQALAQLTLGKPTPYRDNYDPTLLQAVPRSLNREPLGLYPDNLPFHGADIWTMYELSWLNARGVPQVAIGHVSLDAASTNLIESKSFKLYLNSFNQTRFADWETVQKTLQHDLSVCANGKIEVVLHPLHAFSQQPIAEFAGECIDNQDIDIDDYQFNRDYLNQAAIGPVVEETLVSHLLKSNCLITHQPDWGSVMIRYKGAKIDQEKLLRYLVSFRHHNEFHEQCVERIFNDLMALCAPETLTVYARYTRRGGLDINPWRSNEAFVPTTGRLARQ

SEQ ID NO: 50816 - protein, 281 aa, unidentified
  source 1..281: note = Xenorhabdus eapokensis
  REGION 1..281: note = tr|A0A1Q5TPI2|A0A1Q5TPI2_9GAMM NADPH-dependent 7-cyano-7-deazaguanine reductase OS=Xenorhabdus eapokensis; OX = 1873482 GN=queF PE=3 SV=1
MSLYQDNHALSQLTLGKPTPYRDNYDPTLLQAVPRSMNREPLGLFPDSLPFHGADIWTMYELSWLNARGVPQVAIGHVSLDATSENLIESKSFKLYLNSFNQTRFADWETVQKTLQQDLSACANGNIEVALHPLHDFSQQPIGEFAGKCIDNQDIDIDDYQFKRDYLNNAATGPVVEETLVSHLLKSNCLITNQPDWGSVMIRYQGAKIDQEKLLRYLVSFRHHNEFHEQCVERIFNDVMTLCAPEKLTVYARYTRRGGLDINPWRSNEAFIPTTGRLARQ

SEQ ID NO: 50817 - protein, 281 aa, Xenorhabdus ehlersii
  REGION 1..281: note = tr|A0A2D0ILS4|A0A2D0ILS4_9GAMM NADPH-dependent 7-cyano-7-deazaguanine reductase OS=Xenorhabdus ehlersii; OX = 290111 GN=queF PE=3 SV=1
MSLYQDNHALSQLTLGKPTPYRDNYDPTLLQAVPRSMNREPLGLFPDNLPFHGADIWTMYELSWLNARGVPQVAIGHVSLDAASENLIESKSFKLYLNSFNQTRFADWETVQKTLQQDLSACANGNIEVVLHPLHDFSQQPIGEFAGKCIDNQDIDIDDYQFNRDYLNNAATGPVVEETLISHLLKSNCLITNQPDWGSVMIRYQGSKIDQEKLLRYLVSFRHHNEFHEQCVERIFNDLMTLCAPEKLTVYARYTRRGGLDINPWRSNEAFIPTTGRLARQ

SEQ ID NO: 50818 - protein, 281 aa, Xenorhabdus hominickii
  REGION 1..281: note = tr|A0A2G0QGG5|A0A2G0QGG5_9GAMM NADPH-dependent 7-cyano-7-deazaguanine reductase OS=Xenorhabdus hominickii; OX = 351679 GN=queF PE=3 SV=1
MSLYQNDQSLAQLTLGKPTPYSDNYDPTLLQAVPRSMNREPLGLFPDNLPFHGADIWTLYELSWLNSRGVPQVAIGHVSLSAASENLIESKSFKLYLNSFNQTRFADWETVQKTLQQDLSACANGDIDVVLYPLHDFNYQSIAKFEGECIDNQDIEIDDYQFNRDYLNNAATGPIVEEALVSHLLKSNCLITNQPDWGTVQIRYKGPKIDQEKLLRYLVSFRHHNEFHEQCVERIFNDIMVLCAPENLTVYARYTRRGGLDINPWRSNEAFIPPTGRLARQ

SEQ ID NO: 50819 - protein, 281 aa, Xenorhabdus innexi
  REGION 1..281: note = tr|A0A1N6MT76|A0A1N6MT76_9GAMM NADPH-dependent 7-cyano-7-deazaguanine reductase OS=Xenorhabdus innexi; OX = 290109 GN=queF PE=3 SV=1
MSLYQDNQALSQLTLGKPTSYCDTYEPALLQAVPRSMNREPLGLYPDNLPFYGADIWTMYELSWLNSRGVPQVAIGHVSLNAASQNLIESKSFKLYLNSFNQTRFADWETVQQTLQRDLSACANGDIEVVLYPLHDFNQQPIADFEGKCIDNQDIEIDDYQFSRDYLNEAATGPVVDEVLVSHLLKSNCLITNQPDWGSVQIRYKGPKIDQEKLLRYLVSFRHHNEFHEQCVERIFNDLMQLCAPEKLTVYARYTRRGGLDINPWRSNDSFVPPTGRLARQ

SEQ ID NO: 50820 - protein, 278 aa, Xenorhabdus innexi
  REGION 1..278: note = tr|A0A1N6N0R5|A0A1N6N0R5_9GAMM NADPH-dependent 7-cyano-7-deazaguanine reductase OS=Xenorhabdus innexi; OX = 290109 GN=queF PE=3 SV=1
MDIKKSITHLGTKTDYIQNYSPALLETLPRSLAREVINIRCEALPFQGFDLWTAWELSWLNSKGKPVVAIGEFTIPATSPGLIESKSFKLYLNSFNQTQFETTDEVIKAMETDLSRTAGQPVAVKLYPHLNGYTHEISQLAGQSLDDLDIEIDGYDFDAAILANAVTTETDKVSETVYSNLLKSNCLVTNQPDWGSVVIRYEGAKINHEKLLRYLISFRTHNEFHEQCVERIYNDIMQYCRPKKLTVFARYTRRGGLDINPFRSNYESAPLTGRLIRQ

SEQ ID NO: 50821 - protein, 281 aa, unidentified
  source 1..281: note = Xenorhabdus ishibashii
  REGION 1..281: note = tr|A0A2D0KES6|A0A2D0KES6_9GAMM NADPH-dependent 7-cyano-7-deazaguanine reductase OS=Xenorhabdus ishibashii; OX = 1034471 GN=queF PE=3 SV=1
MSLYQDNHALSQLTLGKSTPYRDNYDPTLLQAVPRSMNREPLGLFPDNLPFHGADIWTMYELSWLNARGVPQVAIGHVSLDAASENLIESKSFKLYLNSFNQTRFADWETVQKTLQHDLSACANGNIEVVLHPLHDFSQQPIAEFAGKCIDNQDIEISDYQFNRDYLNNAATGPVVEETLVSHLLKSNCLITHQPDWGSVMIRYQGSKIDQEKLLRYLVSFRHHNEFHEQCVERIFNDLMTLCAPEKLTVYARYTRRGGLDINPWRSNEVFIPTTGRLARQ

SEQ ID NO: 50822 - protein, 281 aa, Xenorhabdus japonica
  REGION 1..281: note = tr|A0A1I4Z5W3|A0A1I4Z5W3_9GAMM NADPH-dependent 7-cyano-7-deazaguanine reductase OS=Xenorhabdus japonica; OX = 53341 GN=queF PE=3 SV=1
MSLYQDNQALSQLTLGKPTPYRDNYDPTLLQAVPRNMNREPLELFPDNLPFHGADIWTMYELSWLNARGVPQVAIGHVSLDAASENLIESKSFKLYLNSFNQTRFADWETVQKNLQQDLSACANGNIEVVLHPLHDFNQQPIAEFEGKCIDNQDIEIDDYQFSRDYLNNAAIGPVVEETLISHLLKSNCLITHQPDWGSVMIRYKGAKIDQEKLLRYLVSFRHHNEFHEQCVERIFNDLMTLCAPEKLTVYARYTRRGGLDINPWRSNEAFVPTTGRLSRQ

SEQ ID NO: 50823 - protein, 86 aa, Xenorhabdus japonica
  REGION 1..86: note = tr|A0A1I5DLW1|A0A1I5DLW1_9GAMM 7-cyano-7-deazaguanine reductase OS=Xenorhabdus japonica; OX = 53341 GN=SAMN05421579_1431 PE=4 SV=1
MDIKKSITHLGTKTDYIQSYSPELLETLPRSLARDIINISSDSLPFQGFDLWTAWELSWLNSKGKPVVAIGEFTIPATSLGQTGLN

SEQ ID NO: 50824 - protein, 86 aa, unidentified
  source 1..86: note = Xenorhabdus khoisanae
  REGION 1..86: note = tr|A0A0J5FME4|A0A0J5FME4_9GAMM QueF_N domain-containing protein OS=Xenorhabdus khoisanae; OX = 880157 GN=AB204_19870 PE=4 SV=1
MKIPLIQSKSFKLYLNSFNQTRVADWETVQKTLQQDLSACANGDIEIVLHHLHEFNQQPIAEFAGKCIDNQDIEKAHKGIVLFFSR

SEQ ID NO: 50825 - protein, 278 aa, unidentified
  source 1..278: note = Xenorhabdus khoisanae
  REGION 1..278: note = tr|A0A0J5FVE3|A0A0J5FVE3_9GAMM NADPH-dependent 7-cyano-7-deazaguanine reductase OS=Xenorhabdus khoisanae; OX = 880157 GN=queF PE=3 SV=1
MDIKKSITHLGTKTDYIQHYSPELLETLPRSLARDIINISSDSLPFQGFDLWTAWELSWLNNKGKPVVAIGEFTIPATSPGLIESKSFKLYLNSFNQTKFETADDVIRAMKKDLSQTAGQPVEVKLYPHLEGYGYEINPLSGQSLDDLDIEIDGYDFDATVLADAASTETDTVSETVHSNLLKSNCLVTNQPDWGSVVIRYEGAKINHEKLLRYLISFRTHNEFHEQCVERIYNDIMHYCRPEKLTVFARYTRRGGLDINPFRSNYESAPLTGRLIRQ

SEQ ID NO: 50826 - protein, 281 aa, Xenorhabdus koppenhoeferi
  REGION 1..281: note = tr|A0A1I7FTG7|A0A1I7FTG7_9GAMM NADPH-dependent 7-cyano-7-deazaguanine reductase OS=Xenorhabdus koppenhoeferi OX=351659 GN=queF PE=3 SV=1
MSLYQDNEALSQLTLGKPTPYKDSYDSTILQAVPRSLNREPLGLYPDNLPFHGADIWTMYELSWLNARGVPQVAVGHVSLNSASENLIESKSFKLYLNSFNQTRFSDWETVQKTLQQDLSACANGDIEVVLYPLHHFSQQPIADFAGECIDNQDIEIDDYQFSRDYLNNAATGSIVEETLVSHLLKSNCLITHQPDWGSVMIRYKGPQIDQEKLLRYLVSFRHHNEFHEQCVERIFNDLMALCVPEKLTVYARYTRRGGLDINPWRSNEEFIPATGRLARQ

SEQ ID NO: 50827 - protein, 281 aa, Xenorhabdus kozodoii
  REGION 1..281: note = tr|A0A2D0LCS4|A0A2D0LCS4_9GAMM NADPH-dependent 7-cyano-7-deazaguanine reductase OS=Xenorhabdus kozodoii; OX = 351676 GN=queF PE=3 SV=1
MSLYQDNHALSQLTLGKPTPYRDNYDPTLLQAVPRSMNREPLGLLPDNLPFYGADIWTMYELSWLNARGVPQVAIGHVSLDAASENLIESKSFKLYLNSFNQTRFADWETVQKTLQHDLSACANGKIEVALHPLHTFSQQPIAEFAGKCIDNQDIEIDDYQFSRDYLNHAATGPIVEETLVSHLLKSNCLITHQPDWGSVMIHYQGAKIDQEKLLRYLVSFRHHNEFHEQCVERIFNDLMTLCAPEKLTVYARYTRRGGLDINPWRSNEAFVPATGRLARQ

SEQ ID NO: 50828 - protein, 281 aa, Xenorhabdus mauleonii
  REGION 1..281: note = tr|A0A1I3VWJ7|A0A1I3VWJ7_9GAMM NADPH-dependent 7-cyano-7-deazaguanine reductase OS=Xenorhabdus mauleonii; OX = 351675 GN=queF PE=3 SV=1
MSLYQDNQSLAQLTLGKPTSYCDNYNPTLLQAVPRSMNREPLELFPENLPFHGADIWTMYELSWLNARGVPQVAIGHVSLSADSENLIESKSFKLYLNSFNQTRFADWETVQKTLQQDLSACANGDIEVVLHPLHSFNQQPIAEFAGECIDNQDIEINEYQFNRDYLNNAAIGPVVEETLVSHLLKSNCLITHQPDWGSVMIRYKGAKIDQEKLLRYLVSFRHHNEFHEQCVERIFNDLMMLCAPEKLTVYARYTRRGGLDINPWRSNEEFTPATGRLARQ

SEQ ID NO: 50829 - protein, 278 aa, Xenorhabdus mauleonii
  REGION 1..278: note = tr|A0A1I3WYT1|A0A1I3WYT1_9GAMM NADPH-dependent 7-cyano-7-deazaguanine reductase OS=Xenorhabdus mauleonii; OX = 351675 GN=queF PE=3 SV=1
MDIQKSITHLGKKTDYIQSYSPELLETIPRSLARDVINISSDSLPFQGFDIWTAWELSWLNSKGKPIVAIGEFTIPATSPGLIESKSFKLYLNSFNQTKFETTDDVIKAMQKDLSQIAGEPVEVKLYPHLDGYGHEISQFSGQSLDELDIEINGYDFDATILADSVSTEANIVSETVYSNLLKSNCLVTNQPDWGSVVIRYEGAKINHEKLLRYLISFRTHNEFHEQCVERIYNDVMHYCRPEKLTVFARYTRRGGLDINPFRSNYENAPQTGRLIRQ

SEQ ID NO: 50830 - protein, 281 aa, Xenorhabdus miraniensis
  REGION 1..281: note = tr|A0A2D0JRS5|A0A2D0JRS5_9GAMM NADPH-dependent 7-cyano-7-deazaguanine reductase OS=Xenorhabdus miraniensis OX=351674 GN=queF_1 PE=3 SV=1
MSLYQDNQALAQLTLGKPTPYRDNYDPTLLQAVPRSMNREPLGLFPESIPFHGADIWTMYELSWLNARGVPQVAIGHVSLDATSENLIESKSFKLYLNSFNQTRFADWETVQKTLQQDLSACANGNIDVVLHPLHNFSQQPIAEFTGKCIDNQDIEIDDYQFSRDYLNNAAIGPIVEETLVSHLLKSNCLITNQPDWGSVMIHYKGARIDQEKLLRYLVSFRHHNEFHEQCVERIFNDLMTLCVPEKLTVYARYTRRGGLDINPWRSNEEFTPAIGRLARQ

SEQ ID NO: 50831 - protein, 278 aa, Xenorhabdus miraniensis
  REGION 1..278: note = tr|A0A2D0JKQ9|A0A2D0JKQ9_9GAMM NADPH-dependent 7-cyano-7-deazaguanine reductase OS=Xenorhabdus miraniensis OX=351674 GN=queF PE=3 SV=1
MDIKKSITHLGTKTDYIQSYSPELLETLPRSLARDIINISSDSLPFQGFDLWTAWELSWLNSKGKPVVAIGEFTIPATSPGLIESKSFKLYLNSFNQTQFETTDDVIQAMKKDLSQTAGQPVEVKLYPHLEGYGHEISPLSGQSLDDLDIEIDGYDFDAMILADSVSAEAGIVSETLNSNLLKSNCLVTNQPDWGSVVIRYEGAKINHEKLLRYLISFRTHNEFHEQCVERIYNDIMHYCRPEKLTVFARYTRRGGLDINPFRSNYESAPLTGRLIRQ

SEQ ID NO: 50832 - protein, 281 aa, Xenorhabdus nematophila
  REGION 1..281: note = tr|N1NNT9|N1NNT9_XENNE NADPH-dependent 7-cyano-7-deazaguanine reductase OS=Xenorhabdus nematophila F1 OX=1306162 GN=queF PE=3 SV=1
MSLYKDSEALAQLTLGKSTPYKDSYDPTLLQAVPRSLNREPLDLYPDNLPFHGADIWTMYELSWLNARGVPQVAVGHVSLNAASENLIESKSFKLYLNSFNQTRLNDWETVQKTLQQDLSACANGDIDVVLYPLHHFSQQPIDDFAGECIDNQDIEIDDYQFSRDYLNHAATGPIVEETLVSHLLKSNCLITNQPDWGSVMIRYKGTKIDQEKLLRYLVSFRHHNEFHEQCVERIFNDLITLCAPEKLTVYARYTRRGGLDINPWRSNEEFIPATGRLARQ

SEQ ID NO: 50833 - protein, 281 aa, Xenorhabdus nematophila
  REGION 1..281: note = tr|A0A0A8NNL5|A0A0A8NNL5_XENNE NADPH-dependent 7-cyano-7-deazaguanine reductase OS=Xenorhabdus nematophila str. Websteri OX=1437826 GN=queF PE=3 SV=1
MSLYKDSEALAQLTLGKSTLYKDSYDPTLLQAVPRSLNREPLDLYPDNLPFHGADIWTMYELSWLNARGVPQVAVGHVSLNAASENLIESKSFKLYLNSFNQTRLNDWETVQKTLQQDLSACANGDIDVVLYPLHHFSQQPIDDFAGECIDNQDIEIDDYQFSRDYLNHAATGPIVEETLVSHLLKSNCLITNQPDWGSVMIRYKGAKIDQEKLLRYLVSFRHHNEFHEQCVERIFNDLITLCAPEKLTVYARYTRRGGLDINPWRSNEEFIPATGRLARQ

SEQ ID NO: 50834 - protein, 281 aa, Xenorhabdus poinarii
  REGION 1..281: note = tr|A0A068R544|A0A068R544_9GAMM NADPH-dependent 7-cyano-7-deazaguanine reductase OS=Xenorhabdus poinarii G6 OX=1354304 GN=queF PE=3 SV=1
MSLYQDNQALSQLTLGKPTPYRDNYDPTLLQAVPRSMNREPLGLFPHNLPFHGADIWTLYELSWLNARGVPQVAIGHVSLDSASENLIESKSFKLYLNSFNQTRFADWETVQKTLQHDLSACANGNIEVVLYPLHDFSQQPIAEFTGKCIDHQDIDIDDYQFSRDYLHHAATGAVVEETLVSHLLKSNCLITHQPDWGSVMIRYKGAKIDQEKLLRYLVSFRHHNEFHEQCVERIFNDLMTLCAPETLTVYARYTRRGGLDINPWRSNEAFTPATGRLARQ

SEQ ID NO: 50835 - protein, 281 aa, Xenorhabdus sp.
  REGION 1..281: note = tr|A0A2D0L7L7|A0A2D0L7L7_9GAMM NADPH-dependent 7-cyano-7-deazaguanine reductase OS=Xenorhabdus sp. KJ12.1; OX = 1851571 GN=queF PE=3 SV=1
MSLYQDNQALSQLTLGKPTSYCDTYEPALLQAVPRSMNREPLGLYPDNLPFYGADIWTMYELSWLNSRGVPQVAIGHVSLNAASENLIESKSFKLYLNSFNQTRFADWETVQQTLQRDLSACANGEIDVVLYPLHDFNQQPIADFEGKCIDNQDIEIDDYQFNRDYLNGAATGPVVDEVLVSHLLKSNCLITNQPDWGSVQIRYKGPKIDQEKLLRYLVSFRHHNEFHEQCVERIFNDLMQLCAPEKLTVYARYTRRGGLDINPWRSNDSFVPPTGRLARQ

SEQ ID NO: 50836 - protein, 281 aa, Xenorhabdus sp.
  REGION 1..281: note = tr|A0A0M0TAB4|A0A0M0TAB4_9GAMM NADPH-dependent 7-cyano-7-deazaguanine reductase OS=Xenorhabdus sp. GDc328; OX = 742178 GN=queF PE=3 SV=1
MSLYQDNHALSQLTLGKPTPYRDNYDPTLLQAVPRSMNREPLELFPDNLPFHGADIWTMYELSWLNARGVPQVAIGHVSLDAASENLIESKSFKLYLNSFNQTRFADWETVQKTLQQDLSACANGNIEVVLHPLHTFSQQPIAEFEGKCIDNQDIDIDDYQFSRNYLNQAATGPVVEETLVSHLLKSNCLITHQPDWGSVMIRYQGPKIDQEKLLRYLVSFRHHNEFHEQCVERIFNDVMTLCAPEKLTVYARYTRRGGLDINPWRSNEAFTPATGRLARQ

SEQ ID NO: 50837 - protein, 281 aa, Xenorhabdus stockiae; identical to SEQ ID NO: 50835
  REGION 1..281: note = tr|A0A2D0KST8|A0A2D0KST8_9GAMM NADPH-dependent 7-cyano-7-deazaguanine reductase OS=Xenorhabdus stockiae; OX = 351614 GN=queF PE=3 SV=1

SEQ ID NO: 50838 - protein, 281 aa, Xenorhabdus szentirmaii
  REGION 1..281: note = tr|W1IWL3|W1IWL3_9GAMM NADPH-dependent 7-cyano-7-deazaguanine reductase OS=Xenorhabdus szentirmaii DSM 16338 OX=1427518 GN=queF PE=3 SV=1
MSLYQDNEALTQLTLGKPTPYKDSYDPTLLQAVPRSLNREPLELYPDNLPFHGADIWTLYELSWLNARGVPQVAIGHVSLDASSENLIESKSFKLYLNSLNQTRFDNWEAVQKTLQKDLAACANGGIEVVLHPLHNFNQQPIAEFAGECIDNQDIDIDDYQFDRNYLNGAATGPLVEETLVSHLLKSNCLITNQPDWGSVMIHYQGAKINQEKLLRYLVSFRHHNEFHEQCVERIFNDLMTLCSPEKLTVYARYTRRGGLDINPWRSNDVFTPATGRLARQ

SEQ ID NO: 50839 - protein, 278 aa, unidentified
  source 1..278: note = Xenorhabdus thuongxuanensis
  REGION 1..278: note = tr|A0A1Q5TK40|A0A1Q5TK40_9GAMM NADPH-dependent 7-cyano-7-deazaguanine reductase OS=Xenorhabdus thuongxuanensis OX=1873484 GN=queF PE=3 SV=1
MDIKESLTHLGTKTDYIQNYSPELLETLPRSLAREVINISSDALPFQGFDLWTAWELSWLNSKGKPIVAIGEFTIPATSPGLIESKSFKLYLNSFNQTKFGTTEDVIRAMKKDLSQTAGQPVEVKLYPHLEGYDHEINQFSGQSLDDLDIEINGYDFDATILANAVSTETDIVAETLHSNLLKSNCLVTNQPDWGSVVIRYEGAKINHEKLLRYLISFRTHNEFHEQCVERIYNDIMYYCRPEKLTVFARYTRRGGLDINPFRSNYESAPLTGRLIRQ

SEQ ID NO: 50840 - protein, 281 aa, unidentified
  source 1..281: note = Xenorhabdus thuongxuanensis
  REGION 1..281: note = tr|A0A1Q5U0W7|A0A1Q5U0W7_9GAMM NADPH-dependent 7-cyano-7-deazaguanine reductase OS=Xenorhabdus thuongxuanensis OX=1873484 GN=queF PE=3 SV=1
MSLYQDNHALSQLTLGKPTPYRDHYDPTLLQAVPRSMNREPLGLFPDNLPFHGADIWTMYELSWLNARGVPQVAIGHVSLDAASENLIESKSFKLYLNSFNQTRFADWETVQKTLQQDLSACANGNIEVVLHPLHDFSQQPIGEFAGKCIDNQDIDIDDYQFNRDYLNNAATGPVVEETLVSHLLKSNCLITNQPDWGSVMIRYQGSKIDQEKLLRYLVSFRHHNEFHEQCVERIFNDLMTLCAPEKLTVYARYTRRGGLDINPWRSNEAFIPTTGRLARQ

SEQ ID NO: 50841 - protein, 281 aa, Xenorhabdus vietnamensis
  REGION 1..281: note = tr|A0A1Y2SGG1|A0A1Y2SGG1_9GAMM NADPH-dependent 7-cyano-7-deazaguanine reductase OS=Xenorhabdus vietnamensis OX=351656 GN=queF PE=3 SV=1
MSLYQNNQALSQLTLGKPTPYCDNYDPTLLQAVPRSMNREPLELFPDNLPFHGADIWTMYELSWLNARGVPQVAIGHISLDAASENLIESKSFKLYLNSFNQTRFADWETVQKTLQQDLSACANGNIEVVLHPLHDFSQQPIAEFEGKCIDNQDIEINDYQFSRDYLNNAAIGPVVEETLVSHLLKSNCLITHQPDWGSVMIHYKGPILDQEKLLRYLVSFRHHNEFHEQCVERIFNDLMTLCAPEKLTVYARYTRRGGLDINPWRSNEAFVPATGRLARQ

SEQ ID NO: 50842 - protein, 275 aa, Xylella fastidiosa
  REGION 1..275: note = sp|Q9PAW2|QUEF_XYLFA NADPH-dependent 7-cyano-7-deazaguanine reductase OS=Xylella fastidiosa (strain 9a5c) OX=160492 GN=queF PE=3 SV=1
MNTSHYSVLGHAVPYPKAYDPSLLFPISRAVGRAQIGIGVVLPFVGEDRWHAYELSWLDARGKPCVATATFHVPCDSPYLIESKSLKLYLNSFSAEVFNRAEALRLRIAADLSACAGAAVAVEFGLPPVGGGDKEISLDRLNVDIEDYGPPNPDYLSNVAQNLIEEMVEETLTSTLFKSNCPVTGQPDWASVTVRYFGVPIDHEGLLRYFISFRHHAEFHEQCVERIFQDVLQRCSPQCLAVEARYTRRGGLDINPLRTTSEMAWPISVFRDPRQ

SEQ ID NO: 50843 - protein, 275 aa, Xylella fastidiosa
  REGION 1..275: note = sp|Q87BP7|QUEF_XYLFT NADPH-dependent 7-cyano-7-deazaguanine reductase OS=Xylella fastidiosa (strain Temecula1 / ATCC 700964) OX=183190 GN=queF PE=3; SV = 1
MNTSHYSVLGHTVPYPKVYDPSLLFPISRAVGRTQIGIGVVLPFVGEDRWHAYELSWLDARGKPCVATATFHVPCDSPYLIESKSLKLYLNSFSAEVFNRAEALRLRIAADLSACAGAAVAVEFGLPPVGSGDKEISLDRLNVDIEDYGPPNPDYLSNVAQNLVEEMVEETLTSTLFKSNCPVTGQPDWASVTVRYFGMPIDHEGLLRYFISFRHHAEFHEQCVERIFQDVLQRCAPQCLAVEARYTRRGGLDINPLRTTSEMAWPLSVFRDPRQ

SEQ ID NO: 50844 - protein, 271 aa, unidentified
  source 1..271: note = Xylella taiwanensis
  REGION 1..271: note = tr|Z9JM11|Z9JM11_9GAMM NADPH-dependent 7-cyano-7-deazaguanine reductase OS=Xylella taiwanensis; OX = 1444770 GN=queF PE=3 SV=1
MNTPQYSALGHVVPYPRAYDPSLLFPISRAVARTHIGIGVVLPFVGEDRWHAYELSWLDARGKPCVATATLHVPCDSPCLIESKSLKLYLNSFNAETFDSAEVLRMRIATDVSVCAGAAVTVEFGLPPAVMCHTAMSLDGLNVAMDDYGPPNPDYLSMAAQDFVEETLTSALFKSNCPVTGQPDWASVTVRYFGAPLDHEGLLRYLVSFRNHAAFHEQCVERIFQDVLQRCAPQWLAVEARYTRRGGLDINPLRATPDMASPIPVFRDPRQ

SEQ ID NO: 50845 - protein, 281 aa, Xylophilus ampelinus
  REGION 1..281: note = tr|A0A318T0Z0|A0A318T0Z0_9BURK NADPH-dependent 7-cyano-7-deazaguanine reductase OS=Xylophilus ampelinus; OX = 54067 GN=queF PE=3 SV=1
MNIPEHSPLGQSSAYADQYDPSLLFPISRAGKRAEIGVDGAPPFFGADLWTAFELSWLNLRGKPQVALAHVTVPCETHNIVESKSFKLYLNSFNNTRLADAEAVRTRLRADIGEAVWRGAGHQSSVGVKLLLPDAFDREPVHELDGLSLDRLDVECARYTPAPELLTVAADEPEVSEVLVSNLLKSNCLVTGQPDWGSVQIRYSGAPIDQAGLLQYLVSFRNHNEFHEQCVERIFMDIWTRCRPHRLSVYARYTRRGGLDINPLRTSHPQALPANVRTARQ

SEQ ID NO: 50846 - protein, 281 aa, Xylophilus sp.
  REGION 1..281: note = tr|A0A0Q4FTA5|A0A0Q4FTA5_9BURK NADPH-dependent 7-cyano-7-deazaguanine reductase OS=Xylophilus sp. Leaf220; OX = 1735686 GN=queF PE=3 SV=1
MNTPEHSPLGQASAYADQYDPSLLFPIPRAGKRAEIGVDGAPPFFGADLWTAFELSWLNLRGKPQVALAHFTVPCETRNIVESKSFKLYLNSFNNTRLADAEAVRARLRADIGEAVWRGAEHASSIGVKLLMPDAFDREPVHELDGLSLDRLDVECTRYTPAPELLTVAAGEPEVSEVLVSNLLKSNCLVTGQPDWGSVQIRYSGAPIDQAGLLQYLVSFRNHNEFHEQCVERIFMDIWNRCKPHRLSVYARYTRRGGLDINPLRTSHPQALPANTRTARQ

SEQ ID NO: 50847 - protein, 154 aa, Yangia pacifica
  REGION 1..154: note = tr|A0A2U8HEB3|A0A2U8HEB3_9RHOB NADPH-dependent 7-cyano-7-deazaguanine reductase OS=Yangia pacifica; OX = 311180 GN=queF PE=3 SV=1
MTDSIYSNLKQLGGATVLPASPEEAELERVPNPQADVPYNVRFTAPEFTSLCPMTGQPDFAHLVIDYVPGAWLVESKALKLYLGAFRNHGAFHEDCTISIARRLVDFLEPQWLRIGGYWYPRGGIPIDVFYQTGPMPEGVWIPDQGVPPYRGRG

SEQ ID NO: 50848 - protein, 154 aa, Yangia pacifica
  REGION 1..154: note = tr|A0A1I6TR34|A0A1I6TR34_9RHOB NADPH-dependent 7-cyano-7-deazaguanine reductase OS=Yangia pacifica; OX = 311180 GN=queF PE=3 SV=1
MTDSIYSNLKQLGGATVLPSSPEAAELERVPNPQADVAYNVRFTAPEFTSLCPMTGQPDFAHLVIDYVPGDWLVESKALKLYLGSFRNHGAFHEDCTISIARRLVDFLDPQWLRIGGYWYPRGGIPIDVFYQTGPMPEGVWIPDQGVPPYRGRG

SEQ ID NO: 50849 - protein, 154 aa, Yangia sp.
  REGION 1..154: note = tr|A0A1B1PMA1|A0A1B1PMA1_9RHOB NADPH-dependent 7-cyano-7-deazaguanine reductase OS=Yangia sp. CCB-MM3; OX = 1792508 GN=queF PE=3 SV=1
MTDSIYSNLKQLGGATVLPASPEEAELERVPNPQADVAYNVRFTAPEFTSLCPMTGQPDFAHLVIDYVPGQWLVESKALKLYLGAFRNHGAFHEDCTISIARRLAEFLDPQWLRIGGYWYPRGGIPIDVFYQTGPMPEGVWIPDQGVPPYRGRG

SEQ ID NO: 50850 - protein, 154 aa, Yangia sp.
  REGION 1..154: note = tr|A0A2A3JV13|A0A2A3JV13_9RHOB NADPH-dependent 7-cyano-7-deazaguanine reductase OS=Yangia sp. SAOS 153D; OX = 1779329 GN=queF PE=3 SV=1
MTDSIYSNLKQLGGATVLPASPEEAELERVPNPQADVAYNVRFTAPEFTSLCPMTGQPDFAHLVIDYVPGAWLVESKALKLYLGAFRNHGAFHEDCTISIARRLVGFLEPQWLRIGGYWYPRGGIPIDVFYQTGPIPEGVWIPDQGVPPYRGRG

SEQ ID NO: 50851 - protein, 281 aa, Yersinia aldovae
  REGION 1..281: note = tr|A0A0T9TSD9|A0A0T9TSD9_YERAL NADPH-dependent 7-cyano-7-deazaguanine reductase OS=Yersinia aldovae; OX = 29483 GN=queF PE=3 SV=1
MSSYQDNKALAQLTLGKPTAYRDHYDATLLQAVPRSMNREPLGLYPDNLPFHGADIWTLYELSWLNSNGLPQVAVGEISLNAKSVNLIESKSFKLYLNSFNQTVFADWESVQATLQQDLAVCAQGEVSVRIFPLDDITDQPIANFSGECLDHQDIRIESYEFSADYLQNSTRQHHVEESLVSHLLKSNCLITHQPDWGSVQIRYRGPQINREALLRYLVSFRHHNEFHEQCVERIFNDIMRFCQPETLSVYARYTRRGGLDINPWRSNTDFVPATGRLARQ

SEQ ID NO: 50852 - protein, 281 aa, Yersinia bercovieri
  REGION 1..281: note = tr|A0A2G4U407|A0A2G4U407_YERBE NADPH-dependent 7-cyano-7-deazaguanine reductase OS=Yersinia bercovieri; OX = 634 GN=queF PE=3 SV=1
MSEYQDHKALAELTLGKPTAYRDHYDVTLLQAVPRSMNREPLGLYPDNLPFHGADIWTLYELSWLNSNGLPQVAVGEISLNANSVNLIESKSFKLYLNSFNQTVFTNWESVQATLQRDLAACAVGDVSVTLYRLDEITDQPIANFAGECLDQQDIRIDSYEFSADYLQGAAGANHVAESLVSHLLKSNCLITHQPDWGSVQISYSGRQINREALLRYLVSFRHHNEFHEQCVERIFNDIMRFCQPETLSVYARYTRRGGLDINPWRSNTHFVPSVGRLARQ

SEQ ID NO: 50853 - protein, 281 aa, Yersinia enterocolitica
  REGION 1..281: note = sp|A1JP94|QUEF_YERE8 NADPH-dependent 7-cyano-7-deazaguanine reductase OS=Yersinia enterocolitica serotype O:8 / biotype 1B (strain NCTC 13174 / 8081) OX=393305 GN=qu eF PE=3 SV=1
MSSYQDHKALAELTLGKPTAYCDHYDVTLLQAVPRSMNREPLGLYPDNLPFHGADIWTLYELSWLNSKGLPQVAIGEISLNADSVNLIESKSFKLYLNSFNQTVFTDWESVRTTLQQDLSACAQGEVSITLYRLDEMTHQPIANFSGECLDEQDLYIDSYEFNADYLQGAAGKNRVTESLVSHLLKSNCLITHQPDWGSVQISYSGPQINREALLRYLISFRHHNEFHEQCVERIFNDIMRFCQPETLSVYARYTRRGGLDINPWRSNTDFVPLTGRLARQ

SEQ ID NO: 50854 - protein, 281 aa, Yersinia enterocolitica
  REGION 1..281: note = tr|A0A4U9IYQ2|A0A4U9IYQ2_YEREN NADPH-dependent 7-cyano-7-deazaguanine reductase OS=Yersinia enterocolitica subsp. enterocolitica OX=150052 GN=queF; PE = 3 SV=1
MSSYQDHKALAELTLGKPTAYCDHYDVTLLQAVPRSINREPLGLYPDNLPFHGADIWTLYELSWLNSKGLPQVAIGEISLNADSVNLIESKSFKLYLNSFNQTVFTDWESVRTTLQQDLSACAQGEVSITLYRLDEMTHQPIANFSGECLDEQDLYIDSYEFNADYLQGAAGKNRVTESLVSHLLKSNCLITHQPDWGSVQISYSGPQINREALLRYLISFRHHNEFHEQCVERIFNDIMRFCQPETLSVYARYTRRGGLDINPWRSNTDFVPLTGRLARQ

SEQ ID NO: 50855 - protein, 281 aa, Yersinia entomophaga
  REGION 1..281: note = tr|A0A3S6EZZ9|A0A3S6EZZ9_YERET NADPH-dependent 7-cyano-7-deazaguanine reductase OS=Yersinia entomophaga; OX = 935293 GN=queF PE=3 SV=1
MSSYQDHQALAELTLGKPTAYRDHYDAALLQAVPRSMNREPLGLYPDNLPFHGADIWTMYELSWLNANGLPQVAVGEISLNADSVNLIESKSFKLYLNSFNQTPFSDWESVRHTLQQDLSICAQGEVSVTLYKLSDIAGQPIADFHGECLDEQDIRIDNYEFSTDYLKDATGQQIVEETLVSHLLKSNCLITHQPDWGSVQIRYRGPQINREALLRYLVSFRHHNEFHEQCVERIFNDLMRFCQPETLSVYARYTRRGGLDINPWRSNTDFTPSNGRLARQ

SEQ ID NO: 50856 - protein, 281 aa, Yersinia frederiksenii
  REGION 1..281: note = tr|A0A0T9QUP4|A0A0T9QUP4_YERFR NADPH-dependent 7-cyano-7-deazaguanine reductase OS=Yersinia frederiksenii; OX = 29484 GN=queF PE=3 SV=1
MSSYQDHKALAELTLGKPTAYRDHYDVTLLQAVPRSMNREPLGLYPDSLPFHGADIWTLYELSWLNSNGLPQVAVGEISLNADSANLIESKSFKLYLNSFNQTLFADWESVRATLQRDLAACAQGDVSVTLYQLHEITHQPIADFLGECLDQQDIRIDSYEFSADYLQGATTANRVEESLVSHLLKSNCLITHQPDWGSVQISYSGPQINREALLRYLVSFRHHNEFHEQCVERIFNDIMRFCQPETLSVYARYTRRGGLDINPWRSNTDFVPSTGRMARQ

SEQ ID NO: 50857 - protein, 281 aa, Yersinia frederiksenii
  REGION 1..281: note = tr|A0A0B6FC96|A0A0B6FC96_YERFR NADPH-dependent 7-cyano-7-deazaguanine reductase OS=Yersinia frederiksenii Y225 OX=1454377 GN=queF PE=3 SV=1
MSSYQDHEALAELTLGKPTAYRDHYDVTLLQAVPRSMNREPLGLYPDNLPFHGADIWTLYELSWLNSKGLPQVAVGEISLNADSVNLIESKSFKLYLNSFNQTTFTDWENVRTTLQQDLSACAQGDVNVRLYRLDEITHQPIANFTGECLDEQDIRIDSYEFSADYLQGAAGKNHVEENLVSHLLKSNCLITHQPDWGSVQISYSGPQINREALLRYLVSFRHHNEFHEQCVERIFNDIMHFCQPETLSVYARYTRRGGLDINPWRSNTDFVPSTGRLARQ

SEQ ID NO: 50858 - protein, 281 aa, unidentified
  source 1..281: note = Yersinia hibernica
  REGION 1..281: note = tr|A0A481QH18|A0A481QH18_9GAMM NADPH-dependent 7-cyano-7-deazaguanine reductase OS=Yersinia hibernica; OX = 2339259 GN=queF PE=3 SV=1
MSSYQDHKALAQLTLGKPTAYRDHYDVTLLQAVPRSMNREPLGLYPDNLPFHGADIWTLYELSWLNSKGLPQVAVGEISLSADSINLIESKSFKLYLNSFNQTAFTDWESVRGTLQQDLSACAQGDVNVRLYRLDELAHQPIANFSGECLDEQDISIDSYEFSTDYLQGATGKNHVEESLVSHLLKSNCLITHQPDWGSVQISYSGPQINREALLRYLVSFRHHNEFHEQCVERIFNDIMNLCQPKTLSVYARYTRRGGLDINPWRSNTDFLPPTGRLARQ

SEQ ID NO: 50859 - protein, 281 aa, Yersinia intermedia; identical to SEQ ID NO: 50856
  REGION 1..281: note = tr|A0A208ZG04|A0A208ZG04_YERIN NADPH-dependent 7-cyano-7-deazaguanine reductase OS=Yersinia intermedia; OX = 631 GN=queF PE=3 SV=1

SEQ ID NO: 50860 - protein, 281 aa, Yersinia intermedia
  REGION 1..281: note = tr|A0A0U1EPP3|A0A0U1EPP3_YERIN NADPH-dependent 7-cyano-7-deazaguanine reductase OS=Yersinia intermedia; OX = 631 GN=queF PE=3 SV=1
MSSYQNHKALAELTLGKPTAYCDHYDATLLQAVPRSMNREPLGLYPDNLPFHGADIWTLYELSWLNSNGLPQVAVGEISLNADSINLIESKSFKLYLNSFNQTIFADKESVRMTLQRDLAACAQGNVSVALYDLDEITGQPISNFNGECLDKQDIRIDSYEFNADYLQGAAGKDHVEESLVSHLLKSNCLITHQPDWGSVQIHYRGPQIDHEALLRYLVSFRHHNEFHEQCVERIFNDIMRFCQPETLTVYARYTRRGGLDINPWRSNTDFVPLTGRLARQ

SEQ ID NO: 50861 - protein, 281 aa, Yersinia kristensenii; identical to SEQ ID NO: 50857
  REGION 1..281: note = tr|A0A0T9PR87|A0A0T9PR87_YERKR NADPH-dependent 7-cyano-7-deazaguanine reductase OS=Yersinia kristensenii; OX = 28152 GN=queF PE=3 SV=1

SEQ ID NO: 50862 - protein, 281 aa, Yersinia kristensenii
  REGION 1..281: note = tr|A0A2A7TBC5|A0A2A7TBC5_YERKR NADPH-dependent 7-cyano-7-deazaguanine reductase OS=Yersinia kristensenii; OX = 28152 GN=queF PE=3 SV=1
MSSYQDHKALAELTLGKPTAYRDHYDVTLLQAVPRSMNREPLGLYPDNLPFHGADIWTLYELSWLNSKGLPQVAVGEISLNADSANLIESKSFKLYLNSFNQTTFADWESVQTTLQRDLSACAQGDVSVRLYRLDEIAHQPIANFTGECLDQQDIRIDNYEFNADYLHGAAGNHYVKESLVSHLLKSNCLITHQPDWGSVQISYSGPQINREALLRYLVSFRHHNEFHEQCVERIFNDIMHFCRPETLSVYARYTRRGGLDINPWRSNTDFVPSTGRLARQ

SEQ ID NO: 50863 - protein, 281 aa, Yersinia massiliensis
  REGION 1..281: note = tr|A0A0T9PMH5|A0A0T9PMH5_9GAMM NADPH-dependent 7-cyano-7-deazaguanine reductase OS=Yersinia massiliensis; OX = 419257 GN=queF PE=3 SV=1
MSSYQDHKALAELTLGKPTAYHDHYDVTLLQAVPRSMNREPLGLYPDNLPFHGADIWTLYELSWLNSHGLPQVAVGQISLNADSVNLIESKSFKLYLNSFNQTIFADWESVRTTLQRDLATCAMGDVSVTLYQLDEITDQPIANFSGECLDQQDIRIDSYEFSTDYLQGAIGANHVQESLVSHLLKSNCLITHQPDWGSVQISYSGPQINREALLRYLVSFRHHNEFHEQCVERIFNDIMRFCQPDTLSVYARYTRRGGLDINPWRSNTHFVPSTGRLARQ

SEQ ID NO: 50864 - protein, 281 aa, Yersinia massiliensis
  REGION 1..281: note = tr|A0A2R4NLM6|A0A2R4NLM6_9GAMM NADPH-dependent 7-cyano-7-deazaguanine reductase OS=Yersinia massiliensis; OX = 419257 GN=queF PE=3 SV=1
MSSYQDHKALAELTLGKPTAYHDHYDVALLQAVPRSMNREPLGLYPDNLPFHGADIWTLYELSWLNSNGLPQVAVGQISLNADSVNLIESKSFKLYLNSFNQTIFADWESVRTTLQRDLAICAEGDVNVTLYRLDEITDQPIANFSGECLDQQDIRIDSYEFSTDYLQGAISANHVEESLVSHLLKSNCLITHQPDWGSVQISYSGPQINREALLRYLVSFRHHNEFHEQCVERIFNDIMRFCQPDTLSVYARYTRRGGLDINPWRSNTHFVPSTGRLARQ

SEQ ID NO: 50865 - protein, 281 aa, Yersinia mollaretii
  REGION 1..281: note = tr|A0A0U1I5P0|A0A0U1I5P0_YERMO NADPH-dependent 7-cyano-7-deazaguanine reductase OS=Yersinia mollaretii; OX = 33060 GN=queF PE=3 SV=1
MSSYQDHKALAELTLGKPTAYRDHYDVTLLQAVPRSMNREPLGLYPDRLPFHGADIWTLYELSWLNSNGLPQVAVGEISLNANSINLIESKSFKLYLNSFNQTVFVDWESVQATLQRDLAACAAGEVSVRLYRLDEITDQPIANFAGACLDEQDIRIDSYEFHADYLQGAAGANRVEESLVSHLLKSNCLITHQPDWGSVQISYSGPQINREALLRYLVSFRHHNEFHEQCVERIFNDIMRFCQPETLSVYARYTRRGGVDINPWRSNTHFAPPTGRLARQ

SEQ ID NO: 50866 - protein, 281 aa, Yersinia mollaretii
  REGION 1..281: note = tr|C4SAR0|C4SAR0_YERMW NADPH-dependent 7-cyano-7-deazaguanine reductase OS=Yersinia mollaretii (strain ATCC 43969 / DSM 18520 / CIP 103324 / CNY 7263 / WAIP 204) OX= 349967 GN=queF PE=3 SV=1
MSSYQDHKALAELTLGKPTAYRDHYDVTLLQAVPRSMNREPLGLYPDSLPFHGADIWTLYELSWLNSNGLPQVAVGEISLNANSINLIESKSFKLYLNSFNQTVFADWESVQATLQRDLAACAAGRVSVKLYRLDEITDQPIANFAGECLDQQDIRIDSYEFNADYLQGAVGTNRIEESLVSHLLKSNCLITHQPDWGSVQISYSGPQINREALLRYLVSFRHHNEFHEQCVERIFNDIMRFCQPETLSVYARYTRRGGLDINPWRSNSDFVPSTGRLARQ

SEQ ID NO: 50867 - protein, 281 aa, Yersinia nurmii
  REGION 1..281: note = tr|A0A0T9LER4|A0A0T9LER4_9GAMM NADPH-dependent 7-cyano-7-deazaguanine reductase OS=Yersinia nurmii; OX = 685706 GN=queF PE=3 SV=1
MSSYQDHQALAELTLGKPTAYRDHYDAALLQAVPRSMNREPLGLYPNNLPFHGADIWTMYELSWLNANGLPQVAVGEISLKADSVNLIESKSFKLYLNSFNQTPFSDWESVRQTLQQDLSTCAQGEVSVNLYKLNDLAGQLIADFNGECLDEQDIRIDNYEFSTDYLKNAAGQQIVEETLVSHLLKSNCLITHQPDWGSVQIRYRGPQINREALLRYLVSFRHHNEFHEQCVERIFNDLMRFCQPETLSVYARYTRRGGLDINPWRSNTDFTPSSGRLARQ

SEQ ID NO: 50868 - protein, 281 aa, Yersinia pekkanenii
  REGION 1..281: note = tr|A0A0T9P7Y8|A0A0T9P7Y8_9GAMM NADPH-dependent 7-cyano-7-deazaguanine reductase OS=Yersinia pekkanenii; OX = 1288385 GN=queF PE=3 SV=1
MSSYQDHKALAELTLGKPTAYRDHYDVSLLQAVPRSMNREPLGLYPDSLPFHGADIWTLYELSWLNSNGLPQVAVGEISLNADSVNLIESKSFKLYLNSFNQTAFTDWKSVRTTLQRDLAACAQGEVSVTLYSLDEITHQPIANFSGECLEQQDIRIDSYEFSADYLQGAAGTNRVEESLVSHLLKSNCLITHQPDWGSVQINYSGPQIDREALLRYLVSFRHHNEFHEQCVERIFNDIMHFCQPEKLSVYARYTRRGGLDINPWRSNTDFVPSTGRLARQ

SEQ ID NO: 50869 - protein, 281 aa, Yersinia pestis
  REGION 1..281: note = sp|Q8ZH75|QUEF_YERPE NADPH-dependent 7-cyano-7-deazaguanine reductase OS=Yersinia pestis OX=632; GN = queF PE=3 SV=1
MSSYQNHKALAELTLGKPTAYCDYYDATLLQAVPRSMNREPLGLYPDNLPFHGADIWTLYELSWLNSNGLPQVAVGEISLNADSINLIESKSFKLYLNSFNQTIFADKESVRMTLQRDLAACAQGNVSVALYDLDEITGQPISNFNGECLDKQDIRIDSYEFNADYLQGAAGKDHVEESLVSHLLKSNCLITHQPDWGSVQIHYRGPQIDHEALLRYLVSFRHHNEFHEQCVERIFNDIMRFCQPETLTVYARYTRRGGLDINPWRSNTDFVPLTGRLARQ

SEQ ID NO: 50870 - protein, 281 aa, Yersinia pestis; identical to SEQ ID NO: 50869
  REGION 1..281: note = tr|A0A2U2GV20|A0A2U2GV20_YERPE NADPH-dependent 7-cyano-7-deazaguanine reductase OS=Yersinia pestis OX=632; GN = queF PE=3 SV=1

SEQ ID NO: 50871 - protein, 281 aa, Yersinia pseudotuberculosis; identical to SEQ ID NO: 50869
  REGION 1..281: note = sp|B1JQF1|QUEF_YERPY NADPH-dependent 7-cyano-7-deazaguanine reductase OS=Yersinia pseudotuberculosis serotype O:3 (strain YPIII) OX=502800; GN = queF PE=3 SV=1

SEQ ID NO: 50872 - protein, 281 aa, Yersinia pseudotuberculosis; identical to SEQ ID NO: 50869
  REGION 1..281: note = tr|A0A3G5KCF4|A0A3G5KCF4_YERPU NADPH-dependent 7-cyano-7-deazaguanine reductase OS=Yersinia pseudotuberculosis OX=633 GN=queF PE=3 SV=1

SEQ ID NO: 50873 - protein, 281 aa, Yersinia rohdei
  REGION 1..281: note = tr|A0A0U1HWG7|A0A0U1HWG7_YERRO NADPH-dependent 7-cyano-7-deazaguanine reductase OS=Yersinia rohdei; OX = 29485 GN=queF PE=3 SV=1
MSSYQDHQALAELTLGKPTAYRDSYDATLLQAVPRSMNREPLGLYPDNLPFHGADIWTLYELSWLNNNGLPQVAVGEISLNANSLNLIESKSFKLYLNSFNQTVFADWESVRTTLQQDLAACAQGDVSVTLYHLDEITHQPIANFAGECLDQQDIRIDSYEFSADYLQGATSHNRVEESLVSHLLKSNCLITHQPDWGSVQISYSGPQINREALLRYLVSFRHHNEFHEQCVERIFNDILRFCQPETLSVYARYTRRGGLDINPWRSNTDFLPSTGRLARQ

SEQ ID NO: 50874 - protein, 281 aa, Yersinia ruckeri
  REGION 1..281: note = tr|A0A085U304|A0A085U304_YERRU NADPH-dependent 7-cyano-7-deazaguanine reductase OS=Yersinia ruckeri; OX = 29486 GN=queF PE=3 SV=1
MSSYQDHQALAKLTLGKPTDYRDHYDATLLQAVPRSMNREPLGLYPDNLPFHGADIWTLYELSWLNANGLPQVAVGEISLNADSINLIESKSFKLYLNSFNQTQFSDWESVRQTLQQDLAHCAQGEVNVSLYTLDQIAGQPIANFTGHCLDEQDIRIDHYEFSTDYLKNAVGNQIVEETLVSHLLKSNCLITHQPDWGSVQICYRGPQINPEALLRYLISFRHHNEFHEQCVERIFNDLMRFCHPETLSVYARYTRRGGLDINPWRSNTTFNPSTGRLARQ

SEQ ID NO: 50875 - protein, 281 aa, Yersinia similis
  REGION 1..281: note = tr|A0A0T9PN69|A0A0T9PN69_9GAMM NADPH-dependent 7-cyano-7-deazaguanine reductase OS=Yersinia similis; OX = 367190 GN=queF PE=3 SV=1
MSSYQNHKALAELTLGKPTAYCDHYNATLLQAVPRSMNREPLGLYPDNLPFHGADIWTLYELSWLNSNGLPQVAVGEISLNADSINLIESKSFKLYLNSFNQTVFADKESVRMTLQRDLATCAQGNVSVALYDLDEITGQPIANFNGECLDKQDIRIDSYEFNADYLQGAAGKDHVEESLVSHLLKSNCLITHQPDWGSVQIHYCGPQIDHKALLRYLVSFRHHNEFHEQCVERIFNDIMRFCQPETLTVYARYTRRGGLDINPWRSNTDFVPLTGRLARQ

SEQ ID NO: 50876 - protein, 281 aa, unidentified; identical to SEQ ID NO: 50860
  source 1..281: note = Yersinia wautersii
  REGION 1..281: note = tr|A0A0E8XH33|A0A0E8XH33_9GAMM NADPH-dependent 7-cyano-7-deazaguanine reductase OS=Yersinia wautersii; OX = 1341643 GN=queF PE=3 SV=1

SEQ ID NO: 50877 - protein, 281 aa, unidentified
  source 1..281: note = Yersiniaceae bacterium
  REGION 1..281: note = tr|A0A2N5EN36|A0A2N5EN36_9GAMM NADPH-dependent 7-cyano-7-deazaguanine reductase OS=Yersiniaceae bacterium 2016Iso3 OX=2060066 GN=queF PE=3 SV=1
MSSYQEHQALQKLTLGKPTAYQDHYDATLLQAVPRSMNREPLGLYPDNLPFHGADIWTLYELSWLNAKGLPQVAVGDVRLNAASLNLVESKSFKLYLNSFNQTRFASWDEVQETLQRDLTACAQGDVQVTLFRLDEVEGQPISRFEGECIDDQEIEIDNYQFSTDVLAQATCGEPVEETLVSHLLKSNCLITHQPDWGSVQIHYRGNRLDREALLRYLVSFRHHNEFHEQCVERIFNDLMHFFRPEKLAVYARYTRRGGLDINPWRANFNFDPAAGRLVRQ

SEQ ID NO: 50878 - protein, 281 aa, unidentified
  source 1..281: note = Yersiniaceae bacterium
  REGION 1..281: note = tr|A0A2N5DX88|A0A2N5DX88_9GAMM NADPH-dependent 7-cyano-7-deazaguanine reductase OS=Yersiniaceae bacterium 2016Iso4 OX=2060068 GN=queF PE=3 SV=1
MSSYQEHQALQKLTLGKPTAYQDHYDASLLQAVPRSMNREPLGLYPDNLPFHGADIWTLYELSWLNAKGLPQVAVGDVRLNAGSLNLVESKSFKLYLNSFNQTRFADWDEVQATLQRDLAHCAQGEVQVTLFRLNEVEGQPISRFEGDCIDDQDIEIDNYQFSTDVLAQAAGGEPVEETLVSHLLKSNCLITHQPDWGSVQIHYRGNRIDREALLRYLVSFRHHNEFHEQCVERIFNDLMRFFRPEKLAVYARYTRRGGLDINPWRANFAFEPAAGRLVRQ

SEQ ID NO: 50879 - protein, 281 aa, Yokenella regensburgei
  REGION 1..281: note = tr|A0A2X2QV34|A0A2X2QV34_9ENTR NADPH-dependent 7-cyano-7-deazaguanine reductase OS=Yokenella regensburgei; OX = 158877 GN=queF PE=3 SV=1
MSSYENHQALSGLTLGKATDYRDIYDASLLQGVPRSLNRDPLGLHADSLPFHGADIWTLYELSWLNARGLPQVAVGHVELSDRTVNLIESKSFKLYLNSFNQTRFASQEEVRDTLERDLSACAQGKVSVALYQLDEIEGQPIAHFHGTCIDNQDIEIDNYQFSTDYLENAASGKVVEETLVSHLLKSNCLITHQPDWGSVQVQYRGPKIDREKLLRYLVSFRHHNEFHEQCVERIFNDIQRLCQPETLSVYARYTRRGGLDINPWRTNTDFVPATGRLVRQ

SEQ ID NO: 50880 - protein, 281 aa, Yokenella regensburgei
  REGION 1..281: note = tr|A0A484WPZ1|A0A484WPZ1_9ENTR NADPH-dependent 7-cyano-7-deazaguanine reductase OS=Yokenella regensburgei; OX = 158877 GN=queF PE=3 SV=1
MSSYENHQALSGLTLGKATDYRDIYDASLLQGVPRSLNRDPLGLHADSLPFHGADIWTLYELSWLNARGLPQVAVGHVELSDRTVNLIESKSFKLYLNSFNQTRFASLEEVRDTLERDLSACAQGKVSVALYQLDEIEGQPIAHFHGTCIDNQDIEIDNYQFSTDYLENAASGKVVEETLVSHLLKSNCLITHQPDWGSVQIQYRGPKIDREKLLRYLVSFRHHNEFHEQCVERIFNDIQRLCQPETLSVYARYTRRGGLDINPWRTNTNFVPATGRLVRQ

SEQ ID NO: 50881 - protein, 154 aa, unidentified
  source 1..154: note = Yoonia maritima
  REGION 1..154: note = tr|A0A2T0VT85|A0A2T0VT85_9RHOB NADPH-dependent 7-cyano-7-deazaguanine reductase OS=Yoonia maritima; OX = 1435347 GN=queF PE=3 SV=1
MSDDIYSNLKQLGGATVMPATPEEAELERVPNPQADVAYNVRFTAPEFTSLCPMTGQPDFAHLVIDYVPGAWLIESKSLKLFLGSFRNHGAFHEDCTVSIARRLAEFLEPQWLRIGGYWYPRGGIPIDVFWQTGAMPEGVWIPDQGVPPYRGRG

SEQ ID NO: 50882 - protein, 153 aa, unidentified
  source 1..153: note = Yoonia sediminilitoris
  REGION 1..153: note = tr|A0A2T6KC25|A0A2T6KC25_9RHOB NADPH-dependent 7-cyano-7-deazaguanine reductase OS=Yoonia sediminilitoris; OX = 1286148 GN=queF PE=3 SV=1
METIYSDLKQLGGQSDLPSSPEAAELERVSNPQAGVDYCVRFTAPEFTSLCPMTGQPDFAHLVIDYVPAEFLVESKSLKLFLGSFRNHGAFHEDCTISIARRLVDFLNPQWLRIGGYWYPRGGIPIDVFWQTGSMPQGVWIPDQGVPSYRGRG

SEQ ID NO: 50883 - protein, 155 aa, unidentified
  source 1..155: note = Yoonia vestfoldensis
  REGION 1..155: note = tr|A0A1Y0E7A7|A0A1Y0E7A7_9RHOB NADPH-dependent 7-cyano-7-deazaguanine reductase OS=Yoonia vestfoldensis; OX = 245188 GN=queF PE=3 SV=1
MSNEDIYKNLTMLGGQTTLPKTPEEAVLERVPNPQAGTDYAVRFTAPEFTSLCPMTGQPDFAHIVLDYVPGDWLVESKSLKLFLGSFRNHGAFHEDCTVTIGKRLIESLAPKWLRVGGYWYPRGGIPIDVFFQTGAQPSGVWIPDQGVPTYRGRG

SEQ ID NO: 50884 - protein, 160 aa, unidentified
  source 1..160: note = Youngiibacter fragilis
  REGION 1..160: note = tr|V7I720|V7I720_9CLOT NADPH-dependent 7-cyano-7-deazaguanine reductase OS=Youngiibacter fragilis 232.1 OX=994573 GN=queF PE=3 SV=1
MGMEKDLSLLGNKDVTYRFDYTPEVLETFINKHQDNDYFVKFNCPEFTSLCPITGQPDFATIYISYVPDVNMVESKSLKLYLFSFRNRGDFHEDCMNIIMKDLIRIMDPKYIEVWGKFTPRGGISIDPYCNYGKKGTRWEAVADRRLEEHDMYPEKVDNR

SEQ ID NO: 50885 - protein, 154 aa, unidentified
  source 1..154: note = Youngimonas vesicularis
  REGION 1..154: note = tr|A0A4S3M8K1|A0A4S3M8K1_9RHOB NADPH-dependent 7-cyano-7-deazaguanine reductase OS=Youngimonas vesicularis OX=1294297 GN=queF PE=3 SV=1
MTKTDVSGLSQLGQNTAQPTSPEEAQLERVPAGHAGTDYVVRFTAPEFTSICPMTGQPDFAHIVIDYIPGDWLVESKSLKLYLHSFRNHGAFHEDCTIDIAKRLVDLLAPKWLRIGAYWYPRGGIPIDVFWQTGPAPEGVWIPDQGVATYRGRG

SEQ ID NO: 50886 - protein, 156 aa, Zavarzinia compransoris
  REGION 1..156: note = tr|A0A317E3V3|A0A317E3V3_9PROT NADPH-dependent 7-cyano-7-deazaguanine reductase OS=Zavarzinia compransoris OX=1264899 GN=queF PE=3 SV=1
MTTPDPTATELSLLGHAAGLPASPAAAVLERIANPHPGTAYLVRFVCPEFTSLCPVTGQPDFAHLVIDYVPGDWLVESKALKLFLGAFRNHGAFHEACTVEIGKRLVDLLAPAWLRIGGYWYPRGGIPIDVFYATGTPPEGLWLPDQGVPPYRGRG

SEQ ID NO: 50887 - protein, 155 aa, Zavarzinia sp.
  REGION 1..155: note = tr|A0A317EBL7|A0A317EBL7_9PROT NADPH-dependent 7-cyano-7-deazaguanine reductase OS=Zavarzinia sp. HR-AS; OX = 2211142 GN=queF PE=3 SV=1
MTTSHETTTLNQLGHPTAQAEGPDSALLEKVPNPQAGVRYLIRFVCPEFTSVCPVTGQPDFAHLVIDYVPRDFIVESKSLKLFLGSFRNHGAFHEDCTVRIARRLVDLLDPEWLRIGGYWYPRGGIPIDVFYATGAPPEGLWLPDQGVPPYRGRG

SEQ ID NO: 50888 - protein, 124 aa, unidentified
  source 1..124: note = Zetaproteobacteria bacterium
  REGION 1..124: note = tr|A0A2M7WVF5|A0A2M7WVF5_9PROT NADPH-dependent 7-cyano-7-deazaguanine reductase OS=Zetaproteobacteria bacterium CG_4_9_14_3_um_filter_53_7 OX=1974119 GN=queF; PE = 3 SV =1
MSEKLGAVINKPTRYLETFENPNPERDYHIRIDSPEFTCLCPKTGQPDFAEIKLDYIPDGLCVELKSLKLYYWSFRDEGHFHEQVTNMIANDLIKLLDPRQIKVTAVFNVRGGVYTTVEVEHSK

SEQ ID NO: 50889 - protein, 122 aa, unidentified
  source 1..122: note = Zetaproteobacteria bacterium
  REGION 1..122: note = tr|A0A2A5FCY3|A0A2A5FCY3_9PROT NADPH-dependent 7-cyano-7-deazaguanine reductase OS=Zetaproteobacteria bacterium OX=2026807 GN=queF PE=3 SV=1
MGDQPTTIASKTLEVFPNPNPERDYHIKIDSPEFTCLCPKTGQPDFAEIKIDYIPDVFCVELKSLKLYYWSFRDEGHFHEQVTNMMASDLIEAMNPRYLKVTAIFNVRGGVYTTVEVEHRQA

SEQ ID NO: 50890 - protein, 143 aa, unidentified
  source 1..143: note = Zhizhongheella caldifontis
  REGION 1..143: note = tr|A0A2S5SUZ8|A0A2S5SUZ8_9BURK NADPH-dependent 7-cyano-7-deazaguanine reductase OS=Zhizhongheella caldifontis OX=1452508 GN=queF PE=3 SV=1
MPPNPPSAPSKELHVFPNPSPKRDYVIQFQIPEFTCHCPLTGQPDFAHFTIDCIADKLCIELKSLKMYMWSYRNEGAFHEKVTNDILDDIVKAIDPRFLRITAKWYVRGGIYTNVVVEHRKKGWKPQPRIELPQHPAENGLLG

SEQ ID NO: 50891 - protein, 276 aa, unidentified
  source 1..276: note = Zhongshania aliphaticivorans
  REGION 1..276: note = tr|A0A127M5P8|A0A127M5P8_9GAMM NADPH-dependent 7-cyano-7-deazaguanine reductase OS=Zhongshania aliphaticivorans OX=1470434 GN=queF PE=3 SV=1
MSEQLSHGPLGEQVDYPSQYDPSCLHPIVRQAGRDGLGLGDVLPFGGVDIWNAYELSCLNEQGKPLVACAEFRVPAQSPNIIESKSFKLYLNSFNQTRLSGLDAMAEMLRHDLSLAAGAEVQVAIYCPEDWPANYSIALPRGECIDGLDICPDSYQPSPSLLSANTGNVIEETLYSHLLRSRCPVTSQPDWASIEISYRGPRINQEGLLAYLVSFREHDDFHEQCVEQIFSDISRYCAPVRLTVYARYLRRGGLDINPWRSNDDLASPENRRGARQ

SEQ ID NO: 50892 - protein, 278 aa, Zhongshania sp.
  REGION 1..278: note = tr|A0A3N0CVT6|A0A3N0CVT6_9GAMM NADPH-dependent 7-cyano-7-deazaguanine reductase OS=Zhongshania sp. DSW25-10 OX=2304603 GN=queF PE=3 SV=1
MSDHKIHGPLGEKVTYPDQYDPTCLHAIPRQQGRGELGIDSAKPLPFSGVDIWNAYELSWLNASGKPVVACAEFRFAAGSPNIIESKSFKLYLNSFNQTRIADLDILKRALERDLSLASGAAVELSLFTADRWEEAYGVSCPEGECLDDLDICPTSYTPNSDLLVVENTEICSEHLYSNLLRSRCPVTSQPDWASVEIRYTGPKIQRESLLAYIVSFREHDEFHEHCVERIFSDISKRCQPEYLSVYARYTRRGGLDINPWRCSDKSLTPNNTRGVRQ

SEQ ID NO: 50893 - protein, 278 aa, Zhongshania sp.
  REGION 1..278: note = tr|A0A2S4HEW3|A0A2S4HEW3_9GAMM NADPH-dependent 7-cyano-7-deazaguanine reductase OS=Zhongshania sp. ZX-21; OX = 2067667 GN=queF PE=3 SV=1
MSDHKSHGPLGEKVTYPDQYDPTCLHAIPRQQGRGELGIDSAKSLPFSGVDIWNAYELSWLNASGKPVVACAEFRFAAGSPNIIESKSFKLYLNSFNQTRIADLDILKRALERDLSLASGAAVELSLFTADRWEDAYGVSCPEGECLDDLDICPTSYSPNSDLLVVENTEICSEHLYSNLLRSRCPVTSQPDWASVEIRYTGPKIQRESLLAYIVSFREHDEFHEHCVERIFSDISKRCQPKYLSVYARYTRRGGLDINPWRSSDKSLTPNNTRGVRQ

SEQ ID NO: 50894 - protein, 283 aa, Zobellella denitrificans
  REGION 1..283: note = tr|A0A291HRJ2|A0A291HRJ2_9GAMM NADPH-dependent 7-cyano-7-deazaguanine reductase OS=Zobellella denitrificans OX=347534 GN=queF PE=3 SV=1
MTPEQKYQNSQALDALPLGKQSSYVCEYDPAQLQPVPRSLNRDDLGLEAGALPFGGEDLWNLYELSWLNNKGKPVVAMGEVHIPATSTNLIESKSFKLYLNSFNQSRFDSLEEVADLLTRDLSLCAQGQVKVRLYELAAAPAQFGVLPGDCIDDLDVEIDRYQPDESLLADAIEEEEVQETLHSHLLKSNCLVTGQPDWGSVMIRYQGPRIRREALLRYLVSFRQHNEFHEQCVERIFMDLMHHCRPKELTVYARYTRRGGLDINPYRSNVAGKAANVRLLRQ

SEQ ID NO: 50895 - protein, 283 aa, Zobellella denitrificans
  REGION 1..283: note = tr|A0A231MYQ4|A0A231MYQ4_9GAMM NADPH-dependent 7-cyano-7-deazaguanine reductase OS=Zobellella denitrificans OX=347534 GN=queF PE=3 SV=1
MTPEQKYQNSQALDALPLGKQSSYVCEYDPAQLQPVPRSLNRDDLGLEAGALPFGGEDLWNLYELSWLNNKGKPVVAMGEVHIPATSTNLIESKSFKLYLNSFNQSRFDSLEEVADLLTRDLSLCAQGQIKVRLYELAAAPAQFGVLPGDCIDDLDVEIDRYQPDESLLADAIEEEEVQETLHSHLLKSNCLVTGQPDWGSVMIRYQGPRIRREALLRYLVSFRQHNEFHEQCVERIFMDLMHHCRPKELTVYARYTRRGGLDINPYRSNVAGKAANVRLLRQ

SEQ ID NO: 50896 - protein, 283 aa, unidentified
  source 1..283: note = Zobellella endophytica
  REGION 1..283: note = tr|A0A2P7R7M1|A0A2P7R7M1_9GAMM NADPH-dependent 7-cyano-7-deazaguanine reductase OS=Zobellella endophytica; OX = 2116700 GN=queF PE=3 SV=1
MTPEQKYQQSQALDALPLGKHSSYVCEYDAGQLQPVPRSLNRDDLGLTADNLPFGGEDLWNLYELSWLTPRGKPVVAMGEVHIPATSVNLIESKSFKLYLNSFNQSKFDSMDEVADILTRDLSLCAEGRVRVRLYELGAAPAQFGVMPGDCIDDLDIEIDRYQPDDSLLNDATEPLEVHETLHSHLLKSNCLVTGQPDWGSVMIRYQGPKIRRDALLRYLVSFRQHNEFHEQCVERIFMDLMQHCRPRELTVYARYTRRGGLDINPYRSNVAGKAANVRLLRQ

SEQ ID NO: 50897 - protein, 283 aa, Zobellella taiwanensis
  REGION 1..283: note = tr|A0A2P7R6M0|A0A2P7R6M0_9GAMM NADPH-dependent 7-cyano-7-deazaguanine reductase OS=Zobellella taiwanensis; OX = 347535 GN=queF PE=3 SV=1
MTPEQKYQQSQALDALPLGKQSSYVCEYDPGQLQPVPRSLNRDDLGLSADALPFAGEDLWNLYELSWLNARGKPVVAMGEVRIPASSANLIESKSFKLYLNSFNQSRFDSLEDVSERLTRDLSACAQGRVGVKLFELAVAPAQFGLLPGDCIDQLDIDIDRYQPDAALLQGATEPEEVNETLHSHLLKSNCLVTGQPDWGSVMIRYQGPRIRREALLRYLVAFRQHNEFHEQCVERIFMDLLTHCRPKELTVYARYTRRGGLDINPYRSNVAGKAANVRLARQ

SEQ ID NO: 50898 - protein, 277 aa, Zoogloea ramigera
  REGION 1..277: note = tr|A0A4Y4CZH2|A0A4Y4CZH2_ZOORA NADPH-dependent 7-cyano-7-deazaguanine reductase OS=Zoogloea ramigera; OX = 350 GN=queF PE=3 SV=1
MSTAPEASPLGKAVAYAEHYDPALLFPIPRQGKRAEIGIAEGALPFVGEDIWNAYELSWLDPRGKPVVALAHFIVPATSPNLIESKSLKLYLNSFNQTRLAGVDELVATLTRDLSAAAGAPVLVHVAPLSTRPQRPMGYPKGILLDGLEIDVDLYTPEPALLSADTSRAPVTETLYSHLLKSNCLVTGQPDWAMLVVRYTGAPIDREGLLRYIISFRQHNEFHEQCVERVFVDILRQCQPSALSVFARYTRRGGLDINPYRRTPGTAVPAPFAEIRQ

SEQ ID NO: 50899 - protein, 284 aa, unidentified
  source 1..284: note = Zoogloeaceae bacteirum
  REGION 1..284: note = tr|A0A2S0QUU3|A0A2S0QUU3_9RHOO NADPH-dependent 7-cyano-7-deazaguanine reductase OS=Zoogloeaceae bacteirum Par-f-2 OX=2080469 GN=queF PE=3 SV=1
MNNSMQPAPHGAESSPLGRAVTYRDTYAPELLFPIDRQLKRDELGIAANALPFIGADLWNAYELSWLNPRGKPVVALGHIEVPADSPRLVESKSLKLYLNAFNQTRFDSAEAVAATVRADLSAAVGAAVNVTVFPLAASTVRSFGLPDGVCVDELDIEIDTYQPTPEFLRTGCRSRVVEETLYSHLLKSNCLVTGQPDWGMVAVRYRGAAIDRAGLLRYIVSFRSHNEFHEQCVERMFCDIMARCAPQALLVWARYTRRGGLDINPWRGTPGSGSPGNFMEVRQ

SEQ ID NO: 50900 - protein, 134 aa, Zooshikella ganghwensis
  REGION 1..134: note = tr|A0A4P9VID5|A0A4P9VID5_9GAMM Uncharacterized protein OS=Zooshikella ganghwensis OX=202772; GN = B9G39_01465 PE=4 SV=1
MKHSQIKALLAYHTESSIFTNQSILQAVYCGVKNRPTIILSDLKVRSLSARNKEPYTAIFTVEYQPNEYFLELISFEKYLASFEGLTTYLEQLTDVIYSNIFDAIKPKNLKVEQQRTTFQGYSATIIIDSNRQG

SEQ ID NO: 50901 - protein, 278 aa, Zooshikella ganghwensis
  REGION 1..278: note = tr|A0A4P9VSL1|A0A4P9VSL1_9GAMM NADPH-dependent 7-cyano-7-deazaguanine reductase OS=Zooshikella ganghwensis OX=202772 GN=queF PE=3 SV=1
MSNNDILKKLPLGQTTEYVCHYKPDLLHPVPRQLNRTEIGVKDEALPFHGEDLWTLYELSWLNAKGKPCVATGEVRINASTPHLIESKSFKLYLNSFNQTQFDSLEEVTSTLQRDLSACAGGAVTVQIHPLSDASLQMAELDGTLLDELDISVNHYELNPALLENTTSNTVVSETLHSHLLKSNCLVTGQPDWGSVQIHYQGPQIDREALLRYIISFRQHQEFHEQCVERIFVDIQRYCAPEKLSVFARYTRRGGLDINPFRSNFEAAPTTSLRLIRQ

SEQ ID NO: 50902 - protein, 282 aa, Zymobacter palmae
  REGION 1..282: note = tr|A0A348HCM2|A0A348HCM2_9GAMM NADPH-dependent 7-cyano-7-deazaguanine reductase OS=Zymobacter palmae; OX = 33074 GN=queF PE=3 SV=1
MKTQSELLVDAPLGHESAYPEQYDASLLFPIDRMPQRRPLGIVDAAALPFVGVDEWQAFEISWLEPSGRPNVRIGRFTLPAQSPNLIESKSWKLYLNSFNQTAFVSEDEVVARMTRDLSAAAGAPVSVELLSVEASSLAGQAMPGECLDDLDVAIKHYTPTPELLTKASEEIVEETVYSHLLKSNCPVTGQPDWGAVVIRYRGPRMARDGLLAYLISYRQHQDFHEHCVERIFVDIMSRIAPESLVVSARYVRRGGLDINPTRATPDHALTALPAWPRLIRQ

SEQ ID NO: 50903 - protein, 147 aa, Zymomonas mobilis
  REGION 1..147: note = tr|A0A542VZS0|A0A542VZS0_ZYMMB NADPH-dependent 7-cyano-7-deazaguanine reductase OS=Zymomonas mobilis; OX = 542 GN=queF PE=3 SV=1
MQTTHLGKTSPLPQSPEQATLDYVPNPRQGKNYLIRFAIPEFTSLCPVTGQPDFAHLVIDYVPDKLIVESKSLKLFLGSFRNHRAFHEDCTVGIGEKLFTEMKAQWLRIGGYWYPRGGIPIDVFWQSGTPPQDLWLPEQGVPPYRGR

SEQ ID NO: 50904 - protein, 147 aa, Zymomonas mobilis
  REGION 1..147: note = sp|Q5NQQ4|QUEF_ZYMMO NADPH-dependent 7-cyano-7-deazaguanine reductase OS=Zymomonas mobilis subsp. mobilis (strain ATCC 31821 / ZM4 / CP4) OX=264203; GN = queF PE=3 SV=1
MQTTHLGKNSPIPQSPEEASLDYVPNPRQGKNYLIRFAIPEFTSLCPVTGQPDFAHLVIDYVPDKLIVESKSLKLFLGSFRNHRAFHEDCTVGIGEKLFTEMKAQWLRIGGYWYPRGGIPIDVFWQSGAAPQDVWLPEQGVPPYRGR

SEQ ID NO: 50905 - protein, 282 aa, Escherichia coli; identical to SEQ ID NO: 43531
  REGION 1..282: note = sp|Q46920|QUEF_ECOLI NADPH-dependent 7-cyano-7-deazaguanine reductase OS=Escherichia coli (strain K12) OX=83333 GN=queF PE=1 SV=1

SEQ ID NO: 50906 - protein, 282 aa, Escherichia coli; identical to SEQ ID NO: 49709
  REGION 1..282: note = sp|B1LQY7|QUEF_ECOSM NADPH-dependent 7-cyano-7-deazaguanine reductase OS=Escherichia coli (strain SMS-3-5 / SECEC) OX=439855 GN=queF PE=3 SV=1

SEQ ID NO: 50907 - protein, 350 aa, unidentified
  source 1..350: note = Abditibacterium utsteinense
  REGION 1..350: note = tr|A0A2S8ST91|A0A2S8ST91_9BACT Queuine tRNA-ribosyltransferase OS=Abditibacterium utsteinense; OX = 1960156 GN=tgt PE=3 SV=1
MKFTVLKTRGAARAGILELPHGIIETPVFMPVGTLASVKAMLPHEMEQLGAQIILNNAFHLHLRPGAEVVKQAGGLHNFQNWHRPILTDSGGFQVFSLAKIRKITDEGVHFQSPVDGSKHFFTPESVIELEETLGPDIGMILDDVIALPATYDQTALAMRRSVAWAKRAANHRKRQDQSIFGIIQGGTHEELRKESAQATREIGFDGYAIGGLAVGETAEEMDAMVELTAALLPENQPRYLMGVGTPRDLKAGVERGVDMFDCVLPTRLARHNVGITEHENINFLKSKHKFDFSPLDPTCECPTCRNYTRAYIHHLCKCGEISGARLLTMHNLWFYQTWMRKLRNWILEG

SEQ ID NO: 50908 - protein, 381 aa, Abiotrophia defectiva
  REGION 1..381: note = tr|W1Q515|W1Q515_ABIDE Queuine tRNA-ribosyltransferase OS=Abiotrophia defectiva ATCC 49176 OX=592010 GN=tgt PE=3 SV=1
MTKPAVWYELIKEEKHTGARLGILHTPHGSFPTPMYMPVGTLATIKGLSPEELKEMGADVVLANTYHLWLRPGEDLVAEAGGLHKFMNWDKGILTDSGGFQVFSLSDMRKITEEGVHFRNHINGEKLFLSPEKAIHIENQLGADIIMSFDECPPFDQSYDYVKRSIERTTRWAERGLRAHQRPQDQALFGILQGAGYKDLRLAHAQDMIAMDFPGYSIGGLSVGESKEEMNEVLDYLTPVMPKHKPRYLMGVGSPDSLIDGVIRGVDMFDCVLATRIARNGTCMTSQGRLVVKNAQYARDFRPIDEKCDCYTCKHYSRAYIRHLIKCDEIFGLRLASIHNVHFLLNLMKQVRYHIENDSLLDFRQAFFEEYGYSKANARNF

SEQ ID NO: 50909 - protein, 381 aa, Abiotrophia sp.
  REGION 1..381: note = tr|A0A1F1LP91|A0A1F1LP91_9LACT Queuine tRNA-ribosyltransferase OS=Abiotrophia sp. HMSC24B09; OX = 1581061 GN=tgt PE=3 SV=1
MTKPAVWYELIKEEKHTGARLGILHTPHGSFPTPMYMPVGTLATIKGLSPEELKGMGADVVLANTYHLWLRPGEDLVAEAGGLHKFMNWDKGILTDSGGFQVFSLSDMRKITEEGVHFRNHINGEKLFLSPEKAIHIENQLGADIIMSFDECPPFDQSYDYVKRSIERTTRWAERGLRAHQRPQDQALFGILQGAGYKDLRLAHAQDMIAMDFPGYSIGGLSVGESKEEMNEVLDYLTPVMPKHKPRYLMGVGSPDSLIDGVIRGVDMFDCVLATRIARNGTCMTSQGRLVVKNAQYARDFRPIDEKCDCYTCKHYSRAYIRHLIKCDEIFGLRLASIHNVYFLLNLMKQVRYHIENDSLLDFRQAFFEEYGYSKANARNF

SEQ ID NO: 50910 - protein, 405 aa, unidentified
  source 1..405: note = Absiella dolichum
  REGION 1..405: note = tr|A8RFR3|A8RFR3_9FIRM Queuine tRNA-ribosyltransferase OS=Absiella dolichum DSM 3991; OX = 428127 GN=tgt PE=3 SV=1
MTNYKNNNTFSFEITKRIPGKLGRAGIIHTPHGDIKTPAFMCVGTRGEVRFLSMEDLESVQAQAMLSNGYHLRNTSVEIAQAGGLAKWSGWNGPTLTDSGGFQVMSLGSGIGKVVSMDREDEVINADPKDRLAHVMEDGVRFFDPFTNQEDFIGPEESMQIQCRIGADIHMAYDELTSLADSYEYNVEALARTERWAQRSIDEHKKHRDDLGYRQSLYGVLQGGRWEDLRRSTAKKLAQMEFDGYGLGGAFLKESLGEILRWCCEELPENKPRHLLGLSHPDDILIGTEMGADTFDCVAPTREARHGRIYARHGYYNLQKCQDSPLPLDEGCDCPTCRSGWTRGELRKLWKSEDNSVRQQYYNLASIHNLRFIIRLTEDARAAILNGTFPEFKAEFLKNYYPNRK

SEQ ID NO: 50911 - protein, 405 aa, unidentified; identical to SEQ ID NO: 50910
  source 1..405: note = Absiella dolichum
  REGION 1..405: note = tr|A0A415PI94|A0A415PI94_9FIRM Queuine tRNA-ribosyltransferase OS=Absiella dolichum OX=31971; GN = tgt PE=3 SV=1

SEQ ID NO: 50912 - protein, 406 aa, unidentified
  source 1..406: note = Absiella sp.
  REGION 1..406: note = tr|A0A372ST28|A0A372ST28_9FIRM Queuine tRNA-ribosyltransferase OS=Absiella sp. AM09-45 OX=2291993; GN = tgt PE=3 SV=1
MTTYKNNNTFSFEITKRIPGKLGRAGIIHTPHGDIKTPAFMAVGTNGAVRFMSMEDLNAVNAQAMLSNGYHLRNISPEIAEKGGLAAWSGWDGPTLTDSGGFQVMSLGSGCGKVVSMKREQGVVNADPKERLAHVSEDGVQFHDPFTDQEDFIGPEESMQIQCRIGADIHMAYDELTSLADSYEYNVEALARTERWAQRSLDEHKKLCDQLGYHQSLYGVLQGGRWEDLRRSTAKKFAEMDFDGYGLGGAFLKESLGEILRWCCEELPENKPRHLLGLSHPDDILIGTEMGADTFDCVAPTREARHGKLYTKYGPFNLAKFSNSTELIDEHCDCPTCKAGWTRGALRELWKSPDLEKKRQYYNLSSIHNLRFIVRLTEETRAAIENGTFEEYKAEFLQNYYHTNAK

SEQ ID NO: 50913 - protein, 406 aa, unidentified
  source 1..406: note = Absiella sp.
  REGION 1..406: note = tr|A0A417JZT0|A0A417JZT0_9FIRM Queuine tRNA-ribosyltransferase OS=Absiella sp. AM27-20 OX=2292277; GN = tgt PE=3 SV=1
MTAYKNNNTFSFEITKRIPGKLGRAGIIHTPHGDIKTPAFMAVGTNGAVRFMSMEDLNAVNAQAMLSNGYHLRNISPEIAEKGGLAAWSGWDGPTLTDSGGFQVMSLGSGCGKVVSMKREQGVVNADPKERLAHVSEDGVQFHDPFTDQEDFIGPEESMQIQCRIGADIHMAYDELTSLADSYEYNVEALARTERWAQRSLDEHKKLCDQLGYHQSLYGVLQGGRWEDLRRSTAKKFAEMDFDGYGLGGAFLKESLGEILRWCCEELPENKPRHLLGLSHPDDILIGTEMGADTFDCVAPTREARHGKLYTKYGPFNLAKFSNSTELIDEHCDCPTCKAGWTRGALRELWKSPDLEKKRQYYNLSSIHNLRFIIRLTEETRAAIENGTFEEYKAEFLQNYYHTNTK

SEQ ID NO: 50914 - protein, 365 aa, unidentified
  source 1..365: note = Abyssibacter profundi
  REGION 1..365: note = tr|A0A363UNW0|A0A363UNW0_9GAMM Queuine tRNA-ribosyltransferase OS=Abyssibacter profundi; OX = 2182787 GN=tgt PE=3 SV=1
MSFVCLQTDGGARRGRLTTQHGVIETPIFMPVGTYGTVKAMTPEELDSLGASIILGNTFHLMLRPGEQVVQALGGLHGFMHWDGPILTDSGGFQVWSLTELRKLTEQGVVFRSPVNGDRVELTPERSIQVQHALGSDIVMQFDECTAYPATEAEAAESMRLSLRWADRCRQAHADNPNLLFGIVQGGMHADLRRESLAGLETVGFDGYAIGGLSVGETREERLHVLETLSPLMPADRPRYLMGVGTPRDLIEGIDRGVDMFDCVMPTRNARNGHLFTSGGIVRIRNARHREDPAPLDADCSCYTCQHYSRAYLYHLNRCNEILGARLNTIHNLHFYLDLMRRAREAIEQGRWAGFRDGELKRWAD

SEQ ID NO: 50915 - protein, 382 aa, unidentified
  source 1..382: note = Abyssicoccus albus
  REGION 1..382: note = tr|A0A3N5C768|A0A3N5C768_9STAP Queuine tRNA-ribosyltransferase OS=Abyssicoccus albus OX=1817405; GN = tgt PE=3 SV=1
MAAITYEHIKTCKQSGARLGKVHTPHGTFETPIFMPVGTLATVKTMSPEELLQVGSQIILSNTYHLWLRPGSDIIKEAGGLHKFMNWDHPILTDSGGFQVFSLSDMRKIEEEGVHFRHHLNGSKLFLSPEKAMDIQHDLGSDIMMSFDECPPFPAEYDYVKQSIERTTRWAHRGLEHHIKSGHDKHQALFGIVQGGEYEALRTQSAKELVAMDFSGYSIGGLSVGEPKDIMYRMLEHTTPLLPFHKPRYLMGVGSPDALIEGVIRGIDMFDCVLPTRIARNGTTMTSNGRVVVKKEQYARDFTPLDESCDCYTCKNYTKAYLRHLIKTDEILGLRLTSIHNLYFLLKLMENVRQAIREDRLLDFKEEFFEQYGLNVENPKNF

SEQ ID NO: 50916 - protein, 374 aa, unidentified
  source 1..374: note = Acaryochloris marina
  REGION 1..374: note = tr|B0C6Z6|B0C6Z6_ACAM1 Queuine tRNA-ribosyltransferase OS=Acaryochloris marina (strain MBIC 11017) OX=329726 GN=tgt PE=3 SV=1
MSNQFRFECHQHCSQTQARVGTFYTPHGPVDTPRFMPVGTLANVKTLTPAQLQETGAQMILANTYHLHLQPGESIVEQAGGLHRFMSWSGPILTDSGGFQVFSLSDMRSIAEEGVSFRSPRDGQMIYLSPETSMAIQNALGADVIMAFDECPSYPASRDAIQAATERTQRWLARCVKAHDRSDQALFGIVQGGTFADLRQAAARSVVEFDLPGYAIGGVSVGEPPELIEKIVKVTTPLLPVHKPRYLMGVGTYREMVQAIAAGIDLFDCVIPTRLARHGNALVAGERWNLKNNRFREDFTPLDSACPCYTCQNFTRAYISHLLRSRELLAYTLLSIHNITELIGFTQRIRQAILDDQFQQIFGTWLFSSDTQLD

SEQ ID NO: 50917 - protein, 335 aa, unidentified
  source 1..335: note = Acaryochloris sp.
  REGION 1..335: note = tr|A0A2W1JXF1|A0A2W1JXF1_9CYAN Queuine tRNA-ribosyltransferase OS=Acaryochloris sp. RCC1774; OX = 1764569 GN=tgt_1 PE=3 SV=1
MPVGTLANVKTVTPDQLQGTGAQMILANTYHLHLQPGEGIVERAGGLHRFMGWSGPILTDSGGFQVFSLSDMRSIEESGVSFRSPRDGQVIHLSPERAIAIQNALGADVIMAFDECAPYPASREAIENAADRTTRWLERCIKAHERADQALFGIVQGGTYLDLRQKSARSLVEFDLPGYAIGGVSVGEPPELIEKIVQATTPLLPKDKPRYLMGVGTYREMAQAIAAGIDLFDCVIPTRLARHGNALVRGERWNLKNNRFRKDFTPLDSDCPCYACQTFTRAYLSHLLRSRELLAYTLLSIHNITELVGFTQKIRQAIIQGTFAQDFRNWLQPAK

SEQ ID NO: 50918 - protein, 371 aa, unidentified
  source 1..371: note = Accumulibacter phosphatis
  REGION 1..371: note = tr|C7RRX9|C7RRX9_ACCPU Queuine tRNA-ribosyltransferase OS=Accumulibacter phosphatis (strain UW-1) OX=522306 GN=tgt PE=3 SV=1
MNFQLLASDGAARCGRLTLTHGTVDTPAFMPVGTYGTVKAMTPRDLTATGAQICLGNTFHLWLRPGLEVIAAHGGLHRFMGWNGPILTDSGGFQVFSLGALRKISEEGVRFQSPVNGDRLFLTPEESMRIQHVLNSDIAMILDECTPYPADHAVAAASMCLSLRWARRSRDRHDEIGNANALFGIVQGGMYEDLRDESLAALIDIGFAGFAIGGLSVGEPKDDMARILAHTAPRLPQDRPRYLMGVGTPEDLVAAVGAGIDMFDCVLPTRNARNGHFFTRYGDIRIRNACHKSDPRPLDASCECYTCRNFSRAYLHHLNRTGEILGAHLGTLHNLHYYQVLMHELRKAIASGTLASTVSAFQRARAQPTTA

SEQ ID NO: 50919 - protein, 378 aa, Acetanaerobacterium elongatum
  REGION 1..378: note = tr|A0A1H0BDF2|A0A1H0BDF2_9FIRM Queuine tRNA-ribosyltransferase OS=Acetanaerobacterium elongatum; OX = 258515 GN=tgt PE=3 SV=1
MYKLIKKDGKARRGEFTTVHGTVQTPAFMNVATAGAIKGGISSYDLKNLKCQVELCNTYHLHLRPGDTLIREMGGLHRFIGWAGPILTDSGGFQVFSLAQLRKIKEEGVTFQSHIDGRKIFMGPEESMRIQSNLGSTIAMAFDECVENPAPYEYSKKSCDRTERWLYRCKDEMTRLNALHDTINPNQMLFGINQGCVYEDLRVQHMESIVKLDLDGYAIGGLAVGEPAVDMYRIISTVEPYMPADKPRYLMGVGTPVNIIEAVSRGVDLFDCVMPSRNARHGHMFTFNGIVNIINAKYTNDERPIAEDCDCPVCKNHSRAYIRHLFKANEMLGMRLAVMHNLYFYNTLMERIREAIEEGTFEQFKERYVPILDKRCKD

SEQ ID NO: 50920 - protein, 378 aa, unidentified
  source 1..378: note = Acetatifactor muris
  REGION 1..378: note = tr|A0A2K4ZDF0|A0A2K4ZDF0_9FIRM Queuine tRNA-ribosyltransferase OS=Acetatifactor muris OX=879566; GN = tgt PE=3 SV=1
MRYRILKQEGRAKRAELETVHGTVQTPLFMNVGTVAAIKGAVATSDLEQIKTQVELSNTYHLHVRPGDKIIRQLGGLHKFMSWDRPILTDSGGFQVFSLAGLRKIKEEGVYFRSHIDGRKIFMGPEESMQIQSNLGSTIAMAFDECAPSRADRSYVQASVDRTARWLERCKKEMARLNSLEDTINREQLLFGINQGAIYPDIRIEHAKRISEMELDGYAVGGLAVGETHEEMYHILDQVVPFLPKDKPAYLMGVGTPANILEGVERGIDFFDCVYPTRNGRHGHLYTNQGKINLFNAKYELDDRPIEEGCGCPACRRYSRAYIRHLLKAKEMLGMRLCVLHNLYFYNTMMEEIRDALDEGRFAEYKKRKLTGINPLDQ

SEQ ID NO: 50921 - protein, 376 aa, Acetitomaculum ruminis
  REGION 1..376: note = tr|A0A1I0VMQ4|A0A1I0VMQ4_9FIRM Queuine tRNA-ribosyltransferase OS=Acetitomaculum ruminis DSM 5522; OX = 1120918 GN=tgt PE=3 SV=1
MFEIKNIDGCAKSGIFKTVHGDIKTPVFMNVGTAAAIKGAVSTVDLKNINTQVELSNTYHLHVRPGDKIVKEMGGLHKFMNWDRPILTDSGGFQVFSLAKLRKIKEEGVYFNSHVDGRKIFMGPEESMQIQSNLASTIAMAFDECPSSMADREYVKKSVDRTTRWLIRCKNEIERLNSLEDTINKNQMLFGINQGAIFDDIRIEHAKEISDLNLDGYAIGGLAVGESHEEMYHVIEKVVPYLPSNKPVYLMGVGTPSNILEAVERGVDFFDCVYPSRNGRHGHVYTNHGKLNLLNKKYELDQRPIEEGCGCEACTHFTRGYIRHLLKAKEMLGMRLCVLHNLYFYNNMMEEIRQAIDNNEFAAYKKRKIDGFNAGE

SEQ ID NO: 50922 - protein, 377 aa, Acetivibrio ethanolgignens
  REGION 1..377: note = tr|A0A0V8QEK3|A0A0V8QEK3_9FIRM Queuine tRNA-ribosyltransferase OS=Acetivibrio ethanolgignens; OX = 290052 GN=tgt PE=3 SV=1
MYKLLCKDGDAKRGEFVTVHGTIQTPVFMNVGTAAAIKGAVSTMDLQQLKTQVELSNTYHLHVRPGDRVVKQLGGLHKFMVWDKPILTDSGGFQVFSLAGLRKIKEEGVYFNSHIDGRKIFMGPEESMQIQSNLASTIAMAFDECPPHPATREYMHNSVDRTTRWLRRCQIEMKRLNSLEDTINKKQMLFGINQGGTFEDIRIEHAKRISDMNLDGYALGGLAVGESHEEMYHIIEKTVPYLPLEKPTYLMGVGTPANILEAVERGVDFFDCVYPARNGRHGHAYTNHGKMNLMNARYELDDRPIEEGCQCPACRTYSRAYIRHLLKAKEMLGLRLLVMHNLYFYNTMMGEIREAIEQGRFKEYKKNKLAGFAEGDN

SEQ ID NO: 50923 - protein, 371 aa, Acetoanaerobium noterae
  REGION 1..371: note = tr|A0A1T5CKY3|A0A1T5CKY3_9FIRM Queuine tRNA-ribosyltransferase OS=Acetoanaerobium noterae; OX = 745369 GN=tgt PE=3 SV=1
MSAIRYELIKTCKQSGARLGKIYTPHGVIDTPIFMPVGTQATVKSMTPEELKVMDARIILSNTYHLYMRPGHELIEKAGGLHKFMNWDRAILTDSGGFQVFSLGPLRKIVEEGVHFRSHLDGSKHFISPEKAIEIQNSLGADIIMSFDECAPYPSEYNYVKKSLERTTRWAKRGKEAHKYPEKQALFGIVQGGMYKDLRTQSANELMEIDFPGYSIGGLSVGEPKPIMYDVLEHTTPLLPKDKPRYLMGVGSPDDLIEGVIRGVDMFDCVLPTRIARNGTAMTSQGKVVVRNATYQEDFTPLDPNCNCYTCKNYSRAYIRHLVKANEILASRLITNHNLHFLLNLMHEVRTAIKEDRLLDFKKDFYSKYGL

SEQ ID NO: 50924 - protein, 371 aa, unidentified; identical to SEQ ID NO: 50923
  source 1..371: note = Acetoanaerobium sticklandii
  REGION 1..371: note = tr|E3PRC8|E3PRC8_ACESD Queuine tRNA-ribosyltransferase OS=Acetoanaerobium sticklandii (strain ATCC 12662 / DSM 519 / JCM 1433 / NCIMB 10654); OX = 499177 GN=tgt PE=3 SV =1

SEQ ID NO: 50925 - protein, 387 aa, Acetobacter aceti
  REGION 1..387: note = tr|A0A0D6MS34|A0A0D6MS34_ACEAC Queuine tRNA-ribosyltransferase OS=Acetobacter aceti NBRC 14818; OX = 887700 GN=tgt PE=3 SV=1
MSSTFRWICESTDGLARAGTLHTAHGPVQTPTFMPVGTAGTVKAMTMDAVRSTGAGIVLGNTYHLMLRPGAERVKQLGGLHKFMDWSGPILTDSGGFQVMSLGALRKLDQDGVTFQSHIDGSKHRLDPQRSTDIQHALDATITMCFDECPALPAAPEAIAASMRMSMRWAARSREAFIQREGYGQFGIVQGGTEPELRAESVKALTDIGFEGYAIGGLAVGEGQELMFSTLDVTTPLMPNDKPRYLMGVGTPDDLLGSVMRGVDMFDCVMPTRAGRTARAYTERGHINLRNARFALDARPLSPHCDCLACTRHSRAYLHHLFRADEILGPMLLTWHNLAYYQRLMRGIRAAIVDGTLSAHAEHLRAEWQAGDWSEDEVPQPLIPPVA

SEQ ID NO: 50926 - protein, 387 aa, Acetobacter aceti
  REGION 1..387: note = tr|A0A1U9KJD5|A0A1U9KJD5_ACEAC Queuine tRNA-ribosyltransferase OS=Acetobacter aceti OX=435 GN=tgt; PE = 3 SV=1
MSSTFRWICESTDGQARAGTLHTAHGPVQTPTFMPVGTAGTVKAMTMDAVRSTGAGIVLGNTYHLMLRPGAERVKRLGGLHKFMDWSGPILTDSGGFQVMSLGALRKLDQDGVTFQSHIDGSKHRLDPQRSTDIQHALDATITMCFDECPALPAAPEAIAASMRMSMRWAARSREAFIQREGYGQFGIVQGGTEPELRAESVKALTDIGFEGYAIGGLAVGEGQELMFSTLDVTTPLMPNDKPRYLMGVGTPDDLLGSVMRGVDMFDCVMPTRAGRTARAYTERGHINLRNARFALDARPLSPHCDCLACTRHSRAYLHHLFRADEILGPMLLTWHNLAYYQRLMRGIRAAIVDGTLEAHAAHLRAEWQAGDWSEDEVPQPLIPPVA

SEQ ID NO: 50927 - protein, 386 aa, unidentified
  source 1..386: note = Acetobacter ascendens
  REGION 1..386: note = tr|A0A1D8QY69|A0A1D8QY69_9PROT Queuine tRNA-ribosyltransferase OS=Acetobacter ascendens OX=481146; GN = tgt PE=3 SV=1
MTRFNWTCESTDGAARAGMLHTAHGPVATPTFMPVGTVGTVKAMTMDAVRSTGAGIVLGNTYHLMLRPGAERIRALGGLHKFMDWSGPILTDSGGFQVMSLGALRRLDQDGVTFRSHIDGSEHRLTPESSTDIQHALDATITMCFDECPALPAPPEAIAASMRLSMRWAARSRQAYVQREGYGQFGIVQGGTEPELRAESVKALTDIGFEGYAIGGLAVGEGQELMFATLDTTTPIMPQDKPRYLMGVGTPNDLLGSVQRGVDMFDCVMPTRAGRTARAYTERGTLNLRNARHATDARPISPHCNCLACSRHSRAYLHHLFRANEILGPMLLTWHNIAYYQRLMREIRQAIVEKRLDALAATLRAEWAAEDWTEDEMPQPTIPPVP

SEQ ID NO: 50928 - protein, 386 aa, unidentified
  source 1..386: note = Acetobacter ascendens
  REGION 1..386: note = tr|A0A1Y0UWK0|A0A1Y0UWK0_9PROT Queuine tRNA-ribosyltransferase OS=Acetobacter ascendens OX=481146; GN = tgt PE=3 SV=1
MTRFNWTCESTDGAARAGMLHTAHGPVATPTFMPVGTVGTVKAMTMDAVRSTGAGIVLGNTYHLMLRPGAERIRALGGLHKFMDWSGPILTDSGGFQVMSLGALRRLDQDGVTFRSHIDGSEHRLTPESSTDIQHALDATITMCFDECPALPAPPEAIAASMRLSMRWAARSRQAYVQREGYGQFGIVQGGTEPELRAESVKALTDIGFEGYAIGGLAVGEGQELMFATLDTTTPIMPQDKPRYLMGVGTPDDLLGSVQRGVDMFDCVMPTRAGRTARAYTERGTLNLRNARHATDARPISPHCNCLACSRHSRAYLHHLFRANEILGPMLLTWHNIAYYQRLMREIWQAIVEKRLDALAATLRAEWAAEDWTEDEMPQPTIPPVP

SEQ ID NO: 50929 - protein, 386 aa, Acetobacter cerevisiae
  REGION 1..386: note = tr|A0A149UV63|A0A149UV63_9PROT Queuine tRNA-ribosyltransferase OS=Acetobacter cerevisiae; OX = 178900 GN=tgt PE=3 SV=1
MSRFHWTCESTDGAARAGTLHTAHGPVATPTFMPVGTVGTVKAMTMDAVRSTGAGIVLGNTYHLMLRPGAERIRALGGLHRFMDWSGPILTDSGGFQVMSLGALRKLDQDGVTFRSHIDGSYHRLTPEISTDIQHALDATITMCFDECPALPAPPETIAASMRMSMRWAARSREAFVQRTGYGQFGIVQGGTEQDLRAESVKALTDIGFEGYAIGGLAVGEGQELMFATLDTTVPVMPQNAPRYLMGVGTPDDLLGSVQRGVDMFDCVMPTRAGRTARAYTERGTLNLRNARHATDARPISPDCDCLACSRHSRAYLHHLFRANEILGPMLLTWHNIAYYQRLMRQIREAIIEGRLDELATTLRANWAAEDWTEDEMPQPAIPPVP

SEQ ID NO: 50930 - protein, 386 aa, Acetobacter cerevisiae
  REGION 1..386: note = tr|A0A149QEN5|A0A149QEN5_9PROT Queuine tRNA-ribosyltransferase OS=Acetobacter cerevisiae; OX = 178900 GN=tgt PE=3 SV=1
MSRFHWTCESTDGAARAGMLHTAHGPVATPTFMPVGTVGTVKAMTMDAVRSTGAGIVLGNTYHLMLRPGAERIRALGGLHRFMDWSGPILTDSGGFQVMSLGALRKLDQDGVTFRSHIDGSYHRLTPEISTDIQHALDATITMCFDECPALPAPPETIAASMRMSMRWAARSREAFVQRTGYGQFGIVQGGTEQDLRAESVKALTDIGFEGYAIGGLAVGEGQELMFATLDTTVPVMPQNAPRYLMGVGTPDDLLGSVQRGVDMFDCVMPTRAGRTARAYTERGTLNLRNARHATDARPISPDCDCLACSRHSRAYLHHLFRANEILGPMLLTWHNIAYYQRLMRQIREAIVEGRLDELATTLRANWAAEDWTEDEMPQPTIPPVP

SEQ ID NO: 50931 - protein, 386 aa, Acetobacter cibinongensis
  REGION 1..386: note = tr|A0A1Z5YZE0|A0A1Z5YZE0_9PROT Queuine tRNA-ribosyltransferase OS=Acetobacter cibinongensis; OX = 146475 GN=tgt PE=3 SV=1
MSRFHWTCESTDGAARAGTLHTAHGPVATPTFMPVGTVGTVKAMTMDAVRSTGAGIVLGNTYHLMLRPGAERVQQLGGLHKFMDWSGPILTDSGGFQVMSLGPLRKLDQDGVTFKSHIDGSTHRLTPESSTDIQHKLDATITMCFDECPALPAPVETIAKSMRLSMKWAERSRQAFIQREGYGQFGIVQGGTEADLRAESVKALTDIGFEGYAIGGLAVGEGQELMFSTLNTTVPLMPQSAPRYLMGVGTPDDLLGSVMRGVDMFDCVMPTRAGRTARAYTERGTLNLRNARHAGDARPISPHCDCLACTRHSRAYLHHLFRANEILGPMLLTWHNIAYYQRLMRQIREAILEKRLEALALQLRAEWAAEDWSEDEMPQPVIPPVP

SEQ ID NO: 50932 - protein, 386 aa, Acetobacter cibinongensis; identical to SEQ ID NO: 50931
  REGION 1..386: note = tr|A0A0D6N1U7|A0A0D6N1U7_9PROT Queuine tRNA-ribosyltransferase OS=Acetobacter cibinongensis 4H-1; OX = 1231339 GN=tgt PE=3 SV=1

SEQ ID NO: 50933 - protein, 386 aa, Acetobacter fabarum
  REGION 1..386: note = tr|A0A269XYF0|A0A269XYF0_9PROT Queuine tRNA-ribosyltransferase OS=Acetobacter fabarum OX=483199; GN = tgt PE=3 SV=1
MSRFHWTCESTDGAARAGMLHTAHGPVATPTFMPVGTVGTVKAMTMDAVRSTGAGIVLGNTYHLMLRPGAARVRALGGLHRFMDWSGPILTDSGGFQVMSLGALRRLDQDGVTFRSHIDGSEHRLTPESSTGIQHDLDATITMCFDECPALPAPPEAIAASMRLSMRWAARSREAYVQRTGYGQFGIVQGGTETDLRAESVKALTDIGFEGYAIGGLAVGEGQELMFATLDTTTPLMPQDKPRYLMGVGTPDDLLGSVQRGVDMFDCVMPTRAGRTARAYTERGTLNLRNARHATDARPISPHCDCLACTRHSRAYLHHLFRANEILGPMLLTWHNIAYYQRLMRQIRQAIMDKNLEATAARMRSEWAAQDWTEDEMPQPHIPPIP

SEQ ID NO: 50934 - protein, 386 aa, Acetobacter ghanensis
  REGION 1..386: note = tr|A0A0U5F1G8|A0A0U5F1G8_9PROT Queuine tRNA-ribosyltransferase OS=Acetobacter ghanensis OX=431306; GN = tgt PE=3 SV=1
MSRFHWTCESTDGAARAGMLHTAHGPVATPTFMPVGTVGTVKAMTMDAVRSTGAGIVLGNTYHLMLRPGAARVRALGGLHRFMDWSGPILTDSGGFQVMSLGALRRLDQDGVTFRSHIDGSEHRLTPESSTGIQHDLDATITMCFDECPALPAPPEAIAASMRLSMRWAARSREAYVQRTGYGQFGIVQGGTETDLRTESVKALTDIGFEGYAIGGLAVGEGQELMFATLDTTTPIMPADKPRYLMGVGTPDDLLGSVQRGVDMFDCVMPTRAGRTARAYTERGTLNLRNARHATDARPISPHCDCLACSRHSRAYLHHLFRANEILGPMLLTWHNIAYYQRLMRQIRQAIMDKNLDATAATMRAEWAAQDWTEDEMPQPLIPPIP

SEQ ID NO: 50935 - protein, 386 aa, Acetobacter indonesiensis
  REGION 1..386: note = tr|A0A252ATE1|A0A252ATE1_9PROT Queuine tRNA-ribosyltransferase OS=Acetobacter indonesiensis; OX = 104101 GN=tgt PE=3 SV=1
MTRFNWTCESTDGAARAGMLHTAHGPVATPTFMPVGTVGTVKAMTMDAVRSTGAGIVLGNTYHLMLRPGAERVRQLGGLHKFMDWSGPILTDSGGFQVMSLGALRKLDQDGVTFKSHIDGSAHRLTPESSTDIQHALDATITMCFDECPALPAAPDAIAKSMRLSMRWAARSREAFVQREGYGQFGIVQGGTESDLRAESVKALTNIGFEGYAIGGLAVGEGQELMFATLDTTVPLMPQTAPRYLMGVGTPDDLLGSVMRGVDMFDCVMPTRAGRTARAYTERGTLNLRNARHANDARPISPHCDCLACSRHSRAYLHHLFRANEILGPMLLTWHNIAYYQRLMRQIREAIVEGRLAALATHLRAEWAAEDWTEDEMPQPVIPPVA

SEQ ID NO: 50936 - protein, 386 aa, Acetobacter indonesiensis
  REGION 1..386: note = tr|A0A0D6N795|A0A0D6N795_9PROT Queuine tRNA-ribosyltransferase OS=Acetobacter indonesiensis 5H-1; OX = 1231340 GN=tgt PE=3 SV=1
MTRFNWTCERTDGAARAGMLHTAHGPVATPTFMPVGTVGTVKAMTMDAVRSTGAGIVLGNTYHLMLRPGAERVRQLGGLHKFMDWSGPILTDSGGFQVMSLGALRKLDQDGVTFKSHIDGSAHRLTPESSTDIQHALDATITMCFDECPALPAAPDVIAKSMRLSMRWAARSREAFVQREGYGQFGIVQGGTESDLRAESVKALTDIGFEGYAIGGLAVGEGQELMFATLDTTVPLMPQTAPRYLMGVGTPDDLLGSVMRGVDMFDCVMPTRAGRTARAYTERGTLNLRNARHANDARPISPHCDCLACSRHSRAYLHHLFRANEILGPMLLTWHNIAYYQRLMRQIREAIVEGRLAALATHLRAEWAAEDWTEDEMPQPVIPPVA

SEQ ID NO: 50937 - protein, 386 aa, Acetobacter malorum
  REGION 1..386: note = tr|A0A087PPV2|A0A087PPV2_9PROT Queuine tRNA-ribosyltransferase OS=Acetobacter malorum OX=178901; GN = tgt PE=3 SV=1
MSRFHWTCESTDGAARAGMLHTAHGPVATPTFMPVGTVGTVKAMTMDAVRSTGAGIVLGNTYHLMLRPGAERIRALGGLHRFMDWSGPILTDSGGFQVMSLGALRKLDQDGVTFRSHIDGSYHRLTPESSTDIQHALDATITMCFDECPALPAPPETIAASMRMSMRWAARSREAFVQRTGYGQFGIVQGGTEQDLRAESVKALTDIGFEGYAIGGLAVGEGQELMFATLDTTVPVMPQNAPRYLMGVGTPDDLLGSVQRGVDMFDCVMPTRAGRTARAYTERGTLNLRNARHATDARPISPDCDCLACSRHSRAYLHHLFRANEILGPMLLTWHNIAYYQRLMRQIREAIIEGRLDDLATTLRANWAAEDWTEDEMPQPAIPPVP

SEQ ID NO: 50938 - protein, 386 aa, Acetobacter malorum
  REGION 1..386: note = tr|A0A149RTQ3|A0A149RTQ3_9PROT Queuine tRNA-ribosyltransferase OS=Acetobacter malorum OX=178901; GN = tgt PE=3 SV=1
MSRFHWTCESTDGAARAGMLHTAHGPVATPTFMPVGTVGTVKAMTMDAVRSTGAGIVLGNTYHLMLRPGAERIRALGGLHRFMDWSGPILTDSGGFQVMSLGALRKLDQDGVTFRSHIDGSYHRLTPESSTEIQHALDATITMCFDECPALPAPPETIAASMRMSMRWAARSREAFVQRTGYGQFGIVQGGTEQDLRAESVKALTDIGFEGYAIGGLAVGEGQELMFATLDTTVPVMPQNAPRYLMGVGTPDDLLGSVQRGVDMFDCVMPTRAGRTARAYTERGTLNLRNARHATDARPISPDCDCLACSRHSRAYLHHLFRANEILGPMLLTWHNIAYYQRLMRQIREAIIEGRLDELATTLRANWAAEDWTEDEMPQPVIPPVP

SEQ ID NO: 50939 - protein, 386 aa, Acetobacter nitrogenifigens
  REGION 1..386: note = tr|A0A511X749|A0A511X749_9PROT Queuine tRNA-ribosyltransferase OS=Acetobacter nitrogenifigens DSM 23921 = LMG 23498 OX=1120919 GN=tgt PE=3 SV=1
MTAFNWRCEAVDGRARAGVLETAHGPVATPTFMPVGTVGTVKAMTMDAVRSTGAGIVLGNTYHLMLRPGAERVRALGGLHRMMDWPGPILTDSGGFQVMSLGALRKLDQDGVTFQSHIDGSKHRLDPERSTAIQHALDATITMCFDECPALPAQADAIAASMRLSMRWAARSREAFVQREGYGQFGIVQGGVEPELRAESAKALCDIGFEGYAIGGLAVGEGQELMFATLDVTTPLLPGDKPRYLMGVGTPDDLLGGVERGVDMFDCVMPTRAGRTARAYTERGTLNLRNARFATDARPISPDCDCLACSRHSRAYLHHLFRADEILGPMLLTWHNLAYYQRMMRGLRTAIVAGDLAAHGAALRAAWAQGDWTEEEWPQPSIPPVS

SEQ ID NO: 50940 - protein, 388 aa, Acetobacter oeni
  REGION 1..388: note = tr|A0A511XMV1|A0A511XMV1_9PROT Queuine tRNA-ribosyltransferase OS=Acetobacter oeni OX=304077; GN = tgt PE=3 SV=1
MKSDTFRWICESTDGAARAGRLQTAHGPVETPTFMPVGTAGTVKAMTMDAVRSTGAGIVLGNTYHLMLRPGAERVRALGGLHRFMDWPGPILTDSGGFQVMSLGALRKLDQDGVTFQSHIDGSKHRLDPERSTVIQHALDATITMCLDECPALPAAPEAIAASMRMSMRWAARSREAFVARPGYGQFGIVQGGTEPELRAESVKALTDIGFEGYAVGGLAVGEGQALMFSTLDVTTPLMPVDAPRYLMGVGTPDDLLGAVERGIDMFDCVMPTRAGRTARAYTERGTLNLRNARFAEDARPLSPHCDCLACSRHSRAYLHHLFRTNEILAPMLLTWHNLAYYQRLMRGIRMAIVDGTLSAHGAHLRAEWAMEDWSEDEMPQPVIPPVP

SEQ ID NO: 50941 - protein, 386 aa, unidentified
  source 1..386: note = Acetobacter okinawensis
  REGION 1..386: note = tr|A0A252BYA9|A0A252BYA9_9PROT Queuine tRNA-ribosyltransferase OS=Acetobacter okinawensis; OX = 1076594 GN=tgt PE=3 SV=1
MSRFHWTCESTDGAARAGMLHTAHGPVATPTFMPVGTVGTVKAMTMDAVRSTGAGIVLGNTYHLMLRPGAARVRALGGLHRFMDWSGPILTDSGGFQVMSLGALRRLDQDGVTFRSHIDGSEHRLTPESSTGIQHDLDATITMCFDECPALPAPPEAIAASMRLSMRWAARSREAYVQRTGYGQFGIVQGGTETDLRAESVKALTDIGFEGYAIGGLAVGEGQELMFATLDSTTPIMPTDKPRYLMGVGTPDDLLGSVQRGVDMFDCVMPTRAGRTARAYTERGTLNLRNARHATDARPISPHCDCLACTRHSRAYLHHLFRANEILGPMLLTWHNIAYYQRLMRQIRQAIVDKNLDATAARMRAEWAAQDWTEDEMPQPLIPPIP

SEQ ID NO: 50942 - protein, 386 aa, Acetobacter orientalis
  REGION 1..386: note = tr|A0A252A353|A0A252A353_9PROT Queuine tRNA-ribosyltransferase OS=Acetobacter orientalis; OX = 146474 GN=tgt PE=3 SV=1
MSRFHWTCESTDGAARAGMLHTAHGPVATPTFMPVGTVGTVKAMTMDAVRSTGAGIVLGNTYHLMLRPGAERVQQLGGLHKFMDWSGPILTDSGGFQVMSLGALRKLDQDGVTFKSHIDGSTHRLTPESSTDIQHKLDATITMCFDECPALPAAPEAIAASMRLSMRWAARSREAFIPRAGYGQFGIVQGGTETDLRAESVKALTDIGFEGYAIGGLAVGEGQELMFSTLDTTVPLMPTNAPRYLMGVGTPDDLLGSVMRGVDMFDCVMPTRAGRTARAYTERGTLNLRNARHANDARPISPHCDCLACTHHSRAYLHHLFRANEILGPMLLTWHNIAYYQRLMRQIRAAILEGQLEALATRLRAEWAAEDWTEDEMPQPHIPPVA

SEQ ID NO: 50943 - protein, 386 aa, Acetobacter orientalis
  REGION 1..386: note = tr|A0A252BFP9|A0A252BFP9_9PROT Queuine tRNA-ribosyltransferase OS=Acetobacter orientalis; OX = 146474 GN=tgt PE=3 SV=1
MSRFHWTCESTDGAARAGMLHTAHGPVATPTFMPVGTVGTVKAMTMDAVRSTGAGIVLGNTYHLMLRPGAERVQQLGGLHKFMDWSGPILTDSGGFQVMSLGALRKLDQDGVTFKSHIDGSTHRLTPESSTDIQHKLDATITMCFDECPALPAAPEAIAASMRLSMRWATRSREAFIPRAGYGQFGIVQGGTETDLRAESVKALTDIGFEGYAIGGLAVGEGQELMFSTLDTTVPLMPTNAPRYLMGVGTPDDLLGSVMRGVDMFDCVMPTRAGRTARAYTERGTLNLRNARHANDARPISPHCDCLACTRHSRAYLHHLFRANEILGPMLLTWHNIAYYQRLMRQIRAAILEGQLEALATRLRAEWAAEDWTEDEMPQPHIPPVA

SEQ ID NO: 50944 - protein, 386 aa, Acetobacter orleanensis
  REGION 1..386: note = tr|A0A4Y3TR62|A0A4Y3TR62_9PROT Queuine tRNA-ribosyltransferase OS=Acetobacter orleanensis; OX = 104099 GN=tgt PE=3 SV=1
MSRFHWTCESTDGAARAGMLHTAHGPVATPTFMPVGTVGTVKAMTMDAVRSTGAGIVLGNTYHLMLRPGAERVRALGGLHRFMDWSGPILTDSGGFQVMSLGALRKLDQDGVTFRSHIDGSYHRLTPEISTDIQHALDATITMCFDECPALPAPPETIAASMRLSMRWAARSREAFVQRTGYGQFGIVQGGTEPDLRAESVKALTDIGFEGYAIGGLAVGEGQALMFGTLDTTVPAMPQNAPRYLMGVGTPDDLLGSVQRGVDMFDCVMPTRAGRTARAYTERGTLNLRNARHATDARPISPDCDCLACSRHSRAYLHHLFRANEILGPMLLTWHNIAYYQRLMRQIRAAIVEGRLDELATTLRANWAAEDWTEDEMPQPVIPPVP

SEQ ID NO: 50945 - protein, 386 aa, Acetobacter pasteurianus
  REGION 1..386: note = tr|A0A1A0DE03|A0A1A0DE03_ACEPA Queuine tRNA-ribosyltransferase OS=Acetobacter pasteurianus OX=438; GN = tgt PE=3 SV=1
MTRFNWTCESTDGAARAGMLHTAHGPVATPTFMPVGTVGTVKAMTMDAVRSTGAGIVLGNTYHLMLRPGAERIRALGGLHKFMDWSGPILTDSGGFQVMSLGALRRLDQDGVTFRSHIDGSEHRLTPESSTDIQHALDATITMCFDECPALPAPPEAIAASMRLSMRWAARSRQAYVQREGYGQFGIVQGGTEPELRAESVKALTDIGFEGYAIGGLAVGEGQELMFATLDTTTPIMPQDKPRYLMGVGTPDDLLGSVQRGVDMFDCVMPTRAGRTARAYTERGTLNLRNARHATDARPISPHCDCLACSRHSRAYLHHLFRANEILGPMLLTWHNIAYYQRLMRQIRQAIVEKRLDALATTLRAEWAAEDWTEDEMPQPTIPPVP

SEQ ID NO: 50946 - protein, 386 aa, Acetobacter pasteurianus
  REGION 1..386: note = tr|S6DB74|S6DB74_ACEPA Queuine tRNA-ribosyltransferase OS=Acetobacter pasteurianus 386B; OX = 1266844 GN=tgt PE=3 SV=1
MTRFNWTCESTDGAARAGMLHTAHGPVATPTFMPVGTVGTVKAMTMDAVRSTGAGIVLGNTYHLMLRPGAERIRALGGLHKFMDWSGPILTDSGGFQVMSLGALRRLDQDGVTFRSHIDGSEHRLTPESSTDIQHALDATITMCFDECPALPAPPEAIAASMRLSMRWAARSRQAYVQREGYGQFGIVQGGTEPELRAESVKALTDIGFEGYAIGGLAVGEGQELMFATLDTTTPIMPQDKPRYLMGVGTPDDLLGSVQRGVDMFDCVMPTRAGRTARAYTERGTLNLRNARHATDARPISPYCDCLACSRHSRAYLHHLFRANEILGPMLLTWHNIAYYQRLMRQIRQAIVEKRLDALATTLRAEWAAEDWTEDEMPQPTIPPVP

SEQ ID NO: 50947 - protein, 386 aa, unidentified
  source 1..386: note = Acetobacter peroxydans
  REGION 1..386: note = tr|A0A4Y3TVK5|A0A4Y3TVK5_9PROT Queuine tRNA-ribosyltransferase OS=Acetobacter peroxydans; OX = 104098 GN=tgt PE=3 SV=1
MTRFHWTCESTDGAARAGTLHTAHGPVATPTFMPVGTVGTVKAMTMDAVRSTGAGIVLGNTYHLMLRPGAERVRALGGLHRFMDWPGPILTDSGGFQVMSLGALRRLDQDGVTFRSHIDGSEHRLTPERSTAIQHALDATITMCFDECPALPAPPEAIAASMRLSMRWAARSREAYVQREGYGQFGIVQGGTEPELRAESIKALTDVGFEGYAIGGLAVGEGQALMFATLEATTPLMPQDKPRYLMGVGTPDDLLGGVMRGVDMFDCVMPTRAGRTARAYTERGTLNLRNARHAADARPISPHCDCLACTRHGRAYLHHLFRANEILGPMLLTWHNIAYYQRLMRQMREAIGTGTLQSLADILRAGWEASDWTEDEMPQPAIPLAP

SEQ ID NO: 50948 - protein, 386 aa, unidentified
  source 1..386: note = Acetobacter persici
  REGION 1..386: note = tr|A0A252ALX4|A0A252ALX4_9PROT Queuine tRNA-ribosyltransferase OS=Acetobacter persici OX=1076596; GN = tgt PE=3 SV=1
MSRFHWTCESTDGAARAGMLHTAHGPVATPTFMPVGTVGTVKAMTMDAVRSTGAGIVLGNTYHLMLRPGAERVRALGGLHRFMDWSGPILTDSGGFQVMSLGALRKLDQDGVTFRSHIDGSYHRLTPESSTDIQHALDATISMCFDECPALPAPPETIAASMRMSMRWAARSREAFVQRTGYGQFGIVQGGTEPDLRAESVKALTDIGFEGYAIGGLAVGEGQELMFATLDTTVPAMPHTAPRYLMGVGTPDDLLGSVQRGVDMFDCVMPTRAGRTARAYTERGTLNLRNARHATDARPISPDCDCLACSRHSRAYLHHLFRANEILGPMLLTWHNIAYYQRLMRQIRAAIVEGRLDELATTLRANWAAEDWTEDEMPQPAIPPVP

SEQ ID NO: 50949 - protein, 386 aa, unidentified
  source 1..386: note = Acetobacter persici
  REGION 1..386: note = tr|A0A1U9LE23|A0A1U9LE23_9PROT Queuine tRNA-ribosyltransferase OS=Acetobacter persici OX=1076596; GN = tgt PE=3 SV=1
MSRFHWTCESTDGAARAGMLHTAHGPVATPTFMPVGTVGTVKAMTMDAVRSTGAGIVLGNTYHLMLRPGAERVRALGGLHRFMDWSGPILTDSGGFQVMSLGALRKLDQDGVTFRSHIDGSYHRLTPESSTDIQHALDATITMCFDECPALPAPPETIAASMRMSMRWAARSREAFVQRTGYGQFGIVQGGTEPDLRAESVKALTDIGFEGYAIGGLAVGEGQELMFATLDTTVPAMPHTAPRYLMGVGTPDDLLGSVQRGVDMFDCVMPTRAGRTARAYTERGTLNLRNARHATDARPISPDCDCLACSRHSRAYLHHLFRANEILGPMLLTWHNIAYYQRLMRQIRAAIVEGRLDELATTLRANWAAEDWTEDEMPQPAIPPVP

SEQ ID NO: 50950 - protein, 386 aa, Acetobacter pomorum
  REGION 1..386: note = tr|A0A346DX52|A0A346DX52_9PROT Queuine tRNA-ribosyltransferase OS=Acetobacter pomorum OX=65959; GN = tgt PE=3 SV=1
MTRFNWTCESTDGAARAGMLHTAHGPVATPTFMPVGTVGTVKAMTMDAVRSTGAGIVLGNTYHLMLRPGAERIRALGGLHKFMDWSGPILTDSGGFQVMSLGALRRLDQDGVTFRSHIDGSEHRLTPESSTDIQHALDATITMCFDECPALPAPPEAIAASMRLSMRWAARSRQAYVQREGYGQFGIVQGGTEADLRAESVKALTDIGFEGYAIGGLAVGEGQELMFATLDTTTPIMPQDKPRYLMGVGTPDDLLGSVQRGVDMFDCVMPTRAGRTARAYTERGTLNLRNARHATDARPISPHCDCLACSRHSRAYLHHLFRANEILGPMLLTWHNIAYYQRLMRQIRQAIVEKRLDALATALRAEWAAEDWTEDEMPQPAIPTVP

SEQ ID NO: 50951 - protein, 386 aa, Acetobacter pomorum
  REGION 1..386: note = tr|A0A2G4RB87|A0A2G4RB87_9PROT Queuine tRNA-ribosyltransferase OS=Acetobacter pomorum OX=65959; GN = tgt PE=3 SV=1
MTRFNWTCESTDGAARAGMLHTAHGPVATPTFMPVGTVGTVKAMTMDAVRSTGAGIVLGNTYHLMLRPGAERIRALGGLHKFMDWPGPILTDSGGFQVMSLGALRRLDQDGVTFRSHIDGSEHRLTPESSTDIQHALDATITMCFDECPALPAPPEAIAASMRLSMRWAARSRQAYVQREGYGQFGIVQGGTEPELRAESVKALTDIGFEGYAIGGLAVGEGQELMFATLDTTTPIMPQDKPRYLMGVGTPDDLLGSVQRGVDMFDCVMPTRAGRTARAYTERGTLNLRNARHATDARPISPYCDCLACSRHSRAYLHHLFRANEILGPMLLTWHNIAYYQRLMRQIRQAIVEKRLDALATTLRAEWAAEDWTEDEMPQPSLPPVP

SEQ ID NO: 50952 - protein, 386 aa, Acetobacter senegalensis
  REGION 1..386: note = tr|A0A0U5EZM8|A0A0U5EZM8_9PROT Queuine tRNA-ribosyltransferase OS=Acetobacter senegalensis; OX = 446692 GN=tgt PE=3 SV=1
MTRFNWTCESMDGNARAGTLHTAHGPVATPTFMPVGTVGTVKAMTMDAVRSTGAGIVLGNTYHLMLRPGAERVRQLGGLHKFMDWSGPILTDSGGFQVMSLGALRKLDQDGVTFKSHIDGSTHRLTPESSTDIQHALDATITMCFDECPALPAPPEIIAKSMRLSMRWAARSREAFVHREGYGQFGIVQGGTETDLRAESVKALTDIGFEGYAIGGLAVGEGQELMFATLDTTVPLMPQNAPRYLMGVGTPDDLLGSVMRGVDMFDCVMPTRAGRTARAYTERGTLNLRNARHAGDARPISPHCDCLACSRHSRAYLHHLFRANEILGPMLLTWHNIAYYQRLMRQIRQAILEGRLETLATQLRAEWAAEDWTEDEMPQPVIPPVP

SEQ ID NO: 50953 - protein, 386 aa, Acetobacter senegalensis
  REGION 1..386: note = tr|A0A149TVX8|A0A149TVX8_9PROT Queuine tRNA-ribosyltransferase OS=Acetobacter senegalensis; OX = 446692 GN=tgt PE=3 SV=1
MTRFNWTCESTDGNARAGTLHTAHGPVATPTFMPVGTVGTVKAMTMDAVRSTGAGIVLGNTYHLMLRPGAERVRQLGGLHKFMDWSGPILTDSGGFQVMSLGALRKLDQDGVTFKSHIDGSTHRLTPESSTDIQHALDATITMCFDECPALPAPPEIIAKSMRLSMRWAARSREAFVHREGYGQFGIVQGGTETDLRAESVKALTDIGFEGYAIGGLAVGEGQELMFATLDTTVPLMPQNAPRYLMGVGTPDDLLGSVMRGVDMFDCVMPTRAGRTARAYTERGTLNLRNARHAGDARPISPHCDCLACSRHSRAYLHHLFRANEILGPMLLTWHNIAYYQRLMRQIRQAILEGRLETLATQLRAEWAAEDWTEDEMPQPVIPPVP

SEQ ID NO: 50954 - protein, 386 aa, Acetobacter sp.
  REGION 1..386: note = tr|A0A252BSU1|A0A252BSU1_9PROT Queuine tRNA-ribosyltransferase OS=Acetobacter sp. DsW_063; OX = 1514894 GN=tgt PE=3 SV=1
MTAFNWRCEAVDGRARAGVLETAHGPVATPTFMPVGTVGTVKAMTMDAVRSTGAGIVLGNTYHLMLRPGAERVRALGGLHRMMDWPGPILTDSGGFQVMSLGALRKLDQDGVTFQSHIDGSKHRLDPERSTAIQYVLDATITMCFDECPALPAEAEAIAASMRLSMRWAARSREAFVQREGYGQFGIVQGGVEPELRAESAKALCDIGFEGYAIGGLAVGEGQELMFATLDVTTPLLPGDKPRYLMGVGTPDDLLGGVERGVDMFDCVMPTRAGRTARAYNERGTLNLRNARFATDARPISPDCDCLACSRHSRAYLHHLFRADEILGPMLLTWHNLAYYQRMMRGLRAAIIAGDLAAHGAALRAAWAQGDWTEDEWPQPSIPPVP

SEQ ID NO: 50955 - protein, 386 aa, Acetobacter sp.
  REGION 1..386: note = tr|A0A5C1YQI7|A0A5C1YQI7_9PROT Queuine tRNA-ribosyltransferase OS=Acetobacter sp. KACC 21233; OX = 2592655 GN=tgt PE=3 SV=1
MTRFHWTCESTDGAARAGTLHTAHGPVQTPTFMPVGTVGTVKAMTMDAVRSTGAGIVLGNTYHLMLRPGAERVRALGGLHRFMDWSGPILTDSGGFQVMSLGALRKLDQDGVTFRSHIDGSEHRLTPESSTDIQHALDATITMCFDECPALPAPPEAIAASMRLSMRWAARSREAYVQREGYGQFGIVQGGTEADLRAESVAALTNIGFEGYAIGGLAVGEGQELMFATLDTTTPLMPQDKPRYLMGVGTPDDLLGSVMRGVDMFDCVMPTRAGRTARAYTERGTLNLRNARHATDSRPISPHCDCLACTRHSRAYLHHLFRSNEILGPMLLTWHNLAYYQRLMRQIRQAIVQGQLNTLAQTLRAGWQAEDWTEDEMPQPAIPPVP

SEQ ID NO: 50956 - protein, 386 aa, Acetobacter syzygii
  REGION 1..386: note = tr|A0A270BW59|A0A270BW59_9PROT Queuine tRNA-ribosyltransferase OS=Acetobacter syzygii OX=146476; GN = tgt PE=3 SV=1
MSRFHWTCESTDGAARAGMLHTAHGPVATPTFMPVGTVGTVKAMTMDAVRSTGAGIVLGNTYHLMLRPGAARVKALGGLHRFMDWSGPILTDSGGFQVMSLGALRRLDQDGVTFRSHIDGSEHRLTPESSTAIQHDLDATITMCFDECPALPAPPEAIAASMRLSMRWAARSREAYVPRAGYGQFGIVQGGTEADLRAESVKALTDIGFEGYAIGGLAVGEGQALMFATLDTTTPIMPQDKPRYLMGVGTPDDLLGSVQRGVDMFDCVMPTRAGRTARAYTERGTLNLRNARHATDARPISPHCDCLACTRHSRAYLHHLFRANEILGPMLLTWHNIAYYQRLMRQIRQAIMDRNLNDTAAAMRAEWAAQDWTEDEMPQPFIPPVP

SEQ ID NO: 50957 - protein, 386 aa, Acetobacter tropicalis; identical to SEQ ID NO: 50953
  REGION 1..386: note = tr|A0A291PDJ3|A0A291PDJ3_9PROT Queuine tRNA-ribosyltransferase OS=Acetobacter tropicalis; OX = 104102 GN=tgt PE=3 SV=1

SEQ ID NO: 50958 - protein, 386 aa, Acetobacter tropicalis
  REGION 1..386: note = tr|A0A0C9LH97|A0A0C9LH97_9PROT Queuine tRNA-ribosyltransferase OS=Acetobacter tropicalis; OX = 104102 GN=tgt PE=3 SV=1
MTRFNWTCESTDGNARAGTLHTAHGPVATPTFMPVGTVGTVKAMTMDAVRSTGAGIVLGNTYHLMLRPGAERVRQLGGLHKFMDWSGPILTDSGGFQVMSLGALRKLDQDGVTFKSHIDGSTHRLTPESSTDIQHALDATITMCFDECPALPAPPEIIAKSMRLSMRWAARSREAFVHREGYGQFGIVQGGTETNLRAESVKALTDIGFEGYAIGGLAVGEGQELMFATLDTTVPLMPQNAPHYLMGVGTPDDLLGSVMRGVDMFDCVMPTRAGRTARAYTERGTLNLRNARHAGDARPISPHCDCLACSRHSRAYLHHLFRANEILGPMLLTWHNIAYYQRLMRQIRQAILEGRLETLATQLRAEWAAEDWTEDEMPQPVIPSVS

SEQ ID NO: 50959 - protein, 394 aa, unidentified
  source 1..394: note = Acetobacteraceae bacterium
  REGION 1..394: note = tr|A0A327M9D5|A0A327M9D5_9PROT Queuine tRNA-ribosyltransferase OS=Acetobacteraceae bacterium DB1506 OX=2230885 GN=tgt PE=3 SV=1
MTLSWTCAATDGAARRGVLRTAHGAVETPVFMPVGTAGTVKAMTADAVRATGARMVLGNTYHLMLRPGAERVARLGGLHRMMDWQGPILTDSGGFQVMSLAALREMDEQGVTFRSHLDGSRHRLTPERSVEIQRLLGADVTMCLDECTPFPASEAVAAESMRRSMRWAARCREAFVPRPGHGLFGIVQGSTYPALRAESVAALAATGFEGYAVGGLAVGEGQPAMFAVLDCTLPLLPASAPRYLMGVGTPSDILGAVRRGIDMFDCVIPTRSGRTGRAYTSRGVLNLRNAKHAEDPRPLDPACPCPACTRHSRAYLHHLIKAAEMLGPMLLTWHNIQYYQDLTRGLREAISAGRLAAHCAAVEAGWAAGDALPEDNIGDDPAAAALAEDRETPA

SEQ ID NO: 50960 - protein, 404 aa, unidentified
  source 1..404: note = Acetobacteraceae bacterium
  REGION 1..404: note = tr|A0A4P7WAH8|A0A4P7WAH8_9PROT Queuine tRNA-ribosyltransferase OS=Acetobacteraceae bacterium; OX = 1909293 GN=tgt PE=3 SV=1
MTLKNNTPPWPDFTPCDKFQWVSEKQDGKARAGWLHTAHGKVPTPIFMPVGTCATVKGMTPAMLRSTGAGIILGNVYHLMLRPTPERVQKLGGLHQMMNWAGPILTDSGGFQVMSLGKLAKVKEEGVTFQSHIDGSRHFLSPERSTDIQFMLDADISMVLDECPALPATKARLESSMECSLRWAQRSRDAFKKRPGYGQFGIVQGGTEKDLRERSAEGLKKIGFEGYAVGGLAVGEPQELMFSTLDYTLPFLPTEAPRYLMGVGTPQDMLGAIERGIDMFDCVMPSRAGRTARAYTERGYINLRNARFAEDPRPLTPYEEGPLKNVSRAYLHHLFKCQEMLGAMFLTLHNLAYYQRLMQQIRRAIISQNLAETASYLREEWLKGDWEMSEWNTPVPPPIDPMPL

SEQ ID NO: 50961 - protein, 373 aa, Acetobacterium bakii
  REGION 1..373: note = tr|A0A0L6U710|A0A0L6U710_9FIRM Queuine tRNA-ribosyltransferase OS=Acetobacterium bakii OX=52689; GN = tgt PE=3 SV=1
MSEFRYELIKECKDTGARLGKIHTKRGVINTPIFMPVGTQATVKSLTSEDLVAMDANIILGNTYHLYLRPGQEIMEKAGGLHKFMNWDRPILTDSGGFQVFSLNDLRKITEAGVEFISHIDGSKHFMTPEKAIDMQNSIGADIIMCFDECAPAGADYDYTKKSLEMTTRWAKRCKDAHKRPEDQALFGIVQGGMYEDLRAQSVKELTEIDFPGYSIGGLSVGEPKDVMYRMLDVTVPLLPKDKPRYLMGVGSLDALFEGVIRGVDMFDCVLQSRIARNGTAFTSHGKVVIRNATYKEDFTPVDSECDCFVCRNYTRAYIRHLIKCNEILGARLLTYHNLYFTLVTMKRIREAIMNDNLLAYKESFFEKYGIAK

SEQ ID NO: 50962 - protein, 246 aa, Acetobacterium sp.
  REGION 1..246: note = tr|A0A351HYD8|A0A351HYD8_9FIRM Queuine tRNA-ribosyltransferase (Fragment) OS=Acetobacterium sp.; OX = 1872094 GN=tgt PE=3 SV=1
TPEKAIDMQNSIGADIIMCFDECAPAGADYEYTKKSMEMTTRWARRCKEAHKRPEDQALFGIVQGGMFADLRAQSVEQLTDIGFPGYSIGGLSVGEPKDVMYKMLDATTPLLPKDKPRYLMGVGSLDALFEGTIRGIDMFDCVLQSRIARNGTAFTSHGKVVVRNATYKEDFTPVDPECDCFVCRNYTRAYIRHLIKTNEILGARLLTYHNLYFTLVTMKKIRQAIMDDNLLAYKEAFFEKFGITE

SEQ ID NO: 50963 - protein, 373 aa, Acetobacterium sp.
  REGION 1..373: note = tr|A0A231NUN2|A0A231NUN2_9FIRM Queuine tRNA-ribosyltransferase OS=Acetobacterium sp. MES1; OX = 1899015 GN=tgt PE=3 SV=1
MSEFRYELIKECKDTGARLGKIHTKRGVINTPIFMPVGTQATVKSLSSEDLVEMDANIILGNTYHLYLRPGQEIMDKAGGIHKFMNWNRPVLTDSGGFQVFSLNDLRKITEDGVEFISHLDGSRHFMTPEKAIDMQNSIGADIIMCFDECAPAGADYEYTKKSMEMTTRWARRCKEAHKRPEDQALFGIVQGGMFADLRAQSVEQLTDIGFPGYSIGGLSVGEPKDVMYKMLDATTPLLPKDKPRYLMGVGSLDALFEGTIRGIDMFDCVLQSRIARNGTAFTSHGKVVVRNATYKEDFTPVDPECDCFVCRNYTRAYIRHLIKTNEILGARLLTYHNLYFTLVTMKKIRQAIMDDNLLAYKEAFFEKFGITE

SEQ ID NO: 50964 - protein, 373 aa, Acetobacterium wieringae; identical to SEQ ID NO: 50963
  REGION 1..373: note = tr|A0A1F2PKJ0|A0A1F2PKJ0_9FIRM Queuine tRNA-ribosyltransferase OS=Acetobacterium wieringae; OX = 52694 GN=tgt PE=3 SV=1

SEQ ID NO: 50965 - protein, 373 aa, Acetobacterium woodii
  REGION 1..373: note = tr|H6LEI4|H6LEI4_ACEWD Queuine tRNA-ribosyltransferase OS=Acetobacterium woodii (strain ATCC 29683 / DSM 1030 / JCM 2381 / KCTC 1655 / WB1); OX = 931626 GN=tgt PE=3 SV= 1
MSEFRYELIKECKDTGARLGKIHTARGIINTPIFMPVGTQATVKSLSSEDLVEMDANIILGNTYHLYLRPGQEIMEKAGGIHQFMNWKRPVLTDSGGFQVFSLNDLRKITEEGVEFISHLDGSRHFMTPEKAIDMQNSIGADIIMCFDECAPAGADYEYTKKSMEMTTRWAKRCKEAHKRPEDQALFGIVQGGMFEDLRAQSVKELTEIDFPGYSIGGLSVGEPKDVMYRMLDATVPLLPKDKPRYLMGVGSLDALFEGTIRGIDMFDCVLQSRIARNGTAFTSHGKVVVRNATYKEDFSPVDPECDCFVCRNYTRAYIRHLIKTNEILGARLLTYHNLYFTLVTMKKIRQAIMDDNLLAYKEAFFKKFGIAE

SEQ ID NO: 50966 - protein, 376 aa, unidentified
  source 1..376: note = Acetobacteroides hydrogenigenes
  REGION 1..376: note = tr|A0A4V2RQV4|A0A4V2RQV4_9BACT Queuine tRNA-ribosyltransferase OS=Acetobacteroides hydrogenigenes; OX = 979970 GN=tgt PE=3 SV=1
MKFDLTATDLHSKARAGVITTDHGQIHTPIFMPVGTVATVKGVFHRDLKDEIKAEIILGNTYHLYLRPGLDVLKAAGGLHKFSAWDRPILTDSGGYQVFSLAENRKLTNEGCTFRSHIDGSKHMFTPENVMDIQRVIGADIIMAFDECPPGTATYEYAKKSLDLTQGWLGRCIKRFDETEGLYGYSQTLFPIVQGCVYPDLRRKAAEHAAALDREGYAIGGLAVGEPAEKMYEMIEVVNEILPSTKPRYLMGVGTPVNILEGISRGVDMFDCVMPTRNGRNGMLFTSEGIINIRNLKWRDDFSPIDPNGSAFVDTTYTKAYLRHLFISDEMLGAQIASMHNLAFYLWLVRESRAHILAGDFAQWKEMMVPKLSVRL

SEQ ID NO: 50967 - protein, 371 aa, Acetohalobium arabaticum
  REGION 1..371: note = tr|D9QVI7|D9QVI7_ACEAZ Queuine tRNA-ribosyltransferase OS=Acetohalobium arabaticum (strain ATCC 49924 / DSM 5501 / Z-7288) OX=574087 GN=tgt; PE = 3 SV=1
MTFEYTLQKESTDTKARCGEFTTPHGKIETPVFMPVGTKATVKTMSPEELEEIDTQIILGNTYHLYLRPGHDLIEEAGGLHEFMNWNGPILTDSGGFQVFSLADRREISEEGVEFQSHLDGSKEFISPEKSIEIQMGLGADIIMAFDECPAHSAEKEYIKESLELTTRWAKRCQQAHTRDDQALFGIIQGGMHRDLREQSAEEITALDFPGYAIGGLSVGESKELMHEVLDYAPDLLPADKPRYLMGVGTPQDLFEGVMRGIDMFDCVFPTRIARNGAVFTSQGRITIRNATYKRQFTSLDPECDCYVCQNYTRAYIRHLIKRNEILGLRLTTYHNLYFLNDLMAKMRQAIFAEELFEFRENFYRKYGLEL

SEQ ID NO: 50968 - protein, 376 aa, unidentified
  source 1..376: note = Acetomicrobium hydrogeniformans
  REGION 1..376: note = tr|A0A0T5XBT7|A0A0T5XBT7_9BACT Queuine tRNA-ribosyltransferase OS=Acetomicrobium hydrogeniformans ATCC BAA-1850 OX=592015 GN=tgt PE=3 SV=1
MGRDKLFSYEIIAECPHTGARAGKFYTTHGVIEMPCFMPVGTQATVKAMAPFELEALGARIILGNAYHLYLRPGVDVIEKAGGLHAFMGWDRAILTDSGGFQVFSLASLRRVSDEGVEFQSHLDGSKHFLTPALVMAIEEAIGSDIAMCFDECTTYPITEEGAKEATLRTIKWAGLCKKAHSRRDQALFGIVQGSVFLSLREYCCHALVDMDFPGYAIGGLAVGEPKALMHEVLELLNKFLPKTKPRYLMGVGHPLDMVEGIARGVDMFDCVLPTRNARNGSVLTSMGKLNVRKKELKEDFSPLDPNCSCYVCRNFSRAYIRHLHKAGEILASRLCTWHNLHFMLDLARKARRAIIDGTFPDLLEHCREVFGDEAD

SEQ ID NO: 50969 - protein, 374 aa, unidentified
  source 1..374: note = Acetomicrobium mobile
  REGION 1..374: note = tr|I4BV11|I4BV11_ACEMN Queuine tRNA-ribosyltransferase OS=Acetomicrobium mobile (strain ATCC BAA-54 / DSM 13181 / JCM 12221 / NGA) OX=891968; GN = tgt PE=3 SV=1
MKDFFNYEVIAECPHTRARVARMSTPHGIIETPCFMPVGTQATVKAMAPFELEMLGARIILSNAYHLYLRPGVDIIEKAGGLHGFMGWDRAILTDSGGFQVFSLASLRNVSDDGVEFQSHLDGSRHFLTPASVMAVEESLGSDIAMCFDECTSYPISEEDARRATLRTIRWAMLCKQSHSRPDQALFGIIQGSVFPELRRLCGEALVDMDFPGYGIGGLAVGEPKRMMYDVLELMDQLLPRSKPRYLMGVGHPLDMVEAIALGVDMFDCVLPTRNARNGSVLTSRGMLNVRRQELKDDLSPLDPKCNCYVCKNFSRAYIRHLHKAGEILASRLCTWHNLHFMLELAREARRTIVDGSFPRLLEYCRKVFGDETD

SEQ ID NO: 50970 - protein, 376 aa, unidentified
  source 1..376: note = Acetomicrobium thermoterrenum
  REGION 1..376: note = tr|A0A1H3DDL8|A0A1H3DDL8_9BACT Queuine tRNA-ribosyltransferase OS=Acetomicrobium thermoterrenum DSM 13490 OX=1120987 GN=tgt PE=3 SV=1
MGRDKLFSYEIIAECPHTGARAGKFYTTHGVIEMPCFMPVGTQATVKAMAPFELEALGARIILGNAYHLYLRPGVDVIEKAGGLHAFMGWDRAILTDSGGFQVFSLASLRRVSDEGVEFQSHLDGSKHFLTPALVMAIEEAIGSDIAMCFDECTTYPITEEGAKEATLRTIKWAGLCKKAHSRRDQALFGIVQGSVFLSLREYCCHALVDMDFPGYAIGGLAVGEPKALMHEVLELLNKFLPKTKPRYLMGVGHPLDMVEGIARGVDMFDCVLPTRNARNGSVLTSMGKLNVRRKELKEDFSPLDPNCSCYVCRNFSRAYIRHLHKAGEILASRLCTWHNLHFMLDLARKARRAIIDGTFPDLLEHCREVFGDEAD

SEQ ID NO: 50971 - protein, 421 aa, Acetonema longum
  REGION 1..421: note = tr|F7NND1|F7NND1_9FIRM Queuine tRNA-ribosyltransferase (Fragment) OS=Acetonema longum DSM 6540 OX=1009370 GN=ALO_18105 PE=3 SV=1
SGLSALMFYLWFDIICISYASYQTKRVGQDVLHFTNPRCFASLWEAVFLAAIQYELIKQCSHTGARAGRLHTPHGTFDTPIFMPVGTQGTVKAMSPHELKEMGAGIILGNTYHLFLRPGHDLVAEAGGLHSFINWDRGILTDSGGFQVFSLGDLRKITEEGVAFRSHLDGSKQFLSPEKSMEVQMALGSDIVMAFDECVPYPAEYDYAKQSTERTTRWAERCREAFCGGNRQGLFGIVQGGMYKDLRSQSVRELVSLDFPGYAVGGLSVGESKPLMYEMLEHTVPQLPSGKPRYLMGVGTPDCLVEGVLYGIDMFDCVFPTRVARNGTVMTHTGRLVVKNAEFARDFRPIDEHCGCYTCRNFTRAYIRHLFKAEEILGLRLTTIHNLYFLLQFMRDMRQAILEDRFVAFRDNFRAGYELAR

SEQ ID NO: 50972 - protein, 438 aa, unidentified
  source 1..438: note = Acetothermus autotrophicum
  REGION 1..438: note = tr|H5SRG2|H5SRG2_ACEAU Queuine tRNA-ribosyltransferase OS=Acetothermus autotrophicum; OX = 1446466 GN=tgt PE=3 SV=1
MPRPLYFAALHSDPHLRARCGVLQTPHGAIQTPSFVAVGTQATVKAVGPDDLKKIGIQVLIANTYHLHLRPGEDVIAQLGGLHRFMGWDGPIMTDSGGFQAFSLGAAIEHGVGKIASIFPDEIEAAARGGHLSKARHGQSLVKITEEGIEFRSHLDGSPQKFTPENTIEIQKKLGADMIFVLDECTSPLHDYEYTKRAMERTHRWAVRALEYFRNNLTSWPPSRHGKGELPSPLRGGDGGEVWSGRQALFGIVQGGAYRDLREQSAKFISALDFDGIGIGGSVGRSKDDLYKVLDWTIPLLPEEKPRHLLGIGEIEDIFHAVARGVDLFDCVAPTRMARNGALWVKDSENFRINITNAIYKTDPRPIAEGCACYTCQNFSRAYLHHLFLAKEILAMRLATIHNLYFLESLMRQIRQAIRDHALIELAASWGIDLGNLT

SEQ ID NO: 50973 - protein, 369 aa, Acholeplasma axanthum
  REGION 1..369: note = tr|A0A449BEU8|A0A449BEU8_ACHAX Queuine tRNA-ribosyltransferase OS=Acholeplasma axanthum OX=29552; GN = tgt PE=3 SV=1
MSIKFEVLHVCKQSGARLGKLTTPHGVFETPFFMPVGTQATVKTLTVDEVKEVSEGLILGNTYHLWLQPGNEIVRKHGGIRGFMKWDGALLTDSGGFQVFSLSSLRKITEEGVHFRHHKNGAKLFMSPEDSIKVQEDLAADIIMSFDECPPPYETYEYMKDSIERTIRWAKRGKDALTTDQALFGIVQGGLNKELRQHCAEELIKLDFPGYSIGGLSVGETKEEMYEITKFLNPILPFDKPRYLMGVGAPEDLIMNVINGVDMFDCVLPSRNARHGSIFTTEGKVNIKNKKYEDDMEPIDKGLNTPVNNYTKSYLRHLFKAEEYLGMRLMTYQNLAYLKHLMGEIRNAIKEDRLLDYLEEMKEKTNYFK

SEQ ID NO: 50974 - protein, 369 aa, Acholeplasma brassicae
  REGION 1..369: note = tr|U4KSZ2|U4KSZ2_9MOLU Queuine tRNA-ribosyltransferase OS=Acholeplasma brassicae OX=61635; GN = tgt PE=3 SV=1
MAIRYELLHTCKQSGARYGLLHTPHGTFETPIFMPVGTQATVKTLTPEEIKEVSDGLILGNTYHLWLQPGDDIIKAHGGIRGFMKWDGALLTDSGGFQVFSLNSIRKIKEEGVYFRHHKNGDMLFLSPEKAIEIQENLGADIIMSFDECPPHDATYDYMKDSIERTLRWAKRGKDAHKTDQALFGIIQGGLDDELRLYSAKKTIELDFPGYSIGGLSVGESKEEMYRILDLLKPVMPTDKPRYLMGVGSPDDLVEGVIRGVDMFDCVLPTRNARHGTAFTTEGKIQIRNKRFEMDFSPLDPGLITPISKYSKSYVRHLFKAEEILGMRIMTYQNLAFLKHLMSEIRQAIKEDRLLDFKEEFFKKYGYSK

SEQ ID NO: 50975 - protein, 371 aa, Acholeplasma hippikon
  REGION 1..371: note = tr|A0A449BIX3|A0A449BIX3_9MOLU Queuine tRNA-ribosyltransferase OS=Acholeplasma hippikon OX=264636; GN = tgt PE=3 SV=1
MIKYEVLHICKQSGARLGRLTTPHGVFETPLFMPVGTLATVKTLTPEEIREVSEGLILGNTYHLWQQPGNDIVKAHGGIRGFMKWDGALLTDSGGFQVFSLAKLRDIKEEGVTFKHHKSGAPLFLSPEIAIKIQEDLGADIIMSFDECPPPYESYEYQKKSVERTIRWAKRGKEALTTDQALFGIVQGGLNKDLREFCAKELAKLDFPGYSIGGLSVGETKAEMYEMTKFLNPILPFDKPRYLMGVGAPEDLLENVINGVDMFDCVLPTRNARHGTAFTTYGKVQVKAQKFERDMNPLDPGLETSISKYSKSYIRHLFKAEEILGQRMLTIQNLAYLKYLMSEIRQAIKEDRLLDFKKEFYAKTNYPEVKY

SEQ ID NO: 50976 - protein, 377 aa, Acholeplasma laidlawii
  REGION 1..377: note = tr|A9NG43|A9NG43_ACHLI Queuine tRNA-ribosyltransferase OS=Acholeplasma laidlawii (strain PG-8A) OX=441768 GN=tgt PE=3 SV=1
MEGGFILISYEVLHVCKQSGARLGKLTTSHGVFETPIFMPVGTLATVKTLTVEEIKEVSEGLILANTYHLWQQPGEDIVKDHGGIRGFMKWDGALLTDSGGFQVFSLAKLRDIKEEGVHFKHHKSGAPLFLGPEDAIRIQEDLGADIIMSFDECPPPYESYEYMKDSVERTIRWAKRGKEALKTDQALFGIVQGGLNKELRTHCAEELIKLDFPGYSIGGLSVGETKAEMYEMTRHLNPILPFNKPRYLMGVGAPEDLLENVINGVDMFDCVLPTRNARHGTALTTTGKVTIKNKQFERDMSSLDPNLQSSVSKYSKSYIRHLFKAEEQLGQRLVTIQNLAYLKHLMAEIRQAIKEDRLLDFKKEFYERTNYPKVSY

SEQ ID NO: 50977 - protein, 377 aa, Acholeplasma laidlawii; identical to SEQ ID NO: 50976
  REGION 1..377: note = tr|A0A553II18|A0A553II18_ACHLA Queuine tRNA-ribosyltransferase OS=Acholeplasma laidlawii OX=2148; GN = tgt PE=3 SV=1

SEQ ID NO: 50978 - protein, 371 aa, Acholeplasma oculi
  REGION 1..371: note = tr|A0A061AAI3|A0A061AAI3_9MOLU Queuine tRNA-ribosyltransferase OS=Acholeplasma oculi OX=35623; GN = tgt PE=3 SV=1
MIQYELLHICKQSGARLGRLTTPHGVFETPIFMPVGTLATVKTLSPSEIREVSEGLILSNTYHLWQQPGNDIVKKHGGIRGFMNWDGALLTDSGGFQVFSLSKIRDIKEEGVHFKHHKSGAPLFLSPEDAIKIQEDLGADIIMSFDECPPPYETDAYMKDSVERTIRWAKRGKDALTTDQALFGIVQGGLNQDLRKYCAEELIKLDFPGYSIGGLSVGETKKEMYEMTRFLNPIMPQNKPRYLMGVGSPEDLLENVINGIDMFDCVLPTRNARHGTALTTVGKITIKNKKFESDMSPLDPNLSTSISPYTKSYIRHLFKAEESFGQRILSIQNLAYLKHLMKEIRQAIKEDRLLDFKKEFYEKTNYEQVRY

SEQ ID NO: 50979 - protein, 371 aa, Acholeplasma palmae
  REGION 1..371: note = tr|U4KRU2|U4KRU2_ACHPJ Queuine tRNA-ribosyltransferase OS=Acholeplasma palmae (strain ATCC 49389 / J233) OX=1318466 GN=tgt PE=3 SV=1
MSIKFEITHICKQSGARLGKLTTPHGVFETPIFMPVGTLATVKTLTPEEIKEVSEGLILGNTYHLWQQPGEQLVKKHGGIRGFMNWDGALLTDSGGFQVFSLAKMRDIKEEGVYFKHHKSGAPLFLSPEKAIEIQEALGADIIMSFDECPPPYETTDYMKKSVERTLRWAKRGKDALTTDQALFGIVQGGLDKEIRKYCAEKLAEMDFPGYSIGGLSVGETKEEMYEMTEYLNDIIPKNKPRYLMGVGAPEDLVENVINGVDMFDCVLPTRIARHGTALTTEGKVVIKNNIYAEDFSSIDPNLKTPVSKYTKSYLRHLFKANEILGMRLISYQNLAYLKHLMAEIRQAIKEDRLLDFKEEFYKKTNYPKVR

SEQ ID NO: 50980 - protein, 367 aa, Acholeplasma sp.
  REGION 1..367: note = tr|R5HC32|R5HC32_9MOLU Queuine tRNA-ribosyltransferase OS=Acholeplasma sp. CAG:878; OX = 1262686 GN=tgt PE=3 SV=1
MKIKYELLKNDNKARHGKLYTNYGVFETPMFMPVGTLANVKTLTPEELKAMNSAVILSNTYHLWLRPGADVIEKAGGLHKFMNYDGPILTDSGGFQVFSLAKPKDITEEGVKFKSHIDGSNLFLTPEISIQVQNKLDSDIAMSFDECIPYPATYEYAKKSTERTLRWAKRGKEVFNNPRQSLFGIVQGGEYQDLREYSAKETVKIGFDGYSIGGTSVGEDKTTMYKMIEDGIRYIPLDKPRYLMGVGDPIDIIEGVIRGIDMFDCVLPTRIARHGNAFTRHGKINLKNAKYKEDFTPIEDCDCYTCKNYTKAYIRHLITCNETLGGRLLSIHNIRFLIRLVEELRVAIDENRVLEYREEFIKNYTNK

SEQ ID NO: 50981 - protein, 372 aa, unidentified
  source 1..372: note = Acholeplasmataceae bacterium
  REGION 1..372: note = tr|A0A350R8M2|A0A350R8M2_9MOLU Queuine tRNA-ribosyltransferase OS=Acholeplasmataceae bacterium; OX = 1898209 GN=tgt PE=3 SV=1
MMSIKFEVLHVCKQSGARLGRLTTPHGVFETPFFMPVGTQATVKTLTPEEIKEVSEGLILGNTYHLWLQPGADIVADHGGIRGFMKWDGALLTDSGGFQVFSLTDMRKITEEGVHFKHHKNGSSLFMSPEDSIKVQEKLGADIIMSFDECPPPYATYEYMKDSVERTLRWAKRGKEALSTDQALFGIVQGGLNKELRQYSAEELIKMDFPGYSIGGLSVGETKHEMYEMTKFLNPILPFDKPRYLMGVGAPDDLVENVINGVDMFDCVLPTRIARHGTALTTEGKIVIKNQTYEKDMRPLDPLLYTHVSKYTRSYIRHLFKGEEILGMRLVTYQNLAYLKHLMQEIRQAIKEDRLLDFKEEMKKKTNYFKSR

SEQ ID NO: 50982 - protein, 399 aa, unidentified
  source 1..399: note = Acholeplasmatales bacterium
  REGION 1..399: note = tr|A0A3D4MKZ6|A0A3D4MKZ6_9MOLU Queuine tRNA-ribosyltransferase OS=Acholeplasmatales bacterium; OX = 2053494 GN=tgt PE=3 SV=1
MSAISYELKHVCKQTGARYGILHTPHGDFETPIFMPVGTKATVKTLTPEEIEQVSDGLILGNTYHLWLQPGDELIKQAGGIRGFMKWDHALLTDSGGFQVFSLAKIRKITEEGVNFRHHKSGAPLFMSPEISIGIQNNLGADIIMSFDECPPFHASREYMANSVERTLRWAKRGYDAHKCKDSQALFGIVQGGPFLDIRKHCLEELENLDFPGYSIGGLAVGESKKEMYDVLNFMKDILPANKPRYLMGVGSPDDLVVGSMMGVDMFDCVAATRIARHGTALTHKGKLLLKNKAHYASFIPLDEKCDCYVCKKYTRSYIHHLIKAEEILGMRLLSYHNLYFLKSLMADIRQAIKEDRLKDFQEEFFKEFGYAHLEDIMSGKVNEGTMKLKDQIKITGEE

SEQ ID NO: 50983 - protein, 370 aa, unidentified
  source 1..370: note = Acholeplasmatales bacterium
  REGION 1..370: note = tr|A0A348NIM2|A0A348NIM2_9MOLU Queuine tRNA-ribosyltransferase OS=Acholeplasmatales bacterium; OX = 2053494 GN=tgt PE=3 SV=1
MPFSFDVLRASRETKARIGVLHTAHGDFETPIFMPVGTQATVKTLDPRETMEVSDGLILGNTYHLWLQPGEAIVKAHGGIRGFMNWPGGLLTDSGGYQVFSLSKIRKIKEEGVEFRHHLSGEKLFMTPEDSIRVQNDLGADIIMSFDECPPFDATYDYMKKSVERTIRWAARGKAAHARQDEQALFGIVQGGPHRDLRESCAAELQKIGFPGYAIGGLAIGESKDEMYAVLAYMDDILPKDKPRYLMGVGSPDDLILGAMNGVDMFDCVLPTRIARHGTAMTSEGKVVIKNKEYETDMGPLDPDCDCHVCKTYTRSYLRHLFKADEILGLRLITYHNLAFLKKLMHAIRTAIKEDRLVAFKDAFFARYYH

SEQ ID NO: 50984 - protein, 366 aa, Achromatium sp.
  REGION 1..366: note = tr|A0A0M1JK71|A0A0M1JK71_9GAMM Queuine tRNA-ribosyltransferase OS=Achromatium sp. WMS3 OX=1604836; GN = tgt PE=3 SV=1
MTAQDGNARRANLILPKGVIETPAFMPIGTYGAVKGLTSEELELSGAQIILSNTFHLYLRPGMEVIKKFQGLHNFMNWQHPILTDSGGFQVYSLGRLRKITEQGVWFQSPIDGQRIFMGPEESIAIQRDLGSNIVMIFDECTPYPANFETTRQSMELSLRWAKRSHEAHINNTASLFGIVQGGMFPTLRKQSLAGLQDIGFDGYAIGGLSVGESATERLKILDALVTELPWDKPRYLMGVGTPDDLVEAVKRGIDMFDCVLPTRNARHGYLFTHQGTIRIRNARYRNDEKPLDSLCDCITCRQYSRAYLHHLDKTQEILGIRLNTLHNLYYYQTLMRELREAIEQNLLVSYIDKFYQMRTAASHAS

SEQ ID NO: 50985 - protein, 363 aa, Achromatium sp.
  REGION 1..363: note = tr|A0A0M1JCM7|A0A0M1JCM7_9GAMM Queuine tRNA-ribosyltransferase OS=Achromatium sp. WMS2 OX=1604835; GN = tgt PE=3 SV=1
MIAQDGLARAGRLSLPIGCVDTPAFMPVGTYGAVKGVTPDEIAKAGARIILSNTLHLSLRPGVEIVRAHGGLHKFMGWPYGILTDSGGFQVFSLGKLRNISEQGVTFRSPIDGRQVFMGPEESIAIQHALGANIIMIFDECTPYPADLKTASQSMELSLRWAERSRRAHGENSAALFGIVQGGMFNELREQSLESLVNIGFDGYAIGGLSVGEPAHERWKILDNLATKLPPNYPHYLMGVGTPEDIVESVQRGMDLFDCVLPTRNARHGYLFTHSGIIRLRNSSYKTDQRPLDPICDCDTCKNYSRAYLHHLDRTKEILGIRLNTLHNVHYYQSLMRDLRKAIGQGQLTQFVTDFYQMRKSEL

SEQ ID NO: 50986 - protein, 378 aa, unidentified
  source 1..378: note = Achromobacter agilis
  REGION 1..378: note = tr|A0A446CY17|A0A446CY17_9BURK Queuine tRNA-ribosyltransferase OS=Achromobacter agilis OX=1353888; GN = tgt PE=3 SV=1
MTGLNFELLATDGGARRGRITLNHGVVETPIFMPVGTYGSVKAMLPHELKEIGSQIVLGNTFHLWLRPGTEIMEKHGGLHGFMQWDKPILTDSGGFQVFSLQGMRKITEEGVKFASPIDGARLFLTPEESMRIQRSLNSDIVMVFDECTPYEIDGRPATVEEAARSMRMSLRWARRSREEFDRLGNPNALFGIVQGGMYESLRDESLAGLQEIGFHGYAIGGLSVGEPKEDMMRILAHVTPKLPAQAPRYLMGVGTPEDLVEGVSRGVDMFDCVMPTRNARNGWLFTRYGDVKIRNAKYRDDTRPLDPSCSCHTCANFSRAYLHHLQRANEITGARLNTLHNLHFYLTIMKEMREAIAEGRFDAWRAQFAADRKRGVD

SEQ ID NO: 50987 - protein, 378 aa, unidentified
  source 1..378: note = Achromobacter aloeverae
  REGION 1..378: note = tr|A0A4Q1HDJ3|A0A4Q1HDJ3_9BURK Queuine tRNA-ribosyltransferase OS=Achromobacter aloeverae; OX = 1750518 GN=tgt PE=3 SV=1
MNGLNFELLATDGAARRGRMTLNHGVVETPIFMPVGTYGSVKAMLPHELKDVGAQIVLGNTFHLWLRPGNDIMRKHGGLHGFMGWDKPILTDSGGFQVFSLQGMRKITEEGVKFASPIDGARLFLTPEESMAIQRALNSDIAMVFDECTPYEIDGRAATPEEAAKSMRMSLRWARRSRDAFDKLENPNALFGIVQGGMYENLRDESLAGLVDIGFHGYAIGGLSVGEPKEDMLRILTHVAPRLPVNAPRYLMGVGTPEDLVDGVARGIDMFDCVMPTRNARNGWLFTRYGDVKIRNARYRDDTRPLDPSCGCHTCGHFSRAYLHHLQRANEITGARLNTLHNLHFYLNLMDEMRGAIAAGTFQAWREQFAADRARGVD

SEQ ID NO: 50988 - protein, 378 aa, unidentified
  source 1..378: note = Achromobacter arsenitoxydans
  REGION 1..378: note = tr|H0F7G7|H0F7G7_9BURK Queuine tRNA-ribosyltransferase OS=Achromobacter arsenitoxydans SY8 OX=477184 GN=tgt PE=3 SV=1
MTGLNFELLATDGGARRGRITLNHGVVETPIFMPVGTYGSVKAMMPHELKEIGSQIVLGNTFHLWLRPGTEIMEKHGGLHGFMQWDKPILTDSGGFQVFSLQGMRKITEEGVKFASPIDGARLFLTPEESMRIQRSLNSDIVMVFDECTPYEIDGRPATVEEAARSMRMSLRWARRSREEFDRLGNPNALFGIVQGGMYESLRDESLAGLQDIGFHGYAIGGLSVGEPKEDMMRILAHVTPKLPAQAPRYLMGVGTPEDLVEGVSRGVDMFDCVMPTRNARNGWLFTRFGDVKIRNAKYRDDTRPLDPSCGCHTCGTFSRAYLHHLQRANEITGARLNTLHNLHFYLTIMKEMREAIAEGRFDAWRAQFAADRARGVD

SEQ ID NO: 50989 - protein, 378 aa, Achromobacter denitrificans
  REGION 1..378: note = tr|A0A3R9GMZ1|A0A3R9GMZ1_ACHDE Queuine tRNA-ribosyltransferase OS=Achromobacter denitrificans; OX = 32002 GN=tgt PE=3 SV=1
MTGLNFELLATDGGARRGRITLNHGVVETPIFMPVGTYGSVKAMLPHELKEIGSQIVLGNTFHLWLRPGTEIMEKHGGLHGFMQWDKPILTDSGGFQVFSLQGMRKITEEGVKFASPIDGARLFLTPEESMRIQRSLNSDIVMVFDECTPYEIDGRPATVEEAARSMRMSLRWARRSREEFDRLGNPNALFGIVQGGMYEALRDESLAGLQEIGFHGYAIGGLSVGEPKEDMMRILAHVTPKLPAQAPRYLMGVGTPEDLVEGVSRGVDMFDCVMPTRNARNGWLFTRFGDVKIRNAKYRDDTRPLDPSCGCHTCANFSRAYLHHLQRANEITGARLNTLHNLHFYLTIMKEMREAIAEGRFDAWRAQFAADRARGVD

SEQ ID NO: 50990 - protein, 378 aa, Achromobacter insolitus
  REGION 1..378: note = tr|A0A162NUP2|A0A162NUP2_9BURK Queuine tRNA-ribosyltransferase OS=Achromobacter insolitus; OX = 217204 GN=tgt PE=3 SV=1
MTGLNFELLATDGGARRGRITLNHGVVETPIFMPVGTYGSVKAMLPHELKEIGSQIVLGNTFHLWLRPGTEIMEKHGGLHGFMQWDKPILTDSGGFQVFSLQGMRKITEEGVKFASPIDGARLFLTPEESMRIQRSLNSDIVMVFDECTPYEIDGRPATVEEAARSMRMSLRWARRSREEFDRLQNPNALFGIVQGGMYEALRDESLAGLQEIGFHGYAIGGLSVGEPKEDMMRILAHVTPKLPAQAPRYLMGVGTPEDLVEGVSRGVDMFDCVMPTRNARNGWLFTRFGDVKIRNAKYRDDTRPLDPSCGCHTCANFSRAYLHHLQRANEITGARLNTLHNLHFYLTIMKEMREAIAEGRFDAWRAQFAADRARGVD

SEQ ID NO: 50991 - protein, 378 aa, unidentified
  source 1..378: note = Achromobacter insuavis
  REGION 1..378: note = tr|F7SVZ4|F7SVZ4_9BURK Queuine tRNA-ribosyltransferase OS=Achromobacter insuavis AXX-A; OX = 1003200 GN=tgt PE=3 SV=1
MTGLNFELLATDGGARRGRITLNHGVVETPIFMPVGTYGSVKAMMPHELKDIGAQIVLGNTFHLWLRPGTEIMEKHGGLHGFMQWDKPILTDSGGFQVFSLQGMRKITEEGVKFASPIDGARLFLTPEESMRIQRSLNSDIVMVFDECTPYEIDGRPATVEEAARSMRMSLRWARRSREEFDKLENPNALFGIVQGGMYESLRDESLAGLQDIGFHGYAIGGLSVGEPKEDMMRILAHVTPKLPAQAPRYLMGVGTPEDLVEGVSRGVDMFDCVMPTRNARNGWLFTRFGDVKIRNAKYRDDTRPLDPSCACHTCANFSRAYLHHLQRANEITGARLNTLHNLHFYLTIMKEMREAIAEGRFDAWRAQFAADRARGVE

SEQ ID NO: 50992 - protein, 378 aa, Achromobacter marplatensis
  REGION 1..378: note = tr|A0A366FGM8|A0A366FGM8_9BURK Queuine tRNA-ribosyltransferase OS=Achromobacter marplatensis; OX = 470868 GN=tgt PE=3 SV=1
MTGLNFELLATDGGARRGRITLNHGVVETPIFMPVGTYGSVKAMMPHELKEIGSQIVLGNTFHLWLRPGTEIMEKHGGLHGFMQWDKPILTDSGGFQVFSLQGMRKITEEGVKFASPIDGARLFLTPEESMRIQRSLNSDIVMVFDECTPYEIDGRPATVEEAARSMRMSLRWARRSREEFDRLGNPNALFGIVQGGMYEALRDESLAGLQDIGFHGYAIGGLSVGEPKEDMMRILAHVTPKLPAQAPRYLMGVGTPEDLVEGVSRGVDMFDCVMPTRNARNGWLFTRFGDVKIRNAKYRDDTRPLDPSCTCHTCANFSRAYLHHLQRANEITGARLNTLHNLHFYLTIMKEMREAIAEGRFDAWRAQFAADRARGIE

SEQ ID NO: 50993 - protein, 378 aa, Achromobacter marplatensis
  REGION 1..378: note = tr|J4QXF3|J4QXF3_9BURK Queuine tRNA-ribosyltransferase OS=Achromobacter marplatensis; OX = 470868 GN=tgt PE=3 SV=1
MTGLNFELLATDGGARRGRITLNHGVVETPIFMPVGTYGSVKAMMPHELKEIGSQIVLGNTFHLWLRPGTEIMEKHGGLHGFMQWDKPILTDSGGFQVFSLQGMRKITEEGVKFASPIDGARLFLTPEESMRIQRSLNSDIVMVFDECTPYEIDGRPATVEEAARSMRMSLRWARRSREEFDRLGNPNALFGIVQGGMYEALRDESLAGLQDIGFHGYAIGGLSVGEPKEDMMRILAHVTPKLPAQAPRYLMGVGTPEDLVEGVSRGVDMFDCVMPTRNARNGWLFTRFGDVKIRNAKYRDDTRPLDPSCACHTCANFSRAYLHHLQRANEITGARLNTLHNLHFYLTIMKEMREAIAEGRFDAWRAQFAADRARGIE

SEQ ID NO: 50994 - protein, 378 aa, Achromobacter piechaudii
  REGION 1..378: note = tr|D4XHX5|D4XHX5_9BURK Queuine tRNA-ribosyltransferase OS=Achromobacter piechaudii ATCC 43553 OX=742159 GN=tgt PE=3 SV=1
MTGLNFELLATDGGARRGRITLNHGVVETPIFMPVGTYGSVKAMMPHELKEIGSQIVLGNTFHLWLRPGTEIMEKHGGLHGFMQWDKPILTDSGGFQVFSLQGMRKITEEGVKFASPIDGARLFLTPEESMRIQRSLNSDIVMVFDECTPYEIDGRPATVEEAARSMRMSLRWARRSRDEFDRLGNPNALFGIVQGGMYESLRDESLAGLQDIGFHGYAIGGLSVGEPKEDMMRILAHVTPKLPAQAPRYLMGVGTPEDLVEGVSRGVDMFDCVMPTRNARNGWLFTRFGDVKIRNAKYRDDTRPLDPSCACHTCSNFSRAYLHHLQRANEITGARLNTLHNLHFYLTIMQEMREAIAEGRFDAWRAQFAADRARGIE

SEQ ID NO: 50995 - protein, 378 aa, Achromobacter piechaudii; identical to SEQ ID NO: 50994
  REGION 1..378: note = tr|A0A0L6HTC3|A0A0L6HTC3_9BURK Queuine tRNA-ribosyltransferase OS=Achromobacter piechaudii; OX = 72556 GN=tgt PE=3 SV=1

SEQ ID NO: 50996 - protein, 378 aa, unidentified
  source 1..378: note = Achromobacter pulmonis
  REGION 1..378: note = tr|A0A2N8KGK0|A0A2N8KGK0_9BURK Queuine tRNA-ribosyltransferase OS=Achromobacter pulmonis; OX = 1389932 GN=tgt PE=3 SV=1
MTGLNFELLATDGGARRGRITLNHGVVETPIFMPVGTYGSVKAMLPHELKEIGSQIVLGNTFHLWLRPGTQIMEKHGGLHGFMQWDKPILTDSGGFQVFSLQGMRKITEEGVKFASPIDGARLFLTPEESMRIQRSLNSDIVMVFDECTPYEIDGRPATVEEAARSMRMSLRWARRSRDEFDRLGNPNALFGIVQGGMYESLRDESLAGLQDIGFHGYAIGGLSVGEPKEDMMRILAHVTPRLPQHAPRYLMGVGTPEDLVEGVARGVDMFDCVMPTRNARNGWLFTRYGDVKIRNAKYRDDTRPLDPSCGCHTCANFSRAYLHHLQRANEITGARLNTLHNLHFYLTIMQEMREAIAEGRFEAWRARFAADRARGVD

SEQ ID NO: 50997 - protein, 378 aa, Achromobacter ruhlandii
  REGION 1..378: note = tr|A0A1D8IEQ2|A0A1D8IEQ2_9BURK Queuine tRNA-ribosyltransferase OS=Achromobacter ruhlandii; OX = 72557 GN=tgt PE=3 SV=1
MTGLNFELLATDGGARRGRITLNHGVVETPIFMPVGTYGSVKAMMPHELKEIGSQIVLGNTFHLWLRPGTEIMEKHGGLHGFMQWDKPILTDSGGFQVFSLQGMRKITEEGVKFASPIDGARLFLTPEESMRIQRSLNSDIVMVFDECTPYEIDGRPATVEEAARSMRMSLRWARRSREEFDRLQNPNALFGIVQGGMYESLRDESLAGLQDIGFHGYAIGGLSVGEPKEDMMRILAHVTPKLPAQAPRYLMGVGTPEDLVEGVSRGVDMFDCVMPTRNARNGWLFTRFGDVKIRNAKYRDDTRPLDPSCACHTCANFSRAYLHHLQRANEITGARLNTLHNLHFYLSIMKEMREAIAEGRFEAWRAQFAADRARGVE

SEQ ID NO: 50998 - protein, 378 aa, Achromobacter ruhlandii
  REGION 1..378: note = tr|A0A2M9GVF3|A0A2M9GVF3_9BURK Queuine tRNA-ribosyltransferase OS=Achromobacter ruhlandii; OX = 72557 GN=tgt PE=3 SV=1
MTGLNFELLATDGGARRGRITLNHGVVETPIFMPVGTYGSVKAMMPHELKEIGSQIVLGNTFHLWLRPGTEIMEKHGGLHGFMQWDKPILTDSGGFQVFSLQGMRKITEEGVKFASPIDGARLFLTPEESMRIQRSLNSDIVMVFDECTPYEIDGRPATVEEAARSMRMSLRWARRSREEFDRLQNPNALFGIVQGGMYESLRDESLAGLQDIGFHGYAIGGLSVGEPKEDMMRILAHVTPKLPAQAPRYLMGVGTPEDLVEGVSRGVDMFDCVMPTRNARNGWLFTRFGDVKIRNAKYRDDTRPLDPSCACHTCANFSRAYLHHLQRANEITGARLNTLHNLHFYLTIMKERREAIAEGRFEAWRAQFAADRARGVE

SEQ ID NO: 50999 - protein, 375 aa, Achromobacter sp.
  REGION 1..375: note = tr|A0A0M7MP47|A0A0M7MP47_9BURK Queuine tRNA-ribosyltransferase OS=Achromobacter sp. ATCC35328; OX = 1806490 GN=tgt PE=3 SV=1
MKFELDTTDGRARRGRLVFDRGVVETPCFMPVGTYGTVKGMTPEEVEATGAQIILGNTFHLWLRPGQEIMKLHGDLHDFMQWKGPILTDSGGFQVFSLGDIRKITEQGVHFRNPINGDPIFLDPEKSMEIQYDLGSDIVMIFDECTPYPADWDYAKRSMEMSLRWAKRSRERFDSLGNKNALFGIIQGSVYEDLRDISVKGLVDIGFDGYAVGGLAVGEPKADMHRILEHVCPQIPADKPRYLMGVGKPEDLVEGVRRGIDMFDCVMPTRNARNGHLFVTDGVVKIRNAKYKSDTGPLDPECDCYTCRNYSRAYLHHLDRCNEILGARLNTIHNLRYYQRLMAGLRKAIEEGKLESFVTDFYQRQGREVPPLNVD

SEQ ID NO: 51000 - protein, 378 aa, Achromobacter sp.
  REGION 1..378: note = tr|A0A0Q8B1J8|A0A0Q8B1J8_9BURK Queuine tRNA-ribosyltransferase OS=Achromobacter sp. Root565; OX = 1736564 GN=tgt PE=3 SV=1
MTGLNFELLATDGGARRGRITLNHGVVETPIFMPVGTYGSVKAMMPHELKEVGSQIVLGNTFHLWLRPGTEIMEKHGGLHGFMQWDKPILTDSGGFQVFSLQGMRKITEEGVKFASPIDGARLFLTPEESMRIQRSLNSDIVMVFDECTPYEIDGRPATVEEAARSMRMSLRWARRSRDEFDRLGNPNALFGIVQGGMYESLRDESLAGLQDIGFHGYAIGGLSVGEPKEDMMRILAHVTPKLPVQAPRYLMGVGTPEDLVEGVSRGVDMFDCVMPTRNARNGWLFTRFGDVKIRNAKYRDDTRPLDPSCSCHTCGNFSRAYLHHLQRANEITGARLNTLHNLHFYLTIMKEMREAIAEGRFDAWRAQFAADRARGIE

SEQ ID NO: 51001 - protein, 378 aa, Achromobacter spanius
  REGION 1..378: note = tr|A0A448C1D7|A0A448C1D7_9BURK Queuine tRNA-ribosyltransferase OS=Achromobacter spanius OX=217203; GN = tgt PE=3 SV=1
MTGLNFELLATDGGARRGRVTLNHGVVETPIFMPVGTYGSVKAMMPHELKEIGSQIVLGNTFHLWLRPGTDIMEKHGGLHGFMQWDKPILTDSGGFQVFSLQGMRKITEEGVKFASPIDGARLFLTPEESMRIQRSLNSDIVMVFDECTPYEIDGRPATVEEAARSMRMSLRWARRSRDEFDRLGNPNALFGIVQGGMYESLRDESLAGLQDIGFHGYAIGGLSVGEPKEDMMRILAHVTPKLPAQAPRYLMGVGTPEDLVEGVSRGVDMFDCVMPTRNARNGWLFTRFGDVKIRNAKYRDDTRPLDPSCTCHTCANFSRAYLHHLQRANEITGARLNTLHNLHFYLTIMKEMREAIAEGRFDAWRAQFAADRARGIE

SEQ ID NO: 51002 - protein, 378 aa, Achromobacter spanius
  REGION 1..378: note = tr|A0A2S5GJI6|A0A2S5GJI6_9BURK Queuine tRNA-ribosyltransferase OS=Achromobacter spanius OX=217203; GN = tgt PE=3 SV=1
MTGLNFELLATDGGARRGRITLNHGVVETPIFMPVGTYGSVKAMMPHELKEIGSQIVLGNTFHLWLRPGTDIMEKHGGLHGFMQWDKPILTDSGGFQVFSLQGMRKITEEGVKFASPIDGARLFLTPEESMRIQRSLNSDIVMVFDECTPYEIDGRPATVEEAARSMRMSLRWARRSRDEFDRLGNPNALFGIVQGGMYESLRDESLAGLQDIGFHGYAIGGLSVGEPKEDMMRILAHVTPKLPAQAPRYLMGVGTPEDLVEGVSRGVDMFDCVMPTRNARNGWLFTRFGDVKIRNAKYRDDTRPLDPSCGCHTCGNFSRAYLHHLQRANEITGARLNTLHNLHFYLTIMQEMREAIGQGRFDAWRAQFAADRARGIE

SEQ ID NO: 51003 - protein, 378 aa, Achromobacter xylosoxidans
  REGION 1..378: note = tr|E3HRH1|E3HRH1_ACHXA Queuine tRNA-ribosyltransferase OS=Achromobacter xylosoxidans (strain A8) OX=762376 GN=tgt PE=3 SV=1
MTGLNFELLATDGGARRGRITLNHGVVETPIFMPVGTYGSVKAMMPHELKEIGSQIVLGNTFHLWLRPGTEIMEKHGGLHGFMQWDKPILTDSGGFQVFSLQGMRKITEEGVKFASPIDGARLFLTPEESMRIQRSLNSDIVMVFDECTPYEIDGRPATVEEAARSMRMSLRWARRSREEFDRLQNPNALFGIVQGGMYEALRDESLAGLQEIGFHGYAIGGLSVGEPKEDMMRILAHVTPKLPAQAPRYLMGVGTPEDLVEGVSRGVDMFDCVMPTRNARNGWLFTRFGDVKIRNAKYRDDTRPLDPSCGCHTCANFSRAYLHHLQRANEITGARLNTLHNLHFYLTIMKEMREAIAEGRFDAWRAQFAADRERGIE

SEQ ID NO: 51004 - protein, 376 aa, Acidaminobacter hydrogenoformans
  REGION 1..376: note = tr|A0A1G5RY20|A0A1G5RY20_9FIRM Queuine tRNA-ribosyltransferase OS=Acidaminobacter hydrogenoformans DSM 2784 OX=1120920 GN=tgt PE=3 SV=1
MAIQFELIKTCKQSGARLGRLHTPHGVIDTPIFMPVGTQATVKAMTPEELEDMEAQIILSNTYHLFLRPGHELVEKAGGLHKFMNWKHPILTDSGGFQVFSLGDLRKITEEGVEFRSHLDGAKHFLSPERAIEIENALGADIIMAFDECAPYPADKEYVKKSLERTTRWAARCKAAHKKPEQQALFGIVQGGMYPDLRKQSAEEITEIGFPGYAIGGLSVGEPKPMMYEVLEQTIPYLPEDKPRYLMGVGSPDDLLEGVLRGVDMFDCVLPTRIARNGTAMTSVGKVVIKNAKHFDDFTPLDPNCDCYTCRNYTKAYLRHLYKADEILSSRLMSYHNLYFLIELMKNVRKAIMEDRLLDFKDEFFEKYGYTVKESE

SEQ ID NO: 51005 - protein, 379 aa, unidentified
  source 1..379: note = Acidaminococcaceae bacterium
  REGION 1..379: note = tr|A0A351EA19|A0A351EA19_9FIRM Queuine tRNA-ribosyltransferase OS=Acidaminococcaceae bacterium; OX = 2049052 GN=tgt PE=3 SV=1
MHAVTYELLKEDSRSKARRGRLHTPHGTFETPMFMPVGTQATVKTLSPEELYDMGSQVILANTYHLFLRPGSDLVRKAGGLHRFMNYRRGMLTDSGGFQVFSLGAMRKITEEGVLFRSHIDGSKQFLSPEVSMHVQEDLGADIAMAFDECIPYPSDEAYTKRSTDRTLRWAERCLAAHTREDQAVFGIVQGGMFPDLRRENALALQELDFAGYGIGGLSVGEPKPVMYEILDRTTDFMDKQKARYLMGVGTPDCLVEGINLGVDMFDCVFPTRVARNGTAMTGRGRLVIRNAVYAEDFRPIDEHCRCYTCRNFSRAYIRHLFKAEETFGLRLLSIHNLHFLLDFVRQIREAIEAGAFPEFRRHFWDNWEEKDARPADLL

SEQ ID NO: 51006 - protein, 374 aa, unidentified
  source 1..374: note = Acidaminococcaceae bacterium
  REGION 1..374: note = tr|A0A3D2QCE3|A0A3D2QCE3_9FIRM Queuine tRNA-ribosyltransferase OS=Acidaminococcaceae bacterium; OX = 2049052 GN=tgt PE=3 SV=1
MHAVTYELLKEDSRSKARRGRLHTPHGTFETPMFMPVGTQATVKTLSPEELYDMGSQVILANTYHLFLRPGSDLVRKAGGLHRFMNYRRGMLTDSGGFQVFSLGAMRKITEEGVLFRSHIDGSKQFLSPEVSMHVQEDLGADIAMAFDECIPYPSDEAYTKRSTDRTLRWAERCLAAHTREDQAVFGIVQGGMFPDLRRENALALQELDFAGYGIGGLSVGEPKPVMYEILDRTTDFMDKQKARYLMGVGTPDCLVEGINLGVDMFDCVLATRIARNGSVFTNRGRVVIKNAKYARDFGPMDETCDCYACTHFSRAYIRHLFNAKEITGGRLASIHNLRFLLRMMEEIRQAIAEDRLLDYRKEFYERYDLTKNF

SEQ ID NO: 51007 - protein, 373 aa, Acidaminococcus fermentans
  REGION 1..373: note = tr|A0A1I5J4Z7|A0A1I5J4Z7_ACIFE Queuine tRNA-ribosyltransferase OS=Acidaminococcus fermentans; OX = 905 GN=tgt PE=3 SV=1
MHSVYFELIKEDPRSGARLGKLHTPHGTFDTPMFMPVGTQATVKTLTPEELYAMHSQVILSNTYHLFLRPGTELVRKAGGLHKFMNYKRGMLTDSGGFQVFSLGEMRKITEEGVMFRSHLDGSRQFLNPEVATKAQEDLGADIIMAFDECIPYPADHGYAKQSTERTTRWARRCLEAKTREDQGLFGIIQGGMYPDLREYSAKAITDMDFAGFAIGGLSVGEPHPLMYDILDKTTRHMPKDKARYLMGVGTPDCLVEGVNLGVDMFDCVYPTRVARNGTAMLPTGRLVVRNAQYAEDWRPIDEHCDCYTCRNFSRAYIRHLFKAEEILALRLLSIHNLHFLLKFAEDMRTAIANDTFPEFRAAFLENYETTRR

SEQ ID NO: 51008 - protein, 373 aa, Acidaminococcus fermentans; identical to SEQ ID NO: 51007
  REGION 1..373: note = tr|D2RLD1|D2RLD1_ACIFV Queuine tRNA-ribosyltransferase OS=Acidaminococcus fermentans (strain ATCC 25085 / DSM 20731 / VR4) OX=591001 GN=tgt; PE = 3 SV=1

SEQ ID NO: 51009 - protein, 374 aa, Acidaminococcus intestini
  REGION 1..374: note = tr|C0WEF4|C0WEF4_9FIRM Queuine tRNA-ribosyltransferase OS=Acidaminococcus intestini; OX = 187327 GN=tgt PE=3 SV=1
MHAVYFELIKEDPRSGARLGKLHTPHGTFDTPMFMPVGTQATVKTLTPEELYDMKSQVILSNTYHLFLRPGTELIRKAGGIHRFMNYERGMLTDSGGFQVFSLGAIRKITEDGVTFRSHIDGSKQFLSPEVAMKAQEDIGADIIMAFDECIPYPADFDYAKKSTERTTRWAKRCLAAKTRDDQGLFGIVQGGMYPELRKYSAEALSELDFAGMAIGGLSVGEPHELMYDILGKTTQYLPKNKARYLMGVGTPDCLVEGVNLGVDMFDCVYPTRVARNGTAMVRSGRLVLKNLEFREDFRPIEEGCDCYTCRHFSRAYIRHLFKSEELLAMRLLSIHNLRFLLKFAEDMRSAIANDTFPEFRAAFLDQYQRTSRR

SEQ ID NO: 51010 - protein, 374 aa, Acidaminococcus intestini; identical to SEQ ID NO: 51009
  REGION 1..374: note = tr|G4Q517|G4Q517_ACIIR Queuine tRNA-ribosyltransferase OS=Acidaminococcus intestini (strain RyC-MR95) OX=568816 GN=tgt PE=3 SV=1

SEQ ID NO: 51011 - protein, 373 aa, Acidaminococcus sp.
  REGION 1..373: note = tr|R7LYX7|R7LYX7_9FIRM Queuine tRNA-ribosyltransferase OS=Acidaminococcus sp. CAG:542; OX = 1262687 GN=tgt PE=3 SV=1
MHSVYFELIKEDPRSGARLGKLHTPHGTFDTPMFMPVGTQATVKTLTPEELYAMHSQVILSNTYHLFLRPGTELVRKAGGLHKFMNYKRGMLTDSGGFQVFSLGEMRKITEEGVMFRSHLDGSRQFLNPEVATKAQEDLGADIIMAFDECIPYPADHGYAKQSTERTTRWARRCLEAKTREDQGLFGIIQGGMYPDLREYSAKAITDMDFAGFAIGGLSVGEPHPLMYDILDKTTRHMPKDKARYLMGVGTPDCLVEGVNLGVDMFDCVYPTRVARNGTAMLPTGRLVVRNAQYAEDWRPIDEHCDCYTCRNFSRAYIRHLFKAEEILALRLLSIHNLHFLLKFAEDMRKAIANDTFPEFRAAFLENYETTRR

SEQ ID NO: 51012 - protein, 373 aa, Acidaminococcus sp.
  REGION 1..373: note = tr|A0A415EKE9|A0A415EKE9_9FIRM Queuine tRNA-ribosyltransferase OS=Acidaminococcus sp. AM05-11; OX = 2291997 GN=tgt PE=3 SV=1
MRQVYFELIKEDPRSGARLGKLHTPHGTFDTPMFMPVGTQATVKTLTPEELYAMNSQVILSNTYHLFLRPGTELVKKAGGLHKFMNYNRGMLTDSGGFQVFSLGEMRKITEEGVMFRSHLDGSKQFLNPEVATKAQEDLGADVIMAFDECIPYPADHAYAKQSTERTTRWAKRCLDAKTRDDQGLFGIIQGGMYPDLREYSAKAITSMDFDGFAIGGLSVGEPHPLMYDILGKTTQWMPKDKARYLMGVGTPDCLVEGVNLGVDMFDCVYPTRVARNGTAMLPTGRLVVRNAAYMEDFRPIDENCDCYTCRHFSRAYIRHLFKAEEILALRLLSIHNLHFLLKFAENMRKAIANDTFPEFRAAFLENYNTTGR

SEQ ID NO: 51013 - protein, 360 aa, unidentified
  source 1..360: note = Acidibacillus ferrooxidans
  REGION 1..360: note = tr|A0A101XNZ4|A0A101XNZ4_9BACL Queuine tRNA-ribosyltransferase OS=Acidibacillus ferrooxidans; OX = 1765683 GN=tgt PE=3 SV=1
MARRGRLSTPHAVIETPVFMPVGTQATVKTLSPEEVMQTGASIILSNTYHLHLRPGEEIVREAGGLHRFMNWPRALLTDSGGYQVFSLSSKRKITEEGVHFRSHISGAPLFIGPEESIAIQNALGADIIMAFDECPPYPATREYVADSLARTTRWAKRCQTVHGRTEDQALFGIVQGGMFRDLRARAAEEITALDFPGYALGGLSVGEEKPLMYEMVEFTTPFLPKDRPRYLMGVGSPDDLFEGVLRGIDMFDCVLPTRIARNGTVFTSRGKLVLKNAANARDYTPLDEACDCYVCKNYSRAYIRHLLKAEETFGIRLTSYHNVHFLVTLMAQIRTAIEEDRLLALRKTFFENYGYQVEG

SEQ ID NO: 51014 - protein, 360 aa, unidentified
  source 1..360: note = Acidibacillus ferrooxidans
  REGION 1..360: note = tr|A0A162TDP0|A0A162TDP0_9BACL Queuine tRNA-ribosyltransferase OS=Acidibacillus ferrooxidans; OX = 1765683 GN=tgt PE=3 SV=1
MARRGRLTTPHAVIETPVFMPVGTQATVKTLSPEEVMQTGASIILSNTYHLHLRPGEEIVREAGGLHRFMNWPRALLTDSGGFQVFSLSSTRKITEQGVHFRSHISGAPLFIGPEESIAIQNALGADIIMAFDECPPYPATREYVSDSLARTTRWAKRCQTAHERTDDQALFGIVQGGMFRDLRARAAEEITALDFPGYALGGLSVGEEKPLMYEMVEFTTPFLPKDRPRYLMGVGSPDDLFEGVLRGIDMFDCVLPTRIARNGTVFTSRGKLVLKNASNARDYSPLDEACDCYVCKNYSRAYIRHLLKAEETFGIRLTSYHNVHFLVTLMAQIRAAIEEGRLLALRKTFFENYGYQVEG

SEQ ID NO: 51015 - protein, 377 aa, unidentified
  source 1..377: note = Acidibacillus sulfuroxidans
  REGION 1..377: note = tr|A0A2U3DB65|A0A2U3DB65_9BACL Queuine tRNA-ribosyltransferase OS=Acidibacillus sulfuroxidans; OX = 1765684 GN=tgt PE=3 SV=1
MSALSFELLKTSSDSLARRGRIRTLHATIETPVFMPVGTQATVKTLSPEELMDIGAHIILSNTYHLHLRPGEDVIQGAGGLHKFMNWPRAILTDSGGFQVFSLSTLRKISEEGVEFRSHISGEKRFLSPERSIQVQNALGADIIMAFDECPPYPADREYVLASLLRTTRWAKRSLVAHERSEEQALFGIVQGGMEIDLRRQAAEELVELDFPGYAIGGLSVGEPKPLMNEVLEHTTPFLPQNKPRYLMGVGAPDDLFEGVMRGVDMFDCVLPTRIARNGTVFTASGKLVVRNAANAKDYAPLDEKCDCYVCKNYSRAYIRHLLKAEETFGIRLTSYHNVYFLVKLMEKIRASIENGTFLALRKQFYDAYGYNRDAMC

SEQ ID NO: 51016 - protein, 257 aa, Acidiferrobacter sp.
  REGION 1..257: note = tr|A0A2D7VN30|A0A2D7VN30_9GAMM Queuine tRNA-ribosyltransferase (Fragment) OS=Acidiferrobacter sp.; OX = 1872107 GN=CL386_08970 PE=3 SV=1
MKYKLFHTDGNARRGQIETSRGVIDTPAFMPVGTVGSVRSVSPQEVAGTGAQIILGNTFHLMLRPGTEIINLHGSLHDFMGWSGPILTDSGGFQVWSLANKKDIREEGVTFRSPVDGSTVFLDPETSMEVQKALGSDIVMCFDECTTYPATMDEARQSMDLSLRWAERCRRYPLAAGQALFGIAQGGMHETLRLEALDHLQSIGFDGYALGGLSVGEPKEDMLRILDTVTTAMPADQPRYLMGVGKPEDLIAGVAAG

SEQ ID NO: 51017 - protein, 388 aa, Acidiferrobacter sp.
  REGION 1..388: note = tr|A0A2Z3R1T6|A0A2Z3R1T6_9GAMM Queuine tRNA-ribosyltransferase OS=Acidiferrobacter sp. SPIII_3; OX = 1281578 GN=tgt PE=3 SV=1
MSLVPFIELGRDGRARACRLSLAHGVVATPSFMPVGTYGAVKGMSPAEVAGSGAAIVLGNTFHLMERPGLEVIAAHGGLHGFMGWQGPILTDSGGFQVFSLAALRKVTEQGVAFRSPRDGRPLMLTPELAMGAQATLRSDIAMVFDECTPHPASFSEARASMELSLRWAERSRAAYDGPGALFGIVQGGLYEDLREISARGLVAVGFDGYALGGLSVGESKDDMYRLVTRCAPLLPADRPRYLMGVGTPEDIVTAVSAGIDLFDCVLPTRNARNGWLFTRTGVVKIRNSGYARDLGPVDPECRCHTCTHTTRSYLHHLQRSGEMLGARLATLHNLTYYGDLMAGLRAAILAGKLEEFVDSFYRTRHKRPPRALGGLPEDEAAATTITA

SEQ ID NO: 51018 - protein, 388 aa, Acidiferrobacter thiooxydans
  REGION 1..388: note = tr|A0A1C2G1V6|A0A1C2G1V6_9GAMM Queuine tRNA-ribosyltransferase OS=Acidiferrobacter thiooxydans; OX = 163359 GN=tgt PE=3 SV=1
MSLVPFIELGRDGRARACQLSLAHGVVATPSFMPVGTYGAVKGMSPAEVAGSGAAIVLGNTFHLMERPGLEVIAAHGGLHGFMGWQGPILTDSGGFQVFSLAALRKVSEQGVAFRSPRDGRPLMLTPELAMAAQATLRSDIAMVFDECTPHPASFGEARASMELSGRWAERSRAAYDGPGALFGIVQGGLYEDLREMSARALVGVGFDGYALGGLSVGESKGDMYRLVTHCAPLLPADRPRYLMGVGTPEDIVTAVSAGIDLFDCVLPTRNARNGWLFTRTGVVKIRNSGYARDLGPVDPECRCHTCTHTTRSYLHHLQRSGEMLGARLATLHNLTYYGDLMAGLRAAILAGTLEEFVDSFYRTRHKRPPRALGGLPEDETAAITTTV

SEQ ID NO: 51019 - protein, 371 aa, unidentified
  source 1..371: note = Acidiferrobacteraceae bacterium
  REGION 1..371: note = tr|A0A2E6P2Q2|A0A2E6P2Q2_9GAMM Queuine tRNA-ribosyltransferase OS=Acidiferrobacteraceae bacterium; OX = 2024893 GN=tgt PE=3 SV=1
MKFEIVKSDGYARRGKLFLRHGLVETPAFMPVGTQAAVRSVSPQEVKDSNSQIVLGNTFHLMLRPGSDLIRAHGGLHNFMGWDNPILTDSGGFQVWSLATNRKLDESGVLFKSPITGEKVFLNPEKSIDVQIDLNSDIAMVFDECTTYPITKEDAAISMERSMRWAKRCKMHHDNAGQALFGIAQGSVYQDLRTQSLGALTEIGFDGYALGGLAVGEGLEEMYGILDSITPLMPWNQPRYLMGVGKPENIVVAVKYGIDMFDCVIPTRNARNGWLYTSTGIVKIRNAENRTNLEPIDQECPCPACLNYSRSYIRHLLTIGETLGLRLCTLHNLYFFQRLMSEIRHAIACGNYDLFVKQFFEKRGDKSHFVA

SEQ ID NO: 51020 - protein, 369 aa, unidentified
  source 1..369: note = Acidiferrobacteraceae bacterium
  REGION 1..369: note = tr|A0A2D6K7Z1|A0A2D6K7Z1_9GAMM Queuine tRNA-ribosyltransferase OS=Acidiferrobacteraceae bacterium; OX = 2024893 GN=tgt PE=3 SV=1
MKYYIKNREGAARRGRLLFERGVVNTPAFMPVGTYGTVKAMTPEELRQVGAEIILGNTFHLMLRPGVEVIGEHGGLHDFMHWEGPILTDSGGFQVWSLAEQRKISDKGVTFRSPVDGAKIFLGPEESMTVQQALGADIIMQFDECTPYPAEKKAVQSSMERSLHWAERCKAAHGSHPSALFGIVQGGMHTALRRQSLRELTDIGFDGYALGGLSVGEPKHHMYRMLRGIAHQLPESAPRYLMGVGRPEDIVYAVACGIDMFDCVMPTRNARNGWLFTSQGVIKIRNSVYAHDRAPLDPRCNCYTCQHYSRSYLRHLQQTNEILGARLATIHNLCHYQSLMAEIRKSLESGDFAAFAIDYLDRFKITFPE

SEQ ID NO: 51021 - protein, 372 aa, unidentified
  source 1..372: note = Acidihalobacter ferrooxidans
  REGION 1..372: note = tr|A0A1P8UGZ5|A0A1P8UGZ5_9GAMM Queuine tRNA-ribosyltransferase OS=Acidihalobacter ferrooxidans; OX = 1765967 GN=tgt PE=3 SV=1
MRFERLAQDGAARRGRLIFPRGEVETPAFMPVGTYGTVKAMTPEELEGLGAQIVLGNTFHLMLRPGTEIIALHGDLHGFMHWERPILTDSGGFQVFSLAKLRKLSETGVTFRSPVNGDRIELTPERSMAVQRALGSDIVMSFDECTPFPATQTQAADSMRLSMRWAQRSRDAHGDNPSALFGIVQGGMYAELRLESAASLREIGFDGYAIGGLAVGEPADVREAVLDYTVPVLPEDRPRYLMGVGTPEDIVEAVRRGVDMFDCVIPTRNARNGFLYTRTGVMRIRNAKYAHDTRPIDERCDCYTCRHYSRAYLRHLDKCGEILGARLNTIHNLYRYQALMREIRDAIAAGSFRAWADGFYAERNAHDASAVP

SEQ ID NO: 51022 - protein, 371 aa, unidentified
  source 1..371: note = Acidihalobacter prosperus
  REGION 1..371: note = tr|A0A1A6C7U3|A0A1A6C7U3_9GAMM Queuine tRNA-ribosyltransferase OS=Acidihalobacter prosperus; OX = 160660 GN=tgt PE=3 SV=1
MKFDLLTRDGAARRGRLTFERGTVETPAFMPVGTYGTVKGMTPEELESLGAEIVLGNTFHLMLRPGTEIIARHGDLHGFMHWERPILTDSGGFQVFSLAKLRKLSEEGVSFRSPVNGDKVMLTPERSMAVQRALGSDIVMVFDECTPYPATEDEAAASMRLSLRWAARSREAHGDSSSALFGIVQGGMYEALRLESAAGLRAIGFDGYAIGGLAVGEPADERLRTLEFTLPALPADRPRYLMGVGTPEDIVESVLRGVDMFDCVIPTRNARNGFLYTRSGVMRIRNARYADDTRPLEEGCECYTCRNYSRAYLRHLDKCGEILGARLNTIHNLHYYQTLMRELREAIAQGRLAAYVDEFRALRAKPGGAVP

SEQ ID NO: 51023 - protein, 371 aa, unidentified
  source 1..371: note = Acidihalobacter prosperus
  REGION 1..371: note = tr|A0A1D8K7B6|A0A1D8K7B6_9GAMM Queuine tRNA-ribosyltransferase OS=Acidihalobacter prosperus; OX = 160660 GN=tgt PE=3 SV=1
MKFDLLTRDGAARRGRLTFERGTVETPAFMPVGTYGTVKGMTPEELEGLGAEIVLGNTFHLMLRPGTEIIARHGDLHGFMHWERPILTDSGGFQVFSLAKLRKLSEEGVSFRSPVNGDKVMLTPERSMAVQRALGSDIVMVFDECTPYPATEDEAAASMRLSLRWAARSREAHGDSTSALFGIVQGGMYEALRLESAAGLQAIGFDGYAIGGLAVGEPAEERLRTLEFTLPALPADRPRYLMGVGTPEDIVESVLRGVDMFDCVIPTRNARNGFLYTRSGVMRIRNARYADDTRPLEEGCECYTCRNYSRAYLRHLDKCGEILGARLNTIHNLHYYQTLMRELREAIAAGCLDEYVSAFRALRANPGDAVP

SEQ ID NO: 51024 - protein, 369 aa, unidentified
  source 1..369: note = Acidimicrobiaceae bacterium
  REGION 1..369: note = tr|A0A2E7Q854|A0A2E7Q854_9ACTN Queuine tRNA-ribosyltransferase OS=Acidimicrobiaceae bacterium; OX = 2024894 GN=tgt PE=3 SV=1
  VARIANT 167: note = Xaa can be any naturally occurring amino acid
MKAVSEVIATDGEARLSEVTLAGGKFQTPCFMPVGTRGAVKHLSSSDMKDLNAEIILGNTYHLMLRPGSDLIRESGGLAKFASWDGLTLTDSGGYQIFSLQPKVDDLGATFRSIYDGSSHHLTPELASTTQADLGADIQMVLDVCSALPAEKNILKEAVDRTALWAXRGREAFLLHPEAQERQSQFGIVQGGTDISLRIESTQRTLQVGFDGYAIGGLSVGEGRSEMLDPVSSVTELLPKDQPRYFMGLGDPAGLVEVVGRGVDMFDCVLPTRLARHGTVLTSEGRINLRNAKFIADERPLDPSFENSPASNWSRSYLRHLLVTEEPTAPRILTLHNLAWMFEFVTQLRKSIIEGEFQKFRKETLEIWG

SEQ ID NO: 51025 - protein, 369 aa, unidentified
  source 1..369: note = Acidimicrobiaceae bacterium
  REGION 1..369: note = tr|A0A2E8BDV0|A0A2E8BDV0_9ACTN Queuine tRNA-ribosyltransferase OS=Acidimicrobiaceae bacterium; OX = 2024894 GN=tgt PE=3 SV=1
MKAIFHEEATCDGARAGQVDTPGGSFTTPCFMPVGTRGAVRHLSSKDLGDLGAEVVLANTYHLMLRPGVEVVRDLGGLRGFTGWQGLSLTDSGGYQIFSLQPRVDDVGAEFRSTYDGSIHKLTPEGAAGVQADLGADIQMVLDVCSALPATDAIVRQAVDRTSAWAVRGRKAFLDHPDAQQRQCQFGIVQGGTNVALRTESAQRTLEVGFDGYAIGGLSVGETRDEMLDPVSAVTTVLPADQPRYFMGLGDPAGLVEVVGRGVDMFDCVLPTRHARHGTVLTSSGKLNLRNARFATDDDPLDPGFPTSPAAPWSRAYLRHLLMTDEPTGRRLLSLHNLAWLLGFVDRLRSSISEGRFAQFRAETLEVWG

SEQ ID NO: 51026 - protein, 364 aa, unidentified
  source 1..364: note = Acidimicrobiales bacterium
  REGION 1..364: note = tr|A0A2A5YVU7|A0A2A5YVU7_9ACTN Queuine tRNA-ribosyltransferase OS=Acidimicrobiales bacterium MED-G01 OX=1986263 GN=tgt PE=3 SV=1
MSLSFELLASDHQARRGRIHTSRGSIETPVFMPVGTRGAVIHLDQRDYKELDIEVVLGNTYHLMLRPGAQIIEDLGGLHSFASWDGHMLTDSGGFQVMSLNDNVKIDDDGVTFTSIYDGSKVRFTPEDAVSTQEQLGADIQMALDVCPALPSSQDTVVKAMERTHDWASRAKSVHRLTDQALFGIVQGGIDPRLRTRSAKHMASLDFPGYGIGGLSVGESHGEMMPALNAAAIELPEDRPRYLMGVGDPARIVDAIGSGIDMFDCVLPTRLARHGTVLTSSGKLNLRNAKHARDDQPLDPANPMSNSFSRAYLRHLIQVKEPTAARIATMHNLWFLLDLVKQARRAIEDGTYDSFRLKILETWA

SEQ ID NO: 51027 - protein, 382 aa, unidentified
  source 1..382: note = Acidimicrobiales bacterium
  REGION 1..382: note = tr|A0A2W6CCP9|A0A2W6CCP9_9ACTN Queuine tRNA-ribosyltransferase OS=Acidimicrobiales bacterium; OX = 2201156 GN=tgt PE=3 SV=1
MILQLKVDATDGAARVGRLQTPRGSFAVPAFMPVGTRGSVRAVSSADMENLGAEVMLANTYHLMLRPGVDVVAGLGGLHAFTSWPGHLLTDSGGYQVYSLGPKVDDDGVTFRSVYDGSSHRLTPEGAVRIQEQLGADIQMVLDVCPALPSPPDVLRLAVERTADWAARAKLAHRRDGQALFGIVQGGTDEALRAESARRTVELDFEGYGIGGLAVGEGPEARLAALASAVTELPTDRPRYLMGVGDPVGLVEAVAMGVDLFDCVAPTRWARHGRVLTGEGPLQLRNAVFRCDPGPLDPDCRCVTCSRWSRAYLRHLLMVGEPSALRLLSLHNLAWTLNLMESVGEAVRTGTLGSLRRQVASVWDAARSGSRPRGRGSVTRRG

SEQ ID NO: 51028 - protein, 378 aa, unidentified
  source 1..378: note = Acidimicrobiia bacterium
  REGION 1..378: note = tr|A0A431IE18|A0A431IE18_9ACTN Queuine tRNA-ribosyltransferase OS=Acidimicrobiia bacterium; OX = 2080302 GN=tgt PE=3 SV=1
MKLTIDVEHRDGRARTGTVHTARGAFRTPLFMPVATRGSIRALMTHELTGLAAADGTRAEVLLANTYHLMLRPGAEVVADLGGLAAFSGWDGLTLTDSGGYQVFSLGPKLHDGGAEFRSTYDGSTHLLTPEGAVATQELLGADIQMVLDVCAALPSSRAALRDALETTASWAARARAAHRRTGDQALFGIVQGGTETDLRAESAQRTVELDFDGYAVGGLSVGETREEMLPALDAALEHLPVDQPRYLMGVGDPLSIVEAVARGVDMFDCVLPTRLARHGTLLTDAGRLNIKRAEFARSEDPIDPNCPCPTCATYSRGYLRHLTAVGEPAAASLCTVHNLTWMLGLVARIRAAIAAGRLDGLRAEVAGVWSGSGPGLG

SEQ ID NO: 51029 - protein, 371 aa, unidentified
  source 1..371: note = Acidimicrobiia bacterium
  REGION 1..371: note = tr|A0A0R2QPB4|A0A0R2QPB4_9ACTN Queuine tRNA-ribosyltransferase OS=Acidimicrobiia bacterium BACL6 MAG-120910-bin40 OX=1655586 GN=tgt PE=3 SV=1
MFPVQFTTDAVDGNARAGTAVTHRGSYTTPCFMPVGTRGAIKYLSASDYEELGAQIVLGNTYHLMLRPGAQTVSAMGGLGAFAGWKGLTLTDSGGFQVFSLSPDVDDDGVTFKSTYDGSRHRYTPESAVQTQQLLGADIQMVLDVCPPLPSPAHVVRLALERTSSWAQRAVLTHTRTDQSLFGIVQGGIDVNLRAESAARTAELNFDGYGIGGLSVGESRQEMLPALEAALAHLPLDRPRYLMGVGDPASLVEAVHLGVDQFDCVLQTRLGRHGTALTSQGRVNLKRSEFTLSNDPIDSSCLCSVCTRHTRGYIRHLFQVGEPTASRLVSMHNIAWTLSLMEKMRNAVIAGRFAALRQEILAVWGNAASLG

SEQ ID NO: 51030 - protein, 378 aa, Acidimicrobium ferrooxidans
  REGION 1..378: note = tr|C7LYS5|C7LYS5_ACIFD Queuine tRNA-ribosyltransferase OS=Acidimicrobium ferrooxidans (strain DSM 10331 / JCM 15462 / NBRC 103882 / ICP); OX = 525909 GN=tgt PE=3 SV=1
MRPSFRIDATDGTARAGTLTLRHGLVPTPVFMPVATRGMVRLVPPATLHELGVSLLLANTYHLALRPGADVVAALGGLSAFTGFGGPMLTDSGGFQVMSLGGTVDDDGVTFRSTYDGRRVRLTPEGVVELEERFGVDIAMVLDVCTMLPAERAALQVAMVRTTEWARRAAAARRDEAQALFGIVQGGSEEDLRREHASQIAEIGFDGYGIGGLAVGESAPATLAAVAAALERLPADRPRYLMGVGDPYLIAHAVELGVDAFDCVAPTRLARHGIALTSQGRLALRPSRWLGSDEPVDPRCGCSTCRTVPRGLVAHLLRVDAHSAGALLSVHNLSFQLGLLRDLRAAIRAGTLAGLVRALDEVWAPSWRSARTEAAPDR

SEQ ID NO: 51031 - protein, 372 aa, Acidimicrobium sp.
  REGION 1..372: note = tr|A0A0R2QJU8|A0A0R2QJU8_9ACTN Queuine tRNA-ribosyltransferase OS=Acidimicrobium sp. BACL27 MAG-120823-bin4 OX=1655564 GN=tgt PE=3 SV=1
MFAVKFRETARDQSARAGIATTHRGEYETPCFMPVGTRGAIRHLSAQDYEELGARIVLGNTYHLMLRPGAQVVSDLGGLGAFAGWKGLTLTDSGGFQVFSLNPDVDDEGVSFRSTYDGSMHRFTPEKAVVTQQLLGADIQMVLDVCASLPATDDVIKLALKRTSNWAARAKAAHTRSDQSLFGIVQGGIDPVLRQESAKITANLEFDGYGIGGLSVGETREEMLVALSAAIEHLPKDRPRYLMGVGDPASLVEAVNLGVDQFDCVMQTRIGRHGTALTSVGKLNITRAEFATSQDPIDLQCSCPVCKRHTRGYIRHLFQVNEPTAARLVSIHNIAFTLNLMTQMRDAIANGVFSSLRKSLLAVWADTANDKA

SEQ ID NO: 51032 - protein, 367 aa, Acidimicrobium sp.
  REGION 1..367: note = tr|A0A0R2PJJ6|A0A0R2PJJ6_9ACTN Queuine tRNA-ribosyltransferase OS=Acidimicrobium sp. BACL17 MAG-120924-bin0 OX=1655565 GN=tgt PE=3 SV=1
MFPVEFSQVAQDGQARAGVATTHRGTYSTPCFMPVGTRGAIKYLSAQDYEQLGAQIVLGNTYHLMLRPGAELIARFGGLGAFAGWNGLTLTDSGGFQVFSLNPDVDDEGVTFKSTYDGSMHRFTPESAVHTQQLLGADIQMVLDVCPPLPSPPHVVRTALERTSMWAARARDAHERHDQSLFGIVQGGIDINMRAESAERTATLQFDGYGIGGLSVGETREEMVPALQAAITHLPANRPRYLMGVGDPASLVEAVNLGVDQFDCVLQTRLGRHGTALTSAGRVNLKRAEFTESDDPIDATCSCMVCTRHSRGYIRHLFQVGEPTASRLVSIHNVAWTISLMDQMRRSIIDGSFAQLRQDILAIWGTT

SEQ ID NO: 51033 - protein, 376 aa, Acidiphilium cryptum
  REGION 1..376: note = tr|A5FY69|A5FY69_ACICJ Queuine tRNA-ribosyltransferase OS=Acidiphilium cryptum (strain JF-5) OX=349163 GN=tgt PE=3 SV=1
MTGFAFHNLGQDGAARRGRLVTAHGTAETPAFMAVGTAGTVKAMTADAVRATGTEIVLGNTYHLMLRPGAERVRALGGLHRMMDWPGIILTDSGGFQVMSLAKLRKIDEVGVTFRSHLDGSAHHLTPESSTAIQNALDATITMAFDECTPFPATHEQAAASMRLSMRWAERSRAAFEPRPGYGQFGIVQGSVFADLRAESAAALTGLGFEGYAIGGLAVGEGQQAMFDTLDVTTPLLPTDRPRYLMGVGTPDDLLGSIARGVDMFDCVMPTRAGRTGRAFTSRGILNLRNARFAAEDRPLDPACPCLACARHSRAYLHHLFRCDEMLGPMLLTTHNLSYYQTVMRGAREAIEAGRFAAYAAATRDAWSQGDDRHTL

SEQ ID NO: 51034 - protein, 376 aa, Acidiphilium multivorum; identical to SEQ ID NO: 51033
  REGION 1..376: note = tr|F0IY74|F0IY74_ACIMA Queuine tRNA-ribosyltransferase OS=Acidiphilium multivorum (strain DSM 11245 / JCM 8867 / NBRC 100883 / AIU301) OX=926570; GN = tgt PE=3 SV=1

SEQ ID NO: 51035 - protein, 372 aa, Acidiphilium rubrum
  REGION 1..372: note = tr|A0A1N6RP61|A0A1N6RP61_ACIRU Queuine tRNA-ribosyltransferase OS=Acidiphilium rubrum OX=526; GN = tgt PE=3 SV=1
MTEFAFTLLGQDGAARRGRITTAHGTAQTPAFMAVGTAGTVKAMTADQVRATGSEIVLGNTYHLMLRPGADRVAALGGLHRMMDWPGIILTDSGGFQVMSLAKLRKLDEIGVTFRSHIDGSAHHLTPESSTAIQHKLDATITMAFDECTPFPATPDEAAASMRLSMRWAARSRAAFTPRPGYAQFGIVQGGIYPDLRAESAAALTALGFEGYAIGGLAVGEGQPAMFETLDATTPLLPATSPRYLMGVGTPDDLLGAIERGVDMFDCVMPTRAGRTGRAYTARGVFNLRNARFGDDATPLDPACTCTLCTRHSAAYLHHLFRCEEMLGPMLLTGHNLTYYQALMHGARTAIEQHRFAAYAAAARDGWRQTHD

SEQ ID NO: 51036 - protein, 376 aa, Acidiphilium sp.
  REGION 1..376: note = tr|A0A257R8Q1|A0A257R8Q1_9PROT Queuine tRNA-ribosyltransferase OS=Acidiphilium sp. 20-67-58; OX = 1970291 GN=tgt PE=3 SV=1
MTGFAFHNLGQDGAARRGRLITAHGTAETPAFMAVGTAGTVKAMTADAVRATGTEIVLGNTYHLMLRPGAERVRALGGLHRMMDWPGIILTDSGGFQVMSLAKLRKIDEVGVTFRSHLDGSAHHLTPESSTAIQNALDATITMAFDECTPFPATHEEAAASMRLSMRWAERSRAAFEPRPGYGQFGIVQGSVFADLRAESAAALTGLGFEGYAIGGLAVGEGQQAMLDTLDVTTPLLPTDRPRYLMGVGTPDDLLGSIARGVDMFDCVMPTRAGRTGRAFTSRGILNLRNARFAAEDRPLDPACHCLACARHSRAYLHHLFRCDEMLGPMLLTTHNLSYYQTVMRGAREAIEAGRFAAYAAATRDAWSQGDDRHTL

SEQ ID NO: 51037 - protein, 370 aa, Acidiphilium sp.
  REGION 1..370: note = tr|R7FXQ2|R7FXQ2_9PROT Queuine tRNA-ribosyltransferase OS=Acidiphilium sp. CAG:727; OX = 1262689 GN=tgt PE=3 SV=1
MEKFYFETIKQDSETGARAGVLHTPHGDIETPVYMPVGTQATVKGVYPRDLKEAGSQIILANTYHLFMRPGDEIVKSAGGLHKFMNWDKPILTDSGGFQVFSLAKLNDIKDEGVTFSSNVDGSKHFVTPEKAIDIENNLGADIIMAFDQCSEYGASYEKSKTAMYRTLNWLDRCYNHHKNENQALFPIVQGNVFKDLRATSLKETVPYAKYGIGIGGLSVGEPKELMYDVMDSMLPNYPTNVPRYLMGVGSPDCLLEGVMRGIDMFDCVLATRIARNGTAMTSRGKVVVRNGKYKEDFTPLDPECDCYCCKNYTKAYLRHVINVNEMMGGMLLSLHNITFLHNLMKGIRKSILGGYFKDFRKEFYEKYGE

SEQ ID NO: 51038 - protein, 397 aa, unidentified
  source 1..397: note = Acidipila dinghuensis
  REGION 1..397: note = tr|A0A4Q1SKS7|A0A4Q1SKS7_9BACT Queuine tRNA-ribosyltransferase OS=Acidipila dinghuensis; OX = 1560006 GN=tgt PE=3 SV=1
MSLDFQILHAAGEARRATMRLPHAAVETPVFMPVGTVASVKALPQHFLEELDARIILGNTYHLYLRPGHELVQRMGGLHRFMSWDRAMLTDSGGFQVFSLNELRKVTDDGVEFRSHLDGSKHFFSPEHSMAVQIALGADICMAFDECTEYPADYARARKSLDTTLRWAERSKTYFDAHRHERPWDLHIAGTELRGMDHSGTGLRGEGPDGFAGLQPNLFGIVQGGMYKDLRRESAERLVEMDFPGYAIGGLSVGEPRDLTLEVIAETLPYLPKDKPRYVMGVGFPDEIVEYAKMGVDMMDCVLPTRAARHGMLFTSEGRLNMKNKQFAEDQGPVDPECDCPTCRRYTRAYLRHLMVAHEPLAATLNTLHNLAFYLRTMAKVREEITRAGGAAAPVAG

SEQ ID NO: 51039 - protein, 371 aa, unidentified
  source 1..371: note = Acidipila rosea
  REGION 1..371: note = tr|A0A4R1L3D5|A0A4R1L3D5_9BACT Queuine tRNA-ribosyltransferase OS=Acidipila rosea OX=768535; GN = tgt PE=3 SV=1
MNRVSLHFEILNSGAAGRRGTLTLPHGQVETPAFMPVGTAASVKALPQHFLEELDARIILGNTYHLYLRPGHELIRRMGGLHRFMSWPRALLTDSGGFQVFSLNELRKVTEEGVRFRSHLDGSSHFFSPEHSMDVQIALGSDIAMAFDECLEYPADRERARKSLDLTMRWAARSKAHFDAHKHEAPWVDELEQTPNLFGIVQGGMFADLRRESAERLVEMDFPGYAIGGLSVGEPRELTREIIADTLPLLPADKPRYVMGVGYPDEIVEYAKMGVDMMDCVLPTRAARHGLLFTSEGRLNIKNRRFAEDQGPLDPECSCPVCQRYSRAYLRHLMAAQEPLAAVLNTLHNLAFYLMTMRRVREELAGSVPSI

SEQ ID NO: 51040 - protein, 379 aa, unidentified
  source 1..379: note = Acidipila sp.
  REGION 1..379: note = tr|A0A372ING7|A0A372ING7_9BACT Queuine tRNA-ribosyltransferase OS=Acidipila sp. 4G-K13 OX=2303751; GN = tgt PE=3 SV=1
MSLAFQIHAESGAARRATMMLPHAAVETPVFMPVGTVGSVKAVPQHLLEELDARIILGNTYHLYLRPGHELVRRMGGLHRFMSWERAILTDSGGFQVFSLNELRKVTEEGVAFRSHIDGSSHFFSPEHSMDVQVALGSDIAMAFDECTEYPADYARARKSLDLTLRWAQRSRDHFEAHKHERPWSEGFEGKMPSLFGIVQGGMYPDLRRESAERLVEMDFPGYAIGGLSVGEPRELTREIIAATLPLLPKDKPRYVMGVGYPDEIVEYAAMGVDMMDCVLPTRAARHGLLFTSEGRLNIKNRRFAEDQGPADPKCDCLVCRRYSRAYLRHLMTAQEPLAAVLNTLHNLAFYLGTMRRVRERIEAGLPVTDLKMEASQSA

SEQ ID NO: 51041 - protein, 401 aa, unidentified
  source 1..401: note = Acidipila sp.
  REGION 1..401: note = tr|A0A3P0X738|A0A3P0X738_9BACT Queuine tRNA-ribosyltransferase OS=Acidipila sp. EB88 OX=2305226; GN = tgt PE=3 SV=1
MSLLFEVAATSPAGGRRGRMHLPHGTVETPVFMPVGTAATVKAVPQDTLETLGTDEAVAAGEQPGAGIILGNTYHLYLRPGHEAIQRMGGLHRFMSWDRPLLTDSGGYQVFSLSALRKISEEGVRFSSHLDGSKHMFSPEHSMAVQLALGSDIAMAFDECLEYPADEARARASLELTMRWAARSLAYWEAHKHEAPWWSADASGRRRPGPVVAPEARPSLFGIVQGGMYPSMRREAAERMVAMDFPGYAIGGLAVGEPRERTLEIIAATLPYLPADKPRYVMGVGYPEEIAEYARMGVDMMDCVLPTRAGRHGLLFTSEGRLNIKNRRFAEDQGPADPECGCPVCRRYTRAYLRHLFAAGEPLAATLNSVHNLAFYLETMRCVRAELAASRTHEMERSLSS

SEQ ID NO: 51042 - protein, 420 aa, unidentified
  source 1..420: note = Acidipropionibacterium acidipropionici
  REGION 1..420: note = tr|A0A142KDQ5|A0A142KDQ5_9ACTN Queuine tRNA-ribosyltransferase OS=Acidipropionibacterium acidipropionici OX=1748 GN=tgt PE=3 SV=1
MSPMPFGFDVTSTLDNGLGRTGTIHTPHGDIETPAFIVVGTKASVKAVLPESVAELGAQAVLANAYHLFLQPGPDLIDEAGGLGRFMNWSAPTFTDSGGFQVLSLGAGFKKTLAMDVSQLTEADVIAADADRKAMVDDDGVTFRSPLNGDLHRFTPEFSMSIQHRLGADIMFAFDELTTLMNTRPYQEEALERTRRWAARCLAEHRRLTGERAGKPYQALFGVIQGAQYEDLRRKACRDLAAMESEGQGFDGFGIGGAIEKKNLGRIVGWCAEELPEDRPRHLLGISEPDDLFAACRAGADTFDCVNPSRVARNAAIYTADGRYNVNTAPFRADFGPLEPGCDCYTCTHYSRAYLHHLFKAKELLANTLATIHNERWTVRLVDDIRAAMRGGDLDALEAEFMGRWNAHGGRLVRRAQVQG

SEQ ID NO: 51043 - protein, 417 aa, unidentified
  source 1..417: note = Acidipropionibacterium acidipropionici
  REGION 1..417: note = tr|K7SIX8|K7SIX8_ACIA4 Queuine tRNA-ribosyltransferase OS=Acidipropionibacterium acidipropionici (strain ATCC 4875 / DSM 20272 / JCM 6432 / NBRC 12425 / NCIMB 8070)OX=1171373 GN=tgt PE=3 SV=1
MPFGFDVTSTLDNGLGRTGTIHTPHGDIETPAFIVVGTKASVKAVLPESVAELGAQAVLANAYHLFLQPGPDLIDEAGGLGRFMNWSAPTFTDSGGFQVLSLGAGFKKTLAMDVSQLTEADVIAADADRKAMVDDDGVTFRSPLNGDLHRFTPEFSMSIQHRLGADIMFAFDELTTLMNTRPYQEEALERTRRWAARCLAEHRRLTGERAGKPYQALFGVIQGAQYEDLRRKACRDLAAMESEGQGFDGFGIGGAIEKKNLGRIVGWCAEELPEDRPRHLLGISEPDDLFAACRAGADTFDCVNPSRVARNAAIYTADGRYNVNTAPFRADFGPLEPGCDCYTCTHYSRAYLHHLFKAKELLANTLATIHNERWTVRLVDDIRAAMRGGDLDALEAEFMGRWNAHGGRLVRRAQVQG

SEQ ID NO: 51044 - protein, 438 aa, unidentified
  source 1..438: note = Acidipropionibacterium jensenii
  REGION 1..438: note = tr|A0A4V1IAY4|A0A4V1IAY4_9ACTN Queuine tRNA-ribosyltransferase OS=Acidipropionibacterium jensenii; OX = 1749 GN=tgt PE=3 SV=1
MPLGFDITSRLDNGLGRTGTIHTPHGDIQTPAFVVVGTKATVKAMLPETVAQLGAQAVLANAYHLFLQPGPELIDEAGGLGRFMNWTGPTFTDSGGFQVLSLGAGFKKTLAMDVADLTEADVIAADADRKAMVDDDGVTFRSPLNGDLHRFTPEVSMGIQHHLGADIMFAFDELTTLMNTRGYQQEALERTRRWALRCLAEHRRLTEERTGKPYQALFGVIQGAQYEDLRRTACRDLAAMEVDGQRFDGFGIGGAIEKQNLGRIVGWCAQELPENRPRHLLGISEPDDLFAACRAGADTFDCVNPSRVARNAAIYTVDGRYNVNTARFRRDLGPLEPGCDCYTCTHYSRAYLHHLFKAREMLANTLATIHNERWTVRLVDSIRSAMASGQLDDLETEFMGRWNAHGGRLPAPRSASVGAAGSVGSAAAAAAGAGGAKE

SEQ ID NO: 51045 - protein, 438 aa, unidentified
  source 1..438: note = Acidipropionibacterium jensenii
  REGION 1..438: note = tr|A0A3S4V5F8|A0A3S4V5F8_9ACTN Queuine tRNA-ribosyltransferase OS=Acidipropionibacterium jensenii; OX = 1749 GN=tgt PE=3 SV=1
MPLGFDMTSRLDNGLGRTGTIHTPHGDIQTPAFVVVGTKATVKAMLPETVAQLGAQAVLANAYHLFLQPGPELIDEAGGLGRFMNWTGPTFTDSGGFQVLSLGAGFKKTLAMDVADLTEADVIAADADRKAMVDDDGVTFRSPLNGDLHRFTPEVSMGIQHHLGADIMFAFDELTTLMNTRGYQQEALERTRRWALRCLAEHRRLTEERTGKPYQALFGVIQGAQYEDLRRTACRDLAAMEVDGQRFDGFGIGGAIEKQNLGRIVGWCAQELPENRPRHLLGISEPDDLFAACRAGADTFDCVNPSRVARNAAIYTVDGRYNVNTARFRRDLGPLEPGCDCYTCTHYSRAYLHHLFKAREMLANTLATIHNERWTVRLVDSIRSAMASGQLDDLETEFMGRWNAHGGRLPAPRSASVGAAGSVGSAAAAAAGAGGAKE

SEQ ID NO: 51046 - protein, 417 aa, unidentified
  source 1..417: note = Acidipropionibacterium virtanenii
  REGION 1..417: note = tr|A0A344UUX3|A0A344UUX3_9ACTN Queuine tRNA-ribosyltransferase OS=Acidipropionibacterium virtanenii OX=2057246 GN=tgt PE=3 SV=1
MPFGFDVTSTLGNGLGRTGVIRTPHGDIETPAFIVVGTKASVKAVLPESVAQLGAQAVLANAYHLFLQPGPDLVDEAGGLGRFMNWPGPTFTDSGGFQVLSLGAGFKKTLAMDVSQLTPADVIAADADRKAMVDDDGVTFRSPLNGDLHRFTPEVSMGIQHRLGADVMFAFDELTTLMNTRPYQEEALERTRRWAARCLAEHRRLTEARPGRPYQALFGVIQGAQFEDLRRTACRDLARMEAGGRGFDGFGIGGAIEKKNLGRIVGWCASELPDDRPRHLLGISEPDDLFAACRAGADTFDCVNPSRVARNAAIYTAEGRYNVNTAPFRRDFGPLEDGCDCYTCTHYSRAYLHHLFKAKELLANTLATIHNERWTVRLVDDIRAAMRAGELDGFEAEFMGRWNANGGRLVRRAPAQN

SEQ ID NO: 51047 - protein, 374 aa, unidentified
  source 1..374: note = Acidisarcina polymorpha
  REGION 1..374: note = tr|A0A2Z5FYY9|A0A2Z5FYY9_9BACT Queuine tRNA-ribosyltransferase OS=Acidisarcina polymorpha; OX = 2211140 GN=tgt PE=3 SV=1
MYLPHAAVQTPVFMPVGTQATVKAIPQHLLEELGAQIILGNTYHLYLRPGHEVIRRLGGLHQFMSWPRALLTDSGGFQVFSLSELRKVTEEGVRFRSHLDGSSHFFSPEHSMDVQIALGADIVMAFDECTEYPADFGRARKSLDLTLCWAQRSKDHFHAHQHERPWAENFAGQNQSLFGIVQGGMFPELRREAAERLVEMDFPGYAIGGLSVGEPRTLTREIIEATLPFLPATKPRYVMGVGYPEEIVEYAAMGVDMMDCVLPTRAARHGLLFTSEGRLNIKNRRFAEDQGPLDPECGCMVCSRYSRAYLRHLFVAQEVLGSVLNTVHNLAYYLDTMESVRDAIELGTLPALVARVRARSTGGASSETERPGSQ

SEQ ID NO: 51048 - protein, 375 aa, Acidisphaera rubrifaciens
  REGION 1..375: note = tr|A0A0D6P4T8|A0A0D6P4T8_9PROT Queuine tRNA-ribosyltransferase OS=Acidisphaera rubrifaciens HS-AP3 OX=1231350 GN=tgt PE=3 SV=1
MRLTWDAAARDGAARAGTLRTAHGDVPTPTFMPVGTAGTVKAMTADAVRATGAGIVLGNTYHLMLRPGAERVAALGGLHRFMDWPGPILTDSGGFQVMSLSKLREIDAGGVTFQSHLDGSRHRLTPARAMDIQHKLDATITMVLDECTPWPATEEQAGASLALSMRWAAEARVAFVARPGYGLFGIVQGGTYPHLRAQSVEALTAIGFDGYAVGGLAVGEGQALMFATLDVTVPLLPGDAPRYLMGVGTPDDLVGAVTRGIDMFDCVIPTRAGRTARAFVPEGTLNLRNARHAGADVPLQDGCPCPACTRHSRAYLHHLFRAGEMLGPMLLTWHNLTYYQALMRGMRDAILDGRFAGHAAALRAGWRRPDETDDP

SEQ ID NO: 51049 - protein, 371 aa, unidentified
  source 1..371: note = Acidithiobacillales bacterium
  REGION 1..371: note = tr|A0A0S8BK35|A0A0S8BK35_9PROT Queuine tRNA-ribosyltransferase OS=Acidithiobacillales bacterium SG8_45 OX=1703383 GN=tgt PE=3 SV=1
MKFELQQADGAARRGQLVFDRGTVQTPAFMPVGTYGTVKAMTPEELRTAGAEIVLGNTFHLMLRPGTDVIAAHGDLHDFMHWSGPILTDSGGFQVWSLGKLRKITEEGVRFQSPVDGKRIFMGPEESMAVQQALGADIIMIFDECTAFPATEPEARASMELSLRWAERSKLAHGDHSSALFGIIQGGMYEHLRDISLTGLKQIGFDGYAIGGLSVGEPKEDMLRVLSHLEPQMPREHPRYLMGVGTPEDIVEAVRRGIDMFDCVMPTRNARNGWLFTSEGVVKIRNARYERDTAPLDPDCDCYTCQNYSRAYLRHLHRCNEILGARLNTIHNLHYYQRLMRDLRAAIAAKGLDDFVEKFYGKRRLKNDKPA

SEQ ID NO: 51050 - protein, 389 aa, unidentified
  source 1..389: note = Acidithiobacillales bacterium
  REGION 1..389: note = tr|A0A0S8L431|A0A0S8L431_9PROT Queuine tRNA-ribosyltransferase OS=Acidithiobacillales bacterium SM1_46 OX=1703384 GN=tgt PE=3 SV=1
MKFELIGSCGAARRGRLRLARGTVQTPAFMPVGTYGTVKAMTPEELRETGAEIILGNTFHLMLRPGVEVIRAHGDLHRFMHWEGPILTDSGGFQVWSLDRLRKVTEQGVRFQSPVDGSRIFMGPEESIAVQHALGADIVMIFDECTPHPATEAETRGSMELSLRWAERSKLAHGKHDSALFGIVQGGMYEHLRDISLTGLKQIGFDGYAIGGLSVGESKADMFRILSHLAPRMPVDRPRYLMGVGTPEDLVEAVRRGVDMFDCVLPTRNARNGWLYTHDGHVKILNSRYAADTGPIDPQCDCYTCRHYSRAYLRHLQRANEILGARLATIHNLHYYQSLMRGLREAISSETLDDFVEKFYRMRPKNSEAPGTAADSAASTSIPSNRGTS

SEQ ID NO: 51051 - protein, 375 aa, Acidithiobacillus caldus
  REGION 1..375: note = tr|A0A060A0R7|A0A060A0R7_ACICK Queuine tRNA-ribosyltransferase OS=Acidithiobacillus caldus (strain ATCC 51756 / DSM 8584 / KU) OX=637389 GN=tgt PE=3; SV = 1
MTFFERLAQDGAARRGRLHFDRGSVETPAFMPVGTYGTVKAVTPEELRETGAEIILGNTFHLFLRPGLEVIETLGGLHGMMHWDGPILTDSGGFQVFSLGALRRLSEAGVRFRAPVDGRPVFLGPEESMDIQRRLGSDIAMVFDECTPHPATWDEARASMELSLRWAARSRAAYAGPGQIFGIVQGGMYGDLRRRSLAGLKALDFPGLALGGLSVGESKAEMLAVLDDILPQMPQDKPRYLMGVGLPEDLVEGVWRGVDMFDCVLPTRNARNGWLFTRHGVLKLRNARYERDVLPPDPECRCYTCRHYSRAYLRHLQRSQEILGARLNTIHNLHYYQELMAGMRQAIELGRLAVFRRDFYAARGSEAPKVSQVLS

SEQ ID NO: 51052 - protein, 375 aa, Acidithiobacillus caldus; identical to SEQ ID NO: 51051
  REGION 1..375: note = tr|A0A1E7YLD4|A0A1E7YLD4_9PROT Queuine tRNA-ribosyltransferase OS=Acidithiobacillus caldus; OX = 33059 GN=tgt PE=3 SV=1

SEQ ID NO: 51053 - protein, 371 aa, unidentified
  source 1..371: note = Acidithiobacillus ferridurans
  REGION 1..371: note = tr|A0A2Z6IEI6|A0A2Z6IEI6_9PROT Queuine tRNA-ribosyltransferase OS=Acidithiobacillus ferridurans; OX = 1232575 GN=tgt PE=3 SV=1
MSIFELLARDGAARRGIIRLPRGTVQTPAFMPVGTYGTVKAMSPEELKTLGAEIILGNTFHLFLRPGLEVVSAVGGLHRMMHWDRPILTDSGGFQVFSLGALRKLTEAGVQFRAPTDGHMVFLGPEESMQIQATLGSDIAMVFDECTPHPASYEEARVSMELSLRWAARSHAAYAGPGKLFGIVQGGMYADLRQRSLAGLQRLDFPGLAIGGLSVGESKVEMMQVLDDLMPHMPADRPRYLMGVGTPEDLVEGVRRGVDMFDCVMPTRNARNGWLFTRDGILKLRNARYEKDVLPPDPACACYTCQNYSRAYLRHLQRSHEILGARLNTLHNLHYYQELIMGLREAIAAGRLDAYADDFYRRRRAGSLVGA

SEQ ID NO: 51054 - protein, 371 aa, Acidithiobacillus ferrivorans
  REGION 1..371: note = tr|A0A1B9BX47|A0A1B9BX47_9PROT Queuine tRNA-ribosyltransferase OS=Acidithiobacillus ferrivorans; OX = 160808 GN=tgt PE=3 SV=1
MSIYQLLARDGAARRGVLRLPRGNIQTPAFMPVGTYGTVKAMSPEELKTLGAEIILGNTFHLFLRPGLEVISAVGGLHKMMHWDRPILTDSGGFQVFSLGALRKLTEAGVQFRAPTDGHKVFLGPEESMQIQAALGSDIAMVFDECTPHPATYAEARVSMELSLRWAARSRAAYAGPGQLFGIVQGGMYGDLRQRSLAGLQRLDFPGLAIGGLSVGESKAEMMQVLEDLMPQMPADRPRYLMGVGTPEDLVEGVCRGVDMFDCVMPTRNARNGWLFTRDGILKLRNARYEKDALPPDPQCACYTCQNYSRAYLRHLQRSHEILGARLNTLHNLHYYQELMAGLRDAIAAGRVGAFTDDFYRRRRAGSLVDA

SEQ ID NO: 51055 - protein, 371 aa, Acidithiobacillus ferrivorans
  REGION 1..371: note = tr|A0A1E7XUJ1|A0A1E7XUJ1_9PROT Queuine tRNA-ribosyltransferase OS=Acidithiobacillus ferrivorans; OX = 160808 GN=tgt PE=3 SV=1
MSIYQLLARDGAARRGVLRLPRGNIQTPAFMPVGTYGTVKAMSPEELKTLGAEIILGNTFHLFLRPGLEVISAVGGLHKMMHWDRPILTDSGGFQVFSLGALRKLTEAGVQFRAPTDGHKVFLGPEESMQIQAALGSDIAMVFDECTPHPATYAEARVSMELSLRWAARSRAAYAGPGQLFGIVQGGMYGDLRQRSLAGLQQLDFPGLAIGGLSVGESKAEMMQVLEDLMPQMPADRPRYLMGVGTPEDLVEGVCRGVDMFDCVMPTRNARNGWLFTRDGILKLRNARYEKDALPPDPQCACYTCQNYSRAYLRHLQRSHEILGARLNTLHNLHYYQELMAGLRDAIAAGRVGAFTDDFYRRRRAGSLVDA

SEQ ID NO: 51056 - protein, 371 aa, Acidithiobacillus ferrooxidans
  REGION 1..371: note = sp|B7J4R9|TGT_ACIF2 Queuine tRNA-ribosyltransferase; OS = Acidithiobacillus ferrooxidans (strain ATCC 23270 / DSM 14882 / CIP 104768 / NCIMB 8455) OX=243159 GN=tgt PE=3SV=1
MSIFQLLARDGAARRGTIRLPRGTVQTPAFMPVGTYGTVKAMSPEELKTLGAEIILGNTFHLFLRPGLEVISAVGGLHRMMHWDRPILTDSGGFQVFSLGALRKLTEAGVQFRAPTDGHMVFLGPEESMQIQAALGSDIAMVFDECTPHPASYEEARVSMELSLRWAARSHAAYAGPGELFGIVQGGMYADLRRRSLAGLQRLDFPGLAIGGLSVGESKVEMMQVLDDLMPHMPADRPRYLMGVGTPEDLVEGVRRGVDMFDCVMPTRNARNGWLFTRDGVLKLRNARYEKDVLPPDPACACYTCQNYSRAYLRHLQRSHEILGARLNTLHNLHYYQELMAGLREAIAAGRLDAYADDFYRRRRAGSLVGA

SEQ ID NO: 51057 - protein, 371 aa, Acidithiobacillus ferrooxidans; identical to SEQ ID NO: 51056
  REGION 1..371: note = sp|B5EK08|TGT_ACIF5 Queuine tRNA-ribosyltransferase; OS = Acidithiobacillus ferrooxidans (strain ATCC 53993); OX = 380394 GN=tgt PE=3 SV=1

SEQ ID NO: 51058 - protein, 369 aa, Acidithiobacillus sp.
  REGION 1..369: note = tr|A0A2I1DKW5|A0A2I1DKW5_9PROT Queuine tRNA-ribosyltransferase OS=Acidithiobacillus sp. SH; OX = 187490 GN=tgt PE=3 SV=1
MGIYELLGEDGAARRGIVHLPRGDIQTPAFMPVGTYGTVKAMAPEELKALGADIILGNTFHLFLRPGLEVISALGGLHQMMHWDRPILTDSGGFQVFSLGALRKLREAGVEFRAPSDGHKVFLGPEESMQIQTVLGSDIAMVFDECTPHPATYAEARTSMELSMRWAARSRRAYQGPGQLFGIVQGGMFADLRRRSLEGLQKLDFPGLAVGGLSVGESKAEMMQVLEDLMPWMPKDRPRYLMGVGTPEDLVEGVFRGVDMFDCVMPTRNARNGWLFTRDGILKLRNARYEKDPLPPDPECSCYTCKNYSRAYLRHLQRSQEILGARLNTQHNLHYYQDLMAGLREAIMQGRLNAFRREFYERRGTQFPQ

SEQ ID NO: 51059 - protein, 379 aa, Acidithiobacillus sp.
  REGION 1..379: note = tr|A0A3M8RNX5|A0A3M8RNX5_9PROT Queuine tRNA-ribosyltransferase OS=Acidithiobacillus sp. CJ-2; OX = 1867749 GN=tgt PE=3 SV=1
MNILRILAEQGAARRGLLQLPRGTIQTPAFMPVGTYGTVKAMTPEELKTLGAEIILGNTFHLFLRPGLEVISALGGLHRMMHWDAPILTDSGGFQVFSLGPLRRLSEAGVRFRAPSDGRAVFLGPEESMAIQGALGSDIAMVFDECTPHPATWDEARASMELSLRWAARSQAAYAGPGQLFGIVQGGMYADLRQRSLEGLVKLDFPGYAIGGLSVGEGKAEMLQVLDDLLPQMPRDRPRYLMGVGTPEDIVAAVQRGVDMFDCVLPTRNARNGWLYTRNGILKLRNARYEKDPLPPDPDCACYTCRNYSRAYLRHLQRSHEILGARLNTLHNLHYYQELMAGLRQAISAGRLDAFVADFHRRYGVADAGASVSGSLADA

SEQ ID NO: 51060 - protein, 371 aa, Acidithiobacillus thiooxidans
  REGION 1..371: note = tr|A0A1C2IWT1|A0A1C2IWT1_ACITH Queuine tRNA-ribosyltransferase OS=Acidithiobacillus thiooxidans; OX = 930 GN=tgt PE=3 SV=1
MGIFECLARDGAARRGIVHLPRGDIQTPAFMPVGTYGTVKAMAPEELKAIGADIILGNTFHLFLRPGLEVITALGGLHKMMHWDRPILTDSGGFQVFSLGALRKLREAGVEFRAPTDGHKVFLGPEESMQIQAVLGSDIAMVFDECTPHPATYEEARVSMELSLRWAARSRRAYQGPGQLFGIVQGGMYGDLRQRSLEGLQKLDFPGLAVGGLSVGESKAEMTEVLENLMPQMPTDRPRYLMGVGTPEDLVEGVYRGVDMFDCVMPTRNARNGWLFTRNGILKLRNASYEKDPLPPDPECSCYTCRNYSRAYLRHLQRSHEILGARLNTQHNLYYYQELMAGLREAIVQGRLEAFRKEFYQRRTASSLIDA

SEQ ID NO: 51061 - protein, 371 aa, Acidithiobacillus thiooxidans
  REGION 1..371: note = tr|A0A543Q413|A0A543Q413_ACITH Queuine tRNA-ribosyltransferase OS=Acidithiobacillus thiooxidans ATCC 19377 OX=637390 GN=tgt PE=3 SV=1
MGIFECLARDGAARRGIVHLPRGDIQTPAFMPVGTYGTVKAMAPEELKAIGADIILGNTFHLFLRPGLEVITALGGLHKMMHWDRPILTDSGGFQVFSLGALRKLREAGVEFRAPTDGHKVFLGPEESMHIQAVLGSDIAMVFDECTPHPATYEEARVSMELSLRWAARSRRAYQGPGQLFGIVQGGMYGDLRQRSLEGLQKLDFPGLAVGGLSVGESKAEMMEVLENLMPQMPADRPRYLMGVGTPEDLVEGVYRGVDMFDCVMPTRNARNGWLFTRNGILKLRNASYEKDPLPPDPECSCYTCSNYSRAYLRHLQRSHEILGARLNTQHNLHYYQELMAGLREAIVQGRLEAFRKEFYQRRTASSLIDA

SEQ ID NO: 51062 - protein, 371 aa, unidentified
  source 1..371: note = Acidithrix ferrooxidans
  REGION 1..371: note = tr|A0A0D8HG02|A0A0D8HG02_9ACTN Queuine tRNA-ribosyltransferase OS=Acidithrix ferrooxidans; OX = 1280514 GN=tgt PE=3 SV=1
MVDDLKGALSFSVGDTHNGSRRGTVKLNRGSFSTPIFMPVGTRGTIKAAIANDIAAIGFEVILGNTYHLMLRPGVEVIDALGGLGRFSGWKRSMLTDSGGFQVMSLGATFSDGGATFRSIYDGSIHDVTPEKAVWLQEMIGADIAMVLDVCTNLPASRDEIKRAMDLTHSWALRARFAKHRQDQAQFGIVQGGSEVDLRSESAKFISDVGFEGIALGGLAVGESRDDMLRAIDAVVPHLPPDKPRYLMGVGDPIGVVEAIARGIDMFDCVAPSRVARHGVAMTFSGKMHMRNQKYVRDESPIEPGCPCVACANFPRALIRHLVSVGEPTGGSLLTLHNLTFMYRLIEGSRNAISTKTLGEYIKSIYAAWGN

SEQ ID NO: 51063 - protein, 388 aa, unidentified
  source 1..388: note = Acidobacteria bacterium
  REGION 1..388: note = tr|A0A1F2R4R8|A0A1F2R4R8_9BACT Queuine tRNA-ribosyltransferase OS=Acidobacteria bacterium RIFCSPLOWO2_02_FULL_64_15 OX=1797181 GN=tgt PE=3 SV=1
MSEAPFAFRVTHTDGRARRGVMTTPHGEVATPAFMPVGTQGAVKGVTHRDLEDLGAEILLSNTYHLYLRPGADLIARRGGLHRFIGWSRPILTDSGGYQVFSLAARRTIDEAGARFRSHLDGSEHHLTPEKATDLQAELGSDIAMVFDECLAHPSDLATTRQSMERTVRWARRARDRFLTLREGAVAGVAVTNPYQAQFGIVQGGIYSDLREQSARETVSIGFEAYAIGGLSVGEPAETMYDTVSQTCVYLPADRPRYLMGAGTPEDLVEAVARGIDLFDCVLPTRNARNGQLFTSRGRINIGNARYSEDDGPPDPACSCYTCRTHSRAYLRHLFQAGEIAAATLNTLHNLHFYLDTLRRIREAIAFGRFESFGRDFEQSLSRQRQDL

SEQ ID NO: 51064 - protein, 367 aa, unidentified
  source 1..367: note = Acidobacteria bacterium
  REGION 1..367: note = tr|A0A1Q7NBN1|A0A1Q7NBN1_9BACT Queuine tRNA-ribosyltransferase OS=Acidobacteria bacterium 13_1_40CM_3_65_5 OX=1803450 GN=tgt PE=3 SV=1
MTTAHGAVETPAFMPVGTQGAVKGVTHRDLESLGAEILLSNTYHLYLRPGDDLIARRGGLHRFIGWTRPILTDSGGYQVFSLAARRTIDDQGAHFRSHLDGSAHSLTPEKATDIQAQLGSDIAMVLDECLAHPSDAAAARQSMQRTLRWAGRARDRFLALRDGLVPDVIVSNPGQAQFGIVQGSVFPELREESARHTVDVGFEAYAIGGLSVGEPIDVMYDIVSQTTPCLPADRPRYLMGTGTPADLVEAVARGIDLFDCVLPTRNARNGQLFTSEGRINIKNARYAEDDRPPDPACSCYTCRTSSRAYLRHLFLAGEINASTLNTLHNLNFYLDTLRRIRDAIVFGRFESFRLAFHQSLSCQPHDS

SEQ ID NO: 51065 - protein, 376 aa, unidentified
  source 1..376: note = Acidobacteriales bacterium
  REGION 1..376: note = tr|A0A1Q3QWZ0|A0A1Q3QWZ0_9BACT Queuine tRNA-ribosyltransferase OS=Acidobacteriales bacterium 59-55 OX=1895690 GN=tgt PE=3 SV=1
MGLTFQVDRTDAGGGRRGRLMLPHGVVETPVFMPVGTAASVKAVEQGVLEAMGSDGRGAEIILANTYHLYLRPGHELIARTGGVHRFMSWERPMLTDSGGFQVFSLSSLRKVTPDGAEFRSHLDGSKHFFSPEHSMDVQIALGADVMMVFDECVEHPATYERTRDSMALTHAWAQRSKDHFELHKERVPWFQQRDGATQSLFGIVQGGMYADLRRESAERLVEMDLPGYAIGGLAVGEPREVTREMIALTLEWLPKDKPRYVMGVGYPDEIEEYARMGVDMMDCVLPTRAGRHGLLFMREEVGGPVVRMNIKRKEYAEDARPIDESCGCMVCRRYSRAYLRHLFVSGEALGLTLNSVHNLAFYLDTMQRVRRDLAG

SEQ ID NO: 51066 - protein, 378 aa, unidentified
  source 1..378: note = Acidobacteriales bacterium
  REGION 1..378: note = tr|A0A1Q7CJ94|A0A1Q7CJ94_9BACT Queuine tRNA-ribosyltransferase OS=Acidobacteriales bacterium 13_2_20CM_2_55_5 OX=1803469 GN=tgt PE=3 SV=1
MSLRFQVESTHEAARVGRLITPHGEVETPVFMPVGTLASVKGVSQDILEELDVQILLGNTYHLYLRPGIDQIRSLGGLHRFMAWPRPILTDSGGFQVFSLNELRKVSEDEVTFRSHLDGSSHSFSPESAMEAQIGLGADIIMAFDECTEYPAPPERARQSMELTLRWAKRSKNYIEEHKQMVPWFQNDDRVSEGQHQALFGIVQGGMDHALRKESVERTVEIGFPGYAIGGLSVGEPRSLTREVVEATVEHLPADKPRYLMGVGTPEEIVEYASLGIDMMDCVLPTRAARHGLLFTSEGKISIKQARYASDQAPLDTNCACRVCARYSRAYLRHLYASNEVLAQVLNTIHNLSFYLDTMRRVRHSIALGKRACFLSGV

SEQ ID NO: 51067 - protein, 378 aa, unidentified
  source 1..378: note = Acidobacteriia bacterium
  REGION 1..378: note = tr|A0A321LVF9|A0A321LVF9_9BACT Queuine tRNA-ribosyltransferase OS=Acidobacteriia bacterium AA117; OX = 2169412 GN=tgt PE=3 SV=1
MTLPFTIQSQAGSARLGQFTTAHGIVETPVFMPVGTLGSVKGVPQDTLEELGAQIILGNTYHLYLRPGHQLVRSLGGLHRFMSWERALLTDSGGFQVFSLSELRKITEDGVNFRSHLDGSSHLFTPERSIEIQIALGADIIMAFDECTEHPAEYRRTRESMEMTLRWARRCKDYFEAHKSEAPWHSSEKPQHQALFGIIQGGMYAGLRRESAERTVEIDFPGYAIGGLSVGESREKTREMIAAALEILPEDKPRYVMGVGYPEEIVQYAAMGVDMMDCVLPTRAARHGLLFTSEGRLNIKNTRFAHDQGPPDPACKCKACSRYSRAYLRHLFVAGEPLAGVLNTIHNLAYYLDTMRAVRHAIHLGDLSGIQSGSVSMA

SEQ ID NO: 51068 - protein, 403 aa, unidentified
  source 1..403: note = Acidobacteriia bacterium
  REGION 1..403: note = tr|A0A317IYN3|A0A317IYN3_9BACT Queuine tRNA-ribosyltransferase OS=Acidobacteriia bacterium; OX = 2081523 GN=tgt PE=3 SV=1
MHANGPCKADHNPGRGPTSHPRVQSKLRITFELLAECPQTRARAGLLHTPHGTIETPVFMPVGTQATVKGLTQRDLAGELGVQILLANTYHLFLRPGHELIRRLGGLHTFMSWPNAILTDSGGFQVFSLSGLRKITDEGVVFQSHLDGDLHSFTPESTVDVQLALGSDILMMLDECPEYPVSHEYARTSMERTVRWARQAMAHYRRHATDPSRQALFPIVQGSMFPDLRRACAEALVELEAEGYAIGGLSVGEPRPLSMEMVEAAESILPRSRPRYAMGVGMPAELPEYVARGVDMMDCVLPSRNARNGYLFTSQGRVIIKHARYKDDPAPVDENCRCYTCSGYSRAYLRHLFQSGEILYAVLATRHNLQRYLDIMRQIRQAILSGSFPECLRTFRSASPDAE

SEQ ID NO: 51069 - protein, 392 aa, Acidobacterium capsulatum
  REGION 1..392: note = tr|C1F9J7|C1F9J7_ACIC5 Queuine tRNA-ribosyltransferase OS=Acidobacterium capsulatum (strain ATCC 51196 / DSM 11244 / JCM 7670 / NBRC 15755 / NCIMB 13165 / 161) OX=24 0015 GN=tgt PE=3 SV=1
MAAARVAAAFICRSPESITIDKVSLTFNIHHTTEAGGRRATMQLPHAAVETPVFMPVGTVATVKAVPQHILEELEAQIILGNTYHLYLRPGHEAIRRLGGLHRFMSWERAILTDSGGFQVFSLSELRKVTENGVEFRSHLDGGRHFFSPEHSMDVQIALGSDIAMAFDECTEYPAEYARARSSLDLTLRWAERSKRHFDAHKYERPWDERFAGQTPNLFGIVQGGMYLDLRRESAERLVEMDFPGYAIGGLSVGEPRERTREVIEATLPLLPKDKPRYVMGVGYPDEIAEYARMGVDMMDCVLPTRAARHGLLFTSEGRMNIKNRQYAEDQNPPDVHCGCMVCRRYTRAYLRHLMAAQEPLSAVLNSIHNLAFYLNTMREVREEMSRAAAAQ

SEQ ID NO: 51070 - protein, 374 aa, Acidobacterium sp.
  REGION 1..374: note = tr|A0A2G4JET3|A0A2G4JET3_9BACT Queuine tRNA-ribosyltransferase OS=Acidobacterium sp. OX=1872119; GN = tgt PE=3 SV=1
MFTLTHTDGSARRGHLTTAHGVIQTPAFMPVGTQGAVKALTAQHLEDVGAEIILGNTYHLYLRPGDELIARRGGLHKFIGWSRPMLTDSGGYQVFSLSDRRKVEEQGVHFRSHHDGSAHLLTPEKAVEIQANLGSDIAMVLDECPALPSTEAIIDTSLELTARWARRCRNRFLELKGEGKGHAQFGIVQGGTFQELRQKSAQLTVSIGFDGYAIGGLSVGEPNETMYQVVEQTVPFLPSGQARYLMGVGTPIDLLEAVARGIDMFDCVMPTRNARNGQLFTSEGPLNIKNARFAEDDGPVDPACGCYTCRRFSRAYLRHLFMAGEMTGGTLNTLHNLSFYLDTMRRIREAIAFGRFEDLRQGFHRTFTRRALIS

SEQ ID NO: 51071 - protein, 370 aa, Acidobacterium sp.
  REGION 1..370: note = tr|A0A3D4VPD4|A0A3D4VPD4_9BACT Queuine tRNA-ribosyltransferase OS=Acidobacterium sp. OX=1872119; GN = tgt PE=3 SV=1
MSLTFNIHHTTEAGGRRATMQLPHAAVETPVFMPVGTVATVKAVPQHILEELEAQIILGNTYHLYLRPGHEAIRRLGGLHRFMSWERAILTDSGGFQVFSLSELRKVTENGVEFRSHLDGGRHFFSPEHSMDVQIALGSDIAMAFDECTEYPAEYARARSSLDLTLRWAERSKRHFDAHKYERPWDERFAGQTPNLFGIVQGGMYLDLRRESAERLVEMDFPGYAIGGLSVGEPRERTREVIEATLPLLPKDKPRYVMGVGYPDEIAEYARMGVDMMDCVLPTRAARHGLLFTSEGRMNIKNRQYAEDQNPPDVHCGCMVCRRYTRAYLRHLMAAQEPLSAVLNSIHNLAFYLNTMREVREEMSRAAAAQ

SEQ ID NO: 51072 - protein, 375 aa, Acidocella aminolytica
  REGION 1..375: note = tr|A0A0D6PLC4|A0A0D6PLC4_9PROT Queuine tRNA-ribosyltransferase OS=Acidocella aminolytica 101 = DSM 11237 OX=1120923 GN=tgt PE=3 SV=1
MTTPDFSFTLAGQDGQARAGLIATAHGKVPTPTFMAVGTAGTVKAMTADAVRATGAKIVLGNTYHLMLRPTAERVARLGGLHKMMDWPGPILTDSGGFQIMSLAKLRKLEEKGVTFRSHIDGTPYELTPERSTEIQHLLDSTITMQLDECTKFPATHKEAMDSMELSIRWAKRSRDAFVKRPGYGQFGIMQGNVYEDLRRHSAAALVDLDFEGYAIGGLAVGEGQAVMFEVLDYCTDFLPAQKPRYLMGVGTPDDLLGAVARGVDMFDCVMPTRAGRTARAFTSNGIFNMRNARFQDDSRPLDENCTCLCCTRHTRAYLHHLFRCEEMLGPMLLTIHNLTYYQNVMQGARAAILNKEYDAYCADVRGNWQRGPDA

SEQ ID NO: 51073 - protein, 371 aa, Acidocella sp.
  REGION 1..371: note = tr|A0A257Q7Z5|A0A257Q7Z5_9PROT Queuine tRNA-ribosyltransferase OS=Acidocella sp. 20-57-95; OX = 1970301 GN=tgt PE=3 SV=1
MKFSYDLQATDGAARAGMLHTAHGDVPTPTFMAVGTAGTVKAMTADAVRATGAKIVLGNTYHLMLRPTAERVARLGGLHKMMDWPGPILTDSGGFQVMSLAKLRKMDEEGVTFRSHLDGSKHFLSPERSMEIQYLLDATITMVLDECTPFPATHDEAAISMRMSSRWAKRSRTAFVAREGYGQFGIVQGGVYEDLRLESADALRALNFEGYAIGGLAVGEGQEMMFATLDVTTPHLPADKPRYLMGVGTPDDLLGSVARGVDMFDCVMPTRAGRTARGFTSKGIFNLRNARFIDDGRPLDENCTCLGCTRHTRAYLHHLFRAEEILGPMLLTIHNLTYYQSLMQGARTAIVAQTYDAYCASTRAGWAAGDD

SEQ ID NO: 51074 - protein, 371 aa, Acidocella sp.
  REGION 1..371: note = tr|A0A258LCE5|A0A258LCE5_9PROT Queuine tRNA-ribosyltransferase OS=Acidocella sp. 35-58-6; OX = 1970306 GN=tgt PE=3 SV=1
MTFSYKLHASDGAARAGTLHTAHGEVPTPTFMAVGTAGTVKAMTADAVRATGAKIVLGNTYHLMLRPTAERVARLGGLHKMMDWPGPILTDSGGFQIMSLAKLRKMTEEGVTFQSHTDGSKHFLSPERSMEIQHLLDATITMVLDECTPFPATHDEAAISMRMSTRWAKRSRTAFIEREGYGQFGIVQGGIYEDLRLESAEALRALNFEGYAIGGLAVGEGQAMMFATLDVTTPHLPTDKPRYLMGVGTPDDLLGSVARGVDMFDCVMPTRAGRTARAFTSKGIFNLRNARFIDDGRPLDETCGCLGCRRHTRAYLHHLFRCEEILGPMLLTIHNLTYYQSLMQGARAAILAQNFESYCADTRAGWAAGDD

SEQ ID NO: 51075 - protein, 354 aa, Acidomonas methanolica
  REGION 1..354: note = tr|A0A023D713|A0A023D713_ACIMT Queuine tRNA-ribosyltransferase OS=Acidomonas methanolica NBRC 104435 OX=1231351 GN=tgt PE=3 SV=1
MPVGTVGTVKGMTMDAVRSTGAGIVLGNTYHLMLRPGAERVRKMGGLHRMMDWPGPILTDSGGFQVMSLGALRKLDADGVTFNSHIDGSTHRLTPESSTRIQHALNATITMCFDECPALPATPERLAESMELSMRWAARSREAFVPREGYGQFGIVQGGTERDLRARSVRALTEIGFEGYAIGGLAVGEGQELMFATLDFTTPLLPERQARYLMGVGTPDDLLGGVERGVDMFDCVMPTRAGRTARAYTERGTLNLRNARHADDLRPLSPHCDCLACTRHSRAYLHHLFRAEEMLGPTLLTWHNLAYYQRLMRTIRAAILDGTLPDLAPRLRAHWAAGDWTEDEFPQPIPPPVP

SEQ ID NO: 51076 - protein, 390 aa, Acidovorax anthurii
  REGION 1..390: note = tr|A0A328YWK8|A0A328YWK8_9BURK Queuine tRNA-ribosyltransferase OS=Acidovorax anthurii OX=78229; GN = tgt PE=3 SV=1
MLQFELLAADPDSHARRGTLTLNHGVVQTPIFMPVGTYGTVKGVMPRSLHDMGAQIILGNTFHLWMRPGLDVMQSFGGLHGFEQWNKPILTDSGGFQVWSLGAMRKITEEGVHFASPVNGDKLFMSPEVSMQIQTVLNSDIVMQLDECTPYETNGHKTTEAEARKSMEMSLRWARRSQDEFHRLDNPNALFGIVQGGMFKHLRQESLERLVEMDFPGYAVGGVSVGEPKDEMLDIMAHTPHRLPAHKPRYLMGVGTPEDLVQGVAEGVDMFDCVMPTRNARNGTIFTRHGDLKIRNARHKADHQPLDPTCTCHACAGTEGVAWADGGRGGFSRAYLHHLDRCGEMLGPMLTTIHNLHYYLNLMREIREALDAGRFTEFRRRFAADRARGV

SEQ ID NO: 51077 - protein, 425 aa, Acidovorax avenae
  REGION 1..425: note = tr|F0Q7S6|F0Q7S6_ACIAP Queuine tRNA-ribosyltransferase OS=Acidovorax avenae (strain ATCC 19860 / DSM 7227 / JCM 20985 / NCPPB 1011) OX=643561; GN = tgt PE=3 SV=1
MSFLLGAGRRAAKRGAAAGQCSAGAQAAVWDNRPIMLQFELLATDPASHARRGTLTLNHGVVQTPIFMPVGTYGTVKGVMPRSLHEMGAQIILGNTFHLWMRPGLDVMQGFGGLHGFEQWNKPILTDSGGFQVWSLGAMRKITEEGVHFASPVNGDKLFMSPEVSMQIQTTLNSDIVMQLDECTPYETKGHKTTEAEARKSMEMSLRWARRSQDEFHRLGNPNALFGIVQGGMYKNLRQESLERLVEMDFPGYAVGGVSVGEPKDEMLDIMAHTPHRLPAHKPRYLMGVGTPEDLVQGVADGVDMFDCVMPTRNARNGTIFTRHGDLKIRNARHKADHQPLDPTCTCHACAGTEGVAWADGGRGGFSRAYLHHLDRCGEMLGPMLTTVHNLHYYLNLMREIRESLDAGRFGEFRVRFAADRARGV

SEQ ID NO: 51078 - protein, 390 aa, Acidovorax avenae
  REGION 1..390: note = tr|A0A2R4ER25|A0A2R4ER25_9BURK Queuine tRNA-ribosyltransferase OS=Acidovorax avenae subsp. avenae; OX = 80870 GN=tgt PE=3 SV=1
MLQFELLATDPASHARRGTLTLNHGVVQTPIFMPVGTYGTVKGVMPRSLHEMGAQIILGNTFHLWMRPGLDVMQSFGGLHGFEQWNKPILTDSGGFQVWSLGAMRKITEEGVHFASPVNGDKLFMSPEVSMQIQTTLNSDIVMQLDECTPYETKGHKTTEAEARKSMEMSLRWARRSQDEFHRLGNPNALFGIVQGGMYKNLRQESLERLVEMDFPGYAVGGVSVGEPKDEMLDIMAHTPHRLPAHKPRYLMGVGTPEDLVQGVADGVDMFDCVMPTRNARNGTIFTRHGDLKIRNARHKADHQPLDPTCTCHACAGTEGVAWADGGRGGFSRAYLHHLDRCGEMLGPMLTTVHNLHYYLNLMREIRESLDAGRFGEFRTRFAADRARGV

SEQ ID NO: 51079 - protein, 390 aa, Acidovorax caeni
  REGION 1..390: note = tr|A0A1I7GMG9|A0A1I7GMG9_9BURK Queuine tRNA-ribosyltransferase OS=Acidovorax caeni OX=343013; GN = tgt PE=3 SV=1
MLQFDLLKTDPGSHARRGRLTLNHGPVETPIFMPVGTYGTVKGVMPQSLHDMGAQIILGNTFHLWMRPGLDVMRSFGGLHGFEQWHKPILTDSGGFQVWSLGPMRKITEEGVHFASPVNGDKLFMSPEVSMQIQTVLNSDIVMQLDECTPYETKGHLTTEREARQSMEMSRRWALRSKAEFERLENPNALFGIVQGGMFENLRQESLEALVEMDFPGYAVGGVSVGEPKDEMLRIMAHTPHRLPAHKPRYLMGVGTPEDLVEGVAQGVDMFDCVMPTRNARNGTIFTRHGDLKIRNARHREDHQPLDPTCTCHACAGKDGVAWADGGRGGFSRAYLHHLDRCGEMLGPMLTTIHNLHYYLNLMREIREALDAGTFAQFRARFKTDRARGV

SEQ ID NO: 51080 - protein, 390 aa, unidentified
  source 1..390: note = Acidovorax carolinensis
  REGION 1..390: note = tr|A0A240TVB7|A0A240TVB7_9BURK Queuine tRNA-ribosyltransferase OS=Acidovorax carolinensis; OX = 553814 GN=tgt PE=3 SV=1
MLQFDLLTTDPTSHARRGTLTLNHGVVQTPIFMPVGTYGTVKGVMPQSLHDMGAQIILGNTFHLWMRPGQEVMQSFGGLHGFEKWDKPILTDSGGFQVWSLGAMRKITEEGVHFASPVNGDKLFMSPEVSMQIQTTLNSDIVMQLDECTPYETKGHLTTEREARQSMEMSLRWAQRSKDEFARLENPNALFGIVQGGMFENLRAESLERLVAMDFPGYAVGGVSVGEPKDEMLRIMAHTPHLLPAHKPRYLMGVGTPEDLVEGVAQGVDMFDCVMPTRNARNGTLFTRFGDLKIRNARHKTDHQPLDTTCSCHACAGSAGVPWNEGGRGGFSRAYLHHLDRCGEMLGPMLTTIHNLHYYLNLMREVREALEAGQFAQFRAQFKADQARGV

SEQ ID NO: 51081 - protein, 390 aa, unidentified
  source 1..390: note = Acidovorax carolinensis
  REGION 1..390: note = tr|A0A240UGM6|A0A240UGM6_9BURK Queuine tRNA-ribosyltransferase OS=Acidovorax carolinensis; OX = 553814 GN=tgt PE=3 SV=1
MLQFDLLTTDPTSHARRGTLTLNHGVVQTPIFMPVGTYGTVKGVMPQSLHDMGAQIILGNTFHLWMRPGQEVMQSFGGLHGFEKWDKPILTDSGGFQVWSLGAMRKITEEGVHFASPVNGDKLFMSPEVSMQIQTTLNSDIVMQLDECTPYETKGHLTTEREARQSMEMSLRWAQRSKDEFARLENPNALFGIVQGGMFENLRAESLERLVAMDFPGYAVGGVSVGEPKDEMLRIMAHTPHRLPAHKPRYLMGVGTPEDLVEGVAQGVDMFDCVMPTRNARNGTLFTRFGDLKIRNARHKTDHQPLDTTCSCHACAGSAGVPWSEGGRGGFSRAYLHHLDRCGEMLGPMLTTIHNLHYYLNLMREVREALDAGQFAQFRAQFKADRARGV

SEQ ID NO: 51082 - protein, 425 aa, Acidovorax cattleyae
  REGION 1..425: note = tr|A0A1H0UNQ7|A0A1H0UNQ7_9BURK Queuine tRNA-ribosyltransferase OS=Acidovorax cattleyae OX=80868; GN = tgt PE=3 SV=1
MSFLLGAGRRAAERGAAADQCSAGAQAAVWDNRPIMLQFELLATDPASHARRGALTLNHGVVQTPIFMPVGTYGTVKGVMPRSLHEMGAQVILGNTFHLWMRPGLDVMQSFGGLHGFEQWNKPILTDSGGFQVWSLGAMRKITEEGVTFASPVNGDKLFMSPEVSMQIQTTLNSDIVMQLDECTPYETKGHKTTEAEARKSMEMSLRWARRSQDEFHRLGNPNALFGIVQGGMYKHLRQESLERLVEMDFPGYAVGGVSVGEPKDEMLDIMAHTPHRLPAHKPRYLMGVGTPEDLVQGVADGVDMFDCVMPTRNARNGTIFTRHGDLKIRNARHKTDHQPLDPTCTCHACAGTEGVAWADGGRGGFSRAYLHHLDRCGEMLGPMLTTVHNLHYYLNLMREIRESLDAGRFGEFRSRFAADRARGV

SEQ ID NO: 51083 - protein, 390 aa, unidentified
  source 1..390: note = Acidovorax cavernicola
  REGION 1..390: note = tr|A0A3A1W4J5|A0A3A1W4J5_9BURK Queuine tRNA-ribosyltransferase OS=Acidovorax cavernicola; OX = 1675792 GN=tgt PE=3 SV=1
MLNFELLKTDPDSHARRATLTLNHGKVQTPIFMPVGTYGTVKGVMPRSLEEMGAQIILGNTFHLWMRPGLDVMASFGGLHQFEKWDKPILTDSGGFQVWSLGAMRKISEEGVKFASPVNGDKLFLTPEVSMQIQTILNSDIVMQFDECTPYDTKGHITTEAEARVSMELSLRWAKRCQAEFARLSNPNALFGIVQGGMFENLREESLAALVDMDFPGYAIGGVSVGEPKEEMLHIMGHTPHRLPANKPRYLMGVGTPEDLVQGVADGVDMFDCVMPTRNARNGTLFTRFGDLKMRNARHKSDPQPIDPSCTCHACAGTSGVSWNDGGREGFSRAYLHHLDRCGEMLGPMLTTIHNLHYYLNLMTEIRAALDAGTFTAFRAQFKSDRARGV

SEQ ID NO: 51084 - protein, 390 aa, Acidovorax citrulli
  REGION 1..390: note = sp|A1TVN0|TGT_ACIAC Queuine tRNA-ribosyltransferase; OS = Acidovorax citrulli (strain AAC00-1) OX=397945 GN=tgt; PE = 3 SV=1
MLQFELLATDPASHARRGTLTLNHGVVQTPIFMPVGTYGTVKGVMPRSLHEMGAQIILSNTFHLWMRPGLDVMQSFGGLHGFEQWNKPILTDSGGFQVWSLGAMRKITEEGVHFASPVNGDKLFMSPEVSMQIQTVLNSDIVMQLDECTPYETKGHKTTEAEARKSMEMSLRWARRSQDEFHRLGNPNALFGIVQGGMYKNLRQESLERLVEMDFPGYAVGGVSVGEPKDEMLDIMAHTPHRLPAHKPRYLMGVGTPEDLVQGVADGVDMFDCVMPTRNARNGTIFTRFGDLKIRNARHKADHQPLDPTCTCHACAGTEGVAWADGGRGGFSRAYLHHLDRCGEMLGPMLTTVHNLHYYLNLMREIRESLDAGRFGEFRARFAADRAQGV

SEQ ID NO: 51085 - protein, 394 aa, Acidovorax delafieldii
  REGION 1..394: note = tr|A0A561XC82|A0A561XC82_ACIDE Queuine tRNA-ribosyltransferase OS=Acidovorax delafieldii OX=47920; GN = tgt PE=3 SV=1
MRPIMLQFDLLKTDPSSHARRGQLTLNHGVVQTPIFMPVGTYGTVKGVMPRSLHDMGAQIILGNTFHLWMRPGLDVMQSFGGLHGFEKWDKPILTDSGGFQVWSLGAMRKITEEGVTFASPVNGDKLFMSPEVSMQIQTTLNSDIVMQLDECTPYETKGHKTTEAEARKSMEMSLRWAKRSQDEFHRLNNPNALFGIVQGGMFKNLRQESLERLVEMDFPGYAVGGVSVGEPKDEMLDIMAHTPHRLPAHKPRYLMGVGTPEDLVQGVADGVDMFDCVMPTRNARNGTMFTRFGDLKIRNARHKADHKPMDTSCTCYACAGSSGVSWDNGGREGFSRAYLHHLDRCGEMLGPMLTTVHNLHYYLNLMREVRESLEAGTFAQFRAQFKANRARGV

SEQ ID NO: 51086 - protein, 390 aa, Acidovorax delafieldii
  REGION 1..390: note = tr|C5TBQ5|C5TBQ5_ACIDE Queuine tRNA-ribosyltransferase OS=Acidovorax delafieldii 2AN; OX = 573060 GN=tgt PE=3 SV=1
MLQFDLLTTDPASHARRGTLTLNHGVVQTPIFMPVGTYGTVKGVMPQSLHDMGAQIILGNTFHLWMRPGLDVMQSFGGLHGFEQWNKPILTDSGGFQVWSLGAMRKITEEGVHFASPVNGDKLFMSPEVSMQIQTTLNSDIVMQLDECTPYETKGHLTTEREARQSMEMSLRWARRSQDEFHRLNNPNALFGIVQGGMYENLRAESLDRLVEMDFPGYAIGGVSVGEPKDEMLRIMAHTPHRLPAHKPRYLMGVGTPEDLVEGVAQGVDMFDCVMPTRNARNGTLFTRFGDLKIRNARHKADHQPLDTTCTCHACAGSAGVPWDQGGRGGFSRAYLHHLDRCGEMLGPMLTTIHNLHYYLNLMREVREALDAGQFAAFRAQFKADRARGV

SEQ ID NO: 51087 - protein, 390 aa, unidentified
  source 1..390: note = Acidovorax ebreus
  REGION 1..390: note = sp|B9MGI1|TGT_ACIET Queuine tRNA-ribosyltransferase; OS = Acidovorax ebreus (strain TPSY) OX=535289 GN=tgt PE=3; SV = 1
MLKFEILATDTSSHARRGTLTLNHGVVQTPIFMPVGTYGTVKGVMPRSLREMGAQIILGNTFHLWMRPGLDVMQSFGGLHGFEQWDKPILTDSGGFQVWSLGSMRKITEEGVHFASPVNGDKLFMSPEVSMQIQTTLNSDIVMQLDECTPYETNGHKTTEAEARKSMEMSRRWAVRSKNEFERLGNPNALFGIVQGGMYKNLRQESLEALVEMDFPGYAVGGVSVGEPKDEMLDIMAHTPHRLPAHKPRYLMGVGTPEDLVEGVAQGVDMFDCVMPTRNARNGTLFTRYGDLKIRNARHKTDHQPLDPSCTCHACAGTEGVSWNDGGRGGFSRAYLHHLDRCGEMLGPMLTTIHNLHYYLNLMREVREALDAGQFGAFRARFKAERARGV

SEQ ID NO: 51088 - protein, 390 aa, unidentified
  source 1..390: note = Acidovorax kalamii
  REGION 1..390: note = tr|A0A235EKM4|A0A235EKM4_9BURK Queuine tRNA-ribosyltransferase OS=Acidovorax kalamii OX=2004485; GN = tgt PE=3 SV=1
MLQFELLKTDPSSHARRGQLTLNHGVVQTPIFMPVGTYGTVKGVMPRSLHDMGAQIILGNTFHLWMRPGLDVMQSFGGLHGFEKWDKPILTDSGGFQVWSLGAMRKITEEGVTFASPVNGDKLFMSPEVSMQIQTTLNSDIVMQLDECTPYETKGHKTTEAEARKSMEMSLRWAKRSQDEFHRLNNPNALFGIVQGGMYKNLRQESLERLVEMDFPGYAVGGVSVGEPKDEMLDIMAHTPHRLPAHKPRYLMGVGTPEDLVQGVADGVDMFDCVMPTRNARNGTMFTRFGDLKIRNARHKADHKPMDTSCTCYACAGSSGVSWDNGGREGFSRAYLHHLDRCGEMLGPMLTTVHNLHYYLNLMREVRESLEAGTFAQFRAQFKADRARGV

SEQ ID NO: 51089 - protein, 429 aa, Acidovorax konjaci
  REGION 1..429: note = tr|A0A1I1YBX7|A0A1I1YBX7_9BURK Queuine tRNA-ribosyltransferase OS=Acidovorax konjaci OX=32040; GN = tgt PE=3 SV=1
MLSSLGGPGAERGADRGIRRGADQCRAVRARAVWDNRPIMLQFELLATDPGSHARRGTLTLNHGVVQTPIFMPVGTYGTVKGVMPRSLHEMGAQIILGNTFHLWMRPGLDVMQSFGGLHGFEQWDKPILTDSGGFQVWSLGAMRKITEEGVQFASPVNGDKLFMSPEVSMQIQTVLNSDIVMQLDECTPYETNGHKTTEAEARKSMEMSLRWARRSQDEFRRLENPNALFGIVQGGMFKHLRQESLERLVEMDFPGYAVGGVSVGEPKDEMLDIMAHTPHRLPAHKPRYLMGVGTPEDLVQGVAEGVDMFDCVMPTRNARNGTIFTRHGDLKIRNARHKADHQPLDPTCTCHACAGTEGVAWADGGRGGFSRAYLHHLDRCGEMLGPMLTTVHNLHYYLNLMREVREALDAGRFGEFRQRFAADRARGI

SEQ ID NO: 51090 - protein, 390 aa, Acidovorax radicis
  REGION 1..390: note = tr|A0A561CAA7|A0A561CAA7_9BURK Queuine tRNA-ribosyltransferase OS=Acidovorax radicis OX=758826; GN = tgt PE=3 SV=1
MLQFDLLTTDPTSHARRGTLTLNHGVVQTPIFMPVGTYGTVKGVMPQSLHDMGAQIILGNTFHLWMRPGLDVMESFGGLHGFEQWNKPILTDSGGFQVWSLGAMRKITEEGVTFASPVNGDKLFMSPEVSMQIQTTLNSDIVMQLDECTPYETKGHLTTEREARQSMEMSLRWARRSQDEFHRLNNPNALFGIVQGGMYENLRAESLERLVEMDFPGYAVGGVSVGEPKDEMLRIMAHTPHLLPTHKPRYLMGVGTPEDLVEGVAQGVDMFDCVMPTRNARNGTMFTRYGDLKIRNARHKSDHQPLDTSCTCHACAGKSGVSWEAGGREGFSRAYQHHLDRCGEMLGPMLTSIHNLHYYLNLMREVREALDAGTFAQFRAKFKADRARGV

SEQ ID NO: 51091 - protein, 390 aa, Acidovorax soli
  REGION 1..390: note = tr|A0A1H4AS43|A0A1H4AS43_9BURK Queuine tRNA-ribosyltransferase OS=Acidovorax soli OX=592050; GN = tgt PE=3 SV=1
MLQFDLLKTDPTSHARRGQLTLNHGVVQTPIFMPVGTYGTVKGVMPQSLHDMGAQIILGNTFHLWMRPGQEVMQSFGGLHAFEKWDKPILTDSGGFQVWSLGAMRKITEEGVHFASPVNGDKLFMSPEVSMQIQTTLNSDIVMQLDECTPYETKGHLTTEAEARKSMEMSLRWAQRSKDEFARLNNPNALFGIVQGGMYENLRAESLERLVEMDFPGYAVGGVSVGEPKDEMLRIMAHTPHLLPAHKPRYLMGVGTPEDLVEGVAQGVDMFDCVMPTRNARNGTLFTRFGDLKIRNARHKTDHQPLDTTCSCHACAGSAGVPWNEGGRAGFSRAYLHHLDRCGEMLGPMLTTIHNLHYYLNLMREVRAALEAGQFAQFRAQFKTDRARGV

SEQ ID NO: 51092 - protein, 394 aa, Acidovorax sp.
  REGION 1..394: note = tr|A0A495I0V8|A0A495I0V8_9BURK Queuine tRNA-ribosyltransferase OS=Acidovorax sp. 94 OX=2135633; GN = tgt PE=3 SV=1
MPPIMLQFDLLKTDPSSHARRGTLTLNHGVVQTPIFMPVGTYGTVKGVMPRSLHDMGAQIILGNTFHLWMRPGLDVMQSFGGLHGFEKWDKPILTDSGGFQVWSLGAMRKITEEGVTFASPVNGDKLFMSPEVSMQIQTTLNSDIVMQLDECTPYETKGHKTTEAEARKSMEMSLRWAKRSRDEFERLQNPNALFGIVQGGMFKNLRQESLEHLVEMDFPGYAVGGVSVGEPKDEMLDIMAHTPHRLPAHKPRYLMGVGTPEDLVQGVADGVDMFDCVMPTRNARNGTMFTRFGDLKIRNARHKADHKPMDTSCTCYACAGSSGVSWDDGGREGFSRAYLHHLDRCGEMLGPMLTTVHNLHYYLNLMREVRVSLDAGTFAEFRARFKTERARGV

SEQ ID NO: 51093 - protein, 390 aa, Acidovorax sp.
  REGION 1..390: note = sp|A1WCK2|TGT_ACISJ Queuine tRNA-ribosyltransferase; OS = Acidovorax sp. (strain JS42) OX=232721 GN=tgt PE=3 SV=1
MLKFEILATDTSSHARRGKLTLNHGVVQTPIFMPVGTYGTVKGVMPRSLREMGAQIILGNTFHLWMRPGLDVMQSFGGLHGFEQWDKPILTDSGGFQVWSLGSMRKITEEGVHFASPVNGDKLFMSPEVSMQIQTTLNSDIVMQLDECTPYETNGHKTTEAEARKSMEMSRRWAVRSKNEFERLGNPNALFGIVQGGMYKNLRQESLEALVEMDFPGYAVGGVSVGEPKDEMLDIMAHTPHRLPAHKPRYLMGVGTPEDLVEGVAQGVDMFDCVMPTRNARNGTLFTRYGDLKIRNARHKTDHQPLDPSCTCHACAGTEGVSWNDGGRGGFSRAYLHHLDRCGEMLGPMLTTIHNLHYYLNLMREVREALDAGQFGAFRARFKAERARGV

SEQ ID NO: 51094 - protein, 390 aa, Acidovorax temperans
  REGION 1..390: note = tr|A0A543L8C5|A0A543L8C5_9BURK Queuine tRNA-ribosyltransferase OS=Acidovorax temperans OX=80878; GN = tgt PE=3 SV=1
MLQFDLLKTDPSSHARRGKLTLNHGVVQTPIFMPVGTYGTVKGVMPQSLHDMGAQIILGNTFHLWMRPGLDVMQSFGGLHGFEKWDKPILTDSGGFQVWSLGAMRKITEEGVHFASPVNGDKLFMSPEVSMQIQTTLNSDIVMQLDECTPYETKGHLTTEAEARKSMEMSLRWAKRSRDEFQRLENPNALFGIVQGGMYKNLRQESLERLVEMDFPGYAVGGVSVGEPKDEMLDIMAHTPHRLPAHKPRYLMGVGTPEDLVQGVAEGVDMFDCVMPTRNARNGTIFTRYGDLKIRNARHKADHQPLDTSCTCHACAGKDGVAWDQGGRGGFSRAYLHHLDRCGEMLGPMLTTIHNLHYYLNLMREVREALDAGTFSQFRAQFKADRARGV

SEQ ID NO: 51095 - protein, 390 aa, Acidovorax temperans
  REGION 1..390: note = tr|A0A0D7K8P6|A0A0D7K8P6_9BURK Queuine tRNA-ribosyltransferase OS=Acidovorax temperans OX=80878; GN = tgt PE=3 SV=1
MLQFDLLKTDPSSHARRSKLTLNHGVVQTPIFMPVGTYGTVKGVMPQSLHDMGAQIILGNTFHLWMRPGLDVMQSFGGLHGFEKWDKPILTDSGGFQVWSLGAMRKITEEGVHFASPVNGDKLFMSPEVSMQIQTTLNSDIVMQLDECTPYETKGHLTTEAEARKSMEMSLRWAKRSKDEFERLGNPNALFGIVQGGMYKNLRQESLEALVAMDFPGYAVGGVSVGEPKDEMLDIMAHTPHRLPAHKPRYLMGVGTPEDLVQGVAEGVDMFDCVMPTRNARNGTIFTRYGDLKIRNARHKADHQPLDTSCTCHACAGKDGVAWDQGGRGGFSRAYLHHLDRCGEMLGPMLTTIHNLHYYLNLMREVREALDAGTFSQFRAQFKADRARGV

SEQ ID NO: 51096 - protein, 390 aa, Acidovorax valerianellae
  REGION 1..390: note = tr|A0A1G7CTP5|A0A1G7CTP5_9BURK Queuine tRNA-ribosyltransferase OS=Acidovorax valerianellae; OX = 187868 GN=tgt PE=3 SV=1
MLQFDLLTTDPTSHARRGTLTLNHGVVQTPIFMPVGTYGTVKGVMPQSLHDMGAQIILGNTFHLWMRPGLDVMQSFGGLHKFEQWNKPILTDSGGFQVWSLGAMRKITEEGVHFASPVNGDKLFMSPEVSMQIQTTLNSDIVMQLDECTPYETKGHLTTEREARTSMEMSLRWAQRSKDEFNRLNNPNALFGIVQGGMFENLRAESLERLVEMDFPGYAVGGVSVGEPKDEMLRIMAHTPHRLPAHKPRYLMGVGTPEDLVEGVAQGVDMFDCVMPTRNARNGTIFTRYGDLKLRNARHKADHQPLDATCTCHACAGAEGVAWDQGGRGGFSRAYLHHLDRCGEMLGPMLTTIHNLHYYLNLMREVRESLDAGRFGEFRQQFAADRARGV

SEQ ID NO: 51097 - protein, 390 aa, unidentified
  source 1..390: note = Acidovorax wautersii
  REGION 1..390: note = tr|A0A1I2EWG9|A0A1I2EWG9_9BURK Queuine tRNA-ribosyltransferase OS=Acidovorax wautersii OX=1177982; GN = tgt PE=3 SV=1
MLQFDLLKTDPTSHARRGTLTLNHGVVQTPIFMPVGTYGTVKGVMPQSLHDMGAQIILGNTFHLWMRPGLDVMQSFGGLHGFEQWNKPILTDSGGFQVWSLGAMRKITEEGVTFASPVNGDKLFMSPEVSMQIQTTLNSDIVMQLDECTPYETQGRKTTEAEARKSMEMSRRWAVRSKNEFERLGNPNALFGIVQGGMFPHLREESLQALVEMDFPGYAVGGVSVGEPKDEMLEIMAHTPHRLPANKPRYLMGVGTPEDLVQGVADGVDMFDCVMPTRNARNGTIFTRYGDLKLRNARHKTDHQPLDPTCTCHACAGKDGVAWADGGRGGFSRAYLHHLDRCGEMLGPMLTTIHNLHYYLNLMREIREALDAGSFAQFRQQFAADRARGV

SEQ ID NO: 51098 - protein, 376 aa, unidentified
  source 1..376: note = Acinetobacter albensis
  REGION 1..376: note = tr|A0A1C4GXU0|A0A1C4GXU0_9GAMM Queuine tRNA-ribosyltransferase OS=Acinetobacter albensis; OX = 1673609 GN=tgt PE=3 SV=1
MKFEKLGQSGRARRGRLTLEHGVIETPVFMPVGTYGTVKGMLPRDIEDIKAQIILGNTFHLYLRPGLDVIREHGGLHKFMKWNKPILTDSGGFQVFSLGAMRKIKEDGVTFRSPIDGSKVFLSPEISMDIQHTLNSDIVMIFDECTPYPATHEEAQKSLQLSLRWAKRCKTQHHEVLKNKNALFGIIQGGMYEDLRDESLNGLKEIDFDGFAIGGLSVGEPKEEMIKVLDYLPVKMPEEKPRYLMGVGKPEDIVEAIRRGVDMFDCVMPTRNARNGHYFVTDGLVRIRNAKFRHDQSPLDPHCDCYTCQNFTRAYLFHLEKCGEMLGSMLGTIHNLRYYQRFTQDIRDALDNGTFDAYVHDFYARRGLEVPPCPED

SEQ ID NO: 51099 - protein, 375 aa, unidentified
  source 1..375: note = Acinetobacter apis
  REGION 1..375: note = tr|A0A217EHQ3|A0A217EHQ3_9GAMM Queuine tRNA-ribosyltransferase OS=Acinetobacter apis OX=1229165; GN = tgt PE=3 SV=1
MKFEKLAQSGRARRGRLTLAHGVVETPIFMPVGTYGTVKGMLPRDIKEIEAQIILGNTFHLYLRPGLEVIKEHGGLHQFMKWDKPILTDSGGFQVFSLGAMRKIKEEGVTFRSPIDGSKVFLSPEISMEIQQTLNSDIVMIFDECTPYPATHAQAQDSLQLSLRWAKRCKTAHVNNANPNALFGIIQGGMYEDLRDESLKGLLDIDFDGYAIGGLSVGEPKDEMIKVLDYLPAKMPEDKPRYLMGVGKPEDIVEAVRRGVDMFDCVMPTRNARNGHYFVTDGLVRIRNSKYRHDQGPLDPHCDCYTCQNFTRAYLYHLEKCGEMLASMLGTIHNLRYYLRLTESMRDALDAGTFDAFVEDFYQRRGLSVPPCPTE

SEQ ID NO: 51100 - protein, 377 aa, Acinetobacter baumannii
  REGION 1..377: note = tr|A0A158LZ69|A0A158LZ69_ACIBA Queuine tRNA-ribosyltransferase OS=Acinetobacter baumannii NIPH 190 OX=1217640 GN=tgt PE=3 SV=1
MKFEKLGQSGRARRGRLTLEHGVVETPVFMPVGTYGTVKGMLPRDIEDIQAQIILGNTFHLYLRPGLEVIKQHGGLHDFIKWNKPILTDSGGFQVFSLGAMRKIKEEGVTFRSPIDGSKVFLSPEISMEIQHVLNSDIVMIFDECTPYPATHEEAQKSLQLSLRWAKRCKTHHHDELKNKNALFGIIQGGMYEDLRDESLNGLLEIGFDGYAIGGLSVGEPKEEMIKVLDYLPNKMPHDKPRYLMGVGKPEDIVEAVRRGVDMFDCVMPTRNARNGHYFVTDGLVRIRNSKYRHDQGPLDPHCDCYTCKNFTRAYLFHLEKCGEMLASMLGTIHNLRYYQRLTEGMRDALDNGTFDEFVQDFYARRGLEVPPCPVDE

SEQ ID NO: 51101 - protein, 377 aa, Acinetobacter baumannii
  REGION 1..377: note = sp|B7I976|TGT_ACIB5 Queuine tRNA-ribosyltransferase; OS = Acinetobacter baumannii (strain AB0057) OX=480119; GN = tgt PE=3 SV=1
MKFEKLGQSGRARRGRLTLEHGVVETPVFMPVGTYGTVKGMLPRDIEDIQAQIILGNTFHLYLRPGLEVIKQHGGLHDFIKWNKPILTDSGGFQVFSLGAMRKIKEEGVTFRSPIDGSKVFLSPEISMEIQHVLNSDIVMIFDECTPYPATHEEAQKSLQLSLRWAKRCKAHHHDELKNKNALFGIIQGGMYEDLRDESLNGLLEIGFDGYAIGGLSVGEPKEEMIKVLDYLPNKMPHDKPRYLMGVGKPEDIVEAVRRGVDMFDCVMPTRNARNGHYFVTDGLVRIRNSKYRHDQGPLDPHCDCYTCKNFTRAYLFHLEKCGEMLASMLGTIHNLRYYQRLTEGMRDALDNGTFDEFVQDFYARRGLEVPPCPVDE

SEQ ID NO: 51102 - protein, 386 aa, Acinetobacter baylyi
  REGION 1..386: note = sp|Q6FEJ4|TGT_ACIAD Queuine tRNA-ribosyltransferase; OS = Acinetobacter baylyi (strain ATCC 33305 / BD413 / ADP1); OX = 62977 GN=tgt PE=3 SV=1
MFFRLDLESCMKFEKLGQSGRARRGRLTLAHGVVETPVFMPVGTYGTVKGMLPRDIEEIQAQIILGNTFHLYLRPGLEVIKEHGGLHEFIKWDKPILTDSGGFQVFSLGAMRKIKEEGVTFRSPIDGSKVFLSPEISMEIQQVLNSDIVMIFDECTPYPATHEEAQKSLQLSLRWAKRCKTHHHEQLNNTNALFGIIQGGMYEDLRDESLNGLLEIGFDGYAIGGLSVGEPKEEMIKVLDYLPAKMPEDKPRYLMGVGKPEDIVEAVRRGVDMFDCVMPTRNARNGHYFVTDGLVRIRNSKYRHDQSPLDPHCDCYTCKNFTRAYLYHLEKCGEMLASMLGTIHNLRYYQRLTQGIRDALEQGTFDEFVTDFYTRRGLDVPPAPVD

SEQ ID NO: 51103 - protein, 376 aa, Acinetobacter beijerinckii
  REGION 1..376: note = tr|N9E4W2|N9E4W2_9GAMM Queuine tRNA-ribosyltransferase OS=Acinetobacter beijerinckii CIP 110307 OX=1217648 GN=tgt PE=3 SV=1
MKFEKLGQSGRARRGRLTLEHGVVETPVFMPVGTYGTVKGMLPRDIEEIQAQIILGNTFHLYLRPGLEVIKEHGGLHEFIRWDKPILTDSGGFQVFSLGAMRKIKEEGVTFRSPIDGSKVFLSPEISMEIQHVLNSDIVMIFDECTPYPATHEEAQKSLQLSLRWAKRCKTHHHDGLKNKNALFGIIQGGMYEDLRDESLTGLLEVGFDGYAIGGLSVGEPKEEMIKVLDYLPNKMPADKPRYLMGVGKPEDIVEAVRRGVDMFDCVMPTRNARNGHYFVTDGLVRIRNSRYRHDQGPLDPHCDCYTCKNFSRAYLYHLEKCGEMLASMLGTIHNLRYYQRLTQGMRDALDNGTFDEYVQDFYARRGLEVPPCPED

SEQ ID NO: 51104 - protein, 376 aa, Acinetobacter beijerinckii
  REGION 1..376: note = tr|N9FD72|N9FD72_9GAMM Queuine tRNA-ribosyltransferase OS=Acinetobacter beijerinckii ANC 3835 OX=1217649 GN=tgt PE=3 SV=1
MKFEKLGQSGRARRGRLTLEHGVVETPVFMPVGTYGTVKGMLPRDIEEIQAQIILGNTFHLYLRPGLEVIKEHGGLHEFIRWDKPILTDSGGFQVFSLGAMRKIKEEGVTFRSPIDGSKVFLSPEISMEIQHVLNSDIVMIFDECTPYPATHEEAQKSLQLSLRWAKRCKTHHHDELKNKNALFGIIQGGMYEDLRDESLTGLLEVGFDGYAIGGLSVGEPKEEMIKVLDYLPNKMPADKPRYLMGVGKPEDIVEAVRRGVDMFDCVMPTRNARNGHYFVTDGLVRIRNSRYRHDQGPLDPHCDCYTCKNFSRAYLYHLEKCGEMLASMLGTIHNLRYYQRLTQGMRDALDNGTFDEYVQDFYARRGLEVPPCPED

SEQ ID NO: 51105 - protein, 376 aa, Acinetobacter bereziniae
  REGION 1..376: note = tr|N8YVR6|N8YVR6_ACIBZ Queuine tRNA-ribosyltransferase OS=Acinetobacter bereziniae NIPH 3; OX = 1217651 GN=tgt PE=3 SV=1
MKFEKLGQSGRARRGRLTLAHGVVETPVFMPVGTYGTVKGMLPRDIEDIQAQIILGNTFHLYLRPGLDVIREHGGLHEFMKWGKPILTDSGGFQVFSLGAMRKIKEEGVTFRSPIDGSKVFLSPEISMDIQHTLNSDIVMIFDECTPYPATHEEAQKSLQLSLRWAKRCKTQHHDVLKNKNALFGIIQGGMYEDLREESLNGLKEIDFDGFAIGGLSVGEPKEEMIKVLDYLPAKMPADKPRYLMGVGKPEDIVEAIRRGVDMFDCVMPTRNARNGHYFVTDGLVRIRNSQYRHDQRPLDPHCDCYTCTNFTRAYLFHLEKCGEMLGSMLGTIHNLRYYQRFTQDIRDALDQGTFDEYVTDFYQRRGLEVPPCPVD

SEQ ID NO: 51106 - protein, 376 aa, Acinetobacter bereziniae; identical to SEQ ID NO: 51105
  REGION 1..376: note = tr|A0A0A8TP59|A0A0A8TP59_ACIBZ Queuine tRNA-ribosyltransferase OS=Acinetobacter bereziniae; OX = 106648 GN=tgt PE=3 SV=1

SEQ ID NO: 51107 - protein, 376 aa, unidentified
  source 1..376: note = Acinetobacter bohemicus
  REGION 1..376: note = tr|A0A1I6UM46|A0A1I6UM46_9GAMM Queuine tRNA-ribosyltransferase OS=Acinetobacter bohemicus; OX = 1435036 GN=tgt PE=3 SV=1
MKFEKLGQSGRARRGRLTLEHGVIETPVFMPVGTYGTVKGMLPRDIEDIKAQIILGNTFHLYLRPGLDVIREHGGLHEFMKWNKPILTDSGGFQVFSLGAMRKIKEDGVTFRSPIDGSKVFLSPEISMDIQHTLNSDIVMIFDECTPYPATHEEAQKSLQLSLRWAKRCKTQHHDVLKNRNALFGIIQGGMYEDLRNESLNGLKEIDFDGFAIGGLSVGEPKEEMIKVLDYLPAQMPEDKPRYLMGVGKPEDIVEAIRRGVDMFDCVMPTRNARNGHYFVTDGLVRIRNAKYRHDQSPLDSECDCYTCQNFTRAYLFHLEKCGEMLGSMLGTIHNLRYYQRFTQDIRDALDNGTFDAYVHDFYARRGLDVPPCPED

SEQ ID NO: 51108 - protein, 376 aa, unidentified; identical to SEQ ID NO: 51107
  source 1..376: note = Acinetobacter bohemicus
  REGION 1..376: note = tr|N8P4N0|N8P4N0_9GAMM Queuine tRNA-ribosyltransferase OS=Acinetobacter bohemicus ANC 3994 OX=1217715 GN=tgt PE=3 SV=1

SEQ ID NO: 51109 - protein, 375 aa, unidentified
  source 1..375: note = Acinetobacter boissieri
  REGION 1..375: note = tr|A0A1G6GID4|A0A1G6GID4_9GAMM Queuine tRNA-ribosyltransferase OS=Acinetobacter boissieri; OX = 1219383 GN=tgt PE=3 SV=1
MKFEKLGQSGRARRGRLTLEHGVVETPIFMPVGTYGTVKGMLPRDIEDIEAQIILGNTFHLYLRPGLEVIKEHGGLHEFMKWNKPILTDSGGFQVFSLGAMRKIKEEGVTFRSPIDGSKVFLSPEISMEIQQTLNSDIVMIFDECTPYPATHEQAQTSLQLSLRWAKRCKTAHTENKNPNALFGIIQGGMYEDLRDESLKGLLDIDFDGYAIGGLSVGEPKEEMIKVLDYLPHKMPEDKPRYLMGVGKPEDIVEAVRRGVDMFDCVMPTRNARNGHYFVTDGLVRIRNSQYRHDQKPLDPHCDCYTCKNFTRAYLYHLEKCGEMLASMLGTIHNLRYYLRLTEAIRNALDDDTFDAFVTDFYTRRGLEVPPCPID

SEQ ID NO: 51110 - protein, 376 aa, Acinetobacter bouvetii
  REGION 1..376: note = tr|A0A4Q7ATJ9|A0A4Q7ATJ9_9GAMM Queuine tRNA-ribosyltransferase OS=Acinetobacter bouvetii; OX = 202951 GN=tgt PE=3 SV=1
MKFEKLGQSGRARRGRLTLAHGVVETPVFMPVGTYGTVKGMLPRDIEEIKAQIILGNTFHLYLRPGLEVIQEHGGLHEFMKWDKPILTDSGGFQVFSLGAMRKIKEEGVTFRSPIDGSKVFLSPEISMDIQKTLNSDIVMIFDECTPYPATHEEAQKSLQLSLRWAKRCKTHHHDEINNTNALFGIIQGGMYEDLRDESLNGLLDIGFDGYAIGGLSVGEPKEEMIKVLDYLPAKMPEDKPRYLMGVGKPEDIVEGIRRGVDMFDCVMPSRNARNGHYFVTDGLVRIRNAKYRHDQSSLDADCDCYTCTNFTRAYLFHLEKCGEMLGSMLGTIHNLRYYQRFTQDIRDALDNGTFDEFVQDFYARRGLEVPPCPQD

SEQ ID NO: 51111 - protein, 376 aa, Acinetobacter bouvetii
  REGION 1..376: note = tr|N9C761|N9C761_9GAMM Queuine tRNA-ribosyltransferase OS=Acinetobacter bouvetii DSM 14964 = CIP 107468 OX=1120925 GN=tgt PE=3 SV=1
MKFEKLGQSGRARRGRLTLAHGVVETPVFMPVGTYGTVKGMLPRDIEEIKAQIILGNTFHLYLRPGLEVIQEHGGLHEFMKWDKPILTDSGGFQVFSLGAMRKIKEEGVTFRSPIDGSKVFLSPEISMDIQKTLNSDIVMIFDECTPYPATHEEAQKSLQLSLRWAKRCKTHHHDEINNTNALFGIIQGGMYEDLRDESLNGLLDIGFDGYAIGGLSVGEPKEEMIKVLDYLPVKMPEDKPRYLMGVGKPEDIVEGIRRGVDMFDCVMPSRNARNGHYFVTDGLVRIRNAKYRHDQSPLDADCDCYTCTNFTRAYLFHLEKCGEMLGSMLGTIHNLRYYQRFTQDIRDALDNGTFDEFVQNFYARRGLEVPPCPQD

SEQ ID NO: 51112 - protein, 376 aa, Acinetobacter brisouii
  REGION 1..376: note = tr|V2VRA2|V2VRA2_9GAMM Queuine tRNA-ribosyltransferase OS=Acinetobacter brisouii CIP 110357 OX=1341683 GN=tgt PE=3 SV=1
MKFEKLTQSGRARRGRLTLEHGVVETPVFMPVGTYGTVKGMLPRDIEEIQAQIILGNTFHLYLRPGLEVIKAHGGLHDFIKWNKPILTDSGGFQVFSLGAMRKIKEEGVTFRSPIDGSKVFLSPEISMEIQHTLNSDIVMIFDECTPYPATHDEAQKSLQLSLRWAKRCKTHHHDKLNNKNALFGIIQGGMYEDLRDESLNGLLEIDFDGYAIGGLSVGEPKEEMIKVLDYLPNKMPADKPRYLMGVGKPEDIVEAVRRGVDMFDCVMPTRNARNGHYFVTDGLVRIRNSKYRHDQSPLDPHCDCYTCQNFTRAYLFHLEKCGEMLASMLGTIHNLRYYQRLTQAMRDALDAGTFDAFVEDFYQRRGLEVPACPAD

SEQ ID NO: 51113 - protein, 377 aa, Acinetobacter calcoaceticus
  REGION 1..377: note = tr|A0A0A8XI10|A0A0A8XI10_ACICA Queuine tRNA-ribosyltransferase OS=Acinetobacter calcoaceticus; OX = 471 GN=tgt PE=3 SV=1
MKFEKLGQSGRARRGRLTLEHGVVETPVFMPVGTYGTVKGMLPRDIEDIQAQIILGNTFHLYLRPGLEVIKEHGGLHNFIKWDKPILTDSGGFQVFSLGAMRKIKEEGVTFRSPIDGSKVFLSPEISMEIQQVLNSDIVMIFDECTPYPATHEEAQKSLQLSLRWAKRCKTHHHDELKNKNALFGIIQGGMYEDLRDESLNGLLEIGFDGYAIGGLSVGEPKDEMIKVLDYLPSKMPQDKPRYLMGVGKPEDIVEAVRRGVDMFDCVMPTRNARNGHYFVTDGLVRIRNSKYRHDQSPLDPHCDCYTCKNFTRAYLFHLEKCGEMLASMLGTIHNLRYYQRLTEGMRDALENGTFDEFVQDFYARRGLEVPPCPVDE

SEQ ID NO: 51114 - protein, 377 aa, Acinetobacter calcoaceticus; identical to SEQ ID NO: 51113
  REGION 1..377: note = tr|N9EUD1|N9EUD1_ACICA Queuine tRNA-ribosyltransferase OS=Acinetobacter calcoaceticus ANC 3680 OX=1217653 GN=tgt PE=3 SV=1

SEQ ID NO: 51115 - protein, 377 aa, Acinetobacter calcoaceticus
  REGION 1..377: note = tr|A0A2S4SYM9|A0A2S4SYM9_9GAMM Queuine tRNA-ribosyltransferase OS=Acinetobacter calcoaceticus/baumannii complex sp. ABNIH27 OX=2080673; GN = tgt PE=3 SV=1
MKFEKLGQSGRARRGRLTLEHGVVETPVFMPVGTYGTVKGMLPRDIEDIQAQIILGNTFHLYLRPGLEVIKQHGGLHDFIKWNKPILTDSGGFQVFSLGAMRKIKEEGVTFRSPIDGSKVFLSPEISMEIQHVLNSDIVMIFDECTPYPATHEEAQKSLQLSLRWAKRCKTHHHDELKNKNALFGIIQGGMYEDLRDESLNGLLEVGFDGYAIGGLSVGEPKEEMIKVLDYLPNKMPQDKPRYLMGVGKPEDIVEAVRRGVDMFDCVMPTRNARNGHYFVTDGLVRIRNSKYRHDQGPLDPHCDCYTCKNFTRAYLFHLEKCGEMLASMLGTIHNLRYYQRLTEGMRDALDNGTFDEFVQDFYARRGLEVPPCPVDE

SEQ ID NO: 51116 - protein, 376 aa, unidentified
  source 1..376: note = Acinetobacter celticus
  REGION 1..376: note = tr|A0A1C3CUD3|A0A1C3CUD3_9GAMM Queuine tRNA-ribosyltransferase OS=Acinetobacter celticus; OX = 1891224 GN=tgt PE=3 SV=1
MKFEKLGQSGRARRGRLTLAHGVVETPVFMPVGTYGTVKGMLPRDIEDIKAQIILGNTFHLYLRPGLEVIQEHGGLHEFMKWNKPILTDSGGFQVFSLGAMRKIKEEGVTFRSPIDGSKVFLSPEISMDIQKTLNSDVVMIFDECTPYPATHEEAQKSLQLSLRWAKRCKTQHHDVLENTNALFGIIQGGMYEDLREESLKGLLEIGFDGYAIGGLSVGEPKEEMIKVLDYLPVQMPEDKPRYLMGVGKPEDVVEGIRRGVDMFDCVMPSRNARNGHYFVTDGLVRIRNAKYRHDQSPLDPHCDCYTCTNFTRAYLFHLEKCGEMLGSMLGTIHNLRYYQRFTQEIRDALDNGTFDDFVQDFYTRRGLEVPPCPQD

SEQ ID NO: 51117 - protein, 376 aa, unidentified
  source 1..376: note = Acinetobacter colistiniresistens
  REGION 1..376: note = tr|N9R389|N9R389_9GAMM Queuine tRNA-ribosyltransferase OS=Acinetobacter colistiniresistens OX=280145 GN=tgt PE=3 SV=1
MKFEKLGQSGRARRGRLTLEHGVVETPVFMPVGTYGTVKGMLPRDIEEIQAQIILGNTFHLYLRPGLEVIKEHGGLHEFIQWDKPILTDSGGFQVFSLGAMRKIKEEGVTFRSPIDGSKVFLSPEISMEIQHVLNSDIVMIFDECTPYPATHEEAQKSLQLSLRWAKRCKTHHHDALKNKNALFGIIQGGMYEDLRDESLKGLLEVGFDGYAIGGLSVGEPKEEMIKVLDYLPNKMPQDKPRYLMGVGKPEDIVEAVRRGVDMFDCVMPTRNARNGHYFVTDGLVRIRNSKYRHDKGPLDPHCDCYTCKNFTRAYLYHLEKCGEMLASMLGTIHNLRYYQRLTQGMRDALDNGTFDEYVQDFYARRGLEVPACPED

SEQ ID NO: 51118 - protein, 376 aa, unidentified
  source 1..376: note = Acinetobacter colistiniresistens
  REGION 1..376: note = tr|S3TGE4|S3TGE4_9GAMM Queuine tRNA-ribosyltransferase OS=Acinetobacter colistiniresistens OX=280145 GN=tgt PE=3 SV=1
MKFEKLGQSGRARRGRLTLEHGVVETPVFMPVGTYGTVKGMLPRDIEEIQAQIILGNTFHLYLRPGLEVIKEHGGLHEFIQWDKPILTDSGGFQVFSLGAMRKIKEEGVTFRSPIDGSKVFLSPEISMEIQHVLNSDIVMIFDECTPYPATHEEAQKSLQLSLRWAKRCKTHHHDALKNKNALFGIIQGGMYEDLRDESLKGLLEVGFDGYAIGGLSVGEPKEEMIKVLDYLPNKMPQEKPRYLMGVGKPEDIVEAVRRGVDMFDCVMPTRNARNGHYFVTDGLVRIRNSKYRHDKGPLDPHCDCYTCKNFTRAYLYHLEKCGEMLASMLGTIHNLRYYQRLTQGMRDALDNGTFDEYVQDFYARRGLEVPACPED

SEQ ID NO: 51119 - protein, 376 aa, unidentified
  source 1..376: note = Acinetobacter cumulans
  REGION 1..376: note = tr|A0A4P8DQ51|A0A4P8DQ51_9GAMM Queuine tRNA-ribosyltransferase OS=Acinetobacter cumulans; OX = 2136182 GN=tgt PE=3 SV=1
MKFEKLAQSGRARRGRLTLEHGVVETPMFMPVGTYGTVKGVLPRDIKEIKSQVILGNTFHLYLRPGLEVIKQHGGLHQFMKWDKPILTDSGGFQVFSLGAMRKIKEDGVTFRSPIDGSKVFLSPEISMDIQHTLNSDIVMIFDECTPYPATHEEAQKSLQLSLRWAKRCKTQHHEVLKNRNALFGIIQGGMYEDLRDESLKGLLDIDFDGYAIGGLSVGEPKEEMIKVLDYLPEKMPADKPRYLMGVGKPEDIVEAVRRGVDMFDCVMPTRNARNGHYFVTDGLVRIRNSQYRHDQGPLDPYCDCYTCTNFTRSYLFHLEKCGEMLGSMLGTIHNLRYYLRLTEMMRDALDNGTFDEFVQDFYARRGLEVPPCPED

SEQ ID NO: 51120 - protein, 376 aa, unidentified
  source 1..376: note = Acinetobacter cumulans
  REGION 1..376: note = tr|A0A3A8G1N5|A0A3A8G1N5_9GAMM Queuine tRNA-ribosyltransferase OS=Acinetobacter cumulans; OX = 2136182 GN=tgt PE=3 SV=1
MKFEKLAQSGRARRGRLTLEHGVVETPMFMPVGTYGTVKGVLPRDIKEIKSQVILGNTFHLYLRPGLEVIKQHGGLHQFMKWDKPILTDSGGFQVFSLGAMRKIKEDGVTFRSPIDGSKVFLSPEISMDIQHTLNSDIVMIFDECTPYPATHEEAQKSLQLSLRWAKRCKTQHHEVLKNRNALFGIIQGGMYEDLRDESLKGLLDIDFDGYAIGGLSVGEPKEEMIKVLDYLPEKMPADKPRYLMGVGKPEDIVEAVRRGVDMFDCVMPTRNARNGHYFVTDGLVRIRNSQYRHDQGPLDPHCDCYTCTNFTRSYLFHLEKCGEMLGSMLGTIHNLRYYLRLTEMMRDALDNGTFDEFVQDFYARRGLEVPPCPED

SEQ ID NO: 51121 - protein, 376 aa, unidentified
  source 1..376: note = Acinetobacter defluvii
  REGION 1..376: note = tr|A0A2S2FAU8|A0A2S2FAU8_9GAMM Queuine tRNA-ribosyltransferase OS=Acinetobacter defluvii; OX = 1871111 GN=tgt PE=3 SV=1
MKFEKLGQSGRARRGRLTLAHGVVETPVFMPVGTYGTVKGMLPRDIEEIQAQIILGNTFHLYLRPGLEVIQEHGGLHEFIKWDKPILTDSGGFQVFSLGAMRKIKEEGVTFRSPIDGSKVFLSPEISMEIQKTLNSDIVMIFDECTPYPATHQEAQKSLQLSLRWAKRCKTHHHDVLKNKNALFGIIQGGMYEDLRDESLNGLKEIDFDGFAIGGLSVGEPKEEMIKVLDYLPAKMPEDKPRYLMGVGKPEDIVEAIRRGVDMFDCVMPTRNARNGHYFVTDGLVRIRNAKYRHDQSPLDPHCDCYTCKNFTRAYLFHLEKCGEMLGSMLGTIHNLRYYQRFTQDIRDALDNGTFDDFVADFYQRRGLDVPHCPVD

SEQ ID NO: 51122 - protein, 375 aa, unidentified
  source 1..375: note = Acinetobacter equi
  REGION 1..375: note = tr|A0A0N9W0V4|A0A0N9W0V4_9GAMM Queuine tRNA-ribosyltransferase OS=Acinetobacter equi OX=1324350; GN = tgt PE=3 SV=1
MKFEKLGQSGRARRGRLTLAHGVVETPVFMPVGTYGTVKGMLPRDIEEIKAQIILGNTFHLYLRPGLEVIKEHGGLHEFMKWNKPILTDSGGFQVFSLGAMRKIKEEGVTFRSPIDGSKVFLSPEISMDIQHTLNSDIVMIFDECTPYPATHEEAQKSLQLSLRWAKRCKTQHHDELKNTNALFGIIQGGMYEDLRDESLNGLLEIGFDGYAIGGLSVGEPKEEMIKVLDYLPAKMPEDKPRYLMGVGKPEDIVEGIRRGVDMFDCVMPSRNARNGHYFVTDGLVRIRNAKYRHDQSPLDPHCDCYTCQNFTRAYLFHLEKCGEMLGSMLGTIHNLRYYQRFTEDIRNALDNGTFDAFVEDFYKRRGLEVPPCPQ

SEQ ID NO: 51123 - protein, 376 aa, unidentified
  source 1..376: note = Acinetobacter gandensis
  REGION 1..376: note = tr|A0A1A7R695|A0A1A7R695_9GAMM Queuine tRNA-ribosyltransferase OS=Acinetobacter gandensis; OX = 1443941 GN=tgt PE=3 SV=1
MKFEKLAQSGRARRGRLTLEHGVVETPMFMPVGTYGTVKGMLPRDIKEIKSQVILGNTFHLYLRPGLDVIREHGGLHQFMKWNNPILTDSGGFQVFSLGAMRKIKEDGVTFRSPIDGSKVFLSPEISMDIQHTLNSDIVMIFDECTPYPATHEEAQKSLQLSLRWAKRCKTQHHDVLKNRNALFGIIQGGMYEDLRDESLNGLKEIDFDGYAIGGLSVGEPKEEMIKVLDYLPAKMPEDKPRYLMGVGKPEDIVEAVRRGVDMFDCVMPTRNARNGHYFVTDGLVRIRNAKYRHDQSPLDPHCDCYTCTNFTKSYLFHLEKCGEMLGSMLGTIHNLRYYLRLTEAMRDALDNGTFDDFVEDFYHRRGMKVPPCPQD

SEQ ID NO: 51124 - protein, 377 aa, unidentified
  source 1..377: note = Acinetobacter genomosp.
  REGION 1..377: note = tr|A0A1V2UNS7|A0A1V2UNS7_9GAMM Queuine tRNA-ribosyltransferase OS=Acinetobacter genomosp. 33YU; OX = 1675530 GN=tgt PE=3 SV=1
MKFEKLGQSGRARRGRLTLEHGVVETPVFMPVGTYGTVKGMLPRDIEDIQAQIILGNTFHLYLRPGLEVIKQHGGLHDFIKWNKPILTDSGGFQVFSLGAMRKIKEEGVTFRSPIDGSKVFLSPEISMEIQHVLNSDIVMIFDECTPYPATHEEAQKSLQLSLRWAKRCKTHHHDELKNKNALFGIIQGGMYEDLRDESLNGLLEVGFDGYAIGGLSVGEPKEEMIKVLDYLPNKMPADKPRYLMGVGKPEDIVEAVRRGVDMFDCVMPTRNARNGHYFVTDGLVRIRNSKYRHDQGPLDPHCDCYTCKNFTRAYLFHLEKCGEMLASMLGTIHNLRYYQRLTEGMRDALDNGTFDEFVQDFYARRGLEVPPCPVDE

SEQ ID NO: 51125 - protein, 376 aa, Acinetobacter gerneri
  REGION 1..376: note = tr|N8Y642|N8Y642_9GAMM Queuine tRNA-ribosyltransferase OS=Acinetobacter gerneri DSM 14967 = CIP 107464 OX=1120926 GN=tgt PE=3 SV=1
MKFEKLGQSGRARRGRLTLEHGVVETPVFMPVGTYGTVKGMLPRDIEEIKAQIILGNTFHLYLRPGLEVIKEHGGLHEFIKWDKPILTDSGGFQVFSLGAMRKIKEEGVTFRSPIDGSKVFLSPEISMEIQKTLNSDIVMIFDECTPYPATHEEAEKSMQLSLRWAKRCKTAHHDTLQNKNALFGIIQGGMYEDLRDVSLKGLLDIDFDGYAIGGLSVGEPKEEMIKVLDYLPNKMPQDKPRYLMGVGKPEDIVEGIRRGVDMFDCVMPTRNARNGHYFVTDGLVRIRNSRYRHDQGPLDPHCDCYTCKNFTRAYLFHLEKCGEMLASMLGTIHNLRYYQRLTEDIRDALDNGTFDDFVADFYGRRGLEVPACPQD

SEQ ID NO: 51126 - protein, 376 aa, Acinetobacter guillouiae
  REGION 1..376: note = tr|A0A077KVA2|A0A077KVA2_ACIGI Queuine tRNA-ribosyltransferase OS=Acinetobacter guillouiae; OX = 106649 GN=tgt PE=3 SV=1
MKFEKLGQSGRARRGRLTLEHGVIETPVFMPVGTYGTVKGMLPRDIEDIKAQIILGNTFHLYLRPGLDVIREHGGLHEFMKWGKPILTDSGGFQVFSLGAMRKIKEEGVTFRSPIDGSKVFLSPEISMDIQHTLNSDIVMIFDECTPYPATHEEAQKSLQLSLRWAKRCKTQHHDVLKNRNALFGIIQGGMYEDLREESLNGLKEIDFDGFAIGGLSVGEPKEEMIKVLDYLPVKMPEDKPRYLMGVGKPEDIVEAIRRGVDMFDCVMPTRNARNGHYFVTDGLVRIRNSQYRHDQSPLDPHCDCYTCTNFTRAYLFHLEKCGEMLGSMLGTIHNLRYYQRFTQDIRDALDQGTFDEYVTDFYQRRGLEVPPCPAD

SEQ ID NO: 51127 - protein, 376 aa, Acinetobacter guillouiae
  REGION 1..376: note = tr|N8YG46|N8YG46_ACIGI Queuine tRNA-ribosyltransferase OS=Acinetobacter guillouiae NIPH 991 OX=1217656 GN=tgt PE=3 SV=1
MKFEKLGQSGRARRGRLTLEHGVIETPVFMPVGTYGTVKGMLPRDIEDIKAQIILGNTFHLYLRPGLDVIREHGGLHEFMKWGKPILTDSGGFQVFSLGAMRKIKEEGVTFRSPIDGSKVFLSPEISMDIQHTLNSDIVMIFDECTPYPATHEEAQKSLQLSLRWAKRCKTQHHDVLKNRNALFGIIQGGMYEDLREESLNGLKEIDFDGFAIGGLSVGEPKEEMIKVLDYLPAKMPEDKPRYLMGVGKPEDIVEAIRRGVDMFDCVMPTRNARNGHYFVTDGLVRIRNSQYRHDQSPLDPHCDCYTCTNFTRAYLFHLEKCGEMLGSMLGTIHNLRYYQRFTQDIRDALDQGTFDEYVTDFYQRRGLEVPPCPAD

SEQ ID NO: 51128 - protein, 376 aa, Acinetobacter gyllenbergii
  REGION 1..376: note = tr|V2T1U0|V2T1U0_9GAMM Queuine tRNA-ribosyltransferase OS=Acinetobacter gyllenbergii NIPH 230 OX=1217658 GN=tgt PE=3 SV=1
MKFEKLGQSGRARRGRLTLEHGVVETPVFMPVGTYGTVKGMLPRDIEEIQAQIILGNTFHLYLRPGLEVIKEHGGLHEFIQWDKPILTDSGGFQVFSLGAMRKIKEEGVTFRSPIDGSKVFLSPEISMEIQHVLNSDIVMIFDECTPYPATHEEAQKSLQLSLRWAKRCKTHHHDALNNKNALFGIIQGGMYEDLRDESLKGLLEVGFDGYAIGGLSVGEPKEEMIKVLDYLPNKMPQDKPRYLMGVGKPEDIVEAVRRGVDMFDCVMPTRNARNGHYFVTDGLVRIRNSKYRHDKGPLDPHCDCYTCKNFTRAYLYHLEKCGEMLASMLGTIHNLRYYQRLTQGMRDALDNGTFDEYVQDFYARRGLEVPACPED

SEQ ID NO: 51129 - protein, 376 aa, Acinetobacter gyllenbergii
  REGION 1..376: note = tr|A0A1B8U9A2|A0A1B8U9A2_9GAMM Queuine tRNA-ribosyltransferase OS=Acinetobacter gyllenbergii; OX = 134534 GN=tgt PE=3 SV=1
MKFEKLGQSGRARRGRLTLEHGVVETPVFMPVGTYGTVKGMLPRDIEEIQAQIILGNTFHLYLRPGLEVIKEHGGLHEFIQWDKPILTDSGGFQVFSLGAMRKIKEEGVTFRSPIDGSKVFLSPEISMEIQHVLNSDIVMIFDECTPYPATHEEAQKSLQLSLRWAKRCKTHHHDELNNKNALFGIIQGGMYEDLRDESLKGLLEVGFDGYAIGGLSVGEPKEEMIKVLDYLPNKMPQDKPRYLMGVGKPEDIVEAVRRGVDMFDCVMPTRNARNGHYFVTDGLVRIRNSKYRHDKGPLDPHCDCYTCKNFTRAYLYHLEKCGEMLASMLGTIHNLRYYQRLTQGMRDALDNGTFDEYVQDFYARRGLEVPACPED

SEQ ID NO: 51130 - protein, 379 aa, Acinetobacter haemolyticus
  REGION 1..379: note = tr|D4XTF7|D4XTF7_ACIHA Queuine tRNA-ribosyltransferase OS=Acinetobacter haemolyticus ATCC 19194 OX=707232 GN=tgt PE=3 SV=1
MDSVMKFEKLGQSGRARRGRLTLEHGVVETPVFMPVGTYGTVKGMLPRDIEEIQAQIILGNTFHLYLRPGLEVIKEHGGLHEFIQWDKPILTDSGGFQVFSLGAMRKIKEEGVTFRSPIDGSKVFLSPEISMEIQHVLNSDIVMIFDECTPYPATHEEAQKSLQLSLRWAKRCKTHHHDELKNKNALFGIIQGGMYEDLRDESLKGLLEVGFDGYAIGGLSVGEPKEEMIKVLDYLPNKMPEDKPRYLMGVGKPEDIVEAVRRGVDMFDCVMPTRNARNGHYFVTDGLVRIRNSKYRHDKGPLDPYCDCYTCKNFTRAYLYHLEKCGEMLASMLGTIHNLRYYQRLTQGMRDALDNGTFDAYVEDFYARRGLDVPPCPN

SEQ ID NO: 51131 - protein, 375 aa, Acinetobacter haemolyticus
  REGION 1..375: note = tr|N9FFL7|N9FFL7_ACIHA Queuine tRNA-ribosyltransferase OS=Acinetobacter haemolyticus NIPH 261 OX=1217986 GN=tgt PE=3 SV=1
MKFEKLGQSGRARRGRLTLEHGVVETPVFMPVGTYGTVKGMLPRDIEEIQAQIILGNTFHLYLRPGLEVIKEHGGLHEFIQWDKPILTDSGGFQVFSLGAMRKIKEEGVTFRSPIDGSKVFLSPEISMEIQHVLNSDIVMIFDECTPYPATHEEAQKSLQLSLRWAKRCKTHHHDELKNKNALFGIIQGGMYEDLRDESLKGLLEVGFDGYAIGGLSVGEPKEEMIKVLDYLPNKMPEDKPRYLMGVGKPEDIVEAVRRGVDMFDCVMPTRNARNGHYFVTDGLVRIRNSKYRHDKGPLDPHCDCYTCKNFTRAYLYHLEKCGEMLASMLGTIHNLRYYQRLTQGMRDALDNGTFDAYVEDFYARRGLDVPPCPN

SEQ ID NO: 51132 - protein, 375 aa, unidentified
  source 1..375: note = Acinetobacter halotolerans
  REGION 1..375: note = tr|A0A4Q6X7F7|A0A4Q6X7F7_9GAMM Queuine tRNA-ribosyltransferase OS=Acinetobacter halotolerans; OX = 1752076 GN=tgt PE=3 SV=1
MKFEKLGQSGRARRGRLTLEHGVVETPVFMPVGTYGTVKGMLPRDLEEIQAQIILGNTFHLYLRPGLEVIKEHGGLHEFIKWDKPILTDSGGFQVFSLGAMRKIKEEGVTFRSPIDGSKVFLSPEISMEIQQVLNSDIVMIFDECTPYPATHEEAQKSLQLSLRWAKRCKTHHHDELKNKNALFGIIQGGMYEDLRDESLTGLLDIGFDGYAIGGLSVGEPKDEMIKVLDYLPNKMPEDKPRYLMGVGKPEDIVEAVRRGVDMFDCVMPTRNARNGHYFVTDGLVRIRNSRYRHDQGPLDPHCDCYTCKNFSRAYLYHLEKCGEMLASMLGTIHNLRYYQRLTQGMRDALDNDTFDAYVQDFYARRGLEVPPCPN

SEQ ID NO: 51133 - protein, 376 aa, unidentified
  source 1..376: note = Acinetobacter idrijaensis
  REGION 1..376: note = tr|A0A098YIE1|A0A098YIE1_9GAMM Queuine tRNA-ribosyltransferase OS=Acinetobacter idrijaensis; OX = 1507807 GN=tgt PE=3 SV=1
MKFEKLGQSGRARRGRLTLEHGVVETPMFMPVGTYGTVKGLLPRDIKEIKSQVILGNTFHLYLRPGLDVIREHGGLHGFMKWNSPILTDSGGFQVFSLGAMRKIKEEGVTFRSPIDGSKVFLSPEISMDIQHTLNSDIVMIFDECTPYPATHEEAQKSLQLSLRWAKRCKTQHHDVLKNRNALFGIIQGGMYEDLRDESLKGLLEIDFDGYAIGGLSVGEPKEEMIKVLDYLPEKMPADKPRYLMGVGKPEDIVEAVRRGVDMFDCVMPTRNARNGHYFVTDGLVRIRNSKYRHDQSPLDPHCDCYTCQNFTRAYLFHLEKCGEMLGSMLGTIHNLRYYLRLTETMRDALDNGTFDEFVHDFYARRGLEVPPCPQD

SEQ ID NO: 51134 - protein, 376 aa, unidentified
  source 1..376: note = Acinetobacter indicus
  REGION 1..376: note = tr|V2U017|V2U017_9GAMM Queuine tRNA-ribosyltransferase OS=Acinetobacter indicus CIP 110367 OX=1341679 GN=tgt PE=3 SV=1
MKFEKLGQSGRARRGRLTLEHGVVETPVFMPVGTYGTVKGMLPRDIEDIQAQIILGNTFHLYLRPGLDVIKEHGGLHEFMKWDKPILTDSGGFQVFSLGAMRKIKEEGVTFRSPIDGSKVFLSPEISMEIQKTLNSDIVMIFDECTPYPATHEEAQKSLQLSLRWAKRCKTHHHDELQNSNALFGIIQGGMYEDLRDESLKGLLEIGFDGYAIGGLSVGEPKEEMIKVLDYLPNKMPEDKPRYLMGVGKPEDIVEGIRRGVDMFDCVMPTRNARNGHYFVTDGLVRIRNSKYRHDQSPLDPHCDCYTCKNFTRAYLFHLEKCGEMLGSMLGTIHNLRYYQRFTQDIRNALDNDTFDDFVQDFYARRGLDVPPCPQD

SEQ ID NO: 51135 - protein, 376 aa, unidentified
  source 1..376: note = Acinetobacter indicus
  REGION 1..376: note = tr|A0A437IZS7|A0A437IZS7_9GAMM Queuine tRNA-ribosyltransferase OS=Acinetobacter indicus OX=756892; GN = tgt PE=3 SV=1
MKFEKLGQSGRARRGRLTLEHGVVETPVFMPVGTYGTVKGMLPRDIEDIQAQIILGNTFHLYLRPGLDVIKEHGGLHEFMKWDKPILTDSGGFQVFSLGAMRKIKEEGVTFRSPIDGSKVFLSPEISMEIQKVLNSDIVMIFDECTPYPATHEEAQKSLQLSLRWAKRCKEHHHNVLENKNALFGIIQGGMYEDLRDESLNGLLDVGFDGYAIGGLSVGEPKEEMIKVLDYLPNKMPEDKPRYLMGVGKPEDIVEGIRRGVDMFDCVMPTRNARNGHYFVTDGLVRIRNSKYRHDQSPLDPHCDCYTCKNFTRAYLFHLEKCGEMLGSMLGTIHNLRYYQRFTQDIRNALDNGTFDDFVQDFYARRGLDVPPCPQD

SEQ ID NO: 51136 - protein, 376 aa, Acinetobacter johnsonii
  REGION 1..376: note = tr|A0A0U3SZH9|A0A0U3SZH9_ACIJO Queuine tRNA-ribosyltransferase OS=Acinetobacter johnsonii XBB1; OX = 1242245 GN=tgt PE=3 SV=1
MKFEKLGQSGRARRGRLTLEHGVVETPVFMPVGTYGTVKGMLPRDIEDIKAQIILGNTFHLYLRPGLEVIKEHGGLHKFMKWDKPILTDSGGFQVFSLGAMRKIKEDGVTFRSPIDGSKVFLSPEISMDIQHTLNSDIVMIFDECTPYPATHEEAQKSLQLSLRWAKRCKTQHHDVLENKNALFGIIQGGMYEDLRDESLKGLLEVGFDGYAIGGLSVGEPKEEMIKVLDYLPEKMPADKPRYLMGVGKPEDIVEGIRRGVDMFDCVMPTRNARNGHYFVTDGLVRIRNSKYRHDQSPLDPHCDCYTCTNFTRAYLFHLEKCGEMLGSMLGTIHNLRYYQRFTQDIRDALDNDRFDAFVEDFYARRGLEVPPCPQD

SEQ ID NO: 51137 - protein, 376 aa, Acinetobacter johnsonii; identical to SEQ ID NO: 51136
  REGION 1..376: note = tr|A0A0W8GXY0|A0A0W8GXY0_ACIJO Queuine tRNA-ribosyltransferase OS=Acinetobacter johnsonii; OX = 40214 GN=tgt PE=3 SV=1

SEQ ID NO: 51138 - protein, 376 aa, Acinetobacter junii
  REGION 1..376: note = tr|D0SL62|D0SL62_ACIJU Queuine tRNA-ribosyltransferase OS=Acinetobacter junii SH205; OX = 575587 GN=tgt PE=3 SV=1
MQFEKLGQSGRARRGRLTLEHGVVETPVFMPVGTYGTVKGMLPRDIEEIQAQIILGNTFHLYLRPGLEVIKEHGGLHEFIQWDKPILTDSGGFQVFSLGAMRKIKEEGVTFRSPIDGSKVFLSPEISMEIQHVLNSDIVMIFDECTPYPATHEEAQKSLQLSLRWAKRCKTHHHDELKNKNALFGIIQGGMYEDLRDESLAGLLEVGFDGYAIGGLSVGEPKEEMIKVLDYLPNKMPQDKPRYLMGVGKPEDIVEAVRRGVDMFDCVMPTRNARNGHYFVTDGLVRIRNSKYRHDKGPLDPHCDCYTCKNFTRAYLYHLEKCGEMLASMLGTIHNLRYYQRLTQGMRDALDNGTFDEYVQDFYARRGLEVPPCPED

SEQ ID NO: 51139 - protein, 376 aa, Acinetobacter junii
  REGION 1..376: note = tr|A0A365PK91|A0A365PK91_ACIJU Queuine tRNA-ribosyltransferase OS=Acinetobacter junii OX=40215; GN = tgt PE=3 SV=1
MQFEKLGQSGRARRGRLTLEHGVVETPVFMPVGTYGTVKGMLPRDIEEIQAQIILGNTFHLYLRPGLEVIKEHGGLHEFIQWDKPILTDSGGFQVFSLGAMRKIKEEGVTFRSPIDGSKVFLSPEISMEIQHVLNSDIVMIFDECTPYPATHEEAQKSLQLSLRWAKRCKTHHHDELKNKNALFGIIQGGMYEDLRDESLAGLLEVGFDGYAIGGLSVGEPKEEMIKVLDYLPNKMPQDKPRYLMGVGKPEDIVEAVRRGVDMFDCVMPTRNARNGHYFVTDGLVRIRNSKYRHDKGPLDPHCDCYTCKNFTRAYLYHLEKCGEMLASMLGTIHNLRYYQRLTQGLRDALDNGTFDEYVQDFYARRGLEVPPCPED

SEQ ID NO: 51140 - protein, 376 aa, unidentified
  source 1..376: note = Acinetobacter kookii
  REGION 1..376: note = tr|A0A1G6N1F0|A0A1G6N1F0_9GAMM Queuine tRNA-ribosyltransferase OS=Acinetobacter kookii OX=1226327; GN = tgt PE=3 SV=1
MKFEKLGQSGRARRGRLTLEHGVVETPVFMPVGTYGTVKGMLPRDVEDIKAQIILGNTFHLYLRPGLDVIREHGGLHEFMKWNKPILTDSGGFQVFSLGAMRKIKEEGVTFRSPIDGSKVFLSPEISMDIQHTLNSDIVMIFDECTPYPATREEAQKSLQLSLRWAKRCKTHHHDVLKNKNALFGIIQGGMYEDLRDESLAGLKEIDFDGFAIGGLSVGEPKEEMIKILDHLPPKMPENKPRYLMGVGKPEDIVEGIRRGVDMFDCVMPTRNARNGHYFVTDGLVRIRNAKYRHDQRPLDPDCDCYTCQNFTRAYLFHLEKCGEMLGSMLGTIHNLRYYQRFTQDIRDALDNGTFDEYVQDFYARRGLEVPPCPED

SEQ ID NO: 51141 - protein, 376 aa, unidentified
  source 1..376: note = Acinetobacter kyonggiensis
  REGION 1..376: note = tr|A0A1H3JXM0|A0A1H3JXM0_9GAMM Queuine tRNA-ribosyltransferase OS=Acinetobacter kyonggiensis; OX = 595670 GN=tgt PE=3 SV=1
MKFEKLGQSGRARRGRLTLEHGVIETPVFMPVGTYGTVKGMLPRDIEDIKAQIILGNTFHLYLRPGLDVIREHGGLHEFMKWNKPILTDSGGFQVFSLGAMRKIKEDGVTFRSPIDGSKVFLSPEISMDIQHTLNSDIVMIFDECTPYPATHEEAQKSLQLSLRWAKRCKTQHHDVLKNRNALFGIIQGGMYEDLRNESLNGLKEIDFDGFAIGGLSVGEPKEEMIKVLDYLPAQMPEDKPRYLMGVGKPEDIVEAIRRGVDMFDCVMPTRNARNGHYFVTDGLVRIRNAKYRHDQSPLDSECDCYTCQNFTRAYLFHLEKCGEMLGSMLGTIHNLRYYQRFTQDIRDALDNGTFDAYVHDFYARRGLEVPPCPED

SEQ ID NO: 51142 - protein, 377 aa, unidentified
  source 1..377: note = Acinetobacter lactucae
  REGION 1..377: note = tr|A0A151YM24|A0A151YM24_9GAMM Queuine tRNA-ribosyltransferase OS=Acinetobacter lactucae; OX = 1785128 GN=tgt PE=3 SV=1
MKFEKLGQSGRARRGRLTLEHGVVETPVFMPVGTYGTVKGMLPRDIEDIQAQIILGNTFHLYLRPGLEVIKEHGGLHDFIKWNKPILTDSGGFQVFSLGAMRKIKEEGVTFRSPIDGSKVFLSPEISMEIQQVLNSDIVMIFDECTPYPATHEEAQKSLQLSLRWAKRCKTHHHDELKNHNALFGIIQGGMYEDLRDESLNGLLEIGFDGYAIGGLSVGEPKEEMIKVLDYLPNKMPHDKPRYLMGVGKPEDIVEAVRRGVDMFDCVMPTRNARNGHYFVTDGLVRIRNSKYRHDQSPLDPHCDCYTCKNFTRAYLFHLEKCGEMLASMLGTIHNLRYYQRLTEGMRDALDNGTFDEFVQDFYARRGLEVPPCPVDE

SEQ ID NO: 51143 - protein, 375 aa, unidentified
  source 1..375: note = Acinetobacter larvae
  REGION 1..375: note = tr|A0A1B2M258|A0A1B2M258_9GAMM Queuine tRNA-ribosyltransferase OS=Acinetobacter larvae OX=1789224; GN = tgt PE=3 SV=1
MKFEKLAQSGRARRGRLTLEHGVVETPVFMPVGTYGTVKGMLPRDIEEIQAQIILGNTFHLYLRPGLDVIKAHGGLHEFIKWDKPILTDSGGFQVFSLGAMRKIKEEGVTFRSPIDGSKVFLSPEISMEIQKVLNSDIVMIFDECTPYPATHQQAQQSLQLSLRWAKRCKTAHTENNNPNALFGIIQGGMYEDLRDESLNGLLEIGFDGYAIGGLSVGEPKEEMLRVLDFLPNKMPEDKPRYLMGVGKPEDIVEGIRRGVDMFDCVMPTRNARNGHYFVSDGLVRIRNSRYRFDQGPLDPHCDCYTCKNFSRAYLFHLEKCGEMLGSMLGTIHNLRYYQRFTQDIRDALEEDRFDAFVQDFYQRRGLEVPPCPED

SEQ ID NO: 51144 - protein, 376 aa, Acinetobacter lwoffii; identical to SEQ ID NO: 51133
  REGION 1..376: note = tr|A0A2K8UNZ0|A0A2K8UNZ0_ACILW Queuine tRNA-ribosyltransferase OS=Acinetobacter lwoffii OX=28090; GN = tgt PE=3 SV=1

SEQ ID NO: 51145 - protein, 376 aa, Acinetobacter lwoffii; identical to SEQ ID NO: 51133
  REGION 1..376: note = tr|N9HSR7|N9HSR7_ACILW Queuine tRNA-ribosyltransferase OS=Acinetobacter lwoffii ATCC 9957 = CIP 70.31 OX=1311804 GN=tgt PE=3 SV=1

SEQ ID NO: 51146 - protein, 378 aa, unidentified
  source 1..378: note = Acinetobacter marinus
  REGION 1..378: note = tr|A0A1G6N802|A0A1G6N802_9GAMM Queuine tRNA-ribosyltransferase OS=Acinetobacter marinus OX=281375; GN = tgt PE=3 SV=1
MKFEKLNQSGRARRARLTLNHGQVETPAFMPVGTYGTVKGMLPRDIEDIGAHIILGNTFHLYLRPGLEVIKEHGGLHEFVKWDKPILTDSGGFQVFSLGEMRKIKEEGVTFRSPIDGSKVFLSPEISMEIQQVLNSDIVMIFDECTPYPATHKQAQDSLQLSLRWAKRCKTAHTENGNPNALFGIIQGGMYEDLRDESLQGLLEIDFDGYAIGGLSVGEPKEEMIKVLDYLPAKMPEDKPRYLMGVGKPEDIVEAVRRGVDMFDCVMPTRNARNAHYFVTDGVVRIRNSQYRHDQQPLDPHCDCYTCKNFTRAYLFHLEKCGEMLGAMLGTIHNLRYYQRLMQGIRDALDAGTFDAYVQDFYQRRGLEVPECPHDQIA

SEQ ID NO: 51147 - protein, 376 aa, unidentified
  source 1..376: note = Acinetobacter nectaris
  REGION 1..376: note = tr|V2TTP6|V2TTP6_9GAMM Queuine tRNA-ribosyltransferase OS=Acinetobacter nectaris CIP 110549 OX=1392540 GN=tgt PE=3 SV=1
MKFEKLGQSGRARRGRLTLEHGVVETPVFMPVGTYGTVKGMLPRDIEDINAQIILGNTFHLYLRPGLEVIKEHGGLHEFMKWNKPILTDSGGFQVFSLGAMRKIKEEGVTFRSPIDGSKVFLSPEISMEIQQTLNSDIVMIFDECTPYPATHEQAQQSLQLSLRWAKRCKTAHTNNGNPNALFGIIQGGMYEDLRDESLKGLLDIGFDGYAIGGLSVGEPKDEMIKVLDYLPNKMPEDKPRYLMGVGKPEDIVEAVRRGVDMFDCVMPTRNARNGHFFVTDGLVRIRNSKYRHDQGPLDPHCDCYTCKNFTRAYLYHLEKCGEMLASMLGTIHNLRYYLRLTETMRHALDEGTFDAFVEDFYTRRGLEVPPCPADE

SEQ ID NO: 51148 - protein, 377 aa, Acinetobacter nosocomialis
  REGION 1..377: note = tr|A0A0E2GCZ8|A0A0E2GCZ8_ACINO Queuine tRNA-ribosyltransferase OS=Acinetobacter nosocomialis NIPH 386 OX=1217985 GN=tgt PE=3 SV=1
MKFEKLGQSGRARRGRLTLEHGVVETPVFMPVGTYGTVKGMLPRDIEDIQAQIILGNTFHLYLRPGLEVIKQHGGLHDFIKWNKPILTDSGGFQVFSLGAMRKIKEEGVTFRSPIDGSKVFLSPEISMEIQHVLNSDIVMIFDECTPYPATHEEAQKSLQLSLRWAKRCKTHHHDELKNKNALFGIIQGGMYEDLRDESLNGLLEVGFDGYAIGGLSVGEPKEEMIKVLDYLPNKMPHDKPRYLMGVGKPEDIVEAVRRGVDMFDCVMPTRNARNGHYFVTDGLVRIRNSKYRHDQGPLDPHCDCYTCKNFTRAYLFHLEKCGEMLASMLGTIHNLRYYQRLTEGMRDALDNGTFDEFVQDFYARRGLEVPPCPVDE

SEQ ID NO: 51149 - protein, 377 aa, Acinetobacter nosocomialis
  REGION 1..377: note = tr|A0A1Y5NM32|A0A1Y5NM32_ACINO Queuine tRNA-ribosyltransferase OS=Acinetobacter nosocomialis P020; OX = 1285584 GN=tgt PE=3 SV=1
MKFEKLGQSGRARRGRLTLEHGVVETPVFMPVGTYGTVKGMLPRDIEDIQAQIILGNTFHLYLRPGLEVIKQHGGLHDFIKWNKPILTDSGGFQVFSLGAMRKIKEEGVTFRSPIDGSKVFLSPEISMEIQHVLNSDIVMIFDECTPYPATHEEAQKSLQLSLRWAKRCKTHHHDELKNKNALFGIIQGGMYEDLRDESLNGLLEVGFDGYAIGGLSVGEPKEEMIKVLDYLPNKMPHDKPRYLMGVGKPEDIVEAVRRGVDMFDCVMPTRNARNGHYFVTDGLVRIRNSKYRHDQGPLDPHCDCYTCKNFTRAYLFHLEKCGEMLASMLGTIHNLRYYQRLTEGMRDALDNDTFDEFVQDFYARRGLEVPPCPIDE

SEQ ID NO: 51150 - protein, 377 aa, unidentified; identical to SEQ ID NO: 51113
  source 1..377: note = Acinetobacter oleivorans
  REGION 1..377: note = tr|A0A0B2UCX5|A0A0B2UCX5_9GAMM Queuine tRNA-ribosyltransferase OS=Acinetobacter oleivorans; OX = 1148157 GN=tgt PE=3 SV=1

SEQ ID NO: 51151 - protein, 377 aa, unidentified; identical to SEQ ID NO: 51113
  source 1..377: note = Acinetobacter oleivorans
  REGION 1..377: note = tr|D8JNN8|D8JNN8_ACISD Queuine tRNA-ribosyltransferase OS=Acinetobacter oleivorans (strain JCM 16667 / KCTC 23045 / DR1) OX=436717 GN=tgt; PE = 3 SV=1

SEQ ID NO: 51152 - protein, 376 aa, Acinetobacter parvus
  REGION 1..376: note = tr|N8R9X8|N8R9X8_9GAMM Queuine tRNA-ribosyltransferase OS=Acinetobacter parvus NIPH 1103; OX = 1217671 GN=tgt PE=3 SV=1
MKFEKLGQSGRARRGRLTLEHGVVETPVFMPVGTYGTVKGMLPRDIEEIQAQIILGNTFHLYLRPGLEVIKEHGGLHQFIQWDKPILTDSGGFQVFSLGAMRKIKEEGVTFRSPIDGSKVFLSPEISMEIQSVLNSDIVMIFDECTPYPATHEEAQKSLQLSLRWAKRCKTHHHDELKNKNALFGIIQGGMYEDLRDESLNGLLEVGFDGYAIGGLSVGEPKEEMIKVLDYLPNKMPQDKPRYLMGVGKPEDIVEAVRRGVDMFDCVMPTRNARNGHYFVTDGLVRIRNSKYRHDKGPLDPYCDCYTCKNFTRAYLYHLEKCGEMLASMLGTIHNLRYYQRLTQGMRDALDNGTFDDYVQDFYARRGLEVPPCPED

SEQ ID NO: 51153 - protein, 376 aa, Acinetobacter parvus
  REGION 1..376: note = tr|N8QA94|N8QA94_9GAMM Queuine tRNA-ribosyltransferase OS=Acinetobacter parvus DSM 16617 = CIP 108168 OX=981333 GN=tgt PE=3 SV=1
MKFEKLGQSGRARRGRLTLEHGVVETPVFMPVGTYGTVKGMLPRDIEEIQAQIILGNTFHLYLRPGLEVIKEHGGLHQFIQWDKPILTDSGGFQVFSLGAMRKIKEEGVTFRSPIDGSKVFLSPEISMEIQSVLNSDIVMIFDECTPYPATHEEAQKSLQLSLRWAKRCKTHHHDELNNKNALFGIIQGGMYEDLRDESLNGLLEVGFDGYAIGGLSVGEPKEEMIKVLDYLPNKMPQDKPRYLMGVGKPEDIVEAVRRGVDMFDCVMPTRNARNGHYFVTDGLVRIRNSKYRHDKGPLDPHCDCYTCKNFTRAYLYHLEKCGEMLASMLGTIHNLRYYQRLTQGMRDALDNGTFDDYVQDFYARRGLEVPPCPED

SEQ ID NO: 51154 - protein, 377 aa, unidentified
  source 1..377: note = Acinetobacter piscicola
  REGION 1..377: note = tr|A0A4Q4GWH2|A0A4Q4GWH2_9GAMM Queuine tRNA-ribosyltransferase OS=Acinetobacter piscicola; OX = 2006115 GN=tgt PE=3 SV=1
MKFEKLGQSGRARRGRLTLEHGVVETPVFMPVGTYGTVKGMLPRDIEDIQAQIILGNTFHLYLRPGLDVIREHGGLHEFMKWGKPILTDSGGFQVFSLGAMRKIKEEGVTFRSPIDGSKVFLSPEISMDIQHTLNSDIVMIFDECTPYPATHEEAQKSLQLSLRWAKRCKTQHHDVLKNKNALFGIIQGGMYEDLREESLNGLKEIDFDGFAIGGLSVGEPKEEMIKVLDYLPAKMPEDKPRYLMGVGKPEDIVEAIRRGVDMFDCVMPTRNARNGHYFVTDGLVRIRNAKYRHDQSPLDPHCDCYTCTNFTRAYLFHLEKCGEMLGSMLGTIHNLRYYQRFTQDIRDALDNGTFDEFVADFYQRRGLEVPPCPVDE

SEQ ID NO: 51155 - protein, 377 aa, Acinetobacter pittii; identical to SEQ ID NO: 51142
  REGION 1..377: note = tr|R8YBA7|R8YBA7_ACIPI Queuine tRNA-ribosyltransferase OS=Acinetobacter pittii ANC 4050; OX = 1217691 GN=tgt PE=3 SV=1

SEQ ID NO: 51156 - protein, 377 aa, Acinetobacter pittii; identical to SEQ ID NO: 51142
  REGION 1..377: note = tr|A0A0M3BW06|A0A0M3BW06_ACIPI Queuine tRNA-ribosyltransferase OS=Acinetobacter pittii OX=48296; GN = tgt PE=3 SV=1

SEQ ID NO: 51157 - protein, 378 aa, unidentified
  source 1..378: note = Acinetobacter populi
  REGION 1..378: note = tr|A0A1Z9Z2V1|A0A1Z9Z2V1_9GAMM Queuine tRNA-ribosyltransferase OS=Acinetobacter populi OX=1582270; GN = tgt PE=3 SV=1
MKFEKLNQSGRARRGRLTLNHGQVETPAFMPVGTYGTVKGMLPRDIEEIGAHIILGNTFHLYLRPGLDVIKEHGGLHQFVKWDKPILTDSGGFQVFSLGEMRQIKEEGVTFRSPIDGAKVFLSPEVSMEIQRVLNSDIVMIFDECTPYPATHEQAQKSLQLSLRWAKRCKVAHTENGNPNALFGIIQGGMYEDLRDESLNGLLEIGFDGYAIGGLSVGEPKEEMIKVLDYLPNKMPADKPRYLMGVGKPEDIVEAVRRGVDMFDCVMPTRNARNAHYFVTDGVVRIRNSQYRHDQQPLDPHCDCYTCKNFTRAYLFHLEKCGEMLGAMLGTIHNLRYYQRLMQAIRDALDAGTFEQFVQDFYQRRGLEVPVCDTESFA

SEQ ID NO: 51158 - protein, 376 aa, unidentified
  source 1..376: note = Acinetobacter pragensis
  REGION 1..376: note = tr|A0A151Y118|A0A151Y118_9GAMM Queuine tRNA-ribosyltransferase OS=Acinetobacter pragensis; OX = 1806892 GN=tgt PE=3 SV=1
MKFEKLAQSGRARRGRLTLEHGVVETPMFMPVGTYGTVKGMLPRDIKEIKSQVILGNTFHLYLRPGLDVIREHGGLHQFMKWDKPILTDSGGFQVFSLGAMRKIKEDGVTFRSPIDGSKVFLSPEISMDIQHTLNSDIVMIFDECTPYPATHEEAQKSLQLSLRWAKRCKTQHHDVLKNRNALFGIIQGGMYEDLRDESLNGLKEIDFDGYAIGGLSVGEPKEEMIKVLDYLPAKMPEDKPRYLMGVGKPEDIVEAVRRGVDMFDCVMPTRNARNGHYFVTDGLVRIRNAKYRHDQSPLDADCDCYTCQNVTRSYLFHLEKCGEMLGAMLGTIHNLRYYLRLTEAMRDALDNGTFDEFVQDFYARRGLEVPPCPQD

SEQ ID NO: 51159 - protein, 376 aa, unidentified; identical to SEQ ID NO: 51128
  source 1..376: note = Acinetobacter proteolyticus
  REGION 1..376: note = tr|A0A1E7R4V0|A0A1E7R4V0_9GAMM Queuine tRNA-ribosyltransferase OS=Acinetobacter proteolyticus; OX = 1776741 GN=tgt PE=3 SV=1

SEQ ID NO: 51160 - protein, 378 aa, unidentified
  source 1..378: note = Acinetobacter puyangensis
  REGION 1..378: note = tr|A0A240E3A8|A0A240E3A8_9GAMM Queuine tRNA-ribosyltransferase OS=Acinetobacter puyangensis; OX = 1096779 GN=tgt PE=3 SV=1
MKFEKLNQSGRARRGRLTLNHGQVETPAFMPVGTYGTVKGMLPRDIEEIGAHIILGNTFHLYLRPGLDVIKEHGGLHQFVKWDKPILTDSGGFQVFSLGEMRQIKEEGVTFRSPIDGAKVFLSPEVSMEIQRVLNSDIVMIFDECTPYPATHEQAQKSLQLSLRWAKRCKVAHTENGNPNALFGIIQGGMYEDLRDESLKGLLDIDFDGYAIGGLSVGEPKEEMIKVLDYLPNKMPADKPRYLMGVGKPEDIVEAVRRGVDMFDCVMPTRNARNAHYFVSDGVVRIRNSQYRHDQQPLDPHCDCYTCKNFTRAYLFHLEKCGEMLGAMLGTIHNLRYYQRLMQGIRDALDAGTFDQYVQDFYQRRGLEVPVCDAESFA

SEQ ID NO: 51161 - protein, 378 aa, unidentified
  source 1..378: note = Acinetobacter qingfengensis
  REGION 1..378: note = tr|A0A1E7R372|A0A1E7R372_9GAMM Queuine tRNA-ribosyltransferase OS=Acinetobacter qingfengensis; OX = 1262585 GN=tgt PE=3 SV=1
MKFEKLNQSGRARRGRLTLNHGQVETPAFMPVGTYGTVKGMLPRDIEDIGAHIILGNTFHLYLRPGLEVIKEHGGLHEFVKWDKPILTDSGGFQVFSLGEMRKITEDGVTFRSPIDGSKIFLSPEISMDIQRVLNSDIVMIFDECTPYPATHAEAEKSMQLSLRWAKRCKTQHDENGNPNALFGIIQGSMYEDLREISLNGLQEIGFDGYAIGGLSVGEPKEEMIKVLDYLPAKMPAEKPRYLMGVGKPEDIVEAVRRGVDMFDCVMPTRNARNAHYFVTDGVVRIRNSQYRHDQQALDPHCDCYTCKNFTRAYLFHLEKCGEMLGAMLGTIHNLRYYQRLMQGIRDALDAGAFEAFVQDFYQRRGQEVPACPIDDVE

SEQ ID NO: 51162 - protein, 376 aa, Acinetobacter radioresistens
  REGION 1..376: note = tr|A0A3F3GNY3|A0A3F3GNY3_ACIRA Queuine tRNA-ribosyltransferase OS=Acinetobacter radioresistens NIPH 2130 OX=1217674 GN=tgt PE=3 SV=1
MKFEKLGQSGRARRGRLTLEHGVVETPVFMPVGTYGTVKGMLPRDIEEIQAQIILGNTFHLYLRPGLDVVKEHGGLHEFIKWDKPILTDSGGFQVFSLGAMRKIKEEGVTFRSPIDGSKVFLSPEVSMEIQKVLNSDIVMIFDECTPYPATHEEAQKSLQLSLRWAKRCKTHHHEVLDNKNALFGIIQGGMYEDLRDESLEGLLEIGFDGYAIGGLSVGEPKEEMIKVLDYLPNKMPHDKPRYLMGVGKPEDIVEGIRRGVDMFDCVMPTRNARNGHYFVTDGLVRIRNSKYRHDQSPLDPHCDCYTCKNFTRAYLFHLEKCGEMLGSMLGTIHNLRYYQRFTQDIRDALDNGTFEAFVEDFYTRRGMEVPPCPED

SEQ ID NO: 51163 - protein, 376 aa, Acinetobacter radioresistens
  REGION 1..376: note = tr|A0A2T1J374|A0A2T1J374_ACIRA Queuine tRNA-ribosyltransferase OS=Acinetobacter radioresistens; OX = 40216 GN=tgt PE=3 SV=1
MKFEKLGQSGRARRGRLTLEHGVVETPVFMPVGTYGTVKGMLPRDIEEIQAQIILGNTFHLYLRPGLDVVKEHGGLHEFIKWDKPILTDSGGFQVFSLGAMRKIKEEGVTFRSPIDGSKVFLSPEVSMEIQKVLNSDIVMIFDECTPYPATHEEAQKSLQLSLRWAKRCKTHHHEVLDNKNALFGIIQGGMYEDLRDESLEGLLEIGFDGYAIGGLSVGEPKEEMIKVLDYLPNRMPHDKPRYLMGVGKPEDIVEGIRRGVDMFDCVMPTRNARNGHYFVTDGLVRIRNSKYRHDQSSLDPHCDCYTCKNFTRAYLFHLEKCGEMLGSMLGTIHNLRYYQRFTQDIRDALDNGTFEAFVEDFYTRRGMEVPPCPED

SEQ ID NO: 51164 - protein, 376 aa, Acinetobacter rudis
  REGION 1..376: note = tr|S3NTY6|S3NTY6_9GAMM Queuine tRNA-ribosyltransferase OS=Acinetobacter rudis CIP 110305; OX = 421052 GN=tgt PE=3 SV=1
MKFEKLAQSGRARRGRLTLEHGVVETPVFMPVGTYGTVKGMLPRDIEEIQAQIILGNTFHLYLRPGLEVIKEHGGLHEFIKWDKPILTDSGGFQVFSLGAMRKIKEEGVTFRSPIDGSKVFLSPEISMEIQRVLNSDIVMIFDECTPYPATHEEAQKSLQLSLRWAKRCKTAHEENGNPNALFGIIQGGMYEDLRDESLTGLLEVGFDGYAIGGLSVGEPKEEMLKVLDYLPAKMPADKPRYLMGVGKPEDIVEAIRRGVDMFDCVMPTRNARNGHYFVTDGLVRIRNSQYRHDQQPLDPHCDCYTCKNFTRAYLFHLEKCGEMLGSMLGTIHNLRYYQRFTQQIRDALDNGTFDDFVTDFYQRRGLEVPPCPEDD

SEQ ID NO: 51165 - protein, 376 aa, Acinetobacter schindleri
  REGION 1..376: note = tr|N9ANA2|N9ANA2_9GAMM Queuine tRNA-ribosyltransferase OS=Acinetobacter schindleri CIP 107287 OX=1217988 GN=tgt PE=3 SV=1
MKFEKLAQSGRARRGRLTLEHGVVETPMFMPVGTYGTVKGMLPRDIKEIKSQVILGNTFHLYLRPGLDVIREHGGLHQFMKWNNPILTDSGGFQVFSLGAMRKIKEEGVTFRSPIDGSKVFLSPEISMDIQHTLNSDIVMIFDECTPYPATHEEAQKSLQLSLRWAKRCKTQHHDVLKNRNALFGIIQGGMYEDLRDESLKGLLEIGFDGYAIGGLSVGEPKEEMIKVLDYLPEKMPEDKPRYLMGVGKPEDIVEAVRRGVDMFDCVMPTRNARNGHYFVTGGLVRIRNAKYRHDQSPLDPACDCYTCQNFSRAYLFHLEKCGEMLGSMLGTIHNLRYYLRLTEAMREALDQGTFEQFVEDFYARRGMQVPPCPED

SEQ ID NO: 51166 - protein, 376 aa, Acinetobacter schindleri; identical to SEQ ID NO: 51165
  REGION 1..376: note = tr|A0A1P8PMD6|A0A1P8PMD6_9GAMM Queuine tRNA-ribosyltransferase OS=Acinetobacter schindleri; OX = 108981 GN=tgt PE=3 SV=1

SEQ ID NO: 51167 - protein, 377 aa, unidentified
  source 1..377: note = Acinetobacter seifertii
  REGION 1..377: note = tr|A0A5E9PDC9|A0A5E9PDC9_9GAMM Queuine tRNA-ribosyltransferase OS=Acinetobacter seifertii; OX = 1530123 GN=tgt PE=3 SV=1
MKFEKLGQSGRARRGRLTLEHGVVETPVFMPVGTYGTVKGMLPRDIEDIQAQIILGNTFHLYLRPGLEVIKQHGGLHDFIKWNKPILTDSGGFQVFSLGAMRKIKEEGVTFRSPIDGSKVFLSPEISMEIQHVLNSDIVMIFDECTPYPATHEEAQKSLQLSLRWAKRCKTHHHDELKNKNALFGIIQGGMYEDLRDESLNGLLEVGFDGYAIGGLSVGEPKEEMIKVLDYLPNKMPSDKPRYLMGVGKPEDIVEAVRRGVDMFDCVMPTRNARNGHYFVTDGLVRIRNSKYRHDQGPLDPHCDCYTCKNFTRAYLFHLEKCGEMLASMLGTIHNLRYYQRLTEGMRDALDNGTFDEFVQDFYARRGLEVPPCPVDE

SEQ ID NO: 51168 - protein, 377 aa, unidentified; identical to SEQ ID NO: 51124
  source 1..377: note = Acinetobacter seifertii
  REGION 1..377: note = tr|N8SFV1|N8SFV1_9GAMM Queuine tRNA-ribosyltransferase OS=Acinetobacter seifertii; OX = 1530123 GN=tgt PE=3 SV=1

SEQ ID NO: 51169 - protein, 376 aa, Acinetobacter soli
  REGION 1..376: note = tr|A0A3R9A4W2|A0A3R9A4W2_9GAMM Queuine tRNA-ribosyltransferase OS=Acinetobacter soli OX=487316; GN = tgt PE=3 SV=1
MKFEKLGQSGRARRGRLTLAHGVVETPVFMPVGTYGTVKGMLPRDIEEIQAQIILGNTFHLYLRPGLEVIKEHGGLHEFIKWDKPILTDSGGFQVFSLGAMRKIKEEGVTFRSPIDGSKVFLSPEISMEIQQVLNSDIVMIFDECTPYPATHEEAQKSLQLSLRWAKRCKTHHHEQLNNTNALFGIIQGGMYEDLRDESLNGLLEIGFDGYAIGGLSVGEPKEEMIKVLDYLPAKMPEDKPRYLMGVGKPEDIVEAVRRGVDMFDCVMPTRNARNGHYFVTDGLVRIRNSKYRHDQSPLDPHCDCYTCKNFTRAYLYHLEKCGEMLASMLGTIHNLRYYQRLTQGIRDALEQGTFDEFVTDFYTRRGLDVPPAPMD

SEQ ID NO: 51170 - protein, 376 aa, Acinetobacter soli
  REGION 1..376: note = tr|N9AJI9|N9AJI9_9GAMM Queuine tRNA-ribosyltransferase OS=Acinetobacter soli NIPH 2899; OX = 1217677 GN=tgt PE=3 SV=1
MKFEKLGQSGRARRGRLTLAHGVVETPVFMPVGTYGTVKGMLPRDIEEIQAQIILGNTFHLYLRPGLEVIKEHGGLHEFIKWDKPILTDSGGFQVFSLGAMRKIKEEGVTFRSPIDGSKVFLSPEISMEIQQVLNSDIVMIFDECTPYPATHEEAQKSLQLSLRWAKRCKTHHHEQLNNTNALFGIIQGGMYEDLRDESLNGLLEIGFDGYAIGGLSVGEPKEEMIKVLDYLPAKMPEDKPRYLMGVGKPEDIVEAVRRGVDMFDCVMPTRNARNGHYFVTDGLVRIRNSKYRHDQSPLDPHCDCYTCKNFTRAYLYHLEKCGEMLASMLGTIHNLRYYQRLTQGIRDALEQGTFDEFVTDFYTRRGLDVPPAPVD

SEQ ID NO: 51171 - protein, 377 aa, Acinetobacter sp.; identical to SEQ ID NO: 51148
  REGION 1..377: note = tr|A0A4V7TCU7|A0A4V7TCU7_9GAMM Queuine tRNA-ribosyltransferase OS=Acinetobacter sp. FDAARGOS_131; OX = 1876769 GN=tgt PE=3 SV=1

SEQ ID NO: 51172 - protein, 376 aa, Acinetobacter sp.; identical to SEQ ID NO: 51133
  REGION 1..376: note = tr|A0A1E3GM68|A0A1E3GM68_9GAMM Queuine tRNA-ribosyltransferase OS=Acinetobacter sp. 51m; OX = 1856846 GN=tgt PE=3 SV=1

SEQ ID NO: 51173 - protein, 376 aa, Acinetobacter tandoii
  REGION 1..376: note = tr|A0A515BC58|A0A515BC58_9GAMM Queuine tRNA-ribosyltransferase OS=Acinetobacter tandoii OX=202954; GN = tgt PE=3 SV=1
MKFEKLAQSGRARRGRLTLEHGVVETPVFMPVGTYGTVKGMLPRDVEDIQAQIILGNTFHLYLRPGLDVIKAHGGLHEFMKWDKPILTDSGGFQVFSLGAMRKIKEEGVTFRSPIDGSKVFLSPEISMEIQQTLNSDIVMIFDECTPYPATHEEAQKSLQLSLRWAKRCKTHHHDELKNNNALFGIIQGGMYEDLRDESLNGLLDIGFDGYAIGGLSVGEPKEEMIKVLDYLPVKMPADKPRYLMGVGKPEDIVEGIRRGVDMFDCVMPTRNARNGHYFVTDGLVRIRNSKYRFDQQPLDPHCDCYTCKNFTRAYLFHLEKCGEMLGSMLGTIHNLRYYQRFTQDIRDALDNGTFDAFVEDFYQRRGLEVPPCPQD

SEQ ID NO: 51174 - protein, 376 aa, Acinetobacter tandoii
  REGION 1..376: note = tr|R9B554|R9B554_9GAMM Queuine tRNA-ribosyltransferase OS=Acinetobacter tandoii DSM 14970 = CIP 107469 OX=1120927 GN=tgt PE=3 SV=1
MKFEKLAQSGRARRGRLTLEHGVVETPVFMPVGTYGTVKGMLPRDVEDIQAQIILGNTFHLYLRPGLDVIEAHGGLHEFMKWDKPILTDSGGFQVFSLGAMRKIKEEGVTFRSPIDGSKVFLSPEISMEIQKTLNSDIVMIFDECTPYPATHEEAQKSLQLSLRWAKRCKTHHHDELNNKNALFGIIQGGMYEDLREESLKGLLEIGFDGYAIGGLSVGEPKEEMIKVLDYLPVKMPADKPRYLMGVGKPEDIVEGIRRGVDMFDCVMPTRNARNGHYFVTDGLVRIRNSKYRHDQQPLDPHCDCYTCTNFTRAYLFHLEKCGEMLGSMLGTIHNLRYYQRFTQDIRDALDNGTFDAFVEDFYQRRGLEVPPCPQD

SEQ ID NO: 51175 - protein, 376 aa, Acinetobacter tjernbergiae
  REGION 1..376: note = tr|V2V358|V2V358_9GAMM Queuine tRNA-ribosyltransferase OS=Acinetobacter tjernbergiae DSM 14971 = CIP 107465 OX=1120928 GN=tgt PE=3 SV=1
MKFEKLGQSGRARRGRLTLEHGVVETPVFMPVGTYGTVKGMLPRDIEEIQAQIILGNTFHLYLRPGLEVIKEHGGLHEFIQWDKPILTDSGGFQVFSLGAMRKIKEEGVTFRSPIDGSKVFLSPEISMEIQQVLNSDIVMIFDECTPYPATHEEAQKSLQLSLRWAKRCKTHHHDELKNKNALFGIIQGGMYEDLRDESLKGLLDVGFDGYAIGGLSVGEPKDEMIKVLDYLPNKMPQDKPRYLMGVGKPEDIVEAVRRGVDMFDCVMPTRNARNGHYFVTDGLVRIRNSKYRHDKGPLDPHCDCYTCKNFTRAYLYHLEKCGEMLASMLGTIHNLRYYQRLTQGMRDALDNGTFDEYVQDFYSRRGLDVPACPED

SEQ ID NO: 51176 - protein, 376 aa, Acinetobacter towneri
  REGION 1..376: note = tr|N9B6H1|N9B6H1_9GAMM Queuine tRNA-ribosyltransferase OS=Acinetobacter towneri DSM 14962 = CIP 107472 OX=1120929 GN=tgt PE=3 SV=1
MKFEKLGQSGRARRGRLTLAHGVVETPVFMPVGTYGTVKGMLPRDIEEIQAQVILGNTFHLYLRPGLEVIQQHGGLHEFIKWDKPILTDSGGFQVFSLGAMRKIKEEGVTFRSPIDGSKVFLSPEISMEIQKTLNSDIVMIFDECTPYPATHEEAQKSLQLSLRWAKRCKTHHHDELQNSNALFGIIQGGMYEDLRVESLNGLLEIGFDGYAIGGLSVGEPKEEMIKVLDYLPAKMPEDKPRYLMGVGKPEDIVEAIRRGVDMFDCVMPTRNARNGHYFVTDGLVRIRNSKYRHDQSPLDPHCDCYTCKNFTRAYLFHLEKCGEMLGSMLGTIHNLRYYQRFTQDIRNALDNGTFDEFVQDFYARRGLEVPPCPED

SEQ ID NO: 51177 - protein, 376 aa, Acinetobacter towneri
  REGION 1..376: note = tr|A0A1E8E4F6|A0A1E8E4F6_9GAMM Queuine tRNA-ribosyltransferase OS=Acinetobacter towneri OX=202956; GN = tgt PE=3 SV=1
MKFEKLGQSGRARRGRLTLAHGVVETPVFMPVGTYGTVKGMLPRDIEEIQAQIILGNTFHLYLRPGLEVIQQHGGLHEFIKWDKPILTDSGGFQVFSLGAMRKIKEEGVTFRSPIDGSKVFLSPEISMEIQKTLNSDIVMIFDECTPYPATHEEAQKSLQLSLRWAKRCKTHHHDELQNSNALFGIIQGGMYEDLRDESLNGLLEIGFDGYAIGGLSVGEPKEEMIKVLDYLPTKMPEDKPRYLMGVGKPEDIVEAIRRGVDMFDCVMPTRNARNGHYFVTDGLVRIRNSKYRHDQSPLDPHCDCYTCKNFTRAYLFHLEKCGEMLGSMLGTIHNLRYYQRFTQDIRNALDNGTFDDFVQDFYARRGLEVPPCPED

SEQ ID NO: 51178 - protein, 376 aa, Acinetobacter ursingii
  REGION 1..376: note = tr|N9C390|N9C390_9GAMM Queuine tRNA-ribosyltransferase OS=Acinetobacter ursingii ANC 3649; OX = 1257043 GN=tgt PE=3 SV=1
MKFEKLGQSGRARRGRLTLEHGIVETPVFMPVGTYGTVKGMLPRDIEEIQAQIILGNTFHLYLRPGLEVIKEHGGLHDFIKWNKPILTDSGGFQVFSLGAMRKIKEEGVTFRSPIDGSKVFLSPEISMEIQQVLNSDIVMIFDECTPYPATHEEAQKSLQLSLRWAKRCKTHHHDELKNTNALFGIIQGGMYEDLRDESLKGLLEIGFDGYAIGGLSVGEPKDEMIKVLDYLPNKMPHDKPRYLMGVGKPEDIVEGIRRGIDMFDCVMPTRNARNGHYFVTDGLVRIRNSKYRHDQSPLDLHCDCYTCKNFTRAYLYHLEKCGEMLASMLGTIHNLRYYQRFTQDIRNALDHGTFDEFVTDFYTRRGLEVPACPVD

SEQ ID NO: 51179 - protein, 395 aa, Acinetobacter ursingii
  REGION 1..395: note = tr|N9QW74|N9QW74_9GAMM Queuine tRNA-ribosyltransferase OS=Acinetobacter ursingii NIPH 706; OX = 1217716 GN=tgt PE=3 SV=1
MLFILAISELFFRLDLESCMKFEKLGQSGRARRGRLTLEHGIVETPVFMPVGTYGTVKGMLPRDIEEIQAQIILGNTFHLYLRPGLEVIKEHGGLHDFIKWNKPILTDSGGFQVFSLGAMRKIKEEGVTFRSPIDGSKVFLSPEISMEIQQVLNSDIVMIFDECTPYPATHEEAQKSLQLSLRWAKRCKTHHHDELKNTNALFGIIQGGMYEDLRDESLNGLLEVGFDGYAIGGLSVGEPKDEMIKVLDYLPNKMPHDKPRYLMGVGKPEDIVEGIRRGIDMFDCVMPTRNARNGHYFVTDGLVRIRNSKYRHDQSPLDPHCDCYTCKNFTRAYLYHLEKCGEMLASMLGTIHNLRYYQRFTQDIRNALDHGTFDEFVTDFYTRRGLEVPACPVD

SEQ ID NO: 51180 - protein, 376 aa, unidentified
  source 1..376: note = Acinetobacter variabilis
  REGION 1..376: note = tr|N9P7P4|N9P7P4_9GAMM Queuine tRNA-ribosyltransferase OS=Acinetobacter variabilis; OX = 70346 GN=tgt PE=3 SV=1
MKFEKLGQSGRARRGRLTLEHGVVETPVFMPVGTYGTVKGMLPRDVEGIKAQIILGNTFHLYLRPGLEVIKQHGGLHGFMKWDKPILTDSGGFQVFSLGAMRKIEEKGVTFRSPIDGSKVFLSPEISMEIQHTLNSDIVMIFDECTPYPATHEEAQKSLQLSLRWAERCKKHHHDELNNKNALFGIIQGGMYEDLRDESLKGLLEIDFDGYAIGGLSVGEPKEEMIKVLDYLPNKMPENKPRYLMGVGKPEDIVEGIRRGVDMFDCVMPTRNARNGHYFVTDGLVRIRNSQYRHDQSPLDPHCDCYTCQNFTRAYLFHLEKCGEMLGSMLGTIHNLRYYQRFTEDIRNALDNGTFDEFVQDFYARRGLEVPPCPQD

SEQ ID NO: 51181 - protein, 376 aa, Acinetobacter venetianus
  REGION 1..376: note = tr|N8ZXH6|N8ZXH6_ACIVR Queuine tRNA-ribosyltransferase OS=Acinetobacter venetianus (strain ATCC 31012 / CIP 110063 / RAG-1) OX=1191460 GN=tgt; PE = 3 SV=1
MQFEKLGQSGRARRGRLTLEHGVVETPVFMPVGTYGTVKGMLPRDIEEIQAQIILGNTFHLYLRPGLEVIKEHGGLHEFIKWDKPILTDSGGFQVFSLGAMRKIKEEGVTFRSPIDGSKVFLSPEISMEIQHVLNSDIVMIFDECTPYPATHEEAQKSLQLSLRWAKRCKTHHHDELNNKNALFGIIQGGMYEDLRDESLKGLLEVGFDGYAIGGLSVGEPKDEMIKVLDYLPNKMPHDKPRYLMGVGKPEDIVEAVRRGVDMFDCVMPTRNARNGHYFVTDGLVRIRNSKYRHDKGPLDPHCDCYTCKNFTRAYLYHLEKCGEMLASMLGTIHNLRYYQRLTQGMRDALDNGTFDEYVQDFYTRRGLEVPPCPED

SEQ ID NO: 51182 - protein, 376 aa, Acinetobacter venetianus
  REGION 1..376: note = tr|A0A137YAR5|A0A137YAR5_9GAMM Queuine tRNA-ribosyltransferase OS=Acinetobacter venetianus; OX = 52133 GN=tgt PE=3 SV=1
MQFEKLGQSGRARRGRLTLEHGVVETPVFMPVGTYGTVKGMLPRDIEEIQAQIILGNTFHLYLRPGLEVIKEHGGLHEFIKWDKPILTDSGGFQVFSLGAMRKIKEEGVTFRSPIDGSKVFLSPEISMEIQQVLNSDIVMIFDECTPYPATHEEAQKSLQLSLRWAKRCKTHHHDELNNKNALFGIIQGGMYEDLRDESLKGLLEVGFDGYAIGGLSVGEPKEEMIKVLDYLPNKMPHDKPRYLMGVGKPEDIVEAVRRGVDMFDCVMPTRNARNGHYFVTDGLVRIRNSKYRHDKGPLDPHCDCYTCKNFTRAYLYHLEKCGEMLASMLGTIHNLRYYQRLTQGMRDALDNGTFDEYVQDFYTRRGLEVPPCPED

SEQ ID NO: 51183 - protein, 376 aa, unidentified
  source 1..376: note = Acinetobacter wuhouensis
  REGION 1..376: note = tr|A0A3G2SZC5|A0A3G2SZC5_9GAMM Queuine tRNA-ribosyltransferase OS=Acinetobacter wuhouensis; OX = 1879050 GN=tgt PE=3 SV=1
MKFEKLGQSGRARRGRLTLEHGVIETPVFMPVGTYGTVKGMLPRDIEDIKAQIILGNTFHLYLRPGLDVIREHGGLHEFMKWGKPILTDSGGFQVFSLGAMRKIKEEGVTFRSPIDGSKVFLSPEISMDIQHTLNSDIVMIFDECTPYPATHEEAQKSLQLSLRWAKRCKTQHHDVLKNRNALFGIIQGGMYEDLREESLNGLKEIDFDGFAIGGLSVGEPKEEMIKVLDYLPEKMPADKPRYLMGVGKPEDIVEAIRRGVDMFDCVMPTRNARNGHYFVTDGLVRIRNSQYRHDQSPLDPHCDCYTCTNFTRAYLFHLEKCGEMLGSMLGTIHNLRYYQRFTQDIRDALDNGTFDEYVTDFYQRRGLDVPPCPED

SEQ ID NO: 51184 - protein, 376 aa, unidentified
  source 1..376: note = Acinetobacter wuhouensis
  REGION 1..376: note = tr|A0A385C1R5|A0A385C1R5_9GAMM Queuine tRNA-ribosyltransferase OS=Acinetobacter wuhouensis; OX = 1879050 GN=tgt PE=3 SV=1
MKFEKLGQSGRARRGRLTLEHGVIETPVFMPVGTYGTVKGMLPRDIEDIKAQIILGNTFHLYLRPGLDVIREHGGLHEFMKWGKPILTDSGGFQVFSLGAMRKIKEEGVTFRSPIDGSKVFLSPEISMDIQHTLNSDIVMIFDECTPYPATHEEAQKSLQLSLRWAKRCKTQHHDVLKNRNALFGIIQGGMYEDLREESLNGLKEIDFDGFAIGGLSVGEPKEEMIKVLDYLPAKMPADKPRYLMGVGKPEDIVEAIRRGVDMFDCVMPTRNARNGHYFVTDGLVRIRNSQYRHDQSPLDPHCDCYTCTNFTRAYLFHLEKCGEMLGSMLGTIHNLRYYQRFTQDIRDALDNGTFDEYVADFYQRRGLDVPPCPED

SEQ ID NO: 51185 - protein, 374 aa, unidentified
  source 1..374: note = Actibacterium atlanticum
  REGION 1..374: note = tr|A0A058ZPW5|A0A058ZPW5_9RHOB Queuine tRNA-ribosyltransferase OS=Actibacterium atlanticum; OX = 1461693 GN=tgt PE=3 SV=1
MEISFDLKATDGRARTGVIRTPRGDIRTPAFMPVGTAATVKAMMPESVRETGADILLGNTYHLMLRPTAERIDRLGGLHKFMNWDRPILTDSGGFQVMSLAGLRKLTEEGVKFTSHVDGSKHMLSPERSMEIQKLLGSDIVMCFDECPALPADRDTIARSMELSMRWAKRSKEAFGERPGHALFGIMQGGLERDLREVSAQKLREIGFHGYAIGGLAVGEGQQAMFACLDYAPGFLPEDKPRYLMGVGKPDDIVGAVKRGVDMMDCVLPSRSGRTGQAFTRRGVVNIKNARHIDDPRPLDEDCTCPTCRNYSRAYLSHVYRSNEMISAMLLTWHNLHYFQEIMQGMRAAIAGGTFDAWEADFHAGRADGDIAPL

SEQ ID NO: 51186 - protein, 375 aa, unidentified
  source 1..375: note = Actibacterium mucosum
  REGION 1..375: note = tr|A0A037ZIW5|A0A037ZIW5_9RHOB Queuine tRNA-ribosyltransferase OS=Actibacterium mucosum KCTC 23349 OX=1454373 GN=tgt PE=3 SV=1
MTKFSFSLHNTDGAARTGVIDTPRGQIRTPAFMPVGTAATVKAMMPESVAATGADILLGNTYHLMLRPTAERIDRLGGLHRFMNWSKPILTDSGGFQVMSLADLRKLTEHGVTFKSHIDGSKHEITPERSMEIQRLLGSDIVMCFDECPALPASDAAVAESMRLSMRWAQRSRDAFGDRPGHALFGIMQGGVTPELREESAEALTRIGFDGYAIGGLAVGEGQAAMFGVLDYAPGFLPVDKPRYLMGVGKPDDIVGAVKRGVDMMDCVLPSRSGRTGQAWTRRGQINIKNARHADDPRPLDEDCTCPACRNYSRAYLHHVFRSNEMISGMLLTWHNLHYFQQIMGEMRAAIAAGTFDAWEEQFHAMRALGDIEPL

SEQ ID NO: 51187 - protein, 378 aa, Actinobacillus delphinicola
  REGION 1..378: note = tr|A0A448TUU0|A0A448TUU0_9PAST Queuine tRNA-ribosyltransferase OS=Actinobacillus delphinicola; OX = 51161 GN=tgt PE=3 SV=1
MKFTLHKKDGNARRGTMTFDRPQGQCTVETPAFMPVGTYGTVKGMTPEEVRATGAEICLGNTFHLWLRPGQEVMRKHGDLHDFMQWHRPILTDSGGFQVFSLGKLRKITEEGVKFQNPINGERIFLSPEKSMEIQYDLGSDIVMIFDECAPYPSTFDYTKKSMEMSLRWAKRSRDRFDELENKNALFGIVQGGVFEELRQVSLDGLKEIGFDGYAVGGLAVGEPKEDMHRILEFTCPQLPEDKPRYLMGVGKPEDLVEGVRRGIDMFDCVMPTRNARNGHLFVTGGVVKIRNAKYRDDTSPLDPECDCYTCKNYTRAYLYHLDKCNEILGARLNTIHNLRYYQRLMAKIRQRIEEGTFDEFVKEFYAARGREVPPLQK

SEQ ID NO: 51188 - protein, 129 aa, Actinobacillus equuli
  REGION 1..129: note = tr|A0A448QQK4|A0A448QQK4_ACTEU Queuine tRNA-ribosyltransferase OS=Actinobacillus equuli OX=718; GN = tgt_1 PE=4 SV=1
MTFSRPKGEYVVETPAFMPVGTYGTVKGMTPEEVAATGAQILLGNTFHLWLRPGQEVMKSHGDLHDFMQWHGPILTDSGGFQVFSLGKLRKIKEEGVTFQTRLAVRNFPFAGKIDGNSVRSRFGYRHDL

SEQ ID NO: 51189 - protein, 56 aa, Actinobacillus equuli
  REGION 1..56: note = tr|A0A448QQJ4|A0A448QQJ4_ACTEU Queuine tRNA-ribosyltransferase OS=Actinobacillus equuli OX=718; GN = tgt_3 PE=4 SV=1
MFDCVMPTRNARNGHLFVSNGIVKIRNAKYKTDTTPLDPECDCYTCKTIRKRIYIT

SEQ ID NO: 51190 - protein, 385 aa, Actinobacillus indolicus
  REGION 1..385: note = tr|A0A4P7CHS8|A0A4P7CHS8_9PAST Queuine tRNA-ribosyltransferase OS=Actinobacillus indolicus; OX = 51049 GN=tgt PE=3 SV=1
MKYELKKTSGNARRGRLTFSRPKGEYHVETPAFMPVGTYGTVKGMTPEEVAQTGAQILLGNTFHLWLRPGQEIMRQHGDLHDFMQWHGPILTDSGGFQVFSLGKLRKIKEEGVYFQNPISGEKVFLSPEKSMEIQYDLGSDIVMIFDECTPYPATFDYAKQSMEMSLRWAKRSRDRFDELQNPNALFGIIQGGVYEELRKVSVEKLVEIGFDGYAVGGLAVGEPKEDMHRILEYVCPQIPADKPRYLMGVGKPEDLVEGVRRGIDMFDCVMPTRNARNGHLFVTNGIVKIRNAKYRNDISPLDPECDCYTCKNYTKAYLYHLDKCGEILGARLNTIHNLRYYQRLMAEIRQAIDEDRFDDFVVEFYQRIGKEVPPLQLAKEGENA

SEQ ID NO: 51191 - protein, 385 aa, Actinobacillus indolicus
  REGION 1..385: note = tr|A0A4V0IIU2|A0A4V0IIU2_9PAST Queuine tRNA-ribosyltransferase OS=Actinobacillus indolicus; OX = 51049 GN=tgt PE=3 SV=1
MKYELKKTNGNARRGRLTFSRPKGEYHVETPAFMPVGTYGTVKGMTPEEVAQTGAQILLGNTFHLWLRPGQEIMRQHGDLHDFMQWHGPILTDSGGFQVFSLGKLRKIKEEGVYFQNPISGEKVFLSPEKSMEIQYDLGSDIVMIFDECTPYPATFDYAKQSMEMSLRWAKRSRDRFDELQNPNALFGIIQGGVYEELRKVSVEKLVEIGFDGYAVGGLAVGEPKEDMHRILEYVCPQIPADKPRYLMGVGKPEDLVEGVRRGIDMFDCVMPTRNARNGHLFVTNGIVKIRNAKYRNDISPLDPECDCYTCKNYTKAYLYHLDKCGEILGARLNTIHNLRYYQRLMAEIRQAIDEDRFDDFVVEFYQRIGKEIPPLQLAKEGENA

SEQ ID NO: 51192 - protein, 382 aa, Actinobacillus lignieresii
  REGION 1..382: note = tr|A0A380TUN3|A0A380TUN3_ACTLI Queuine tRNA-ribosyltransferase OS=Actinobacillus lignieresii; OX = 720 GN=tgt PE=3 SV=1
MKYELKTTSGNARRGRLTFSRPKGEYVVETPAFMPVGTYGTVKGMTPEEVAATGAQILLGNTFHLWLRPGQEVMKSHGDLHDFMQWHGPILTDSGGFQVFSLGKLRKIKEEGVTFQNPISGEKIFLSPEKSMEIQYDLGSDIVMIFDECTPYPATFDYAKSSMEMSLRWAKRSRDRFDELQNPRALFGIVQGGTYEELRKISVEGLVNIGFDGYAVGGLAVGEPKEEMHRILEFTTPLLPRDKPRYLMGVGKPEDLVEGVRRGIDMFDCVMPTRNARNGHLFVSNGIVKIRNAKYKTDTTPLDPECDCYTCKNYTKAYLYHLDKCGEILGARLNTIHNLRYYQRLMAQIRQAIEEDRFDDFVVEFYAKIGKEVPPLQSEVNK

SEQ ID NO: 51193 - protein, 380 aa, Actinobacillus minor
  REGION 1..380: note = tr|C5S3A3|C5S3A3_9PAST Queuine tRNA-ribosyltransferase OS=Actinobacillus minor NM305; OX = 637911 GN=tgt PE=3 SV=1
MKYELKCTSGNARRGRLTFNRPKGEFHVETPAFMPVGTYGTVKGMTPEEVAATGAQILLGNTFHLWLRPGQEVMKMHGDLHDFMQWHGPILTDSGGFQVFSLGKLRKIKEEGVTFQNPISGEKIFLSPEKSMEIQYDLGSDIVMIFDECTPYPATFDYAKNSMEMSLRWAKRSRDRFDELENPRALFGIVQGGTYEELRKISVEGLVNIGFDGYAVGGLAVGEPKEEMHRILEFTTPLLPADKPRYLMGVGKPEDLVEGVRRGIDMFDCVMPTRNARNGHLFVSDGVVKIRNAKYKSDTSPLDPECDCYTCKNYTKAYLYHLDKCGEILGARLNTIHNLRYYQRLMAQIRQAIEEDRFDDFVVEFYAKIGKEVPPLQKGE

SEQ ID NO: 51194 - protein, 382 aa, Actinobacillus pleuropneumoniae
  REGION 1..382: note = sp|A3N087|TGT_ACTP2 Queuine tRNA-ribosyltransferase; OS = Actinobacillus pleuropneumoniae serotype 5b (strain L20) OX=416269 GN=tgt PE=3 SV=1
MKYELKTTSGNARRGRLTFSRPKGEYVVETPAFMPVGTYGTVKGMTPEEVAATGAQILLGNTFHLWLRPGQEVMKSHGDLHGFMQWHGPILTDSGGFQVFSLGKLRKIKEEGVTFQNPISGEKIFLSPEKSMEIQYDLGSDIVMIFDECTPYPATFDYAKNSMEMSLRWAKRSRDRFDELQNPRALFGIVQGGTYEELRKISVEGLVNIGFDGYAVGGLAVGEPKEEMHRILEFTTPLLPQDKPRYLMGVGKPEDLVEGVRRGIDMFDCVMPTRNARNGHLFVSNGIVKIRNAKYKTDTTPLDPECDCYTCKNYTKAYLYHLDKCGEILGARLNTIHNLRYYQRLMAQIRQAIEEDRFDDFVVEFYAKIGKEVPPLQSEVNK

SEQ ID NO: 51195 - protein, 382 aa, Actinobacillus pleuropneumoniae; identical to SEQ ID NO: 51194
  REGION 1..382: note = sp|B3GXF8|TGT_ACTP7 Queuine tRNA-ribosyltransferase; OS = Actinobacillus pleuropneumoniae serotype 7 (strain AP76) OX=537457 GN=tgt PE=3 SV=1

SEQ ID NO: 51196 - protein, 386 aa, Actinobacillus porcinus
  REGION 1..386: note = tr|A0A4V0IEZ1|A0A4V0IEZ1_9PAST Queuine tRNA-ribosyltransferase OS=Actinobacillus porcinus; OX = 51048 GN=tgt PE=3 SV=1
MKFNLKTTSGTARRGEMVFQRPNKEGEITEFKVQTPAFMPVGTYGTVKGMTPEEVRATGAEILLGNTFHLWLRPGQEVMKMHGDLHDFMQWHRPILTDSGGFQVFSLGKLRKIKEEGVTFQNPINGEKIFLSPEKSMEIQYDLGSDIVMIFDECTPYPATFDYAKKSMEMSLRWAKRSRDRFDELENPRALFGIVQGGTYEELRKISAEGLVNIGFDGYAVGGLAVGEPKEEMHRILEFTTPLLPTDKPRYLMGVGKPEDLVEGVRRGIDMFDCVMPTRNARNGHLFVSDGVVKIRNAKYRSDTTALDPECDCYTCKNYTKAYLYHLDKCGEILGARLNTIHNLRYYQRLMEQIRTAIEEDRFDDFVVEFYAKIGKEVPPLQKAVK

SEQ ID NO: 51197 - protein, 380 aa, unidentified; identical to SEQ ID NO: 51193
  source 1..380: note = Actinobacillus porcitonsillarum
  REGION 1..380: note = tr|A0A2U8FML8|A0A2U8FML8_9PAST Queuine tRNA-ribosyltransferase OS=Actinobacillus porcitonsillarum; OX = 189834 GN=tgt PE=3 SV=1

SEQ ID NO: 51198 - protein, 376 aa, unidentified
  source 1..376: note = [Actinobacillus] rossii
  REGION 1..376: note = tr|A0A380U242|A0A380U242_9PAST Queuine tRNA-ribosyltransferase OS=[Actinobacillus] rossii; OX = 123820 GN=tgt PE=3 SV=1
MKFNLKTTSGNARRGEMVFQRPQGEFKVQTPAFMPVGTYGTVKGMTPEEVRATGAEILLGNTFHLWLRPGQEVMKMHGDLHDFMQWHRPILTDSGGFQVFSLGQLRKIKEEGVTFQNPINGEKIFLSPEKSMEIQYDLGSDIVMIFDECTPYPATFDYAKKSMEMSLRWAKRSRDRFNELENPRALFGIVQGGTYEELRKISAEGLVNIGFDGYAVGGLAVGEPKAEMHRILEFTTPLLPADKPRYLMGVGKPEDLVEGVRRGIDMFDCVMPTRNARNGHLFVSDGVVKIRNAKYRSDTTALDPECDCYTCKNYTKAYLYHLDKCGEILGARLNTIHNLRYYQRLMEQIRTAIEEDRFDDFVVEFYTKIGKEVPPL

SEQ ID NO: 51199 - protein, 387 aa, Actinobacillus seminis
  REGION 1..387: note = tr|A0A263HGI6|A0A263HGI6_9PAST Queuine tRNA-ribosyltransferase OS=Actinobacillus seminis OX=722; GN = tgt PE=3 SV=1
MKFKLHKTNGAARRGTMTFSRPQGEFTVETPAFMPVGTYGTVKGMTPEEVRATGAEILLGNTFHLWLRPGQEVMRKHGDLHDFMQWHRPILTDSGGFQVFSLGKLRKITEEGVKFQNPINGERIFLSPEKSMEIQYDLGSDIVMIFDECAPYPSTFDYTRKSMEMSLRWAQRSRQRFDELGNKNALFGIVQGGVFEELRQVSLEGLVKIGFDGYAVGGLAVGEPKEDMHRILEYVCPQLPTDKPRYLMGVGKPEDLVEGVRRGIDMFDCVMPTRNARNGHLFVSDGIVKIRNAKYRDDTSPLDPECDCYTCKHYTKSYLYHLDKCGEILGARLNTIHNLRYYQRLMAQIRQAIEEDRFEQFVMDFYAKIGKPVPPLQSETTETEPQE

SEQ ID NO: 51200 - protein, 379 aa, Actinobacillus succinogenes
  REGION 1..379: note = sp|A6VN75|TGT_ACTSZ Queuine tRNA-ribosyltransferase; OS = Actinobacillus succinogenes (strain ATCC 55618 / DSM 22257 / 130Z) OX=339671 GN=tgt PE=3 SV=1
MKFKLKTTSGTARRGEMTFSRPQGEFTVQTPAFMPVGTYGTVKGMTPEEVRATGAEILLGNTFHLWLRPGQEVMRKHGDLHDFMQWHRPILTDSGGFQVFSLGKLRKITEEGVKFQNPINGERIFLSPEKSMEIQYDLGSDIVMIFDECTPYPATFDYAKKSMEMSLRWAQRSRDRFDELGNKNALFGIVQGGTFEELRKVSAEGLVDIGFDGYAVGGLAVGEPKEEMHRILEFTTPLLPADKPRYLMGVGKPEDLVEGVRRGIDMFDCVMPTRNARNGHLFVTDGIVKIRNAKYRDDTSALDPHCDCYTCRHYTKSYLYHLDKCGEILGARLNTIHNLRYYQRLMEEIRQAIEEDRFDDFVVEFYTRMGKEVPPLQKP

SEQ ID NO: 51201 - protein, 382 aa, Actinobacillus suis
  REGION 1..382: note = tr|K0G3V1|K0G3V1_ACTSU Queuine tRNA-ribosyltransferase OS=Actinobacillus suis H91-0380; OX = 696748 GN=tgt PE=3 SV=1
MKYELKNTSGNARRGRLTFSRPKGEYVVETPAFMPVGTYGTVKGMTPEEVAATGAQILLGNTFHLWLRPGQEVMKSHGDLHDFMQWHGPILTDSGGFQVFSLGKLRKIKEEGVTFQNPISGEKIFLSPEKSMEIQYDLGSDIVMIFDECTPYPATFDYAKNSMEMSLRWAKRSRDRFDELQNPRALFGIVQGGTYEELRKISVEGLVNIGFDGYAVGGLAVGEPKEEMHRILEFTTPLLPQDKPRYLMGVGKPEDLVEGVRRGIDMFDCVMPTRNARNGHLFVSNGIVKIRNAKYKTDTTPLDPGCDCYTCKNYTKAYLYHLDKCGEILGARLNTIHNLRYYQRLMAQIRQAIEEDRFDDFVVEFYAKIGKEVPPLQSEVNK

SEQ ID NO: 51202 - protein, 382 aa, Actinobacillus ureae
  REGION 1..382: note = tr|E8KHG3|E8KHG3_9PAST Queuine tRNA-ribosyltransferase OS=Actinobacillus ureae ATCC 25976; OX = 887324 GN=tgt PE=3 SV=1
MKYELKTTSGNARRGRLTFSRPKGEYVVETPAFMPVGTYGTVKGMTPEEVAATGAQILLGNTFHLWLRPGQEVMKSHGDLHDFMQWHGPILTDSGGFQVFSLGKLRKIKEEGVTFQNPISGEKIFLSPEKSMEIQYDLGPDIVMIFDECTPYPATFDYAKNSMEMSLRWAKRSRDRFDELQNPRALFGIVQGGTYEELRKISVEGLVNIGFDGYAVGGLAVGEPKEEMHRILEFTTPLLPQDKPRYLMGVGKPEDLVEGVRRGIDMFDCVMPTRNARNGHLFVSNGIVKIRNAKYKTDTTALDPECDCYTCKNYTKAYLYHLDKCGEILGARLNTIHNLRYYQRLMAQIRQAIEEDRFDDFVVEFYAKIGKEVPPLQSDVNK

SEQ ID NO: 51203 - protein, 408 aa, unidentified
  source 1..408: note = Actinobacteria bacterium
  REGION 1..408: note = tr|A0A0R2NX75|A0A0R2NX75_9ACTN Queuine tRNA-ribosyltransferase OS=Actinobacteria bacterium BACL2 MAG-120802-bin41 OX=1655568 GN=tgt PE=3 SV=1
MSFSFEVIKEIPEELGRAGVISTPHGQIATPAFIPVGTKASVKSLTPESLDDLGAQAVLANAYHLYLQPGSETLDQAGGLGKFMNWDKPSFTDSGGFQVMSLGAGFKKVIDMSLGSLDSDEAMAESKERLAHVDDEGVTFKSHLDGSMHRFTPEISMQVQHQIGADIIFAFDELTTLHNTRKYQEQSLERTRLWAIRCLDEHKRLTDQRSDKPYQALFGVLQGAQYEDLRRKAAKDLSEMKSSGLSFDGFGIGGALDKASLGQIVSWMSSELPRDKPRHLLGIGEPADLFAGVENGADTFDCVAPSREARTSAVYSENGRFNVTSATYKRDFSPIDKDCNCYTCSNFTRAYLNHLFRAKEMLASTLATIHNLAFTVRLVDRMRQAILDGNFREFKTDFLGRYQAKALD

SEQ ID NO: 51204 - protein, 374 aa, unidentified
  source 1..374: note = Actinobacteria bacterium
  REGION 1..374: note = tr|A0A1F2X5U6|A0A1F2X5U6_9ACTN Queuine tRNA-ribosyltransferase OS=Actinobacteria bacterium RBG_16_67_15 OX=1797202 GN=tgt PE=3 SV=1
MSALRFAITASAGAARAGTLTTTHGEVPTPAFMPVGTRATVRAIGVDDLAAVGADMVLVNTYHLMLRPGSETIAALGGVQQFMGWPGPVLTDSGGFQVFSLQPRVDEDGVTFRSTYDGSMVRMTPESAVAAQEVIGSDIAMVLDHLVGLPAPVERVADAMERTLRWAERGRAAHRRADQALFGIVQGGVDPELRASSARRTAELGFPGFGIGGLSVGESAADRAVALDAVAAVLPAESPRYVMGLGDTAGVLDAVGRGFDLFDCVWPTRLARHGKAITAYGDFSIRRAEFAADSRPLDPDCGCFTCRHHSRAYLRHLRVTDELLGHRLMSIHNLAYTLGILKQAREAIASGRFEPFRQGVMNRRRQDAGGEGLR

SEQ ID NO: 51205 - protein, 365 aa, unidentified
  source 1..365: note = Unknown
  REGION 1..365: note = tr|A0A094PS51|A0A094PS51_9ACTN Queuine tRNA-ribosyltransferase OS=actinobacterium acAcidi; OX = 1504320 GN=tgt PE=3 SV=1
MFPVQLDIDARDGAARSATATTHRGTYETPCFMPVGTRGAVKYLSARDYADIGARIVLGNTYHLMLRPGADVVEKFGGLGSFSGWDGLTLTDSGGFQVFSLDPKVDDDGVTFKSTYDGSYHRFTPEIAVQTQEKIGADIQMVLDVCTSLPAEPDVVRLALERTHAWALRAKAAHSRPDQSLFGIVQGGTNSAMRAESARRTVDVGFDGFGIGGLSVGESRAEMVESIAACIDELPEDRPRYLMGVGDPASLVEAVGLGVDQFDCVLQTRLGRHGTALTSQGRVNIKNAQFLDSDEPLDPLCSCWVCASHSRGYLRHLAQTGEPTGSRLVSVHNLAWTISLMKDMRHAIQQGTFSDLKRGILDVWA

SEQ ID NO: 51206 - protein, 365 aa, unidentified
  source 1..365: note = Unknown
  REGION 1..365: note = tr|A0A094Q934|A0A094Q934_9ACTN Queuine tRNA-ribosyltransferase OS=actinobacterium acAcidi; OX = 1504320 GN=tgt PE=3 SV=1
MFPVRFTTEASDGSARAGTAVTYRGPYTTPTFMPVGTRGAIKYLSATDYEDLGAQIVLGNTYHLMLRPGAETISTLGGLGKFAGWGGLTLTDSGGFQVFSLNPSVDDDGVTFRSTYDGSSHRYTPEGAVATQQLLGADIQMVLDVCPPLPSEPSVVRLALERTSAWAKRAHVAHVRDDQSLFGIVQGGIDVNMREESAKRTAELNFDGYGIGGLSVGETREQMIPALAAALAHLPTDRPRYLMGVGDPASLVEAVNLGVDQFDCVLQTRLGRHGTALTSSGRVNLKRSEFTLSEDPIDATCRCMVCSRHTRGYIRHLFQVGEPTASRLVSVHNIAWTINFMNLMREAILEARFAQFRQSTLAIWG

SEQ ID NO: 51207 - protein, 389 aa, unidentified
  source 1..389: note = Unknown
  REGION 1..389: note = tr|A0A094PJH2|A0A094PJH2_9ACTN Queuine tRNA-ribosyltransferase OS=actinobacterium acAMD-5; OX = 1504319 GN=tgt PE=3 SV=1
MDGHLGRVGTITTPHGVIQTPAFIPVGTKATVKAVLPESLIQIGAQAVLANAYHLYLQPGPKTLDQAGGVGKFMNWHGPTFTDSGGFQVLSLGVGFKKVLAMDADTVQADDVIADNKDRLALVDDDGVTFKSHLDGSMHRFTPEVSMQVQHQIGADIIFAFDECTTLLNTREYQEKSLDRTFAWAKRCIAEHQKLTLERVGKPYQMLFGVIQGAQYEDLRRKAARDLAQLEFDGFGLGGALDKNNLGTIVSWMNEELPTDKPRHLLGIGEPDDLFVGVQNGVDTFDCVAASRTARTGAIYTKDGRVNVTLASYKNDFSPLEIDCPCYTCTHYTKAYVSHLFRAKEMLGSTLATIHNEHFIVNLVDQMRKSIIDGTFFELKEEFMTRYYK

SEQ ID NO: 51208 - protein, 407 aa, unidentified
  source 1..407: note = Unknown
  REGION 1..407: note = tr|J9DWH1|J9DWH1_9ACTN Queuine tRNA-ribosyltransferase OS=actinobacterium SCGC AAA027-L06; OX = 913338 GN=tgt PE=3 SV=1
MINGFEFRVRQGLKSKLGRTGQIFTPHGVINTPAFIPVGTKATLKSVLPESLKDLGAQAVLANAYHLYLQPGPEIVDQAGGLAKFMNWPGPTFTDSGGFQVLSLGVGFKKVIAMDENTFQADDVIADDKERLAHVDDDGVTFKSHLDGSFHRFTPEVSMQVQHQIGADIIFAFDECTTLHNTRSYQEKALERTRLWAQRCLVEHDRLTKLRKDKPYQALFGVLQGAQYEELRRKAAKDLAAMSMDGISFDGFGIGGALDKQTLGDILRWVNEELPEDKPRHFLGIGEPDDLFVGVENGADTFDCVAPSRQARTSSVFTKDGRVNISNAPHKNEFFPIEKDCTCYTCQNYTRAYLCHLFRAKEMVAATLATIHNQHFIVGLVEQMRQSIEDGTFFEFKASFMKRYYGK

SEQ ID NO: 51209 - protein, 431 aa, Actinobaculum massiliense
  REGION 1..431: note = tr|K9EFC4|K9EFC4_9ACTO Queuine tRNA-ribosyltransferase OS=Actinobaculum massiliense ACS-171-V-Col2 OX=883066 GN=tgt PE=3 SV=1
MKDRGFEPKTELAVRRGERNGKPLGRTGVIHTPHGDIATPAFIPVGTRATVKTLTPEQVKGVGAQAVLANAYHLYLQPGPEIVDRAGGLAQFMNWGGPTYTDSGGFQVLSLGSGYKKVLSAEYAGANAGRADAQIAPDKERLAAVDDDGVWFRSHLDGSKHRFTPEVSMGIQHHLGADIMFAFDELTTLLNSRNYQEESLERTRLWAERCLAEHKKLTEERADKPYQQLFGVIQGAQYEDLRRKACADLGSMEVDGQRFDGFGIGGALEKENLGNIVSWCTDELPADRARHLLGISEPDDFFAAIEAGADTFDCVNPSRVARNGAIYSRDGRFNVTRAQFKDDFSALTPECDCYTCTNYSRAYLHHLFKAKEQLASTLATIHNERYTVRLVDEIRESIDGGYYEDYKAQTVARFYAGNWGRVDVQRRRPRG

SEQ ID NO: 51210 - protein, 419 aa, Actinobaculum sp.
  REGION 1..419: note = tr|U1Q491|U1Q491_9ACTO Queuine tRNA-ribosyltransferase OS=Actinobaculum sp. oral taxon 183 str. F0552 OX=1227261 GN=tgt PE=3 SV=1
MTFTLGVRLEEPVGAGGVGGRTGRPLGRAGTIHTPHGDIATPAFVPVATKATVKAVAPEAVAELGAQAVLANAYHLYLQPGSDVVDEAGGLAAFMNWRGPTYTDSGGFQILSLGSGFKKVLSAEFSGSGRAGSASKERLVDVDDDGVWFRSHLDGARHRFTPEISMGIQHELGADVIFAFDELTTLLDSRAYQEQALERTRRWAARCLAEHGRLTEARPDRPYQQLFGVVQGAQYEDLRRKAARDLGAMEAGGRRFDGFGIGGALEKENLGRIVGWVSEELPEDRARHLLGISEPDDVFAAVEAGADTFDCVNPSRVARNAAIYSPDGRFNVTRSQFRRDFSPLVPGCACYTCSNYTRAYLHHLFKAREMLSSTLATIHNEHYTVQLVEGIRRSILSGEYAAYKGETLGRFYAGDWGRA

SEQ ID NO: 51211 - protein, 421 aa, Actinobaculum sp.
  REGION 1..421: note = tr|A0A430JT10|A0A430JT10_9ACTO Queuine tRNA-ribosyltransferase OS=Actinobaculum sp. 352; OX = 2490946 GN=tgt PE=3 SV=1
MHDTGVRSTGMQTAALRSGRGGRPLGRTGVIHTPHGDIRTPAFIPVGTKATVKAVLPESVAALGAQAVLANAYHLYLQPGSDIVDEAGGLARFMNWSGPTYTDSGGFQVLSLGSGFKKVLSEEFSGSSRADSDVAPTKERLADVDDDGVWFRSHLDGSRHRFTPEVSMRIQHELGADVIFAFDELTTLMNSRGYQEEALERTRRWAQRCLAAHRELTEARTGKPYQQLFGVIQGAQYEDLRRKAARDLGAMEIDGQRFDGFGVGGALEKENLGTIVGWVCEELPEDRARHLLGISEPDDFFAAVEAGADTFDCVNPSRVARNAAIYSPDGRFNVVRAQFRRDFEPLVPGCECYTCTHYSRAYLHHAFKAKEMISSTLATIHNEYFTVKLVEGIRDSIEGGYYAEFKEETLGRFYAGQWGRK

SEQ ID NO: 51212 - protein, 442 aa, Actinobaculum suis
  REGION 1..442: note = tr|A0A0K9EQW1|A0A0K9EQW1_9ACTO Queuine tRNA-ribosyltransferase OS=Actinobaculum suis OX=1657; GN = tgt PE=3 SV=1
MQDRGFTVQTRLEVKRGARNGRPLGRTGVIHTPHGDIKTPAFIPVGTKATVKTLTPEQVESTGAQAVLANAYHLYLQPGPEIVDAAGGLAAFMNWRGPTYTDSGGFQVLSLGSGYKKILSAEYAGANAGMADSGVAPKTGRNKDKERLANVDEEGVWFRSHLDGSKHRFTPEVSMGIQHQLGADIMFAFDELTTLLNSRAYQEESLERTRRWAERCLREHRRLTEARAGKPYQQLFGVIQGAQYEDLRRKASRDLAAMRVDGQEFDGFGIGGALEKENLGEIVAWCCDELPEDRARHLLGISEPDDFFAAIESGADTFDCVNPSRVARNGAIYSEDGRFNITRAQFRADFSALTPECDCYTCTNYSRAYIHHLFKAKEQLANTLATIHNEQYTVRLVARIREAMENGTYEEFKKETLARFYAGGWGRKVAPQTRRRGSRKGA

SEQ ID NO: 51213 - protein, 442 aa, Actinobaculum suis
  REGION 1..442: note = tr|A0A1B9BDS7|A0A1B9BDS7_9ACTO Queuine tRNA-ribosyltransferase OS=Actinobaculum suis OX=1657; GN = tgt PE=3 SV=1
MQDRGFTVQSRLEVKRGARNGRPLGRTGVIHTPHGDIKTPAFIPVGTKATVKTLTPEQVEATGAQAVLANAYHLYLQPGPEIVDAAGGLAAFMNWHGPTYTDSGGFQVLSLGSGYKKILSAEYAGANAGMADSGVAPKTGRNKDKERLANVDEEGVWFRSHLDGSKHRFTPEVSMGIQHQLGADIMFAFDELTTLLNSRAYQEESLERTRRWAERCLREHRRLTEARAGKPYQQLFGVIQGAQYEDLRRKASRDLAAMRIDGQEFDGFGIGGALEKENLGEIVAWCCDELPEDRARHLLGISEPDDFFAAIESGADTFDCVNPSRVARNGAIYSEDGRFNITRAQFRADFSALTPECDCYTCTNYSRAYIHHLFKAKEQLANTLATIHNEQYTVRLVARIREAMENGTYEEFKKETLARFYAGGWGRKVAPQTRRRGSRKGA

SEQ ID NO: 51214 - protein, 433 aa, Actinomyces coleocanis
  REGION 1..433: note = tr|C0VZ99|C0VZ99_9ACTO Queuine tRNA-ribosyltransferase OS=Actinomyces coleocanis DSM 15436 OX=525245 GN=tgt PE=3 SV=1
MGVTDNLDFERIDAQRGFEITARVDEVPIETPYGDKPLGRTGILTTAHGQIETPAFIPVGTLANVKGVLPEMMEDLGAQALLANAYHLYLTPGADIVDEAGGLGKFMNWEKPTYTDSGGFQVLSLGSGYKKVLSQEFSGQKPTAEQEAKEAVKRSRKSVDEDGVVFRSHHDGTKHRFNPEISLKIQHQLGADIMFAFDELTSLLHPYDYQVESLARTHRWAQRSLDAHWKLTAEQPERPYQQLFGVLQGAQFENLRRETARTLREMEFEGQGFDGYGLGGALEKENLGTIVSWLTSELPEEKPRHLLGISEPDDFFRAIEVGADTFDCVNPSRVARNAAIYTPDGRVNITNARFKRKFEPMVAGCGCYTCTHYTTAYVHHLFKTKEILASTLATIHNEWFTVHLVDTIREAIKNREYLACKEEVLGRFYSKKG

SEQ ID NO: 51215 - protein, 442 aa, Actinomyces europaeus
  REGION 1..442: note = tr|S2VVZ2|S2VVZ2_9ACTO Queuine tRNA-ribosyltransferase OS=Actinomyces europaeus ACS-120-V-Col10b OX=883069 GN=tgt PE=3 SV=1
MSNAPITQAHRERIEASRGFKVAAWLDEVQVETDDGPRPLGRVGTLQTAHGSIETPAFIPVGTLANVKGVLPEMMKELGAQALLANAYHLYLQPGADIVEAGGGLGEFMNWPGPTFTDSGGFQVLSLGSNYKKVLSQEFAGKKVTAEDEAAEAVRRNRAAVDDDGVVFRSHIDGAKHRFNPEISLSIQHQLGADIMFAFDELTSLLHPYDYQVESLARTHRWAQRSLDQHWRLTAENPDKPYQQLYGVLQGAQHKDLRNEAARTLTEMRTSVDLEQLGIDGEGFDGFGLGGALEKEKLGLIVSWLTSALPDNKPRHLLGISEPDDFFAAIEAGADTFDCVNPSRVARNAAIYTPYGRVNITNARFKRDFGPLANGCGCYTCQNYSTAYVHHLFKAHEILAATLATIHNEWFTVHLVDNIRESIRNGDYTEYKQETLAQFYGN

SEQ ID NO: 51216 - protein, 442 aa, Actinomyces europaeus
  REGION 1..442: note = tr|A0A2N6US70|A0A2N6US70_9ACTO Queuine tRNA-ribosyltransferase OS=Actinomyces europaeus OX=66228; GN = tgt PE=3 SV=1
MSNAPITQAHRERIEASRGFKVAAWLDEVEVETDDGPRPLGRVGTLQTAHGTIETPAFIPVGTLANVKGMLPEMMKELGAQALLANAYHLYLQPGADIVEAGGGLGKFMNWAGPTFTDSGGFQVLSLGSNYKKVLSQEFAGKKVTAEDEAAEAVRRNRAAVDEDGVVFRSHIDGTKHRFNPEISLSIQHQLGADIMFAFDELTSLLHPYDYQVESLARTHRWAQRSLDQHWRLTAENPDKPYQQLYGVLQGAQYKDLRNEAARTLTQMRTSPNLEQLGIDGEGFDGFGLGGALEKENLGLIVSWLTSALPDNKPRHLLGISEPDDFFAAIEAGADTFDCVNPSRVARNAAIYTPDGRVNITNARFKRDFGPLADGCGCYTCQNYTTAYVHHLFKAHEILASTLATIHNEWFTVHLVDSIRESIRNGEYTEYKQETLARFYGN

SEQ ID NO: 51217 - protein, 432 aa, Actinomyces hominis
  REGION 1..432: note = tr|A0A2N6UNV5|A0A2N6UNV5_9ACTO Queuine tRNA-ribosyltransferase OS=Actinomyces hominis OX=595468; GN = tgt PE=3 SV=1
MDRISRSQIDSQRGFVVQQRLEARSNTAVNAAGRPLGRAGVLTTAHGVIRTPAFIPVGTLATVKGVLPEQMAQLGAQALLANAYHLYLQPGDELVAQAGGVGAFMNWPGPTFTDSGGFQVLSLGSGYKKVLSDEFSGREPTSEEAAFEAVRRNRAVVDEDGVVFRSHRDGSKHRFNPEVSLSIQHNLGADIMFAFDELTSLRHPRSYQEESLERTHRWAQRSLDQHWRLTQEQPEKPYQQLFGVLQGAQYEDLRRHAARTLAAMTSHGEGFDGFGLGGALEKENLGRIVGWMTSELPEDKPRHLLGISEPDDFFRAIEAGADTFDCVNPSRVARNAAIYTRDGRFNVTNASCRTDFSPLDSTCGCYTCAHYTRAYVRHLFKAHEMLGPILATIHNEYFTVNLVKRIRQSILDGTYAEFKEDTLGRFYGARTQ

SEQ ID NO: 51218 - protein, 443 aa, Actinomyces hongkongensis
  REGION 1..443: note = tr|A0A1D8B028|A0A1D8B028_9ACTO Queuine tRNA-ribosyltransferase OS=Actinomyces hongkongensis; OX = 178339 GN=tgt PE=3 SV=1
MSADWLAAPPVPFSLPAAPPSGWRDRGFQVGARLASGSGLGRTGTIHTAHGIIRTPAFIPVGTKANVKALTPEMVEALGAQAVLANAYHLYLRPGSDVVDEAGGFARFMNWRGPTYTDSGGFQVLSLGAGFKKVLSQEFSGAADSDDPRLSAQAVRASNAVVDDDGVVFSSHIDGTKHRFTPEASMRIQHQLGADIMFAFDELTSLLHPRSYQVESLERTHAWARRCLVEHARLTEERRAMPYQQLWGVVQGAQWEDLRRRAARTMADMEADGQRFDGFGVGGALEKERLGTIVSWVCEELGEDRPRHLLGISEPEDLFAGVEAGADTFDCVNPSRVARNAAVYTPTGRYNITNARFKRDFSPLAPGCGCYTCTNHTRAYVHHLFKAKEILSSTLATIHNEWFTLRLVDAMRDSIERGCFEDFRDDMLGRYRSGGGREGRSAQ

SEQ ID NO: 51219 - protein, 429 aa, unidentified
  source 1..429: note = Actinomyces liubingyangii
  REGION 1..429: note = tr|A0A1Q5PLU0|A0A1Q5PLU0_9ACTO Queuine tRNA-ribosyltransferase OS=Actinomyces liubingyangii; OX = 1921764 GN=tgt PE=3 SV=1
MTPPPQPLPQSDPDPLPQQGDFSFEVTSQLPNGLGRTGVIHTPHGDIQTPAFIVVGTKATVKAVLPDSIRDLGAQATLANAFHLYLQPGPEILDEAGGLGQFMNWQGPTFTDSGGFQVMSLGSGFKKVLAMDTTGMQSDDVIAEGKTRRAHVDDDGVWFTSPLDGSKHRFTPEVSLQIQHQLGADIMFAFDELTTLAHTRSYQESSLERTRLWAQRCLREHRRLSIEREHRPYQALFGVIQGAQYEDLRRKACQDLSEMSIDGQQFDGFGLGGAIEKQRLGEIVGWCAQELPQNKPRHLLGISEPDDLFAACEMGADTFDCVNPSRVARNAAIYTNRGRYNVNRAVHKRDFRPLEEGCECYTCQNYTRAYLHHLFKAKEMLASTLATIHNEYWTVNLVEQIRLSMIEGRFEAFRDEFLGRYYENGGRLK

SEQ ID NO: 51220 - protein, 429 aa, Actinomyces marimammalium
  REGION 1..429: note = tr|A0A1Q5PSJ9|A0A1Q5PSJ9_9ACTO Queuine tRNA-ribosyltransferase OS=Actinomyces marimammalium; OX = 156892 GN=tgt PE=3 SV=1
MTDDSLTLTPAQTGNAQEETCFTVGTRLESGYGLGRTGTIHTPHGEIQTPAFIPVGTKATVKTVLPETVAELGAQAVLANAYHLYLQPGSDIVDEAGGLGKFMNWPGPTYTDSGGFQVLSLGSGFKKVLSQQFAGTANADTDVAEDKIRRAQVDDDGVWFKSHLDGSMHRFTSEISMRIQHELGADIIFAFDELTTLLNSYEYQVESLERTRLWAERCLRAHGQLTAQRAGKPRQLLFGVVQGAQYEDLRRKAARDLAAMEVDGWRFDGFGLGGALEKENLGKICAWVCEELPEDRPRHLLGISEPDDFFRAIEAGADTFDCVSPSRVARTSAVYLPTGRKNLTRAEFKRDFRPLDETCGCYTCQHYSRAYLHHLFKAKEMLGKTLATIHNEYFTVHLVDRIRQSIEDGTYEELKAEVLGNYYGSSSAS

SEQ ID NO: 51221 - protein, 408 aa, Actinomyces nasicola
  REGION 1..408: note = tr|A0A1Q5Q4Z1|A0A1Q5Q4Z1_9ACTO Queuine tRNA-ribosyltransferase OS=Actinomyces nasicola OX=208480; GN = tgt PE=3 SV=1
MSEVFTVGERLATGGRTGTIHTPHGDIQTPAFIPVATQATIKAVLPETIASLGAQAVLANAYHLYLQPGHEVVEAAGGLGRFMNWPGPTYTDSGGFQVLSLGSGFKKVLSDQFAGKANADTDVAEDKSRRAQVDDDGVWFTSHRDGTKHRFTPEVSMQVQHAIGADIIFAFDELTTLLNSYDYQVESLERTRLWAIRSLREHTRLMAAHPDRPRQLLFGVIQGAQYEDLRRKAARDLGAMEVDGAHFPGFGIGGALEKENLATIVRWVTEELPEDRPRHLLGISEPDDLFNAIAVGADTFDCVSPSRVARTSAVYTRTGRTNLLRSENRTAFVPIDETCTCYTCENYTRAYLHHLFKAKEMVGSTLATIHNEHFTLTLVDRIRKSITTGDFERLRADVLGDYYGQRCE

SEQ ID NO: 51222 - protein, 407 aa, Actinomyces nasicola
  REGION 1..407: note = tr|A0A1H3WF35|A0A1H3WF35_9ACTO Queuine tRNA-ribosyltransferase OS=Actinomyces nasicola OX=208480; GN = tgt PE=3 SV=1
MSEVFTLGTQLETGGRTGIIHTPHGDIHTPAFIPVATQATIKAVLPETIASLGAQAVLANAYHLYLQPGPEIVEEAGGLGRFMNWLGPTYTDSGGFQVLSLGSGFKKVLSDQFAGKANADTDIAEDKIRRAQVDDDGVWFTSHRDGTKHRFTPEVSMQVQHALGADIIFAFDELTTLLNSYDYQVESLERTRRWAERSLREITRLMDSHPERPRQLLFGVIQGAQYEDLRRKSARDLGAMEVDGHQFPGFGIGGALEKENLATIVRWVTEELPEDRPRHLLGISEPDDLFNAIAVGADTFDCVSPSRVARTSAVYTRTGRTNLLRSENRTRFEPIDDSCPCYTCTHYTRAYLHHLFKAKEMVASTLATIHNEFFTITLVDRIRTAISEGNFVELRSEVLGDYYGQKV

SEQ ID NO: 51223 - protein, 405 aa, unidentified
  source 1..405: note = Actinomyces neuii
  REGION 1..405: note = tr|A0A2I1IKU3|A0A2I1IKU3_9ACTO Queuine tRNA-ribosyltransferase OS=Actinomyces neuii OX=33007; GN = tgt PE=3 SV=1
MKGFEIGVRLEGHLGRTGTIHTPHGDIATPAFIPVGTKATVKAVLPESMADLGAQALLANAYHLYLQPGPQIVDEAGGLAAFMNWPGPTYTDSGGFQVLSLGAGYKKVLSEEFSGKTTAPISKPQLKNRATVDEDGVVFRSHLDGSKHRFTPEISMQIQHHLGADIMFAFDELTSLVHPYDYQVTSLERTRRWAERCLSAHKQLTAERANKPYQQLFGVLQGAQYEDLRRKAARDLGTMEIDGISFDGFGIGGALEKENLGKIVGWVCEELPESKARHLLGISEPDDFFSAIENGADTFDCVNPSRVARNAAIYLPGGRVNITRAEFKRDFRPLDEKCECYTCTHYTRAYLHHLFKAKEMLASTLATIHNEHFTVTLVAGIRRAIEEGYYHEFKTQTLGRFYGKK

SEQ ID NO: 51224 - protein, 404 aa, unidentified
  source 1..404: note = Actinomyces neuii
  REGION 1..404: note = tr|K0ZIR1|K0ZIR1_9ACTO Queuine tRNA-ribosyltransferase OS=Actinomyces neuii BVS029A5; OX = 888439 GN=tgt PE=3 SV=1
MTSFDIGARLDGKLGRTGIIHTPHGDIPTPAFIPVGTKATVKAVLPESMRSLGANALLANAYHLYLQPGPEIVDEAGGLSKFMNWDGPTYTDSGGFQVLSLGAGYKKVLSQEFSGKTTAPVSQPQLKNRAKVDEDGVVFRSHLDGSKHRFNPEVSMRIQHQLGADIMFAFDELTSLVHPYDYQVTSLERTRRWAERCLSAHAKLTEERADKPHQQLFGVLQGAQYEDLRRKAARDLGSMEIDGTTFDGFGIGGALEKENLGTIVGWVCEELPEDKARHLLGISEPDDFFTAIENGADTFDCVNPSRVARNAAIYMPTGRVNITRAEFKRDFRPLDDNCTCYTCTHYSRAYLHHLFKAKEMLSATLATIHNEHFTVQLVANIRKSIEEGYYEDFKTETLGRFYGN

SEQ ID NO: 51225 - protein, 441 aa, Actinomyces sp.
  REGION 1..441: note = tr|J3J7W7|J3J7W7_9ACTO Queuine tRNA-ribosyltransferase OS=Actinomyces sp. ICM58; OX = 1105030 GN=tgt PE=3 SV=1
MNAHWLGAPSPEQVAPFSAPASSGAHRPDRGFEVGARLEAERGLGRTGVIHTAHGTIATPAFIPVGTKANVKALTPEMVRSLGAQAVLANAYHLYLQPGSDIVDEAGGFASFMNWAGPTYTDSGGFQVLSLGAGFKKVLSQEFSGQADPSDPAVQMQAIKASNAVVDDDGVVFSSHIDGTKHRFNPEVSMGIQHQLGADIMFAFDELTSLLHPRDYQVESLERTHAWARRCLVEHGRLTRERAGKPYQQLWGVIQGAQWEDLRRRAARTMADMEADGQRFDGFGVGGALEKENLGTIVSWVCEELGEDRPRHLLGISEPEDLFAGVAAGADTFDCVNPSRVARNAAIYTPDGRFNITNARFKRDFTPLVEGCECYTCTHYTRAYVHHLFKAKEILSSTLATIHNEWFTLRLVDAIRASIKDGCFEEFRSDMLGRYQAGRRP

SEQ ID NO: 51226 - protein, 415 aa, Actinomyces sp.
  REGION 1..415: note = tr|D0WLD0|D0WLD0_9ACTO Queuine tRNA-ribosyltransferase OS=Actinomyces sp. oral taxon 848 str. F0332 OX=649743 GN=tgt PE=3 SV=1
MTFEIRARLDAHPLARTGVLATPHGDIATPAFVPVGTKATVKAVAPEAIADVGAQAVLANAYHLYLQPGSDIVDEAGGLGKFMNWPGPTFTDSGGFQVLSLGSGFKKVLSEEFSGSPHADGTVAPWKERLADVDDDGVWFRSHLDGSRHRFTPEVSMRIQYELGADVIFAFDELTTLLNSRAYQEEALERTRRWALRCLAAHRALTAEREGKPYQQLFGVVQGAQYEDLRRKAARDLGAMEADGQRFDGFGIGGALEKENLGTIVGWVSQELPEDRARHLLGISEPDDFFAAVEAGADTFDCVNPSRVARNAAIYSPDGRFNLTRAQFRRDFNPLVPGCGCYTCTHYSRAYLHHLYKAKEMLFSTLATIHNEHFTVQLVDGIRAAIETGDYADFKEETLGRFYAGKWGRSAGEKQ

SEQ ID NO: 51227 - protein, 415 aa, unidentified
  source 1..415: note = Actinomyces tangfeifanii
  REGION 1..415: note = tr|A0A1D9MMM1|A0A1D9MMM1_9ACTO Queuine tRNA-ribosyltransferase OS=Actinomyces tangfeifanii; OX = 1912795 GN=tgt PE=3 SV=1
MPAQETFSFEVTSTLPNGKGRTGIIHTPHGDIHTPAFIVVGTKATVKAVLPDNIKDLGAQATLANAFHLYLQPGPQILDQAGGLGQFMNWSGPTFTDSGGFQVMSLGSGFKKVLAMDMAGKQTDDVLAEGTTRRAHVDDDGVWFTSHLDGSKHRFTPEISLQIQHQLGADIMFAFDELTTLAHTRAYQESSLERTRLWAQRCLREHRRLSIEREHRPYQALFGVIQGAQYEDLRRKACQDLSAMCIDGQEFDGFGLGGAIEKENLGTIVGWCAEELPANKPRHLLGISEPDDLFAACEMGADTFDCVNPSRVARNAAIYTADGRYNVSRAACKDDFGPLEEGCECYTCQHYSRAYLHHLFKAKEMLFSTLATIHNEYWTVQLVENIRKAMLAGEFETYRDEFLGRYYANGGRVKF

SEQ ID NO: 51228 - protein, 415 aa, unidentified
  source 1..415: note = Actinomycetaceae bacterium
  REGION 1..415: note = tr|A0A179B365|A0A179B365_9ACTO Queuine tRNA-ribosyltransferase OS=Actinomycetaceae bacterium BA112 OX=1823756 GN=tgt PE=3 SV=1
MTFEIRARLDAHPLARTGVLATPHGEIATPAFVPVGTKATVKAVAPEAIADVGAQAVLANAYHLYLQPGSDIVDEAGGLGKFMNWPGPTFTDSGGFQVLSLGSGFKKVLSEEFSGSPHADGTVAPWKERLADVDDDGVWFRSHLDGSRHRFTPEVSMRIQHELGADVIFAFDELTTLLNSRAYQEEALERTRRWALRCLAAHRALTAEREGKPYQQLFGVVQGAQYEDLRRKAARDLGAMEADGQRFDGFGIGGALEKENLGTIVGWASQELPEDRARHLLGISEPDDFFAAVEAGADTFDCVNPSRVARNAAIYSPDGRFNLTRAQFRRDFNPLVPGCDCYTCTHYSRAYLHHLYKAKEMLFSTLATIHNEHFTVRLVDGIRAAIETGDYADFKEETLGRFYAGKWGRSAGEKQ

SEQ ID NO: 51229 - protein, 394 aa, unidentified
  source 1..394: note = Actinomycetales bacterium
  REGION 1..394: note = tr|A0A524B3X8|A0A524B3X8_9ACTO Queuine tRNA-ribosyltransferase OS=Actinomycetales bacterium mxb001 OX=1962179 GN=tgt PE=3 SV=1
MPDSPGRTGIITTPHGQIRTPAFIPVGTKATVKALLPESVRDLGAQAVLANAYHLYLQPGADIVAEAGGLGAYMNWSGPTFTDSGGFQVLSLGAGFKKVLAMDAGQRDDDVIAPGKERLAVVDDDGVTFRSHLDGSEHRFTPEVSMRVQADIGADIAFAFDELTTLNNTRDYQDLSLERTRLWAERCLVEHARLREVHPHRPYQALFGVIQGAQYEDLRRKAARDLGAMDFDGFGIGGAIEKVSLPEIVGWVTSELPDDRPRHLLGIGEPGDLFAGVAAGADTFDCVSPSREARNSAVYTPDGRFNLLTSASRRAFVPIDEECDCYTCANYTRAYLHHAFKAKEMIGATLATIHNIRFTVRLVDRMREAMESGDFAAYRDEFLGRYYAGRDASA

SEQ ID NO: 51230 - protein, 406 aa, unidentified
  source 1..406: note = Actinomycetales bacterium
  REGION 1..406: note = tr|A0A1Z9D781|A0A1Z9D781_9ACTO Queuine tRNA-ribosyltransferase OS=Actinomycetales bacterium TMED115 OX=1986615 GN=tgt PE=3 SV=1
MGEDRSLPGSQLGRSGVITTPHGQIRTPAFIPVGTKATVKTVLPESMRDLGAQAVLANAYHLYLQPGADIVEAAGGLGAFMNWPGPTFTDSGGFQVLSLGVGFKKVLAMDVSDRTVDDVVAPGKDRLAHVDDDGVTFTSHLDGSRHRFTAEVSMQVQHALGADIIFAFDECTTLMNSRDYQQVAMRRTLEWAKRCIAEHRRITADRPERAYQALFGVIQGAQYEDLRRQAASDIAALPFDGFGIGGAIEKERMADIVRWVCEELPEDKPRHLLGIGEPQDFFTAIASGADTFDCVSPARVARNSALYTSRGRFNVTASINRRTFAPIEEGCTCYTCKNYTRAYLHHAFKAKESIAATLATIHNQHFIVNLVDNIRVAIEAGDFHAYREAFVGGYANNGQAGSQAGG

SEQ ID NO: 51231 - protein, 565 aa, Actinoplanes sp.
  REGION 1..565: note = tr|G8S1R3|G8S1R3_ACTS5 Drug resistance transporter, EmrB/QacA subfamily OS=Actinoplanes sp. (strain ATCC 31044 / CBS 674.73 / SE50/110) OX=134676 GN=ACPL_1277 PE=3 S V=1
MSHPTPTAARPAAEFTHRQILTILAGLMMGMFLAALDQTIMATATRTIADDLNGFDLQAWATTAFLITSTISTPLYGKLSDIYGRRPFFLFAIGIFIVGSMLCGLSQNMYELAAFRAIQGIGAGGLMSLALAIIGDIVPPRERAKYQGFFLAVFGTASVLGPILGGFFAGADQLLWVDGWRWVFYLNVPIGIAAMAVVAKVLHLPHTRVNHRIDWPGAVALIVGLVPLLTVAEQGRTWGWDSGRSILCYVIGVVGLISFVIAERAYKDEALLPLRLFGNRTIAVGTGASTILGIAMFGGLMTVPLYLQIVKGSSATMAGLQMIPFVFGIMSGSIIAGQLIARTGRYRIFPILGSTFMVIALFLFSLVGADTPLWRTMLIMVLMGLGLGGNMQPMITAVQNAVSPREIGVATGAVTFFRSMGGTMGTAVFLSVLFNVLPGNIRDAYADAAKNPEFLKAAADPTQQQLLKQAQGGGGLSDTSFINKLTDVVAHPFKVGFSDSVHVVYLLAFAIMLVGLVIVFFLPEIPLAMRSAQQQRADDAAAQGDASGADQGTAGVKAGTEGFAH

SEQ ID NO: 51232 - protein, 824 aa, Actinoplanes sp.
  REGION 1..824: note = tr|G8SL54|G8SL54_ACTS5 Drug resistance transporter, EmrB/QacA subfamily OS=Actinoplanes sp. (strain ATCC 31044 / CBS 674.73 / SE50/110) OX=134676 GN=ACPL_7379 PE=3 S V=1
MSATGGAPPLSHRQILQVLSGLMLGMFLAALDQTIVASAIRTIGDDLHGLSLQAWVTTAYLITATISTPLYGKLSDIYGRKRFFVTAITIFVVGSAACSFATSMYQLAVFRAVQGLGAGGLFSLALAIIGDLVPPRERARYQGYFLAVFGASSVLGPVIGGFFAGADEILGLSGWRWVFLVNVPIGAVALVVVAKVLHLRHTRRDHRIDWWGAVALCVCLVPLLTAAEQGRTWGWTGSRTVLCYAVGAAGLVAFLVAEARMGAEALIPLRFFRNRTFALTSFAGFVTGMGMFGGLALLPLYLQIVHGASPTRSGLQLLPLTAGIMAGSLISGRAISATGRYRVWPMLGAPLMIGGMGLMHSLAVDTPYWRTGVFMGLFGLGLGFVLQPVTLAVQNAMPPQDMGVATASATFFRQMGATAGTAVFLSLLFSRVGDRIRDALRVAGADPAFQKLMADPANRRVLGGSLDDTSFLRHVDPVLARPFESGFAATIADICLVAGGVLTVALILFAFLPQVPLRGSAPAGPAELSPSSGSATDLSPSPGSATASPASSRSPHSPSPPARSVDALSLSGVVTGLDQRPLTGARLTLADLAGGQAARAVTGPDGRYLLTPEVAGAYLLICAADRHQPAAIRLTVTGADARDVRLAAGGRIEGDVVDQHDRPVAAATVTLTDAAGAVVASAITGPDGGYVLAGLYPAEYTLTGIAPGARPAARTVVLDTGGVSRADLLLAGNGTLTGQVRAAASGHPVPEASVMAVDEAGAVVATTWTDADGRYAFADLVPGAYTVTASGYPPVADRVELIGELTAHDIMLGGPREGSRLISP

SEQ ID NO: 51233 - protein, 421 aa, unidentified
  source 1..421: note = Actinotignum sanguinis
  REGION 1..421: note = tr|A0A430JMX9|A0A430JMX9_9ACTO Queuine tRNA-ribosyltransferase OS=Actinotignum sanguinis; OX = 1445614 GN=tgt PE=3 SV=1
MTTGFTIGTRLDARVGDRTGQPLGRTGVIHTPHGDIATPAFIPVGTKATVKTLTPEQVRGIGAQAVLANAYHLYLQPGPEILDAAGGLAAFMNWNGPTYTDSGGFQVLSLGSGFKKVLTNEYAGKNAGRADTELARDKERLANVDDDGVWFRSHLNGSRHRFTPEVSMGIQHQLGADIMFAFDELTTLLNSRAYQEKSLERTRRWAQRCLAEHRRLTIERVGKPYQQLFGVIQGAQYEDLRRKAARDLGSMCVDGQEFDGFGIGGALEKEKLGTICAWVSEELPETKARHLLGISEPDDFFAAIEAGADTFDCVNPSRVARNAAIYSPDGRFNVTRAQFRTDFGPLVPECECYTCQNYSRAYLNHLFKAKEALAATLATIHNEYFTVHLVDTIRAAIESGDYAACKEETLGRFYRGQWGRA

SEQ ID NO: 51234 - protein, 421 aa, unidentified
  source 1..421: note = Actinotignum schaalii
  REGION 1..421: note = tr|S2VP63|S2VP63_9ACTO Queuine tRNA-ribosyltransferase OS=Actinotignum schaalii FB123-CNA-2 OX=883067 GN=tgt PE=3 SV=1
MTTGFTIGTRLDARVGDLTGRPLGRTGVIHTPHGDIATPAFIPVGTKATVKTLTPEQVRGIGAQAVLANAYHLYLQPGPEILDAAGGLSAFMNWNGPTYTDSGGFQVLSLGSGFKKVLTNEYAGKNAGRADTELARDKERLANVDDDGVWFRSHLNGSRHRFTPEVSMGIQHQLGADIMFAFDELTTLLNSRAYQEKSLERTRRWAERCLAEHRRLTIERAGKPYQQLFGVIQGAQYEDLRRKAARDLGSMCVDGQEFDGFGIGGALEKEKLGTICAWVSEELPETKARHLLGISEPDDFFAAIEAGADTFDCVNPSRVARNAAIYSPDGRFNVTRAQFRTDFGPLVPECECYTCQNYSRAYLNHLFKAKEALAATLATIHNEYFTVHLVDTIRAAIESGDYAACKEETLGRFYRGQWGRA

SEQ ID NO: 51235 - protein, 421 aa, unidentified
  source 1..421: note = Actinotignum schaalii
  REGION 1..421: note = tr|A0A068NN04|A0A068NN04_9ACTO Queuine tRNA-ribosyltransferase OS=Actinotignum schaalii OX=59505; GN = tgt PE=3 SV=1
MTTGFTIGTRLDARVGDLTGRPLGRTGVIHTPHGDIATPAFIPVGTKATVKTLTPEQVRGIGAQAVLANAYHLYLQPGPEILDAAGGLSAFMNWNGPTYTDSGGFQVLSLGSGFKKVLSNEYAGKNAGRADTELARDKERLANVDDDGVWFRSHLNGSRHRFTPEVSMGIQHQLGADIMFAFDELTTLLNSRAYQEKSLERTRRWAERCLAEHRRLTIERAGKPYQQLFGVIQGAQYEDLRRKAARDLGAMCVDGQEFDGFGIGGALEKEKLGTICAWVSEELPETKARHLLGISEPDDFFAAIEAGADTFDCVNPSRVARNAAIYSPDGRFNVTRAQFRTDFGPLVPDCECYTCQNYSRAYLNHLFKAKEALAATLATIHNEYFTVHLVDTIRAAIESGDYAACKEETLGRFYRGQWGRA

SEQ ID NO: 51236 - protein, 421 aa, unidentified
  source 1..421: note = Actinotignum timonense
  REGION 1..421: note = tr|A0A2I2J307|A0A2I2J307_9ACTO Queuine tRNA-ribosyltransferase OS=Actinotignum timonense; OX = 1870995 GN=tgt PE=3 SV=1
MTTGFTIGTRLDARVGDLTGRPLGRTGVIHTPHGDIATPAFIPVGTKATVKTLTPEQVRGIGAQAVLANAYHLYLQPGPEILDAAGGLSAFMNWNGPTYTDSGGFQVLSLGSGFKKVLSNEYAGKNAGRADTELARDKERLANVDDDGVWFRSHLNGSRHRFTPEVSMGIQHQLGADIMFAFDELTTLLNSRAYQEKSLERTRRWAERCLAEHRRLTIERAGKPYQQLFGVIQGAQYEDLRRKAARDLGSMCVDGQEFDGFGIGGALEKEKLGTICAWVSEELPETKARHLLGISEPDDFFAAIEAGADTFDCVNPSRVARNAAIYSPDGRFNVTRAQFRTDFGPLVPGCECYTCQNYSRAYLNHLFKAKEALAATLATIHNEYFTVHLVDTIRAAIESGDYAACKEETLGRFYRGQWGRA

SEQ ID NO: 51237 - protein, 438 aa, unidentified
  source 1..438: note = Actinotignum urinale
  REGION 1..438: note = tr|A0A2N6V0G6|A0A2N6V0G6_9ACTO Queuine tRNA-ribosyltransferase OS=Actinotignum urinale OX=190146; GN = tgt PE=3 SV=1
MDKVGFTVETRLDVRCGSETGKPLGRTGVIHTPHGNIATPAFIPVGTKATVKTLNPEQVKGVGAQAVLSNAYHLYLQPGSDVVDEAGGLGAFMNWDGPTYTDSGGFQVLSLGSGFKKVLSNEYASKADGRADMETATDRERLANVDDDGVWFRSHLDGSKHRFTPEVSMGIQHELGADIMFAFDELTTLLNSRGYQETSLERTRLWAQRCLIEHQRLTQERVGKPYQQLFGVVQGAQYEDLRRKAARDLGAMNMNGQMFDGFGIGGALEKENLGTIVGWVSEELPENKARHLLGISEPDDFFAAIEAGADTFDCVNPSRVARNGAIYSPDGRFNVTRYQFRRDFRQLVEGCECYTCSNYTRAYLNHLFKAKEMLGYALATIHNEHYTVKLVDDIRASIENGNYTDFKEETLGRFYAGNWGRIDAKPKSALKKRGEKAR

SEQ ID NO: 51238 - protein, 376 aa, unidentified
  source 1..376: note = Acutalibacter muris
  REGION 1..376: note = tr|A0A1Z2XQH5|A0A1Z2XQH5_9FIRM Queuine tRNA-ribosyltransferase OS=Acutalibacter muris OX=1796620; GN = tgt PE=3 SV=1
MYRLIKTEGTARRGELATVHGMVQTPGFMNVATAGAIKGAVSAYDLMELGCQVQLCNTYHLHLRPGDETVKRLGGIRKFTGWQGPVLTDSGGFQVFSLAKLRDIREEGVTFSSHIDGRKIFMGPEESMRIQSNLGSTIAMAFDECVENPAEYEYAKMSCARTARWLERCKAEMARLNREEGTLNPNQMLFGINQGCTYHDLRIEHMKRIAEMGLDGYGIGGLAVGETAGEMYSVIEAIEPHMPKDKIRYLMGVGTPANLLEAVRRGVDLFDCVMPTRNARHGHAFTMEGCRNMLNAKYVLDEAPLDETCDCPVCRRFTRAYIHHLFKAGEMLAMRLTVMHNLYFYNHLLAKIRDALDEGRFEAFYKENIETVGRRI

SEQ ID NO: 51239 - protein, 376 aa, unidentified
  source 1..376: note = Acutalibacter sp.
  REGION 1..376: note = tr|A0A3A9EKI1|A0A3A9EKI1_9FIRM Queuine tRNA-ribosyltransferase OS=Acutalibacter sp. 1XD8-33; OX = 2320081 GN=tgt PE=3 SV=1
MYQLLKTEGMARRGRFVTVHGTVQTPGFMNVATAGAIKGAVSAYDLKELGCQVQLCNTYHLHLRPGDETVKALGGIRKFTGWEGPVLTDSGGFQVFSLAKLRNIREEGVTFASHIDGRRIFMGPEESMRIQSNLGSTIAMAFDECVENPAPYDYAKSSCARTARWLRRCKEEMARLNARQDTLNPSQLLFGINQGCTYQDLRVEHMKEIAALDLDGYGIGGLAVGETAEEMYAVIEAIEPHMPKDKIRYLMGVGTPANILEAVRRGVDLFDCVMPTRNARHGHAFTAEGCRNLMNAKYRLDQAPLDESCGCPVCRSFTRAYVHHLLKAGEMLGMRLAVMHNLYFYNHLLERIRAALDEGRFEAFYRENIEVISRRI

SEQ ID NO: 51240 - protein, 376 aa, Adhaeribacter aerolatus
  REGION 1..376: note = tr|A0A512B4D7|A0A512B4D7_9BACT Queuine tRNA-ribosyltransferase OS=Adhaeribacter aerolatus; OX = 670289 GN=tgt PE=3 SV=1
MTFELTAKDIHSKARAGEITTAHGTIQTPIFMPVGTAGTVKAVHQRELTNDIQAQIILGNTYHLYLRPGLEVLEQAGGLHKFNGWDQPILTDSGGYQVYSLSGTRKIVEEGVKFKSHIDGSTHFFSPEGVMDIQRTIGADIMMAFDECTPYPCEYNYAKKSLDMTHRWLQRCCDRFDSTEGKYGYDQTLFPIVQGSTYKDLRIQSAETIASFNREGNAIGGLSVGEPAEMMYEFTELVCDILPADKPRYLMGVGTPANILENIALGVDMFDCVLPTRNARNGMLFTSQGIINIRNERWKNDFSPIDETVGGYASTFYSKAYLRHLVHSGEMLGSQISSVHNLTFYLWLVKQAREHIIAGDYLAWKDKMVKQVMQRL

SEQ ID NO: 51241 - protein, 376 aa, Adhaeribacter sp.
  REGION 1..376: note = tr|A0A2T2YMP1|A0A2T2YMP1_9BACT Queuine tRNA-ribosyltransferase OS=Adhaeribacter sp. HMF7605; OX = 2072846 GN=tgt PE=3 SV=1
MTFTLTAHDKESKARAGTLTTAHGIIQTPIFMPVGTAGTVKAVHQREIKEDIQAQIILGNTYHLYLRPGLNTLEQAGGLHKFNGWDQPILTDSGGYQVYSLSGTRKIVEEGVKFKSHIDGSTHFFSPENVMDIQRTIGADIIMAFDECTPYPCEYNYARKSMDMTHRWLQRCCERFDNMESKYGYEQNLFPIVQGSTFKDLRQKSAETIASFNRAGNAIGGLSVGEPADMMYEMTELVCDILPADKPRYLMGVGTPANILENIALGIDMFDCVLPTRNARNGMLFTTQGIINIRNEKWKNDFSPIDETLGGYASTFYTKAYLRHLVHSGEMLGAQISSVHNLTFYLWLVKQAREQILAGTFRAWKDKMVKDLMVRL

SEQ ID NO: 51242 - protein, 376 aa, Adhaeribacter sp.
  REGION 1..376: note = tr|A0A369QAQ2|A0A369QAQ2_9BACT Queuine tRNA-ribosyltransferase OS=Adhaeribacter sp. HMF7616; OX = 2072847 GN=tgt PE=3 SV=1
MLFTLTAHDKETKARAGTLTTDHGLIQTPIFMPVGTAGTVKAVHQREIRDDIQAQIILGNTYHLYLRPGLQTLEQAGGLHRFNGWDKPILTDSGGYQVYSLSGTRKIVEEGVKFKSHIDGSTHFFSPENVMDIQRTIGADIIMAFDECTPYPCEYNYARKSMDMTHRWLQRCCDRFDATESKYGYEQNLFPIVQGSTYKDLRVKSAETIASFNRAGNAIGGLSVGEPAEMMYEMTELVCDILPADKPRYLMGVGTPANILENIALGVDMFDCVLPTRNARNGMLFTTQGIINIRNEKWKNDFSPIDETLGGYASTFYSKAYLRHLVHSGEMLGAQISSVHNLTFYLWLVKQARKQILAGTFRTWKDKMVKDLMVRL

SEQ ID NO: 51243 - protein, 381 aa, Adlercreutzia equolifaciens
  REGION 1..381: note = tr|A0A3E2ER20|A0A3E2ER20_9ACTN Queuine tRNA-ribosyltransferase OS=Adlercreutzia equolifaciens; OX = 446660 GN=tgt PE=3 SV=1
MALFDCTCDATSGHARALTYTTAHGDFHTPMFMPVGTSATVKGITTSQLRELGSQVVLANTYHLAMRPGADLVAEAGGIHRFMNYDGPMLTDSGGFQVFSLADTVKLSDDGVTFQSIYDGSKIHWTPEENMRIQELIGADIAMQLDQCAPYPATREFVARAVDYSSAWARRCLAAHKRPDQTLFGIVQGGMHLDLRLESVRRLREIEEESLTAGGRRFGGYGIGGYSVGEDHEVMFETLGEVARACPDDRPRYLMGVGNPTTLVRAVREGVDMFDCVLPTRTARMGTAFSSAGRMNMRNAKYARDFTPLDPTCDCPTCKNHTRAYIRHLVKQNEMLGAILLSVHNLHFLLDLMRRAREAVLADAYEEFFEQWMESDAAADY

SEQ ID NO: 51244 - protein, 379 aa, Advenella incenata
  REGION 1..379: note = tr|A0A4Q7VSW1|A0A4Q7VSW1_9BURK Queuine tRNA-ribosyltransferase OS=Advenella incenata OX=267800; GN = tgt PE=3 SV=1
MPGLSFSLIKTEGKARRASITLNHGTVQTPMFMPVGTYGSVKAMLPHELEEIGAQVVLGNTFHLWLRPGTEVIEKHDGLHGFMQWKKPILTDSGGFQVFSLSDLRSKITEEGVKFSSPIDGSRLFLTPEESMRIQRALNSDIVMVFDECTPYTIDGRPATHDEAARSMRMSLRWAQRSRDAFDTLQNPNALFGIVQGGMFEDLRDESLAGLQRIGFDGYAIGGLSVGEPKPDMRRILAHIAHQLPDNAPRYLMGVGTPEDLVEGVSQGVDMFDCVMPSRNARNGWLFTRFGDIKIRNARYRDDTRPLDPTCACHTCRHFSRAYLHHMQKANEITGARLNTLHNLHFYLRIMEEMREALEQNRFAQWQEQFFTDRSKGID

SEQ ID NO: 51245 - protein, 379 aa, Advenella kashmirensis
  REGION 1..379: note = tr|A0A356LEH1|A0A356LEH1_9BURK Queuine tRNA-ribosyltransferase OS=Advenella kashmirensis; OX = 310575 GN=tgt PE=3 SV=1
MPGLSFSLIKTEGKARRASITLNHGTVQTPMFMPVGTYGSVKAMLPHELEEIGAQVVLGNTFHLWLRPGTEVIEKHDGLHGFMQWKKPLLTDSGGFQVFSLSDLRSKITEEGVKFSSPIDGSRLFLTPEESMRIQRALNSDIAMVFDECTPYTIDGRPATHDEAARSMRMSLRWAQRSRDAFDTLQNPNALFGIVQGGMFEDLRDESLAGLQRIGFDGYAIGGLSVGEPKPDMRRILAHIAHQLPDNAPRYLMGVGTPEDLVEGVSQGVDMFDCVMPSRNARNGWLFTRFGDIKIRNARYRDDTRPLDPTCACHTCRHFSRAYLHHMQKANEITGARLNTLHNLHFYLNIMEQMRQALEQGRFAHWQEQFFIDRSKGID

SEQ ID NO: 51246 - protein, 379 aa, Advenella kashmirensis
  REGION 1..379: note = tr|I3UA17|I3UA17_ADVKW Queuine tRNA-ribosyltransferase OS=Advenella kashmirensis (strain DSM 17095 / LMG 22695 / WT001) OX=1036672 GN=tgt PE=3 SV=1
MPGLSFSLIKTEGKARRASITLNHGTVQTPMFMPVGTYGSVKAMLPHELEEIGSQVVLGNTFHLWLRPGTEVIEKHDGLHGFMQWKKPILTDSGGFQVFSLSDLRSKITEEGVKFSSPIDGSRLFLTPEESMRIQRALNSDIVMVFDECTPYTIDGRPATHDEAARSMRMSLRWAQRSRDAFDTLQNPNALFGIVQGGMFEDLRDESLAGLQRIGFDGYAIGGLSVGEPKPDMRRILAHIAHQLPDNAPRYLMGVGTPEDLVEGVSQGVDMFDCVMPSRNARNGWLFTRFGDIKIRNARYRDDTRPLDPTCACHTCRHFSRAYLHHMQKANEITGARLNTLHNLHFYLRIMEEMREALEQGRFAQWQEQFFIDRSKGID

SEQ ID NO: 51247 - protein, 379 aa, Advenella mimigardefordensis
  REGION 1..379: note = tr|W0PIR0|W0PIR0_9BURK Queuine tRNA-ribosyltransferase OS=Advenella mimigardefordensis DPN7 OX=1247726 GN=tgt PE=3 SV=1
MPGLSFSLIKTEGKARRASITLNHGTVQTPMFMPVGTYGSVKAMLPHELDDIGAQVVLGNTFHLWLRPGTDVIEKHDGLHGFMQWKKPILTDSGGFQVFSLSDLRSKITEEGVKFSSPIDGSRLFLTPEESMRIQRSLNSDIVMVFDECTPYTIDGRPATHDEAARSMRMSLRWAQRSRDAFNALQNPNALFGIVQGGMFEDLRDESLAGLQRIGFDGYAIGGLSVGEPKEDMRRILAHIAHQLPDNAPRYLMGVGTPEDLVEGVSQGVDMFDCVMPSRNARNGWLFTRFGDIKIRNARYRDDTRPLDPTCACHTCQHFSRAYLHHMQKANEITGARLNTLHNLHFYLNLMEQMREALEQGRFAQWQEQFFTDRSKGID

SEQ ID NO: 51248 - protein, 379 aa, Advenella sp.
  REGION 1..379: note = tr|A0A2M9TZY5|A0A2M9TZY5_9BURK Queuine tRNA-ribosyltransferase OS=Advenella sp. S44 OX=1982755; GN = tgt PE=3 SV=1
MSGLSFSLLKTEGKARRASITLNHGTVQTPMFMPVGTYGSVKAMLPHELEEIGAQVVLGNTFHLWLRPGTDVIEKHGGLHGFMQWEKPILTDSGGFQVFSLSDLRSKITEEGVKFSSPIDGSRLFLTPEESMRIQRKLNSDIVMVFDECTPYSIDGRPASHDEAASSMRMSLRWAQRSRDAFDSLQNPNALFGIVQGGMFEDLRDESLAGLQGIGFDGYAIGGLSVGEPKADMRRILAHIAHQLPENAPRYLMGVGTPEDLVEGVSQGVDMFDCVMPSRNARNGWLFTRFGDIKIRNARYRDDTRPLDPSCACHTCRHFSRAYLHHMQKANEITGARLNTLHNLYFYLQIMKEMREALEQGRFGQWQEQFFTDRSKGID

SEQ ID NO: 51249 - protein, 376 aa, Aequorivita antarctica
  REGION 1..376: note = tr|A0A5C6YXN2|A0A5C6YXN2_9FLAO Queuine tRNA-ribosyltransferase OS=Aequorivita antarctica; OX = 153266 GN=tgt PE=3 SV=1
MHFKLEATDLQSSARAGTITTDHGVIETPIFMPVGTVGTVKGVHQRELKEDINPDVILGNTYHLYLRPQMPVLEKAGGLHKFMNWDRNILTDSGGYQVYSLSANRKIKEEGVKFKSHIDGSYHFFTPENVMEIQRTIGADIIMAFDECAPYPCDYNYAKRSMHMTHRWLDRCIKHLEKTPLKYDYGQTFFPIVQGSTYKDLRKQSAEYIASVGAEGNAIGGLSVGEPAEEMYEMTAIVTEILPKEKPRYLMGVGTPINILENIALGIDMFDCVMPTRNGRNGMLFTSEGIINIKNKKWEADLSVIDPMGITWVDTEYNKAYLRHLFTVNEMLGRQIATIHNLGFYLWLVREARKHILAGDFAQWKNSMVKKLDQRL

SEQ ID NO: 51250 - protein, 376 aa, Aequorivita lipolytica
  REGION 1..376: note = tr|A0A5C6YM17|A0A5C6YM17_9FLAO Queuine tRNA-ribosyltransferase OS=Aequorivita lipolytica; OX = 153267 GN=tgt PE=3 SV=1
MHFKLEATDLQSSARAATITTDHGVIETPIFMPVGTLGTVKGVHQRELKEDINPDVILSNTYHLYLRPQTPVLEKAGGIHKFINWDRNILTDSGGYQVYSLSANRKIKEEGVKFKSHIDGSYHVFTPENVMEIQRTIGADIIMAFDECTPYPCEYNYAKRSMHMTHRWLDRCIKHLEKTPLKYDYGQTFFPIVQGSTYKDLRKQSAEYIASVGAEGNAIGGLSVGEPADEMYEMTAVVTEILPKEKPRYLMGVGTPANILENIALGVDMFDCVMPTRNGRNGMIFTSEGTINIKNKKWEADLSAIDPMGITWVDTEYSKAYLRHLFTVNEMLGRQIATIHNLGFYLWLVREARKHILAGDFAAWKNGMVKKLDQRL

SEQ ID NO: 51251 - protein, 376 aa, unidentified
  source 1..376: note = Aequorivita soesokkakensis
  REGION 1..376: note = tr|A0A1A9LDW5|A0A1A9LDW5_9FLAO Queuine tRNA-ribosyltransferase OS=Aequorivita soesokkakensis; OX = 1385699 GN=tgt PE=3 SV=1
MHFKLEATDLQSSARAATITTDHGVIETPIFMPVGTVGTVKGVHQRELKQDINPDIILGNTYHLYLRPQTPVLEKAGGLHKFMNWDRNILTDSGGYQVYSLSANRKIKEEGVKFKSHIDGSYHVFTPENVMEIQRTIGADIIMAFDECTPYPCEYNYAKRSMHMTHRWLDRCIKHLEKTPLKYDYGQTFFPIVQGSTYKDLRRQSAEYIASVGAEGNAIGGLSVGEPADEMYEMTAVVTEILPKEKPRYLMGVGTPVNLLENIALGIDMFDCVMPTRNGRNGMLFTSEGIINIKNKKWEADLSVIDPMGITWVDTDYSKAYLRHLFTVNEMLGRQIATIHNLGFYLWLVREARKHILAGDFAEWKNGMVKKLDQRL

SEQ ID NO: 51252 - protein, 376 aa, Aequorivita sp.
  REGION 1..376: note = tr|A0A330MPU6|A0A330MPU6_9FLAO Queuine tRNA-ribosyltransferase OS=Aequorivita sp. CIP111184; OX = 2211356 GN=tgt PE=3 SV=1
MHFKLEATDLQSSARAATITTDHGVIETPIFMPVGTVGTVKGVHQRELKEDINPDIILGNTYHLYLRPQTPILEKAGGLHKFMNWDRNILTDSGGYQVYSLSANRKIKEEGVKFKSHIDGSYHVFTPENVMEIQRSIGADIIMAFDECTPYPCEYNYAKRSMHMTHRWLDRCIKHLEKTPLKYDYGQTFFPIIQGSTYKDLRKQSAEYIASVGAEGNAIGGLSVGEPADEMYEMTAVVTEILPKDKPRYLMGVGTPVNLLENIALGIDMFDCVMPTRNGRNGMLFTSEGTINIKNKKWEMDLSAIDPMGITWVDTDYSKAYLRHLFTVNEMLGRQIATIHNLGFYLWLVREARKHILAGTFTDWKNVMVKKMDQRL

SEQ ID NO: 51253 - protein, 376 aa, Aequorivita sp.
  REGION 1..376: note = tr|A0A2E4RVM1|A0A2E4RVM1_9FLAO Queuine tRNA-ribosyltransferase OS=Aequorivita sp. OX=1872390; GN = tgt PE=3 SV=1
MHFKLEATDLQSSARAATITTDHGVIETPIFMPVGTVGTVKGVHQRELKQDINPDIILGNTYHLYLRPQTPVLEKAGGLHKFMNWDRNILTDSGGYQVYSLSANRKIKEEGVKFKSHIDGSYHVFTPENVMEIQRTIGADIIMAFDECTSYPCEYNYAKRSMHMTHRWLDRCIKHLEKTPLKYDYGQTFFPIVQGSTYKDLRRQSAEYIASVGAEGNAIGGLSVGEPADEMYEMTAVVTEILPKEKPRYLMGVGTPVNLLENIALGIDMFDCVMPTRNGRNGMLFTSEGIINIKNKKWEADLSVIDPMGITWVDTDYSKAYLRHLFTVNEMLGRQIATIHNLGFYLWLVREARKHILAGDFAEWKGGMVKKLDQRL

SEQ ID NO: 51254 - protein, 376 aa, Aequorivita sublithincola
  REGION 1..376: note = tr|I3YS33|I3YS33_AEQSU Queuine tRNA-ribosyltransferase OS=Aequorivita sublithincola (strain DSM 14238 / LMG 21431 / ACAM 643 / 9-3) OX=746697; GN = tgt PE=3 SV=1
MQFKLEATDLQSNARAGTITTDHGVIETPIFMPVGTVGTVKGVHQRELKEDINPDVILGNTYHLYLRPQMAVLEKAGGLHKFMNWDRNILTDSGGYQVYSLSANRKIKEEGVKFKSHIDGSYHFFTPENVMEIQRTIGADIIMAFDECAPYPCEYNYAKRSMHMTHRWLDRCIKHLEKTPLKYGYDQTFFPIVQGSTYKDLRKQSAEYIASVGAEGNAIGGLSVGEPAEEMYEMTEIVTAILPKEKPRYLMGVGTPINILENIALGIDMFDCVMPTRNGRNGMLFTSEGIINIKNKKWEADLSAIDPMGITWVDTDYNKAYLRHLFTVNEMLGRQIATIHNLGFYLWLVREARKHILTGDFAQWKNGMVKKLDQRL

SEQ ID NO: 51255 - protein, 376 aa, unidentified
  source 1..376: note = Aequorivita viscosa
  REGION 1..376: note = tr|A0A1M6F0T8|A0A1M6F0T8_9FLAO Queuine tRNA-ribosyltransferase OS=Aequorivita viscosa OX=797419; GN = tgt PE=3 SV=1
MQFKLEATDINSDARAATITTDHGVIETPIFMPVGTVGSVKGVHQRELREDINPDIILGNTYHLYLRPQMPILEKAGGLHKFMNWDRNILTDSGGYQVYSLSANRKIKEEGVKFKSHIDGSYHLFTPENVMEIQRTIGADIIMAFDECAPYPCNYNYAKRSMHMTHRWLDRCINHLGKSPVKYGFDQSFFPIVQGSTYKDLRKQSAEYIASVGAEGNAIGGLSVGEPAEEMYEMTAVVTEILPKDKPRYLMGVGTPVNILENIALGIDMFDCVMPTRNGRNGMLFTSEGIINIKNKKWEDDFSPIDPMGITWVDTEYSKAYLRHLFTVNEMLGRQIGSIHNLGFYLWLVREARKHILAGDFASWKESMVKKLDQRL

SEQ ID NO: 51256 - protein, 381 aa, unidentified
  source 1..381: note = Aeribacillus composti
  REGION 1..381: note = tr|A0A559U9R4|A0A559U9R4_9BACI Queuine tRNA-ribosyltransferase OS=Aeribacillus composti; OX = 1868734 GN=tgt PE=3 SV=1
MNKPPIRYELIKTCKQTGARLGIVHTPHGSFETPVFMPVGTLATVKTMSPEELKEIGAKIILSNTYHLWLRPGEDIVKEAGGLHSFMNWDGAILTDSGGFQVFSLSEFRRIEEEGVYFRNHLNGDKLFLSPEKATEIQNALGSDIIMAFDECPPYPASFDYMKQSVERTSRWAERCLAAHKRENEQGMFGIVQGGEYENLRKQSARDLVSLDFSGYAVGGLSVGEPKEVMNRVLEFTVPLLPSDKPRYLMGVGSPDSLIDGAIRGIDMFDCVLPTRIARNGTLMTSTGRLVVKNAKYARDFGPLDESCDCYVCRNYSRAYIRHLIKSNETFGIRLTSYHNLYFLIKLMEQIRESIREDRLGDFREEFFERYGFNKPNAKNF

SEQ ID NO: 51257 - protein, 381 aa, Aeribacillus pallidus; identical to SEQ ID NO: 51256
  REGION 1..381: note = tr|A0A165XN31|A0A165XN31_9BACI Queuine tRNA-ribosyltransferase OS=Aeribacillus pallidus OX=33936; GN = tgt PE=3 SV=1

SEQ ID NO: 51258 - protein, 536 aa, Aeriscardovia aeriphila
  REGION 1..536: note = tr|A0A261F830|A0A261F830_9BIFI Queuine tRNA-ribosyltransferase OS=Aeriscardovia aeriphila; OX = 218139 GN=tgt PE=3 SV=1
MSEHDEIFTADASASDPAAASAAASDQATSAPAATYPAASTSNPADPAFQPHYGKRKKEIQHVDPDDEGAWVTPPALAEKISESDARSAALAHSGWHAIRTREEQAESLAHAIAQGRDAFGFELKTELPNGMDNNGKQGLGQGGRRHGRTGVIHTPHGDIHTPAFVPVATQATMKGVLPEQIRGLGAQCMLSNAFHLNERPGPELIDKAGGLAAFENWDGPTFTDSGGFQVLSLGAGFKKTLAMDVTGLKNDDVIAEGKTRHAFVDEDGVTFHSPLSGKKERFSAEISMQIQHQLGADIMFAFDELTTLMNTRRYQEASVERTFRWAKRCVAEHHKLTQERSDKPYQALFGVVQGANYEDLRRRAASQIASLDFDGFGLGGAFEKRIMGEICAWICDELPENKPRHVLGIAAVDDIFAAVENGGDTFDCVAPARVGRNGAIYTHDGRYNVLRARFTDDFRPLEVGCDCYTCQHYSRAYVHHVLKCKEMTGSTLATIHNERFFVRLLDEIRDSIDGGWFYELRDETLARFYRNGSKG

SEQ ID NO: 51259 - protein, 382 aa, unidentified
  source 1..382: note = Aerococcaceae bacterium
  REGION 1..382: note = tr|A0A347WLE7|A0A347WLE7_9LACT Queuine tRNA-ribosyltransferase OS=Aerococcaceae bacterium ZY16052; OX = 2036206 GN=tgt PE=3 SV=1
MTETAPIRYELIKEEKHTGARLGILHTPHGSFETPMYMPVGTLATVKGLSPEELKAMGAGVILSNTYHLWLRPGEDIVEEAGGLHQFMNWDQGVLTDSGGFQVFSLSDTRKITEEGVKFKSHIDGSDLFLTPEKSIQIQNALGADIIMSFDECPDFNHTYDYVKQSIHRTTRWAERGLKAHQKANQQALFGIVQGAGYKDLRLQHARDMVSLDFPGYSIGGLSVGESKEEMNDVMDYLLPELPANKPRYLMGVGSPDSLIDGAIRGVDMFDCVLATRIARNGTCMTSSGRLVVKNATYARDFRPIDEHCQCYTCQNYTRAYVRHLFKADEIFGLRLASIHNVYFLLELMRQVRQAIREDNLLEFREAFFEAYGYNKPNARAF

SEQ ID NO: 51260 - protein, 381 aa, unidentified
  source 1..381: note = Aerococcaceae bacterium
  REGION 1..381: note = tr|A0A3D0CGN6|A0A3D0CGN6_9LACT Queuine tRNA-ribosyltransferase OS=Aerococcaceae bacterium; OX = 2053495 GN=tgt PE=3 SV=1
MTEPAIRYELIKEEKNTGARLGILHTPHGSFETPIYMPVGTLATVKGLSPEELKDMGAEIVLSNTYHLWLRPGEDIVEEAGGLHKFMNWDRGILTDSGGFQVFSLSDMRKIEEVGVHFRNHISGEKLFLTPEKAIQIENALGADIIMSFDECPDFHHSYDYVKNSIYRTTRWAERGLKAHQRPEDQALFGIVQGAGYKDLRIQHARDLVSLDFPGYSIGGLSVGETKEEMNSVLDYLTPELPKDKPRYLMGVGSPDALIDGVIRGVDMFDCVLATRIARNGTCMTSNGRLVVKNAQYARDFRPIDENCDCYTCRNYTRAYVRHLIKTDELFGMRLASIHNVYFLLELMRNVRKAIMDDQLLEFREDFFEKYGYNKPNAKNF

SEQ ID NO: 51261 - protein, 379 aa, Aerococcus christensenii
  REGION 1..379: note = tr|A0A133XT84|A0A133XT84_9LACT Queuine tRNA-ribosyltransferase OS=Aerococcus christensenii; OX = 87541 GN=tgt PE=3 SV=1
MPALRYELIKKEKHTGARLGRVITPHGVIETPIFMPVGTLASVKSVSPEELKEMKAQIILSNTYHLWLRPGDDLIERAGGLHTFMNWDRPILTDSGGFQVFSLTDIRRLEEEGVHFRSHLDGSKLFLSPEKAIQIQNHLGSDIMMSLDECPPFDASYDYMKHSIERTTRWAERGLKAHQRPNDQALFGILQGGGYKDLRLQHAKEMIGLDFPGYSIGGLSVGESKEEMYKVLDYLTPIMPENKPRYLMGVGSPDALIEGSIRGVDMFDCVLATRIARNGTCMTSKGRLVVKNAAYKEDFRPIDEACQCYTCRNFTRAYVRHLLHCGETFGLRLTSIHNLHFLLQLMEQVRQAIREDCLLDFKEDFFERYGLNVDKPKNF

SEQ ID NO: 51262 - protein, 379 aa, Aerococcus christensenii
  REGION 1..379: note = tr|A0A2I1K861|A0A2I1K861_9LACT Queuine tRNA-ribosyltransferase OS=Aerococcus christensenii; OX = 87541 GN=tgt PE=3 SV=1
MPALRYELIKKEKHTGARLGRVITPHGVIETPIFMPVGTLASVKSVSPEELKEMKAQIILSNTYHLWLRPGDDLIERAGGLHTFMNWDRPILTDSGGFQVFSLTDIRRLEEEGVRFRSHLDGSKLFLSPEKAIQIQNHLGSDIMMSLDECPPFDASYDYMKHSIERTTRWAERGLKAHQRPNDQALFGILQGGGYKDLRLQHAKEMIGLDFPGYSIGGLSVGESKEEMYKVLDYLTPIMPENKPRYLMGVGSPDALIEGSIRGVDMFDCVLATRIARNGTCMTSKGRLVVKNAAYKEDFRPIDEACQCYTCRNFTRAYVRHLLHCGETFGLRLTSIHNLHFLLQLMEQVRQAIREDCLLDFKEDFFERYGLNVDKPKNF

SEQ ID NO: 51263 - protein, 379 aa, Aerococcus sanguinicola
  REGION 1..379: note = tr|A0A109RDS6|A0A109RDS6_9LACT Queuine tRNA-ribosyltransferase OS=Aerococcus sanguinicola; OX = 119206 GN=tgt PE=3 SV=1
MPALEYRLIKKEKHTGARLGEIKTPHGVIETPIFMPVGTLATVKSLSPEELKAMNAQIILSNTYHLWLRPGDDIVKEAGGLHQFMNWDRPILTDSGGFQVFSLSDSRKLTEEGAHFKSHLDGRKLFLSPEKAIEIENNLGADIIMSLDECPDFNHDYDYVKHSIDRTTRWAERGLKAHQRPDDQALFGILQGAGYKDLRLQHAKDMISLDFPGYSIGGLSVGESKDEMYQVLDYLTPVMPEHKPRYLMGVGSPDALIEGVIRGVDMFDCVLATRIARNGTCMTSQGRLVVKNAPYQRDFNPIDPNCSCYTCQNFSRAYVRHLFKADETFGLRLTSIHNLHFLLDLMAQVRQAIRDDNLLDFKEEFFEAYGLNTKNPKNF

SEQ ID NO: 51264 - protein, 379 aa, Aerococcus sp.
  REGION 1..379: note = tr|A0A1F1DP40|A0A1F1DP40_9LACT Queuine tRNA-ribosyltransferase OS=Aerococcus sp. HMSC061A03; OX = 1739396 GN=tgt PE=3 SV=1
MPALEYRLIKKEKHTGARLGEIKTPHGIIETPIFMPVGTLATVKSLSPEELKAMNAQIILSNTYHLWLRPGDDIVKEAGGLHQFMNWDRPILTDSGGFQVFSLSDSRKLTEEGVHFKSHLDGRKLFLSPEKAIEIENNLGADIIMSLDECPDFNHDYDYVKHSIERTTRWAERGLKAHQRPDDQALFGILQGAGYKDLRLQHAKDMISLDFPGYSIGGLSVGESKEDMYQVLDYLTPVMPEGKPRYLMGVGSPDALIEGVIRGVDMFDCVLATRIARNGTCMTSQGRLVVKNAPYQRDFNPIDPNCSCYTCQNFSRAYVRHLFKADETFGLRLTSIHNLHFLLDLMAQVRQAIREDRLLDFKEEFFEAYGLNVKNPKNF

SEQ ID NO: 51265 - protein, 380 aa, Aerococcus sp.
  REGION 1..380: note = tr|A0A3N4GR23|A0A3N4GR23_9LACT Queuine tRNA-ribosyltransferase OS=Aerococcus sp. SJQ22 OX=2487350; GN = tgt PE=3 SV=1
MTSSALNFTLHKKEKHTGARLGTVETPHGSIETPVFMPVGTLATVKSVSPEELTDMNAQIILSNTYHLWLRPGDDLVKEAGGLHKFMNWDKPILTDSGGFQVFSLADTRKIEEEGVTFKSHLDGKKLFLSPEKAIQIENNLGADIIMSFDECPDFNHDYDYVKNSINRTTHWAERGLKAHERSNDQALFGILQGAGYKDLRLQHAKDMISLDFPGYSIGGLSVGESKEDMYEVLDYLTPVMPENKPRYLMGVGSPDALIEGVIRGVDMFDCVLPTRIARNGTTMTSQGRVVIKNAQYARDFTPLDPECDCYTCRNYSRAYIRHLIKTNETFGIRLTSIHNLHFLINLMEQIKEAIREDRLLDFRDEFFLRYYGEVKKSNF

SEQ ID NO: 51266 - protein, 381 aa, Aerococcus suis
  REGION 1..381: note = tr|A0A1W1Y2C2|A0A1W1Y2C2_9LACT Queuine tRNA-ribosyltransferase OS=Aerococcus suis OX=371602; GN = tgt PE=3 SV=1
MSKALKYTLHKKEKHTGARLGEIETPHGKIQTPVFMPVGTQATVKAVSPEELKAMSAEIILSNTYHLWLRPGDDLVKEAGGLHQFMNWDRPILTDSGGFQVFSLAKLRQIKEEGVHFRSHLDGRKLFLGPEEAIGIENNLGADIIMSFDECPDYNHDYDYVKKSIARTTRWAERGLKAHKRPDEQALFGILQGAGYKDLRLQHAKDMISLDFPGYSIGGLSVGESKEEMYGVMDYLLPVMPENKPRYLMGVGSPDALIEGVIRGVDMFDCVLPTRIARNGTTMTSNGRLVVKNAKYARDFRPIDEHCDCYTCRNYTRAYVRHLLKTDETFGLRLTSIHNLHFLTHLMADIREAIRQDQLMEFRDDFFMRYYGTKGLPTKNF

SEQ ID NO: 51267 - protein, 339 aa, Aerococcus urinae
  REGION 1..339: note = tr|A0A329NU46|A0A329NU46_9LACT Queuine tRNA-ribosyltransferase (Fragment) OS=Aerococcus urinae; OX = 1376 GN=DBT54_10215 PE=3 SV=1
VKALYMDQVRGAGADIILGNTYHLMLRPGAEEVAALGGLHKFANWPHPILTDSGGFQVMSLATLRKMTEEGVTFASHIDGSRHLLTPERSIEIQCLLGSDIQMQLDECTPFPATEEEARVSMELSLRWGKRSKAAFETQPHRLEGQALFGIVQGSVYPDLRARSVDGLMATGFDGYAIGGLAVGEGQSEMLRMLDVTAPLLPADRPRYLMGVGTPDDLVESVRRGVDMFDCVMPTRNGRHGLAFTRMGRVNLKNARHAKDPRPLDAESSCPAARDYSRAYLHHLIKSGEMLGSMLVSWINIAYYQELMAGLRAAIAAGRLDAFAAEFKRDQAAGDIEAL

SEQ ID NO: 51268 - protein, 379 aa, Aerococcus urinae
  REGION 1..379: note = tr|A0A178HFJ9|A0A178HFJ9_9LACT Queuine tRNA-ribosyltransferase OS=Aerococcus urinae OX=1376; GN = tgt PE=3 SV=1
MPALTYELIKTEKHTGARLGRVTTPHGSFETPIFMPVGTLATVKGLSPEELKDLGAEIILSNTYHLWLRPGDDIVKEAGGLHQFMNWNRPILTDSGGFQVFSLTKIRRLEEEGVYFRSHLNGHRLFLSPEKAISIENNLGADIIMSLDECPPFDASYDYMKNSINRTTRWAERGLAAHQRPEDQALFGIIQGGGYKDLRLQHAQDLINLDFPGYSIGGLSVGESKEEMYEVLDYLTPVMPSHKPRYLMGVGSPDALIEGAIRGIDMFDCVLATRIARNGTCMTSRGRLVVKNATFKRDFRPLDEACSCYTCQNYSRAYIRHLIHTNEILGARLTSIHNLHFLTDLMANVRQAIRDDNLLDFKADFFERYGLNKKNPKNF

SEQ ID NO: 51269 - protein, 380 aa, Aerococcus urinaeequi
  REGION 1..380: note = tr|A0A3D4XLA0|A0A3D4XLA0_9LACT Queuine tRNA-ribosyltransferase OS=Aerococcus urinaeequi OX=51665; GN = tgt PE=3 SV=1
MTSSALKYTLHKKEKHTGARLGQVETPHGMIETPVFMPVGTQASVKAVSPEELTDMNAQIILSNTYHLWLRPGDDLVKEAGGLHQFMNWDKPILTDSGGFQVFSLADSRKIEEEGVTFKSHLDGKKLFLSPEKAIHIENNLGADIIMSFDECPDFNHDHNYVEKSIHRTTRWAERGLNAHQRPNDQALFGILQGAGYKDLRLQHAKDMIGLDFPGYSIGGLSVGESKEDMYKVLDYITPVMPEDKPRYLMGVGSPDALIEGVIRGIDMFDCVLPTRIARNGTTMTSQGRVVIKNAQYARDFTPLDPNCDCYTCRNYTRAYIRHLLKANETFALRLTSIHNLHFLINLMEQIKDAIREDRLLDFRDEFFLQYYGKVQKTAF

SEQ ID NO: 51270 - protein, 380 aa, Aerococcus urinaeequi
  REGION 1..380: note = tr|A0A0U4VWH4|A0A0U4VWH4_9LACT Queuine tRNA-ribosyltransferase OS=Aerococcus urinaeequi OX=51665; GN = tgt PE=3 SV=1
MTSSALKYTLHKKEKHTGARLGQVETPHGTIETPVFMPVGTQASVKAVSPEELTDMNAQIILSNTYHLWLRPGDDLVKEAGGLHQFMNWDKPILTDSGGFQVFSLADSRKIEEEGVTFKSHLDGKKLFLSPEKAIHIENNLGADIIMSFDECPDFNHDHNYVEKSIHRTTRWAERGLNAHQRPNDQALFGILQGAGYKDLRLQHAKDMIGLDFPGYSIGGLSVGESKEDMYKVLDYLTPVMPEDKPRYLMGVGSPDALIEGVIRGIDMFDCVLPTRIARNGTTMTSQGRVVIKNAQYARDFTPLDPNCDCYTCRNYTRAYIRHLLKANETFALRLTSIHNLHFLINLMEQIKDAIREDRLLDFRDEFFLQYYGKVQKTAF

SEQ ID NO: 51271 - protein, 381 aa, Aerococcus urinaehominis
  REGION 1..381: note = tr|A0A120IAR9|A0A120IAR9_9LACT Queuine tRNA-ribosyltransferase OS=Aerococcus urinaehominis; OX = 128944 GN=tgt PE=3 SV=1
MSSPALKYTLIHQDKYTGARLGEIETPHGKIETPIFMPVGTLATVKSVSPEELTAMEAQIILSNTYHLWLRPGDDLVKEAGGLHQFMNWHKPILTDSGGFQVFSLSDSRTIKEEGVYFKSHLDGSKLFLGPEEAIQIENNLGADIIMSFDECPDFNHSYDYVKDSINRTTRWAERGLKAHQRPDDQALFGIIQGAGYKDLRLQHAHDLISLDFPGYSIGGLSVGESKQEMYEVLDYLTPVMPSDKPRYLMGVGSPDALIEGAIRGVDMFDCVLPTRIARNGTCMTSRGRLVVKNAKFARDFGPIDDQCDCYTCRNFSRAYVRHLFKADETFGLRLTSIHNLHFLINLMKQVREAIRNDQLLEFKEDFFEAYGLNQANPKNF

SEQ ID NO: 51272 - protein, 389 aa, Aerococcus viridans
  REGION 1..389: note = tr|D4YF55|D4YF55_9LACT Queuine tRNA-ribosyltransferase OS=Aerococcus viridans ATCC 11563 = CCUG 4311 OX=655812 GN=tgt PE=3 SV=1
MCGRKKGILMTSSALKYTLHKKEKHTGARLGQVETPHGTIETPVFMPVGTQASVKAVSPEELTDMNAQIILSNTYHLWLRPGDDLVKEAGGLHQFMNWDKPILTDSGGFQVFSLADSRKIEEEGVTFKSHLDGKKLFLSPEKAIHIENNLGADIIMSFDECPDFNHDHNYVEKSIHRTTRWAERGLNAHQRPDDQALFGILQGAGYKDLRLQHAKDMIGLDFPGYSIGGLSVGESKEDMYKVLDYLTPVMPEDKPRYLMGVGSPDALIEGVIRGVDMFDCVLPTRIARNGTTMTSQGRVVIKNAQYARDFTPLDPNCDCYTCRNYTRAYIRHLLKANETFALRLTSIHNLHFLINLMEQIKDAIREDRLLDFRDEFFLQYYGKVQKTAF

SEQ ID NO: 51273 - protein, 380 aa, Aerococcus viridans
  REGION 1..380: note = tr|A0A2N6UCL6|A0A2N6UCL6_9LACT Queuine tRNA-ribosyltransferase OS=Aerococcus viridans OX=1377; GN = tgt PE=3 SV=1
MTSSALKYTLHKKEKHTGARLGQVETPHGTIETPVFMPVGTQASVKAVSPEELNDMNAQIILSNTYHLWLRPGDDLVKEAGGLHQFMNWDKPILTDSGGFQVFSLADFRKIEEEGVTFKSHLDGKTLFLSPEKAIHIENNLGADIIMSFDECPDFNHDHAYVEKSIHRTTRWAERGLNAHQRPNDQALFGILQGAGYKDLRLQHAKDMIGLDFPGYSIGGLSVGESKEDMYQVLDYLTPVMPENKPRYLMGVGSPDALIEGVIRGVDMFDCVLPTRIARNGTTMTSQGRVVIKNAQYARDFSPLDPNCDCYTCRNYTRAYIRHLLKANETFGLRLTSIHNLHFLINFMAQIKDAIREDRLLDFRDEFFLQYYGKVQKTAF

SEQ ID NO: 51274 - protein, 407 aa, unidentified
  source 1..407: note = Aeromicrobium camelliae
  REGION 1..407: note = tr|A0A3N6WMI4|A0A3N6WMI4_9ACTN Queuine tRNA-ribosyltransferase OS=Aeromicrobium camelliae; OX = 1538144 GN=tgt PE=3 SV=1
MAWRDGTLDGVFTIGSRLDDAPGRSGVITTPHGQIRTPAFIPVGTRATVKAVLPEHMAELGAQALLANAYHLYLQPGSDIVDEAGGLGRFMNWPGPTFTDSGGFQVMSLGVGFKKTLSMDSSRATADDVIASGKERLAHVDDDGVTFKSHLDGSTHRFTPEISMRIQHELGADIIFAFDELTTLMNTRGYQEEALARTQAWAQRCVVEHERLTRERSDKPYQALFGVVQGAQYEDLRRKAARDLASLPFDGFGIGGAIEKENLGTICRWVVEELPEDKPRHLLGIGEPDDFFAGVENGCDTFDCVGPSRVARSSRVYTRTGRYNLNVAASRRDFGPIDDECDCYTCAHYTKAYLHHLFKTNEMLSATLCTIHNERFTVRLVDDIRASIEDGTYWEFKAETLGRFYGA

SEQ ID NO: 51275 - protein, 401 aa, unidentified
  source 1..401: note = Aeromicrobium choanae
  REGION 1..401: note = tr|A0A1T4Z7A9|A0A1T4Z7A9_9ACTN Queuine tRNA-ribosyltransferase OS=Aeromicrobium choanae; OX = 1736691 GN=tgt PE=3 SV=1
MFTVGSTLPDAPGRSGTIETPHGSIRTPAFIPVGTKATVKAVLPESISDLGGQAVLANAYHLYLQPGADIVEAAGGLGAFMNWHGPTFTDSGGFQVLSLGAGFKKTLAMDAVGAEADDVIAPGKDRLAHVDEDGVTFKSHLDGSKHRFTPEVSMGIQHQLGADIIFAFDELTTLMNSREYQEDSLRRTQAWAQRCLAEIERLRAAHPERPRQALFGVVQGAQHEDLRRQAARGLADLAFDGYGVGGAIEKENLGAIVRWVTDELPDDRPRHLLGIGEPEDLFAGVEAGCDTFDCVTPTRVARSSRVYSATGRYNLMVAASRRDFGPIEEGCDCYTCAHYTKAYLHHLFKANEYNAATLCSIHNERFFVRLVDSMRTAIEAGDFAALRTEWLGRYLAGQAAR

SEQ ID NO: 51276 - protein, 435 aa, Aeromicrobium erythreum
  REGION 1..435: note = tr|A0A0U4AXG9|A0A0U4AXG9_9ACTN Queuine tRNA-ribosyltransferase OS=Aeromicrobium erythreum OX=2041; GN = tgt PE=3 SV=1
MTDSPTTTPPLFEVGARLGDRAGRTGTLTTAHGTIRTPAFVPVGTKATVEAVLPEAMAELGAQALLANAYHLYLQPGDDVVEEAGGLGRFMGWSGPTFTDSGGFQVMSLGAGFRKTLSMDSTSEAADVIATDKDRLAHVDDDGVTFRSHLDGSTHRFTPEVSMGIQHRLGADVIFAFDELTTLLDSRAYQEESLARTEAWAARCLAEHRRLSSLRRPQPGTLAGTPTGPARRPQPGTPAGPAGPALFGVVQGAQHEDLRRRAARHLAELEVDGTRFDGFGIGGAIEKENLATIVGWVTDELPDDKPRHLLGIGEPDDLFAAVEAGADTFDCVGPSRVARSSRVYTADGRENLLVARSRRRFEPIEDDCDCYTCAHYTRAYLHHLFKAKEYLAATLTTIHNERYVVRLVDRMRAALEDGTFDELRAETMGRIRSSR

SEQ ID NO: 51277 - protein, 397 aa, Aeromicrobium flavum
  REGION 1..397: note = tr|A0A512HQY8|A0A512HQY8_9ACTN Queuine tRNA-ribosyltransferase OS=Aeromicrobium flavum OX=416568; GN = tgt PE=3 SV=1
MFTVGSTLPDAPGRSGTIETPHGAIRTPAFIPVGTKATVKAVLPESIVQLGGQAVLSNAYHLYLQPGADIVEEAGGLGAFMNWRGPTFTDSGGFQVLSLGAGFKKTLAMDAVGTEADDVIAPGKDRLAHVDDDGVTFKSHLDGSKHRFTPEVSMRIQHQLGADIIFAFDELTTLMNSREYQEDSLRRTQAWAERCLAEHQRLSAERADKPRQALYGVVQGAQHEDLRRQAARGLAGMDFDGYGVGGAIEKESLGTIVRWVTDELPDDRPRHLLGIGEPEDLFAGVEAGCDTFDCVTPTRVARSSRIYTADGRSNLMVAASRRDFGPIEEGCDCYTCAHYTKAYLHHLFKANEYNAATLCSIHNERFFIRLVDRMRDAIEAGDFAALRDEWLGRYLSK

SEQ ID NO: 51278 - protein, 400 aa, Aeromicrobium marinum
  REGION 1..400: note = tr|E2SAF5|E2SAF5_9ACTN Queuine tRNA-ribosyltransferase OS=Aeromicrobium marinum DSM 15272; OX = 585531 GN=tgt PE=3 SV=1
MFTVHHTANDSRARTGTLTTPHGEVRTPAFVPVGTRATVKAVLPEQMRELGAQALLANAYHLYLQPGSDVVDEAGGLGRFMNWPGPTFTDSGGFQVMSLGAGFKKTLAMDATGVTSDEVIAPGKERLAHVDDDGVTFKSHLDGSRHRFTPEISMRIQHELGADVIFAFDELTTLMNTRGYQEEALARTQAWAVRCVEEHRRLTEERVGKPYQALFGVVQGAQYEDLRRQAARDLVPLGFDGFGIGGAMEKENLGTIIGWVTEELPDDRPRHLLGIGEPDDLFTAVEAGCDTFDCVGPSRVARSSRMYGSDGQFNLKVAANKRNFDPIDAECDCYTCAHYSRAYLHHLFKTDEFIGNTLGTIHNERFIVRLVDRIREAVADGTYADLKAETLARYYPRRGQ

SEQ ID NO: 51279 - protein, 410 aa, Aeromicrobium sp.
  REGION 1..410: note = tr|A0A0Q7QFF2|A0A0Q7QFF2_9ACTN Queuine tRNA-ribosyltransferase OS=Aeromicrobium sp. Root495; OX = 1736550 GN=tgt PE=3 SV=1
MFTVGAELPDAAGRTGVLSTPHGDVQTPAFIPVGTRATVKAVLPESVRELGAQAVLANAYHLYLQPGADIVEEGGGLARFMGWGGPTFTDSGGFQVMSLGAGFKKTLSMDSTSATSDTVIAPGKERLAHVDDDGVTFKSHLDGSKHRFTPEISMGIQHRLGADVIFAFDELTTLMNTRGYQEQSVERTHAWAERCLAEHDRLTVERSEHPYQALFGVVQGAQYEDLRRRAASGLAALEVEGRSFDGFGIGGAIEKEQLSEIVGWVVDELPRDKPRHLLGIGEPDDLFAGVEAGCDTFDCVGPSRTARSSRVYTADGHRNLLVAASRRDFGPIEDDCDCYTCTHYTTAYLHHLFKTKEFLSATLTTIHNERFIVRLVDSMRTAIASGDFAALKEESLGRFYARRSAGSSAQ

SEQ ID NO: 51280 - protein, 397 aa, Aeromicrobium sp.
  REGION 1..397: note = tr|A0A200HBV3|A0A200HBV3_9ACTN Queuine tRNA-ribosyltransferase OS=Aeromicrobium sp. PE09-221; OX = 1898043 GN=tgt PE=3 SV=1
MFSIDHRIEDAPGRSGVITTPHGQIRTPAFIPVGTRATVKSVLPESMAELGAQALLANAYHLYLQPGADIVDEAGGLGRFMNWPGPTFTDSGGFQVMSLGVGFKKTLSMDSTRVARDDVIAKGKERLAHVDDDGVTFKSHLDGSRHRFTPEVSMRIQHQLGADIIFAFDELTTLMNTRGYQEESLARTQAWAERCIAEHEKLTRERADKPYQALFGVVQGAQYEDLRRKAARDLAGLPFDGFGIGGAIEKENLGTICRWVVDELPEDKPRHLLGIGEPDDFFEGIENGADTFDCVTPSRVARSSRVYTRRGRYNLDVAASRRDFSPIDDACDCYTCAHYTKAYLHHLFKTNEMLSATLCTIHNERFMVKLVDDIRASIDDGTYHAFKADTLGRFYGP

SEQ ID NO: 51281 - protein, 378 aa, Aeromonas allosaccharophila
  REGION 1..378: note = tr|A0A0T6U0G9|A0A0T6U0G9_9GAMM Queuine tRNA-ribosyltransferase OS=Aeromonas allosaccharophila; OX = 656 GN=tgt PE=3 SV=1
MKFELKTTDGRARRGQLVFERGVVQTPAFMPVGTYGTVKGMTPEEVRESGAQILLGNTFHLWLRPGQEVMRAHGDLHDFMNWQGPILTDSGGFQVFSLGDIRKITEAGVHFRHPINGEKIFLDPEKSMEIQYDLGSDIVMIFDECTPYPATYEEARKSMEMSLRWGKRSRDKFDALGNKNALFGIIQGSVYEDLRDVSLNGLLEIGFDGYAVGGLAVGEPKEDMHRILEHVCPKIPADKPRYLMGVGKPEDLVEGVRRGIDMFDCVMPTRNARNGHLFTTDGVVKIRNAKYRNDTSTLDADCDCYTCKNYTRSYLYHLDKCNEILGARLNTIHNLRYYQRVMQGLRDAIEQGKLDDFVTEFYRRQGKPVPPLAEKDVK

SEQ ID NO: 51282 - protein, 378 aa, unidentified
  source 1..378: note = Aeromonas cavernicola
  REGION 1..378: note = tr|A0A2H9U5Z2|A0A2H9U5Z2_9GAMM Queuine tRNA-ribosyltransferase OS=Aeromonas cavernicola; OX = 1006623 GN=tgt PE=3 SV=1
MKFELKTTDGRARRGQLVFDRGVVQTPAFMPVGTYGTVKGMTPEEVRESGAQILLGNTFHLWLRPGQEVMRAHGDLHDFMNWQGPILTDSGGFQVFSLGDIRKITEEGVHFRHPINGEKIFLDPEKSMEIQYDLGSDIVMIFDECTPYPATYEEARKSMEMSLRWAKRSRDKFDALGNKNALFGIIQGSVYEPLRDVSLNGLLEIGFDGYAVGGLAVGEPKEDMHRILEHVCPQIPADKPRYLMGVGKPEDLVEGVRRGIDMFDCVMPTRNARNGHLFTTDGVVKIRNAKYRSDTSPLDADCDCYTCQHYSRSYLHHLDKCNEILGARLNTIHNLRYYQRVMQGLRDAIEQGKLNDFVTEFYRRQGKPVPPLAENDVK

SEQ ID NO: 51283 - protein, 378 aa, Aeromonas caviae
  REGION 1..378: note = tr|A0A2X4NF47|A0A2X4NF47_AERCA Queuine tRNA-ribosyltransferase OS=Aeromonas caviae OX=648 GN=tgt; PE = 3 SV=1
MKFELKTTDGRARRGQLVFERGVVQTPAFMPVGTYGTVKGMTPEEVRETGAQILLGNTFHLWLRPGQEVMRAHGDLHDFMNWQGPILTDSGGFQVFSLGHIRKITEEGVHFRHPINGEKIFLDPEKSMEIQYDLGSDIVMIFDECTPYPATYEEARKSMEMSLRWAKRSRDKFDALGNKNALFGIIQGSVYEPLRDVSLDGLLEIGFDGYAVGGLAVGEPKEDMHRILDHVCPKIPADKPRYLMGVGKPEDLVEGVRRGIDMFDCVMPTRNARNGHLFTTDGVVKIRNAKYREDTSTLDADCDCYTCKNYTRSYLYHLDKCNEILGARLNTIHNLRYYQRVMQGLRDAIEQGKLDDFVTEFYRRQGKPVPPLAENDVK

SEQ ID NO: 51284 - protein, 378 aa, Aeromonas caviae
  REGION 1..378: note = tr|A0A443VYU5|A0A443VYU5_AERCA Queuine tRNA-ribosyltransferase OS=Aeromonas caviae OX=648 GN=tgt; PE = 3 SV=1
MKFELKTTDGRARRGQLVFERGVVQTPAFMPVGTYGTVKGMTPEEVRETGAQILLGNTFHLWLRPGQEVMRAHGDLHDFMNWQGPILTDSGGFQVFSLGHIRKITEEGVHFRHPINGEKIFLDPEKSMEIQYDLGSDIVMIFDECTPYPATYEEARKSMEMSLRWAKRSRDKFDALGNKNALFGIIQGSVYEPLRDVSLDGLLEIGFDGYAVGGLAVGEPKEDMHRILDHVCPKIPADKPRYLMGVGKPEDLVEGVRRGIDMFDCVMPTRNARNGHLFTTDGVVKIRNAKYREDTSTLDADCDCYTCKNYTRSYLYHLDKCNEILGARLNTIHNLRYYQRVMQGLRDAIEQGKLDDFVTEFYRRQGKPVPPLAENGVK

SEQ ID NO: 51285 - protein, 378 aa, unidentified
  source 1..378: note = Aeromonas dhakensis
  REGION 1..378: note = tr|K1JHF4|K1JHF4_9GAMM Queuine tRNA-ribosyltransferase OS=Aeromonas dhakensis OX=196024; GN = tgt PE=3 SV=1
MKFELKTTDGRARRGQLVFERGTVQTPAFMPVGTYGTVKGMTPEEVRETGAQILLGNTFHLWLRPGQEVMRAHGDLHDFMNWQGPILTDSGGFQVFSLGHIRKITEAGVHFRHPINGEKIFLDPEKSMEIQYDLGSDIVMIFDECTPYPATYEEARKSMEMSLRWGKRSRDKFDALGNKNALFGIIQGSVYEDLRDVSLAGLLEIGFDGYAVGGLAVGEPKEDMHRILEHVCPKIPADKPRYLMGVGKPEDLVEGVRRGIDMFDCVMPTRNARNGHLFTTDGVVKIRNAKYREDTSTLDADCDCYTCKNYTRSYLYHLDKCNEILGARLNTIHNLRYYQRVMQGLRDAIEQGKLDDFVTEFYRRQGKPVPPLAENDVK

SEQ ID NO: 51286 - protein, 378 aa, Aeromonas diversa
  REGION 1..378: note = tr|N9VJC1|N9VJC1_9GAMM Queuine tRNA-ribosyltransferase OS=Aeromonas diversa CDC 2478-85; OX = 1268237 GN=tgt PE=3 SV=1
MKFELKTTDGRARRGQLVFERGTVQTPAFMPVGTYGTVKGMTPEEVRQSGAEILLGNTFHLWLRPGQEVMRLHGDLHDFMNWHGPILTDSGGFQVFSLGDIRKITEEGVTFRHPINGDKIFLSPEKSMEIQYDLGSDIVMIFDECTPYPATYEEARKSMEMSLRWAKRSRQRFNELGNKNALFGIIQGSVYEPLRDVSLDGLLEIGFDGYAVGGLAVGEPKEDMHRILEHVCPKIPADKPRYLMGVGKPEDLVEGVRRGIDMFDCVMPTRNARNGHLFTTDGVVKIRNAKHKDDTSPLDAECDCYTCQNYSRSYLHHLDKCNEILGARLNTIHNLRYYQRVMQGLRDAIEQGKLDDFVTEFYRRQGKPVPPLAEAATE

SEQ ID NO: 51287 - protein, 378 aa, Aeromonas encheleia
  REGION 1..378: note = tr|A0A3S4SSB3|A0A3S4SSB3_9GAMM Queuine tRNA-ribosyltransferase OS=Aeromonas encheleia OX=73010; GN = tgt PE=3 SV=1
MKFELKTTDGRARRGQLVFERGVVQTPAFMPVGTYGTVKGMTPEEVRETGAQILLGNTFHLWLRPGQAVMRAHGDLHDFMNWQGPILTDSGGFQVFSLGHIRKITEAGVHFRHPINGEKIFLDPEKSMEIQYDLGSDIVMIFDECTPYPATYEEARKSMEMSLRWGKRSRDKFDALGNKNALFGIIQGSVYEELRDVSLNGLLEIGFDGYAVGGLAVGEPKEDMHRILEHVCPKIPADKPRYLMGVGKPEDLVEGVRRGVDMFDCVMPTRNARNGHLFTTNGVVKIRNAKYREDTSTLDADCDCYTCKNYTRSYLYHLDKCNEILGARLNTIHNLRYYQRVMQGLRDAIEQGKLDDFVTEFYRRQGKPVPPIAENDVK

SEQ ID NO: 51288 - protein, 378 aa, Aeromonas enteropelogenes
  REGION 1..378: note = tr|A0A175VKN0|A0A175VKN0_AEREN Queuine tRNA-ribosyltransferase OS=Aeromonas enteropelogenes; OX = 29489 GN=tgt PE=3 SV=1
MKFELKTTDGRARRGQLVFERGTVQTPAFMPVGTYGTVKGMTPEEVAETGAQILLGNTFHLWLRPGQEVMRAHGDLHDFMNWQGPILTDSGGFQVFSLGDIRKITEAGVHFRHPINGEKIFLDPEKSMEIQYDLGSDIVMIFDECTPYPATYEEARKSMEMSLRWAKRSRDKFDALGNKNALFGIIQGSVYEPLRDVSLDGLLEIGFDGYAVGGLAVGEPKEDMHRILEHVCPKIPADKPRYLMGVGKPEDLVEGVRRGIDMFDCVMPTRNARNGHLFTTDGVVKIRNAKHRDDTSTLDADCDCYTCKNYSRSYLHHLDKCNEILGARLNTIHNLRYYQRVMQGLRDAIEQGKLDDFVTEFYRRQGKPVPPLAENDVK

SEQ ID NO: 51289 - protein, 378 aa, Aeromonas hydrophila
  REGION 1..378: note = sp|A0KJ20|TGT_AERHH Queuine tRNA-ribosyltransferase; OS = Aeromonas hydrophila subsp. hydrophila (strain ATCC 7966 / DSM 30187 / JCM 1027 / KCTC 2358 / NCIMB 9240) OX=3 80703 GN=tgt PE=3 SV=1
MKFELKTTDGRARRGQLVFERGTVQTPAFMPVGTYGTVKGMTPEEVRETGAQILLGNTFHLWLRPGQEVMRAHGDLHDFMNWQGPILTDSGGFQVFSLGHIRKITEAGVHFRHPINGEKIFLDPEKSMEIQYDLGSDIVMIFDECTPYPATYEEARKSMEMSLRWGKRSRDKFDALGNKNALFGIIQGSVYEDLRDVSLDGLLEIGFDGYAVGGLAVGEPKEDMHRILEHVCPKIPADKPRYLMGVGKPEDLVEGVRRGIDMFDCVMPTRNARNGHLFTTDGVVKIRNAKYREDTSTLDADCDCYTCKNYTRSYLYHLDKCNEILGARLNTIHNLRYYQRVMQGLRDAIEQGKLDDFVTEFYRRQGKPVPPLAENDVK

SEQ ID NO: 51290 - protein, 378 aa, Aeromonas hydrophila; identical to SEQ ID NO: 51289
  REGION 1..378: note = tr|A0A347A7A7|A0A347A7A7_AERHY Queuine tRNA-ribosyltransferase OS=Aeromonas hydrophila OX=644; GN = tgt PE=3 SV=1

SEQ ID NO: 51291 - protein, 378 aa, Aeromonas jandaei
  REGION 1..378: note = tr|A0A2S5FFW2|A0A2S5FFW2_AERJA Queuine tRNA-ribosyltransferase OS=Aeromonas jandaei OX=650 GN=tgt; PE = 3 SV=1
MKFELKTTDGRARRGQLVFERGTVQTPAFMPVGTYGTVKGMTPEEVRETGAQILLGNTFHLWLRPGQEVMRAHGDLHDFMNWQGPILTDSGGFQVFSLGDIRKITEAGVHFRHPINGEKIFLDPEKSMEIQYDLGSDIVMIFDECTPYPATYEEARKSMEMSLRWAKRSRDKFDALGNKNALFGIIQGSVYEPLRDVSLEGLLEIGFDGYAVGGLAVGEPKEDMHRILEHVCPKIPADKPRYLMGVGKPEDLVEGVRRGIDMFDCVMPTRNARNGHLFTTDGVVKIRNAKYRNDTSTLDADCDCYTCKNYTRSYLHHLDKCNEILGARLNTIHNLRYYQRVMQGLRDAIEQGKLDDFVTEFYRRQGKPVPPLAVNDVK

SEQ ID NO: 51292 - protein, 378 aa, unidentified
  source 1..378: note = Aeromonas lusitana
  REGION 1..378: note = tr|A0A2M8HC69|A0A2M8HC69_9GAMM Queuine tRNA-ribosyltransferase OS=Aeromonas lusitana OX=931529; GN = tgt PE=3 SV=1
MKFELKTTDGRARRGQLVFERGVVQTPAFMPVGTYGTVKGMTPEEVRETGAQILLGNTFHLWLRPGQAVMRAHGDLHDFMNWQGPILTDSGGFQVFSLGHIRKITEAGVHFRHPINGEKIFLDPEKSMEIQYDLGSDIVMIFDECTPYPATYEEARKSMEMSLRWGKRSREKFDALGNKNALFGIIQGSVYEELRDVSLDGLLEIGFDGYAVGGLAVGEPKEDMHRILEHVCPKIPADKPRYLMGVGKPEDLVEGVRRGVDMFDCVMPTRNARNGHLFTTDGVVKIRNAKYREDTSTLDADCDCYTCKNYTRSYLYHLDKCNEILGARLNTIHNLRYYQRVMQGLRDAIEQGKLDDFVTEFYRRQGKPVPPLAENDVK

SEQ ID NO: 51293 - protein, 378 aa, Aeromonas media
  REGION 1..378: note = tr|A0A023RKV5|A0A023RKV5_AERME Queuine tRNA-ribosyltransferase OS=Aeromonas media WS OX=1208104; GN = tgt PE=3 SV=1
MKFELKTTDGRARRGQLVFERGVVQTPAFMPVGTYGTVKGMTPEEVRETGAQILLGNTFHLWLRPGQAVMRAHGDLHDFMNWQGPILTDSGGFQVFSLGHIRKITEAGVHFRHPINGEKIFLDPEKSMEIQYDLGSDIVMIFDECTPYPATYEEARKSMEMSLRWAKRSREKFDALGNKNALFGIIQGSVYEPLRDVSLDGLLEIGFDGYAVGGLAVGEPKEDMHRILDHVCPKIPADKPRYLMGVGKPEDLVEGVRRGIDMFDCVMPTRNARNGHLFTTDGVVKIRNAKYREDTSTLDADCDCYTCKNYTRSYLYHLDKCNEILGARLNTIHNLRYYQRVMQGLRDAIEQGKLDDFVTEFYRRQGKPVPPLTENDVK

SEQ ID NO: 51294 - protein, 378 aa, Aeromonas molluscorum
  REGION 1..378: note = tr|R1GUE5|R1GUE5_9GAMM Queuine tRNA-ribosyltransferase OS=Aeromonas molluscorum 848; OX = 1268236 GN=tgt PE=3 SV=1
MKFELKTTDGRARRGQLVFERGVVQTPAFMPVGTYGTVKGMTPEEVRETGAEILLGNTFHLWLRPGQAVMRAHGDLHDFMNWQGPILTDSGGFQVFSLGHIRKITEAGVHFRHPINGEKIFLDPEKSMEIQYDLGSDIVMIFDECTPYPATYEEARKSMEMSLRWGKRSRDKFDALGNKNALFGIIQGSVYEELRDVSLNGLLEIGFDGYAVGGLAVGEPKEDMHRILEHVCPKIPADKPRYLMGVGKPEDLVEGVRRGVDMFDCVMPTRNARNGHLFTTDGVVKIRNAKYREDTSTLDADCDCYTCKNYTRSYLYHLDKCNEILGARLNTIHNLRYYQRVMQGLRDAIEQGKLDDFVTEFYRRQGKAVPPLAEENVQ

SEQ ID NO: 51295 - protein, 378 aa, unidentified
  source 1..378: note = Aeromonas rivipollensis
  REGION 1..378: note = tr|A0A2P1PGH5|A0A2P1PGH5_9GAMM Queuine tRNA-ribosyltransferase OS=Aeromonas rivipollensis; OX = 948519 GN=tgt PE=3 SV=1
MKFELKTTDGRARRGQLVFERGVVQTPAFMPVGTYGTVKGMTPEEVRETGAQILLGNTFHLWLRPGQAVMRAHGDLHDFMNWQGPILTDSGGFQVFSLGHIRKITEAGVHFRHPINGEKIFLDPEKSMEIQYDLGSDIVMIFDECTPYPATYEEARKSMEMSLRWAKRSRDKFDALGNKNALFGIIQGSVYEPLRDVSLDGLLEIGFDGYAVGGLAVGEPKEDMHRILDHVCPKIPADKPRYLMGVGKPEDLVEGVRRGIDMFDCVMPTRNARNGHLFTTDGVVKIRNAKYREDTSTLDADCDCYTCKNYTRSYLYHLDKCNEILGARLNTIHNLRYYQRVMQGLRDAIEQGKLDDFVTEFYRRQGKPVPPLTENDVK

SEQ ID NO: 51296 - protein, 378 aa, Aeromonas salmonicida
  REGION 1..378: note = sp|A4SP26|TGT_AERS4 Queuine tRNA-ribosyltransferase; OS = Aeromonas salmonicida (strain A449) OX=382245 GN=tgt; PE = 3 SV=1
MKFELKTTDGRARRGQLVFERGTVQTPAFMPVGTYGTVKGMTPEEVRETGAEILLGNTFHLWLRPGQEVMRAHGDLHDFMNWQGPILTDSGGFQVFSLGHIRKITEAGVHFRHPINGEKIFLDPEKSMEIQYDLGSDIVMIFDECTPYPATYEEARKSMEMSLRWGKRSRDKFDALGNKNALFGIIQGSVYEELRDVSLNGLLEIGFDGYAVGGLAVGEPKEDMHRILEHVCPKIPADKPRYLMGVGKPEDLVEGVRRGVDMFDCVMPTRNARNGHLFTTDGVVKIRNAKYRSDTSTLDADCDCYTCKNYTRSYLYHLDKCNEILGARLNTIHNLRYYQRVMQGLRDAIEQGKLDDFVTEFYRRQGKPVPPLAENDVK

SEQ ID NO: 51297 - protein, 378 aa, Aeromonas salmonicida
  REGION 1..378: note = tr|T0QY19|T0QY19_AERSA Queuine tRNA-ribosyltransferase OS=Aeromonas salmonicida subsp. pectinolytica 34mel OX=1324960 GN=tgt PE=3 SV=1
MKFELKTTDGRARRGQLVFERGVVQTPAFMPVGTYGTVKGMTPEEVRETGAEILLGNTFHLWLRPGQEVMRAHGDLHDFMNWQGPILTDSGGFQVFSLGHIRKITEAGVHFRHPINGEKIFLDPEKSMEIQYDLGSDIVMIFDECTPYPATYEEARKSMEMSLRWGKRSRDKFDALGNKNALFGIIQGSVYEELRDVSLNGLLEIGFDGYAVGGLAVGEPKEDMHRILEHVCPKIPADKPRYLMGVGKPEDLVEGVRRGVDMFDCVMPTRNARNGHLFTTDGVVKIRNAKYRSDTSTLDADCDCYTCKNYTRSYLYHLDKCNEILGARLNTIHNLRYYQRVMQGLRDAIEQGKLDDFVTEFYRRQGKPVPPLAENDVK

SEQ ID NO: 51298 - protein, 378 aa, Aeromonas schubertii
  REGION 1..378: note = tr|A0A0W7U2B5|A0A0W7U2B5_9GAMM Queuine tRNA-ribosyltransferase OS=Aeromonas schubertii OX=652; GN = tgt PE=3 SV=1
MKFELKTTDGRARRGQLVFERGTVQTPAFMPVGTYGTVKGMTPEEVRQSGAEILLGNTFHLWLRPGQEVMRLHGDLHDFMNWHGPILTDSGGFQVFSLGDIRKITEEGVTFRHPINGDKIFLSPEKSMEIQYDLGSDIVMIFDECTPYPATYEEARKSMEMSLRWAKRSRQRFDELGNKNALFGIIQGSVYEPLRDVSLDGLLEIGFDGYAVGGLAVGEPKEDMHRILEHVCPKIPADKPRYLMGVGKPEDLVEGVRRGIDMFDCVMPTRNARNGHLFTTDGVVKIRNAKHKDDTSPLDAECDCYTCQNYSRSYLHHLDKCNEILGARLNTIHNLRYYQRVMQGLRDAIEQGKLDDFVTEFYRRQGKPVPPLAEAATE

SEQ ID NO: 51299 - protein, 378 aa, Aeromonas schubertii
  REGION 1..378: note = tr|A0A0S2SDT4|A0A0S2SDT4_9GAMM Queuine tRNA-ribosyltransferase OS=Aeromonas schubertii OX=652; GN = tgt PE=3 SV=1
MKFELKTTDGRARRGQLVFERGTVQTPAFMPVGTYGTVKGMTPEEVRQSGAEILLGNTFHLWLRPGQEVMRLHGDLHDFMNWHGPILTDSGGFQVFSLGDIRKITEEGVTFRHPINGDKIFLSPEKSMEIQFDLGSDIVMIFDECTPYPATYEEARKSMEMSLRWAKRSRQRFDELGNKNALFGIIQGSAYEPLRDVSLDGLLEIGFDGYAVGGLAVGEPKEDMHRILEHVCPKIPADKPRYLMGVGKPEDLVEGVRRGIDMFDCVMPTRNARNGHLFTTDGVVKIRNAKHKDDTSPLDAECDCYTCQNYSRSYLHHLDKCNEILGARLNTIHNLRYYQRVMQGLRDAIEQGKLDDFVTEFYRRQGKPVPPLAEAATE

SEQ ID NO: 51300 - protein, 378 aa, Aeromonas simiae
  REGION 1..378: note = tr|A0A5J6WYU8|A0A5J6WYU8_9GAMM tRNA guanosine(34) transglycosylase Tgt OS=Aeromonas simiae OX=218936 GN=tgt; PE = 4 SV=1
MKFELKTTDGRARRGQLVFERGTVQTPAFMPVGTYGTVKGMTPEEVAETGAQILLGNTFHLWLRPGQDVMRKHGDLHDFMNWHGPILTDSGGFQVFSLGDIRKITEEGVTFRHPINGDKIFLSPEKSMEIQYDLGSDIVMIFDECTPYPATYEEARKSMEMSLRWAKRSRERFNELGNKNALFGIIQGSVYEPLRDVSLDGLLEIGFDGYAVGGLAVGEPKEDMHRILEHVCPKIPADKPRYLMGVGKPEDLVEGVRRGIDMFDCVMPTRNARNGHLFTTDGVVKIRNAKHREDTSPLDAECDCYTCQNYSRSYLHHLDKCNEILGARLNTIHNLRYYQRVMQGLRDAIEQGKLDDFVTEFYRRQGKPVPPLAEAASE

SEQ ID NO: 51301 - protein, 378 aa, Aeromonas sobria
  REGION 1..378: note = tr|A0A2N3J3D2|A0A2N3J3D2_AERSO Queuine tRNA-ribosyltransferase OS=Aeromonas sobria OX=646 GN=tgt; PE = 3 SV=1
MKFELKTTDGRARRGQLVFERGTVQTPAFMPVGTYGTVKGMTPEEVRETGAQILLGNTFHLWLRPGQEVMRAHGDLHDFMNWQGPILTDSGGFQVFSLGHIRKITEAGVHFRHPINGEKIFLDPEKSMEIQYDLGSDIVMIFDECTPYPATYEEARKSMEMSLRWGKRSRDKFDALGNKNALFGIIQGSVYEELRDVSLNGLLEIGFDGYAVGGLAVGEPKEDMHRILEHVCPKIPADKPRYLMGVGKPEDLVEGVRRGVDMFDCVMPTRNARNGHLFTTDGVVKIRNAKYRTDTSTLDADCDCYTCKNYTRSYLYHLDKCNEILGARLNTIHNLRYYQRVMQGLRDAIEQGKLDDFVTEFYRRQGKPVPPLAENDVK

SEQ ID NO: 51302 - protein, 378 aa, Aeromonas sobria
  REGION 1..378: note = tr|A0A2N3IW81|A0A2N3IW81_AERSO Queuine tRNA-ribosyltransferase OS=Aeromonas sobria OX=646 GN=tgt; PE = 3 SV=1
MKFELKTTDGRARRGQLVFERGTVQTPAFMPVGTYGTVKGMTPEEVRETGAQILLGNTFHLWLRPGQEVMRAHGDLHDFMNWQGPILTDSGGFQVFSLGHIRKITEAGVHFRHPINGEKIFLDPEKSMEIQYDLGSDIVMIFDECTPYPATYEEARKSMEMSLRWGKRSRDKFDALGNKNALFGIIQGSVYEELRDVSLNGLLEIGFDGYAVGGLAVGEPKEDMHRILEHVCPKIPADKPRYLMGVGKPEDLVEGVRRGVDMFDCVMPTRNARNGHLFTTDGVVKIRNAKYRTDTSTLDADCDCYTCKNYTRSYLYHLDKCNEILGARLNTIHNLRYYQRVMQGLRDAIEQGKLDDFVTEFYRRQGKPVPPLVENDVK

SEQ ID NO: 51303 - protein, 378 aa, Aeromonas sp.
  REGION 1..378: note = tr|A0A291TIH7|A0A291TIH7_9GAMM Queuine tRNA-ribosyltransferase OS=Aeromonas sp. CU5 OX=2033033; GN = tgt PE=3 SV=1
MKFELKTTDGRARRGQLVFERGTVQTPAFMPVGTYGTVKGMTPEEVRETGAEILLGNTFHLWLRPGQEVMRAHGDLHDFMNWQGPILTDSGGFQVFSLGDIRKITEAGVHFRHPINGEKIFLDPEKSMEIQYDLGSDIVMIFDECTPYPVSYEDARKSMEMSLRWGKRSRDKFDALGNKNALFGIIQGSVYEELRDVSLNGLLEIGFDGYAVGGLAVGEPKEDMHRILEHVCPKIPADKPRYLMGVGKPEDLVEGVRRGVDMFDCVMPTRNARNGHLFTTDGVVKIRNAKYRTDTSTLDADCDCYTCKNYTRSYLYHLDKCNEILGARLNTIHNLRYYQRVMQGLRDAIEQGKLDDFVTEFYRRQGKPVPPLAENDVK

SEQ ID NO: 51304 - protein, 378 aa, Aeromonas sp.; identical to SEQ ID NO: 51284
  REGION 1..378: note = tr|A0A369SV59|A0A369SV59_9GAMM Queuine tRNA-ribosyltransferase OS=Aeromonas sp. ARM81 OX=1747384; GN = tgt PE=3 SV=1

SEQ ID NO: 51305 - protein, 378 aa, Aeromonas taiwanensis
  REGION 1..378: note = tr|A0A5F0KDG4|A0A5F0KDG4_9GAMM Queuine tRNA-ribosyltransferase OS=Aeromonas taiwanensis OX=633417; GN = tgt PE=3 SV=1
MKFELKTTDGRARRGQLVFERGTVQTPAFMPVGTYGTVKGMTPEEVRDTGAQILLGNTFHLWLRPGQEVMRAHGDLHDFMNWQGPILTDSGGFQVFSLGHIRKITEEGVHFRHPINGEKIFLDPEKSMEIQYDLGSDIVMIFDECTPYPATYEEARKSMEMSLRWAKRSRDKFDALGNKNALFGIIQGSVYEPLRDVSLDGLLEIGFDGYAVGGLAVGEPKEDMHRILEHVCPRIPADKPRYLMGVGKPEDLVEGVRRGIDMFDCVMPTRNARNGHLFTTDGVVKIRNAKYREDTSTLDADCDCYTCKNYTRSYLYHLDKCNEILGARLNTIHNLRYYQRVMQGLRDAIEQGKLDDFVTEFYRRQGKPVPPLAENDVK

SEQ ID NO: 51306 - protein, 378 aa, Aeromonas veronii
  REGION 1..378: note = tr|A0A0E2LJY8|A0A0E2LJY8_9GAMM Queuine tRNA-ribosyltransferase OS=Aeromonas veronii Hm21; OX = 1347420 GN=tgt PE=3 SV=1
MKFELKTTDGRARRGQLVFERGVVQTPAFMPVGTYGTVKGMTPEEVRETGAQILLGNTFHLWLRPGQEVMRAHGDLHDFMNWQGPILTDSGGFQVFSLGHIRKITEAGVHFRHPINGEKIFLDPEKSMEIQYDLGSDIVMIFDECTPYPATYEEARKSMEMSLRWGKRSRDKFDALGNKNALFGIIQGSVYEDLRDVSLKGLLEIGFDGYAVGGLAVGEPKEDMHRILEHVCPKIPADKPRYLMGVGKPEDLVEGVRRGIDMFDCVMPTRNARNGHLFTTDGVVKIRNAQHRNDTSTLDAECDCYTCKNYSRSYLHHLDKCNEILGARLNTIHNLRYYQRVMQGLRDAIEQGKLDDFVTEFYRRQGKPVPPLAENDVK

SEQ ID NO: 51307 - protein, 378 aa, Aeromonas veronii; identical to SEQ ID NO: 51283
  REGION 1..378: note = tr|A0A494TUN7|A0A494TUN7_9GAMM Queuine tRNA-ribosyltransferase OS=Aeromonas veronii OX=654 GN=tgt; PE = 3 SV=1

SEQ ID NO: 51308 - protein, 343 aa, Aestuariibacter sp.
  REGION 1..343: note = tr|A0A2D6XW84|A0A2D6XW84_9ALTE Queuine tRNA-ribosyltransferase (Fragment) OS=Aestuariibacter sp.; OX = 1872400 GN=CL531_02925 PE=3 SV=1
  VARIANT 79: note = Xaa can be any naturally occurring amino acid
MQFELLHTDGKARRGRLVFERGVVETPAFMPVGTYGTVKGMTPEELEDSGAHICLGNTFHLMLRPGTGIIKQHGDLHDXMHWDKPILTDSGGFQVFSLGDLRKITEEGVTFRSPINGEKILLTPEKSMEVQRDLGSDIVMIFDECTPYPATEQEARISMELSLRWAKRSKDAHGDNPSALFGIIQGGMYEDLRDVSLAGLEDIGFDGYAIGGLSVGEPKDDMIRIINHTAPKIPENKPRYLMGVGKPEDIVEAVRRGIDMFDCVMPTRNARNGHLFVTEGVIKIRNAKHKHDTGPLDENCDCYTCKNYSRSYLHHLDKCNEILGARLNTIHNLRYYQRVMQGL

SEQ ID NO: 51309 - protein, 370 aa, Aestuariibacter sp.
  REGION 1..370: note = tr|A0A506RT91|A0A506RT91_9ALTE Queuine tRNA-ribosyltransferase OS=Aestuariibacter sp. GS-14; OX = 2590670 GN=tgt PE=3 SV=1
MQFELLHTDGKARRGRLVFERGVVETPAFMPVGTYGTVKGMTPEELEDSGAHICLGNTFHLMLRPGTGIIKQHGDLHDFMHWEKPILTDSGGFQVFSLGDLRKITEEGVTFRSPINGEKILLTPEKSMEVQRDLGSDIVMIFDECTPYPATEQEARISMELSLRWAKRSKEAHGDNPSALFGIIQGGMFEDLRDVSLAGLEDIGFDGYAIGGLSVGEPKEDMIRIINHTAPKIPENKPRYLMGVGKPEDIVEAVRRGIDMFDCVMPTRNARNGHLFVTEGVIKIRNAKHKNDTGPLDEKCDCYTCKNYSRSYLHHLDKCNEILGARLNTIHNLRYYQRVMQGLRDAIASDSLDAFVEEFYAQKNMPVPAL

SEQ ID NO: 51310 - protein, 375 aa, unidentified
  source 1..375: note = Aestuariispira insulae
  REGION 1..375: note = tr|A0A3D9HXU9|A0A3D9HXU9_9PROT Queuine tRNA-ribosyltransferase OS=Aestuariispira insulae; OX = 1461337 GN=tgt PE=3 SV=1
MPDFGFDLLGTDGQARRGRVTTAHGTIETPAFMPVGTAATVKAMFPEDVAKTGAEIVLGNTYHLMLRPTAERIAELGGLHKFMNWSKPILTDSGGYQVMSLTELRKLTEEGVRFRSHIDGSYHMLTPERSTEIQHLLGSTITMAFDECTPYPCTKEEAEKSMELSMRWAVRSRDAFVKREGYGQFGIVQGSVHEDLRLRSIEALNGIDFEGYAVGGLAVGEGQELMFSTLDFTTPAMKTDKPRYLMGVGKPTDLVGAVARGIDMFDCVLPTRSGRNAQAFTRRGPVNMKNARHATDHRPLDEECPCPACTQYSRAYLHHLIKAGEILGMMLLSWHNIQYYQQLMQGMRDAIEAGSFEDFQAAFLEEYNGGDIAPL

SEQ ID NO: 51311 - protein, 380 aa, unidentified
  source 1..380: note = Aestuariivirga litoralis
  REGION 1..380: note = tr|A0A2W2ATL5|A0A2W2ATL5_9RHIZ Queuine tRNA-ribosyltransferase OS=Aestuariivirga litoralis; OX = 2650924 GN=tgt PE=3 SV=1
MTLQEKTPEFGFTLHGTDGTARLGTVHTLHGDIRTPAFMPVGTVGTVKGLYLDQVEGTGADIILGNTYHLMLRPGAEEVAKLGGLHHFIGWKRPILTDSGGFQIMSLSKIRKITEQSAMFQSHIDGRKYELSPERAMEIQRLLGSDIQMQLDQCIQYPHTEKEAEKAMQLSLRWAERSRKAFGRQPGRGNFGIVQGGINPKLRKESAEGLKSIGFEGYAIGGLAVGEGHELMLQAIEHTIPHLPEDRPRYLMGVGTPEDILESVARGIDMFDCVLPTRSGRHGQAFTRFGKINLRNAKHADDLRPLDPEHPCPALSRYSRAYLHHLIRSGELLGMMLLSWANIAYYQSLMQGIRAAISEGRFEDFRVATKEQWKRGDIPA

SEQ ID NO: 51312 - protein, 376 aa, unidentified
  source 1..376: note = Aestuariivita sp.
  REGION 1..376: note = tr|A0A2E0YJ37|A0A2E0YJ37_9RHOB Queuine tRNA-ribosyltransferase OS=Aestuariivita sp. OX=1872407; GN = tgt PE=3 SV=1
MKDKVSFVLKSQSGKARCGVIRTPRGEIRTPAFMPVGTGATVKAMMTDSVRATGADILLGNTYHLMLRPGAQRIANLGGLHQFMNWSRPILTDSGGFQVMSLAGLRKMSEHGVTFKSHIDGSCHELSPERSIEIQKLLGSDIAMVFDECTPFPATQEEARKSMKLSMRWAERSKDAFGDRLGHALFGIQQGSVYPDQRAESAVALTDIGFDGYAIGGLAVGEGQEAMFDVLEYAPDMLPFDKPRYLMGVGKPDDIVGAVKRGIDMMDCVLPSRSGRTGQVFTRRGVVNIKNARHQDDPRPLDEDCTCPACRNYSRAYLHHVFKSQEMISGMLLTWHNLHYFQELMSNMRSAIAEDKFDIFEKFFHNSRVNGDIEQL

SEQ ID NO: 51313 - protein, 372 aa, Afifella marina
  REGION 1..372: note = tr|A0A1G5NI93|A0A1G5NI93_AFIMA Queuine tRNA-ribosyltransferase OS=Afifella marina DSM 2698; OX = 1120955 GN=tgt PE=3 SV=1
MTEFSFTLQARDGNARRGTISMPRGLIRTPAFMPVGTQATVKAMYPEQVRELGADIVLGNTYHLMLRPGAERVARLGGLHSFMRWPHPILTDSGGFQVMSLAQLTKLDEDGVTFKSHVDGSTHRLTPERSVEIQGLLGADITMQLDECLKLPADYSEVERAMELSLRWGERSKAAFGGEPGRALFGIVQGGDQPDLRLRSAEGLRRIGFHGYAVGGLAVGEPQAIMLEILQETVPALPDEAPRYLMGVGTPEDILLSIARGIDMFDCVMPTRAGRHGQAFTRYGRLNMRNAKHTEDLRPLDPSSDCPAARDYSRAYLHHLFRTQETLGAMLLTWSNLAYYQTLMKEARQAISEGRYTDYVAEVRENWERGEP

SEQ ID NO: 51314 - protein, 377 aa, Afipia broomeae
  REGION 1..377: note = tr|K8P658|K8P658_9BRAD Queuine tRNA-ribosyltransferase OS=Afipia broomeae ATCC 49717; OX = 883078 GN=tgt PE=3 SV=1
MSVPNYFKLLGRDGEARTGELTTPHGVVRTPAFMPVGTAGAMKGIHWRDIRETGADIVLGNTYHLMLRPGAERIAALGGLQAFTTWNGPMLTDSGGFQVMSLAKIRKVTEHAVTFSSHIDGTKVELSPERAIEVQRLLGSDIAMQLDECVRLPAERTEIERAMQLSIRWAERSKRAFETAPPGYMLFGIAQGGDVPELRRESTLSLIDIGFHGYAVGGLAVGEPQEVMLAMIEEVAPLLPQERPRYLMGVGTPDDMLEAVARGIDMFDCVMPTRNGRHGHVFTRHGVINLRNARHADDPRPLDEESGWRSTSGYSRAYLHHLVKSEEALGAMLLSEINVAYYQSLMSGARAAIAAGTFDDYRASVRAGWARGDIAPR

SEQ ID NO: 51315 - protein, 377 aa, Afipia broomeae
  REGION 1..377: note = tr|A0A2M8ZI00|A0A2M8ZI00_9BRAD Queuine tRNA-ribosyltransferase OS=Afipia broomeae OX=56946 GN=tgt; PE = 3 SV=1
MSLPNHFDLVATDGAARTGRLTTPHGVVRTPAFMPVGTAGAMKGVHWREVRDAGADIVLGNTYHLMLRPGAERIAALGGLQVFTGWQGPMLTDSGGFQVMSLSELRKVSEAAVTFRSHIDGTKIELSPERSIEVQRLLGSDIAMQMDECVRLPAERDDIERAMQLSLRWAERSKRAFETAPPGYMLFGIAQGGDIPELRQASARGLVDIGFHGYAIGGLAVGEPQSVMLAMIEEVAPILPPDRPRYLMGVGTPDDLLEAVARGIDMFDCVMPTRNGRHGVAFTRFGQVNLRNARHADDPRPIDEESSWPSARNCSRAYLHHLVKSGETLGAMLLSEINIAYYQQLMHDIRNAVSEGRFADLREHIRAGWAKGDITAR

SEQ ID NO: 51316 - protein, 377 aa, Afipia clevelandensis
  REGION 1..377: note = tr|K8PLL7|K8PLL7_9BRAD Queuine tRNA-ribosyltransferase OS=Afipia clevelandensis ATCC 49720 OX=883079 GN=tgt PE=3 SV=1
MAVPNHFKLLGHDGEARTGVLTTPHGVVRTPAFMPVGTAGAMKSIHWRDIRETGADIVLGNTYHLMLRPGAERIASLGGLQTFTTWNGPMLTDSGGFQVMSLAKLRKVTEHAVTFSSHIDGSKVELSPERAIEVQRLLGSDIAMQLDECVRLPAERADIERAMLLSIRWAERSKRAFESAPEGYMLFGIVQGGDIPELRRDSAHRLIDIGFHGYAVGGLAVGEPQAVMLAMIEEVAPLLPQERPRYLMGVGTPDDMLEAIARGIDMFDCVMPTRNGRHGHVFTRHGIINLRNARHADDPRPLDEESHWRGARDYSRAYLHHLVKSEEALGAMLLSEINVAYYQTLMSGARAAIAAGTFDSYRASVRDGWARGDIAPR

SEQ ID NO: 51317 - protein, 458 aa, Afipia felis
  REGION 1..458: note = tr|A0A090MKN6|A0A090MKN6_AFIFE Queuine tRNA-ribosyltransferase OS=Afipia felis OX=1035 GN=tgt; PE = 3 SV=1
MSVANHFRLLGSDGEARTGVLTTPHGAVRTPAFMPVGTAGAMKGIHWREIRETGADIVLGNTYHLMLRPTAERIAALGGLQKFTGWNGPMLTDSGGFQVMSLSKLRKVTEQGVRFKSHIDGAVLDLTPERAIEVQRLFGSDIAMQLDECVRLPATRAEVERAMQLSLRWAERSKRAFEGAPSGRMLFGIVQGGDIAELRRQSAVALGQIDFHGFAVGGLAVGEPQEVMLAMIEETAPLLPQDRPRYLMGVGTPDDMIEAVARGIDMFDCVLPTRNGRHGHAFTRRGVINLRNARHADDPRPLDEESPWPPARSYSRAYLHHLVKAGEALGAMLLSEINIAYFQTLMSGIREAICGGHVSRIFALQRKRAGRQATCRRGRHRFRSRLAVGRPDNPSAYAWSRNRGRRYRRSTDSSRCCRKRLRLQPPPWCRSRLRKSCARLRAERTARASGGFQRLPSS

SEQ ID NO: 51318 - protein, 377 aa, Afipia felis
  REGION 1..377: note = tr|A0A380W7T2|A0A380W7T2_AFIFE Queuine tRNA-ribosyltransferase OS=Afipia felis OX=1035 GN=tgt; PE = 3 SV=1
MSVANHFKLLGRDGEARTGVLTTPHGEVRTPAFMPVGTAGAMKGIHWRDIRETGADIVLGNTYHLMLRPTAERIAALGGLQTFTGWKGPMLTDSGGFQVMSLSKLRKVTEQGVRFKSHIDGAVLDLTPERAIEVQRLFGSDIAMQLDECVRLPAPRGEVERAMQLSLRWAERCKRAFETAPPGHMLFGIVQGGDVAELRRRSAAALGEIGFHGYAVGGLAVGEPQEVMLAMIEEAAPLLPQDRPRYLMGVGTPDDMIEAVARGIDMFDCVLPTRNGRHGHAFTRRGVINLRNARHADDPRPLDEESPWLPARSYSRAYLHHLVKAGEALGAMLLSEINIAYFQTLMSDIRDAIAAGTFADFRAVTKAGWAAGDLPPR

SEQ ID NO: 51319 - protein, 377 aa, Afipia massiliensis
  REGION 1..377: note = tr|A0A4U6BUG1|A0A4U6BUG1_9BRAD Queuine tRNA-ribosyltransferase OS=Afipia massiliensis OX=211460; GN = tgt PE=3 SV=1
MTVPNHFKLLGRDGEARTGELTTPHGVVRTPAFMPVGTAGAMKSIHWRDIRDTGADIVLGNTYHLMLRPGAERIAALGGLQKFTTWNGPMLTDSGGFQVMSLAKLRKVTEHAVTFSSHIDGTKVELSPERAIEVQRLLGSDIAMQLDECVRLPAERADIERAMQLSIRWAGRSKRAFETAPAGYMLFGIVQGGDIPELRRESTRALIDIGFHGYAVGGLAVGEPQAVMLAMIEEVAPILPQERPRYLMGVGTPDDMLEAVARGIDMFDCVMPTRNGRHGHVFTRHGVINLRNARHADDPRPLDEESAWRSANGYSRAYLHHLVKSEEALGAMLLSEVNVAYYQSLMTGARAAIAAGTYGDYRASVREGWARGDIAPR

SEQ ID NO: 51320 - protein, 377 aa, Afipia sp.
  REGION 1..377: note = tr|A0A1G9WY45|A0A1G9WY45_9BRAD Queuine tRNA-ribosyltransferase OS=Afipia sp. GAS231 OX=1882747; GN = tgt PE=3 SV=1
MTVPNHFELLATNGAARTGRLTTPHGVIRTPAFMPVGTAGAMKGLHWREVRDAGADIVLGNTYHLMLRPGAERIAALGGLQKFTGWNGPMLTDSGGFQVMSLSELRKVTEQAVTFRSHIDGAKVELSPERSIEVQRLLGSDIAMQMDECVRLPAERADIERAMQLSLRWAVRSKRAFESAPEGYMLFGIVQGGDIPQLRHASARGLVEIGFHGYAIGGLAVGEPQAVMLDMIEETAPELPADRPRYLMGVGTPEDLLEAVARGIDMFDCVMPTRNGRHGMAFTRFGQINLRNARHADDPRPLDEESAWPSARDYSRAYLHHLVRSGETLGAMLLSDINVAYYQHLMQGMRDAIAAGGFEDFKKQTRAGWARGDIAAR

SEQ ID NO: 51321 - protein, 377 aa, Afipia sp.
  REGION 1..377: note = tr|A0A2D6Z3M8|A0A2D6Z3M8_9BRAD Queuine tRNA-ribosyltransferase OS=Afipia sp. OX=1871052 GN=tgt; PE = 3 SV=1
MSVPNHFKLLGRDGEARTGELTTPHGVVRTPAFMPVGTAGAMKGIHWRDIRETGADIVLGNTYHLMLRPGAERIAALGGLQAFTTWNGPMLTDSGGFQVMSLAKIRKVTEHAVTFSSHIDGTKVELSPERAIEVQRLLGSDIAMQLDECVRLPAERTEIERAMQLSIRWAERSKRAFETAPPGYMLFGIAQGGDVPELRRESTLALIDIGFHGYAVGGLAVGEPQEVMLAMIEEVAPLLPQERPRYLMGVGTPDDMLEAVARGIDMFDCVMPTRNGRHGHVFTRHGVINLRNARHADDPRPLDEESGWRSTSGYSRAYLHHLVKSEEALGAMLLSEINVAYYQSLMNGARAAIAAGTFDDYRASVRAGWARGDIAPR

SEQ ID NO: 51322 - protein, 374 aa, Agarivorans albus
  REGION 1..374: note = tr|R9PJB8|R9PJB8_AGAAL Queuine tRNA-ribosyltransferase OS=Agarivorans albus MKT 106; OX = 1331007 GN=tgt PE=3 SV=1
MKYELLAQDGKARRGRLVFERGSVETPAFMPVGTYGTVKGMTPEEVSATGAEILLGNTFHLWLRPGQEVMKAHGDLHDFMNWQGPILTDSGGFQVFSLGDIRNITEEGVHFRNPVNGDKIFLTPEKSMEIQNDLGSDVVMIFDECTPYPATEEEADKSMQMSLRWAARSRQRHDELENKNALFGIIQGGVYEHLRDVSLEGLTNIGFDGYAIGGLAVGEPKEDMHRILDYVAHKVPEDKPRYLMGVGKPEDLVEGVRRGVDMFDCVMPTRNARNGHLFTSEGVIKIRNARHREDTNTLDKECDCYTCQNYSRSYLHHLDKCNEILGARLNTIHNLRHYQRLMEGLRGAIAAGKLDDFVAEFYAKLGREVPPLAE

SEQ ID NO: 51323 - protein, 374 aa, Agarivorans sp.
  REGION 1..374: note = tr|A0A4D4IN06|A0A4D4IN06_9ALTE Queuine tRNA-ribosyltransferase OS=Agarivorans sp. Toyoura001; OX = 2283141 GN=tgt PE=3 SV=1
MKYQLLAQDGKARRGRLEFERGSVETPAFMPVGTYGTVKGMTPEEVSETGAEILLGNTFHLWLRPGQEVMKAHGDLHDFMNWQGPILTDSGGFQVFSLGDIRNITEEGVHFRNPVNGDKIFLTPEKSMEIQNDLGSDIVMIFDECTPYPATEAEADKSMQMSLRWAARSRQRHDELNNKNALFGIIQGGVYEHLRDVSLEGLTNIGFDGYAIGGLAVGEPKEDMHRILDYVAHKVPADKPRYLMGVGKPEDLVEGVRRGVDMFDCVMPTRNARNGHLFTGEGVVKIRNARHREDTNPLDKECDCYTCQNYSRSYLHHLDKCNEILGARLNTIHNLRYYQRVMEGIREAVAAGKFDDFVADFYAKLGREVPPLAE

SEQ ID NO: 51324 - protein, 380 aa, unidentified
  source 1..380: note = Agathobacter rectalis
  REGION 1..380: note = tr|C4ZAW9|C4ZAW9_AGARV Queuine tRNA-ribosyltransferase OS=Agathobacter rectalis (strain ATCC 33656 / DSM 3377 / JCM 17463 / KCTC 5835 / VPI 0990); OX = 515619 GN=tgt PE =3 SV=1
MAKYELLKQEGRAKRGTFHTVHGDIQTPVFMNVGTVGAIKGAVSTDDLKEIKCQVELSNTYHLHVRTGDKIIKELGGLHKFMVWDRPILTDSGGFQVFSLAGLRKIKEEGVYFNSHIDGAKIFMGPEESMQIQSNLGSTIAMAFDECPSSVADRQYVTNSVNRTARWLERCKKEMARLNSLPDTINKEQLLFGINQGAIYDDIRIDHAKRISELELDGYAVGGLAVGESHEEMYHILDETVPHLPVNKPTYLMGVGTPANILEGVERGIDFFDCVYPSRNGRHGHVYTNHGKLNLFNQKYQKDMRPIEEGCNCPACRTYSRAYIRHLLKAKEMLGMRLCVLHNLYFYNNMMEEIRDSLDAGRFASYKAEKLYGMTQGEQS

SEQ ID NO: 51325 - protein, 379 aa, unidentified
  source 1..379: note = Agathobacter ruminis
  REGION 1..379: note = tr|A0A2G3E688|A0A2G3E688_9FIRM Queuine tRNA-ribosyltransferase OS=Agathobacter ruminis OX=1712665; GN = tgt PE=3 SV=1
MAKYDLLKTEGRAKRGVFHTVHGDIQTPVFMNVGTVGAIKGAVSTEDLKQIKCQVELSNTYHLHVRTGDKTIKELGGLHKFMVWDRPILTDSGGFQVFSLSSLRKIKEEGVHFRSHIDGAKIFMGPEESMQIQSNLGSTIAMAFDECPPALAERKYVEDSVARTTRWLKRCKTEMARLNALEDTVNPNQLLFGINQGAVYDDIRIDHAKEIAELDLDGYAVGGLAVGESHEQMYHVLEETVPYLPQNKPTYLMGVGTPANILEGVERGIDFFDCVYPSRNGRHGHAYTRFGKLNLNNKKFEKDMRPIEEGCQCPACRNYSRAYIRHLLKAGEMLGLRLMVLHNLYFYNNMMEEIRNALDEGRFAQYKASMLDSMEHGQD

SEQ ID NO: 51326 - protein, 380 aa, unidentified
  source 1..380: note = Agathobaculum butyriciproducens
  REGION 1..380: note = tr|A0A2U1BBT3|A0A2U1BBT3_9FIRM Queuine tRNA-ribosyltransferase OS=Agathobaculum butyriciproducens; OX = 1628085 GN=tgt PE=3 SV=1
MEIGKFNLIKTEGRARRGEFCTAHGVVQTPVFQNVGTAGAIKGAVDAFDLKELGCQIELSNTYHLHVRPGDQIVKQMGGLHKFMRWDGPMLTDSGGFQVFSLATLRKIKEEGVTFHSHVDGRKIFMGPEESMRIQSNLGSDIAMAFDECIENPAPREYVKNSIDRTTRWLKRCKTELDRLNTLPDTVNPHQLLFGINQGGTYDDLRIEHMQAIAELDLPGYAIGGLAVGESTEVMYHILDVVLPHAPEHKPRYLMGVGTPSNIIEGVARGIDFFDCVMPTRNARHGHLFTHNGILNIMNAKYQTDDRPIEEGCQCPTCQRFSRAYLRHLLKSGEMLSQRLLVMHNLWFYNHLMQEIRDALDNGTFEAYRAEYSEKMSKRI

SEQ ID NO: 51327 - protein, 381 aa, Aggregatibacter actinomycetemcomitans
  REGION 1..381: note = tr|H0KHB8|H0KHB8_AGGAC Queuine tRNA-ribosyltransferase OS=Aggregatibacter actinomycetemcomitans RhAA1 OX=1089447 GN=tgt PE=3 SV=1
MKYELDKTSGNARRGRLVFERPQGTFTVETPAFMPVGTYGTVKGMTPEEVRATGAEILLGNTFHLWLRPGQEVMRKHGDLHDFMQWHRPILTDSGGFQVFSLGKLRKITEEGVRFQNPINGERIFLSPEKSMEIQYDLGSDIVMIFDECTPYPATFDYAKQSMEMSLRWAQRSRARFDELGNKNALFGIIQGGTFEELRKVSLEGLVNIGFDGYAVGGLAVGEPKEDMHRILEYICPQIPVDKPRYLMGVGKPEDLVEGVRRGIDMFDCVMPTRNARNGHLFVTDGIVKIRNAKYKDDTSPLDLHCDCYTCKHYTKAYLYHLDKCGEILGARLNTIHNLRYYQRLMAEIRQAIEADHFDDFVVEFYARIGKPVPPLQLTDQ

SEQ ID NO: 51328 - protein, 383 aa, Aggregatibacter actinomycetemcomitans
  REGION 1..383: note = tr|A0A5D0EPG3|A0A5D0EPG3_AGGAC tRNA guanosine(34) transglycosylase Tgt OS=Aggregatibacter actinomycetemcomitans OX=714 GN=tgt PE=4 SV=1
MKYELDKTSGNARRGRLVFERPRGTFTVETPAFMPVGTYGTVKGMTPEEVRTTGAEILLGNTFHLWLRPGQEVMRKHGDLHDFMQWHCPILTDSGGFQVFSLGKLRKITEEGVKFQNPINGERIFLSPEKSMEIQYDLGSDIVMIFDECTPYPATFNYAKQSMEMSLRWAQRSRARFDELGNKNALFGIIQGGTFEELRKVSLEGLINIGFDGYAVGGLAVGEPKEDMHRILEYICPQIPADKPRYLMGVGKPEDLVEGVRRGIDMFDCVMPTRNARNGHLFVTDGIVKIRNAKYKDDTSPPDPHCDCYTCKHYTKAYLYHLDKCGEILGARLNTIHNLRYYQRLMAEIRQAIEADRFDNFVVEFYARIGKPVPPLQLAEADQ

SEQ ID NO: 51329 - protein, 383 aa, Aggregatibacter aphrophilus
  REGION 1..383: note = tr|A0A448FBU9|A0A448FBU9_AGGAP Queuine tRNA-ribosyltransferase OS=Aggregatibacter aphrophilus ATCC 33389 OX=985008 GN=tgt PE=3 SV=1
MKYELDKTSGNARRGRLVFERPQGTFTVETPAFMPVGTYGTVKGMTPEEVRATGAEILLGNTFHLWLRPGQEVMRKHGDLHDFMQWHRPILTDSGGFQVFSLGKLRKITEEGVKFQNPINGERIFLSPEKSMEIQYDLGSDIVMIFDECTPYPATFDYAKKSMEMSLRWAQRSRNRFDELGNKNALFGIIQGGTFEELRKVSLEGLVNIGFDGYAVGGLAVGEPKEDMHRILEYICPQIPADKPRYLMGVGKPEDLVEGVRRGIDMFDCVMPTRNARNGHLFVTDGIVKIRNAKYKDDTSPLDPHCDCYTCKHYTKAYLYHLDKCGEILGARLNTIHNLRYYQRLMAEIRQAIEEDRFDDFVVEFYARIGKPIPPLQLAETEK

SEQ ID NO: 51330 - protein, 221 aa, Aggregatibacter aphrophilus
  REGION 1..221: note = tr|A0A336N282|A0A336N282_AGGAP Queuine tRNA-ribosyltransferase OS=Aggregatibacter aphrophilus; OX = 732 GN=tgt_2 PE=3 SV=1
MEMSLRWAQRSRNRFDELGNKNALFGIIQGGTFEELRKVSLEGLVNIGFDGYAVGGLAVGEPKEDMHRILEYICPQIPADKPRYLMGVGKPEDLVEGVRRGIDMFDCVMPTRNARNGHLFVTDGIVKIRNAKYKDDTSPLDPHCDCYTCKHYTKAYLYHLDKCGEILGARLNTIHNLRYYQRLMAEIRQAIEEDRFDDFVVEFYARIGKPIPPLQLAETEK

SEQ ID NO: 51331 - protein, 383 aa, Aggregatibacter segnis
  REGION 1..383: note = tr|E6KYW2|E6KYW2_9PAST Queuine tRNA-ribosyltransferase OS=Aggregatibacter segnis ATCC 33393 OX=888057 GN=tgt PE=3 SV=1
MKYELDKTSGNARRGRLVFERPQGTFTVETPAFMPVGTYGTVKGMTPEEVRATGAEILLGNTFHLWLRPGQEIMRKHGDLHDFMQWHRPILTDSGGFQVFSLGKLRKITEEGVKFQNPINGERIFLSPEKSMEIQYDLGSDIVMIFDECTPYPATFDYAKKSMEMSLRWAQRSRNRFDELGNKNALFGIIQGGTFEELRKVSLEGLVNIGFDGYAVGGLAVGEPKEDMHRILEYICPQIPADKPRYLMGVGKPEDLVEGVRRGIDMFDCVMPTRNARNGHLFVTDGIVKIRNAKYKDDTSPLDPHCDCYTCKHYTKAYLYHLDKCGEILGARLNTIHNLRYYQRLMAEIRQAIEEDRFDDFVVDFYARIGKPVPPLQLAETEK

SEQ ID NO: 51332 - protein, 383 aa, Aggregatibacter segnis
  REGION 1..383: note = tr|A0A369YC23|A0A369YC23_9PAST Queuine tRNA-ribosyltransferase OS=Aggregatibacter segnis OX=739; GN = tgt PE=3 SV=1
MKYELDKTSGNARRGRLVFERPQGTFTVETPAFMPVGTYGTVKGMTPEEVRATGAEILLGNTFHLWLRPGQEVMRKHGDLHDFMQWHRPILTDSGGFQVFSLGKLRKITEEGVKFQNPINGERIFLSPEKSMEIQYDLGSDIVMIFDECTPYPATFDYAKKSMEMSLRWAQRSRNRFDELGNKNALFGIIQGGTFEELRKVSLEGLVNIGFDGYAVGGLAVGEPKEDMHRILEYICPQIPADKPRYLMGVGKPEDLVEGVRRGIDMFDCVMPTRNARNGHLFVTDGIVKIRNAKYKDDTSPLDPHCDCYTCKHYTKAYLYHLDKCGEILGARLNTIHNLRYYQRLMAEIRQAIEDDRFDDFVVEFYARIGKPVPPLQLAETEK

SEQ ID NO: 51333 - protein, 383 aa, Aggregatibacter sp.
  REGION 1..383: note = tr|U1S7Y4|U1S7Y4_9PAST Queuine tRNA-ribosyltransferase OS=Aggregatibacter sp. oral taxon 458 str. W10330 OX=1321772 GN=tgt PE=3 SV=1
MKYELDKTSGNARRGRLVFERPQGTFTVETPAFMPVGTYGTVKGMTPEEVRATGAEILLGNTFHLWLRPGQEVMRKHGDLHDFMQWHRPILTDSGGFQVFSLGKLRKITEEGVKFQNPINGERIFLSPEKSMEIQYDLGSDIVMIFDECTPYPATFDYAKKSMEMSLRWAQRSRNRFDELGNKNALFGIIQGSTFEELRKVSLEGLVNIGFDGYAVGGLAVGEPKEDMHRILEYICPQIPADKPRYLMGVGKPEDLVEGVRRGIDMFDCVMPTRNARNGHLFVTDGIVKIRNAKYKDDTSPLDPHCDCYTCKHYTKAYLYHLDKCGEILGARLNTIHNLSYYQRLMAEIRQAIEDDRFDDFVVEFYARIGKPVPPLQLAETEK

SEQ ID NO: 51334 - protein, 370 aa, Agitococcus lubricus
  REGION 1..370: note = tr|A0A2T5J1A1|A0A2T5J1A1_9LACT Queuine tRNA-ribosyltransferase OS=Agitococcus lubricus OX=1077255; GN = tgt PE=3 SV=1
MQFKLLATDGIARRGELTLQHGKVQTPAFMPVGTYGTVKGMFPSDIENIGADIILGNTFHLWLRPTTEVVKQFGGLHKFINWDKPILTDSGGFQVFSLGALRKISEEGVKFQSPIDGAKVFLTPEVSMQIQRELNSDIVMIFDECTPYPATEKEARDSMELSLRWAARCKTAHEGNPNALFGIVQGGMYEHLRDVSLAGLLDIGFDGYAIGGLSVGEPKDDMLKILNHVPTKLPDDKPRYLMGVGKPEDIVEAVRRGVDMFDCVMPTRNARNGHYFVTDGVVRIRNSQYKTDQSPIDEHCDCYACKNFSRAYLHHLDKCGEMLGAMLGTLHNLRYYQRLMAGLRTAIENGTLSAFVADFYARRGLPVPVL

SEQ ID NO: 51335 - protein, 376 aa, unidentified
  source 1..376: note = Agrobacterium albertimagni
  REGION 1..376: note = tr|K2QA89|K2QA89_9RHIZ Queuine tRNA-ribosyltransferase OS=Agrobacterium albertimagni AOL15 OX=1156935 GN=tgt PE=3 SV=1
MSENFTFNLKATSGKARLGEITMPRGTIRTPAFMPVGTVGTVKAMYLDQVKEGGADIILGNTYHLMLRPGPERVARLGGLHELIRWPGPILTDSGGFQVMSLSGLRKLDEQGVTFKSHVDGSLHHMSPERSIEIQGLLDSDIQMQLDECVALPNEPREIERAMELSLRWAERCRVAFGNQPGKAMFGIVQGGDQPALRIRSAEGLKQLDLKGYSIGGLAVGEPQAVMLDMLRITLPVLPTEKPRYLMGVGTPDDMLKSVAEGIDMFDCVMPTRSGRHGLAFTRRGKVNIRNARHAEDMRPLDEQSSCPATRDYSRAYLHHLVRSNEALGGMLLSWNNLSYYQELMQGIRQAIAEDRFEDFKAETIEMWARGDIDPV

SEQ ID NO: 51336 - protein, 376 aa, unidentified
  source 1..376: note = Agrobacterium arsenijevicii
  REGION 1..376: note = tr|A0A0D8KKI4|A0A0D8KKI4_9RHIZ Queuine tRNA-ribosyltransferase OS=Agrobacterium arsenijevicii; OX = 1585697 GN=tgt PE=3 SV=1
MHDKFTFTLKATSGGARLGEVAMPRGVIRTPAFMPVGTVGTVKAMYLDQVRELGADIILGNTYHLMLRPGPERVARLGGLHELIRWPHPILTDSGGFQVMSLSGLRKLDEKGVTFKSHVDGSLHHMSPERSIEIQGMLDSDIQMQLDECIALPAERKEIERAMEMSLRWAERCRVAFGEQPGKAMFGIVQGGDQPDLRIRSAEGLKQLDLKGYAVGGLAVGEPQDVMLGMLDITLPVLPTEKPRYLMGVGTPDDILKSVARGIDMFDCVMPTRSGRHGLAFTRRGRVNIRNARHAEDMRPLDEQSNCPASRDYSRAYLHHLTRSNEALGGMLLSWHNLAYYQELMQGIRKSIEEGRFADFYAETIEMWARGDIDPV

SEQ ID NO: 51337 - protein, 376 aa, unidentified
  source 1..376: note = Agrobacterium bohemicum
  REGION 1..376: note = tr|A0A135P5I4|A0A135P5I4_9RHIZ Queuine tRNA-ribosyltransferase OS=Agrobacterium bohemicum; OX = 2052828 GN=tgt PE=3 SV=1
MQENFTFTLKTTSGGARLGEVAMPRGVIRTPAFMPVGTVGTVKAMYLDQVRELGADVILGNTYHLMLRPGPERVQRLGGLHELIRWPHPILTDSGGFQVMSLSGLRKLDEKGVTFKSHIDGSLHYMSPERSIEIQGMLDSDIQMQLDECIALPAERKEIERAMEMSLRWAERCRVAFGEQTGKAMFGIVQGGDQPDLRIRSAEGLKQLDLKGYAVGGLAVGEPQDVMLGMLDITLPVLPTEKPRYLMGVGTPDDILKSVARGIDMFDCVMPTRSGRHGLAFTRRGRVNLRNARHAEDMRPLDEQSNCPASRDYSRAYLHHLARSNEALGGMLLSWHNLAYYQELMQGIRKSIEEDRFADFYAETIEMWAKGDIDRI

SEQ ID NO: 51338 - protein, 376 aa, unidentified
  source 1..376: note = Agrobacterium deltaense
  REGION 1..376: note = tr|A0A1S7NWN8|A0A1S7NWN8_9RHIZ Queuine tRNA-ribosyltransferase OS=Agrobacterium deltaense RV3; OX = 1183426 GN=tgt PE=3 SV=1
MHDKFTFTLKATSGGARLGEVAMPRGVIRTPAFMPVGTVGTVKAMYLDQVRELGADIILGNTYHLMLRPGPERVARLGGLHELIRWPHPILTDSGGFQVMSLSGLRKLDEKGVTFKSHVDGSLHHMSPERSIEIQGMLDSDIQMQLDECIALPAERKEIERAMEMSLRWAERCRVAFGEQPGKAMFGIVQGGDQPDLRIRSAEGLKQLDLKGYAVGGLAVGEPQDVMLGMLDITLPVLPTEKPRYLMGVGTPDDILKSVARGIDMFDCVMPTRSGRHGLAFTRRGKVNIRNARHAEDMRPLDEQSNCPASRDYSRAYLHHLTRANEALGGMLLSWHNLAYYQELMQGIRKSIEEGRFADFYAETIEMWARGDIDPI

SEQ ID NO: 51339 - protein, 376 aa, unidentified
  source 1..376: note = Agrobacterium deltaense
  REGION 1..376: note = tr|A0A1S7TKE0|A0A1S7TKE0_9RHIZ Queuine tRNA-ribosyltransferase OS=Agrobacterium deltaense NCPPB 1641 OX=1183425 GN=tgt PE=3 SV=1
MHDKFTFTLKATSGGARLGEVAMPRGVIRTPAFMPVGTVGTVKAMYLDQVRELGADIILGNTYHLMLRPGPERVARLGGLHELIRWPHPILTDSGGFQVMSLSGLRKLDEQGVTFKSHVDGSLHHMSPERSIEIQGMLDSDIQMQLDECIALPAERKEIERAMEMSLRWAERCRVAFGDQPGKAMFGIVQGGDQPDLRVRSAEGLKQLDLKGYAVGGLAVGEPQDVMLGMLDITLPVLPTEKPRYLMGVGTPDDILKSVARGIDMFDCVMPTRSGRHGLAFTRRGKVNIRNARHAEDMRPLDEQSNCPASRDYSRAYLHHLTRANEALGGMLLSWHNLAYYQELMQGIRKSIEEGRFADFYAETIEMWARGDIDPI

SEQ ID NO: 51340 - protein, 376 aa, unidentified
  source 1..376: note = Agrobacterium fabrum
  REGION 1..376: note = tr|A0A2W5F0W8|A0A2W5F0W8_9RHIZ Queuine tRNA-ribosyltransferase OS=Agrobacterium fabrum OX=1176649; GN = tgt PE=3 SV=1
MHDKFTFTLKATSGGARLGEVAMPRGVIRTPAFMPVGTVGTVKAMYLDQVRELGADIILGNTYHLMLRPGPERVARLGGLHELIRWPHPILTDSGGFQVMSLSGLRKLDEKGVTFKSHVDGSLHHMSPERSIEIQGMLDSDIQMQLDECIALPAERKEIERAMEMSLRWAERCRVAFGEQPGKAMFGIVQGGDQPDLRIRSAEGLKQLDLKGYAVGGLAVGEPQDVMLGMLDITLPVLPTEKPRYLMGVGTPDDILKSVARGIDMFDCVMPTRSGRHGLAFTRRGKVNIRNARHAEDMRPLDEQSNCPASRDYSRAYLHHLTRANEALGGMLLSWHNLAYYQELMQGIRKSIEEGRFADFYAETIEMWARGDIDPV

SEQ ID NO: 51341 - protein, 376 aa, unidentified
  source 1..376: note = Agrobacterium fabrum
  REGION 1..376: note = sp|Q8UES8|TGT_AGRFC Queuine tRNA-ribosyltransferase; OS = Agrobacterium fabrum (strain C58 / ATCC 33970); OX = 176299 GN=tgt PE=3 SV=1
MHEKFTFTLKSTSGGARLGEVAMPRGVIRTPAFMPVGTVGTVKAMYLDQVRELGADIILGNTYHLMLRPGPERVARLGGLHELIRWPHPILTDSGGFQVMSLSGLRKLDEKGVTFKSHVDGSLHHMSPERSIEIQGMLDSDIQMQLDECIALPAERKEIERAMEMSLRWAERCRVAFGEQPGKAMFGIVQGGDQPDLRIRSAEGLKELDLKGYAVGGLAVGEPQDVMLGMLDITLPVLPTEKPRYLMGVGTPDDILKSVARGIDMFDCVMPTRSGRHGLAFTRRGRVNIRNARHAEDMRPLDEQSNCPASRDYSRAYLHHLTRSNEALGGMLLSWHNLAYYQELMQGIRTSIEEGRFADFYAETIEMWARGDIDPV

SEQ ID NO: 51342 - protein, 376 aa, unidentified
  source 1..376: note = Agrobacterium genomosp.
  REGION 1..376: note = tr|A0A1S7P9S3|A0A1S7P9S3_9RHIZ Queuine tRNA-ribosyltransferase OS=Agrobacterium genomosp. 3 str. CFBP 6623 OX=1183432 GN=tgt PE=3 SV=1
MHDKFTFTLKATSGGARLGEVAMPRGIIRTPAFMPVGTVGTVKAMYLDQVRELGADIILGNTYHLMLRPGPERVARLGGLHELIRWPHPILTDSGGFQVMSLSGLRKLDEKGVTFKSHVDGSLHHMSPERSIEIQGMLDSDIQMQLDECIALPAERKEIERAMEMSLRWAERCRVAFGEQPGKAMFGIVQGGDQPDLRIRSAEGLKQLDLKGYAVGGLAVGEPQDVMLGMLDITLPVLPTEKPRYLMGVGTPDDILKSVARGIDMFDCVMPTRSGRHGLAFTRRGRVNIRNARHAEDMRPLDEQSNCPASRDYSRAYLHHLTRSNEALGGMLLSWHNLAYYQELMQGIRKSIEEGRFADFYAETIEMWARGDIDPI

SEQ ID NO: 51343 - protein, 376 aa, unidentified
  source 1..376: note = Agrobacterium genomosp.
  REGION 1..376: note = tr|A0A1S7MAI3|A0A1S7MAI3_9RHIZ Queuine tRNA-ribosyltransferase OS=Agrobacterium genomosp. 2 str. CFBP 5494 OX=1183436 GN=tgt PE=3 SV=1
MHDKFTFTLKATSGGARLGEVAMPRGVIRTPAFMPVGTVGTVKAMYLDQVRELGADIILGNTYHLMLRPGPERVARLGGLHELIRWPHPILTDSGGFQVMSLSGLRKLDEKGVTFKSHVDGSLHHMSPERSIEIQGLLDSDIQMQLDECIALPAERKEIERAMEMSLRWAERCRVAFGDQPGKAMFGIVQGGDQPDLRIRSAEGLKQLDLKGYAVGGLAVGEPQDVMLGMLDITLPVLPTEKPRYLMGVGTPDDILKSVARGIDMFDCVMPTRSGRHGLAFTRRGKVNIRNARHAEDMRPLDEQSNCPASRDYSRAYLHHLVRANEALGGMLLSWHNLAYYQELMQGIRKSIEEGRFADFYMETIEMWARGDIDAV

SEQ ID NO: 51344 - protein, 376 aa, unidentified
  source 1..376: note = Agrobacterium larrymoorei
  REGION 1..376: note = tr|A0A4D7DTV2|A0A4D7DTV2_9RHIZ Queuine tRNA-ribosyltransferase OS=Agrobacterium larrymoorei; OX = 160699 GN=tgt PE=3 SV=1
MQENFTFTLKATSGGARLGEVAMPRGVIRTPAFMPVGTVGTVKAMYLDQVRELGADVILGNTYHLMLRPGPERVARLGGLHELIRWPHPILTDSGGFQVMSLSGLRKLDEKGVTFKSHVDGSLHHMSPERSIEIQGMLDSDIQMQLDECVALPAERKEIERAMEMSLRWAERCRVAFGEQPGKAMFGIVQGGDQPDLRIRSAEGLKQLDLKGYAVGGLAVGEPQDVMLSMLDTTLPVLPTEKPRYLMGVGTPDDILKSVARGIDMFDCVMPTRSGRHGLAFTRRGRVNIRNARHAEDMRPLDEQSNCPASRDYSRAYLHHLARSNEALGGMLLSWHNLAYYQELMQGIRKSIEEGRFPDFYAETIEMWAKGDIDPV

SEQ ID NO: 51345 - protein, 376 aa, unidentified
  source 1..376: note = Agrobacterium larrymoorei
  REGION 1..376: note = tr|A0A4Z1PXG1|A0A4Z1PXG1_9RHIZ Queuine tRNA-ribosyltransferase OS=Agrobacterium larrymoorei; OX = 160699 GN=tgt PE=3 SV=1
MQENFTFTLKATSGGARLGEVAMPRGVIRTPAFMPVGTVGTVKAMYLDQVRELGADVILGNTYHLMLRPGPERVARLGGLHELIRWPHPILTDSGGFQVMSLSGLRKLDEKGVTFKSHVDGSLHHMSPERSIEIQGMLDSDIQMQLDECVALPAERKEIERAMEMSLRWAERCRVAFGEQPGKAMFGIVQGGDQPDLRIRSAEGLKQLDLKGYAVGGLAVGEPQAVMLSMLDTTLPVLPTEKPRYLMGVGTPDDILKSVARGIDMFDCVMPTRSGRHGLAFTRRGRVNIRNARHAEDMRPLDEQSNCPASRDYSRAYLHHLARSNEALGGMLLSWHNLAYYQELMQGIRKSIEEGRFPDFYAETIEMWAKGDIDPV

SEQ ID NO: 51346 - protein, 376 aa, unidentified
  source 1..376: note = Agrobacterium radiobacter
  REGION 1..376: note = tr|B9JFA9|B9JFA9_AGRRK Queuine tRNA-ribosyltransferase OS=Agrobacterium radiobacter (strain K84 / ATCC BAA-868) OX=311403 GN=tgt PE=3 SV=1
MSESFQFQLKKTDGGARLGEVSMPRGTIRTPAFMPVGTVGTVKAMYLDQVRESGADIILGNTYHLMLRPTAERVARLGGLHELIRWPHPILTDSGGFQVMSLSGLRKLDEKGVTFKSHVDGSLHHMSPERSIEIQGLLGSDIQMQLDECVALPSTPKEIERAMEMSLRWAERCKVAFGDQPGKAMFGIVQGGDVPDLRVRSAQALSQMDLKGYAVGGLAVGEPQDVMLRMLETTLPELPTEKPRYLMGVGTPDDILKSVARGIDMFDCVMPTRSGRHGLAFTRRGKVNIRNARHAEDMRPLDDQSNCPASRDYSRAYLHHLVRANEALGGMLLSWNNLAYYQELMQGIRQAIAEGRFADFMAETQENWARGDLEPV

SEQ ID NO: 51347 - protein, 376 aa, unidentified
  source 1..376: note = Agrobacterium rhizogenes
  REGION 1..376: note = tr|A0A2T7VGL7|A0A2T7VGL7_AGRRH Queuine tRNA-ribosyltransferase OS=Agrobacterium rhizogenes OX=359; GN = tgt PE=3 SV=1
MHENFTFTLKATSGGARLGEVAMPRGVIRTPAFMPVGTVGTVKAMYLDQVREAGADIILGNTYHLMLRPGPERVARLGGLHELIRWPHPILTDSGGFQVMSLSGLRKLDEKGVTFKSHVDGSLHHMSPERSIEIQGLLDSDIQMQLDECVALPAERKEIERAMEMSLRWAERCRVAFGEQPGKAMFGIVQGGDQPDLRIRSAEGLKELDLKGYAVGGLAVGEPQDVMLAMLDTTLPVLPTEKPRYLMGVGTPDDILKSVARGIDMFDCVMPTRSGRHGLAFTRRGRVNIRNARHAEDMRPLDEQSNCPASRDYSRAYLHHLVRSNEALGGMLLSWHNLAYYQELMQGIRKSIEEGRFPDFHAETIEMWAKGDIDPV

SEQ ID NO: 51348 - protein, 376 aa, unidentified
  source 1..376: note = Agrobacterium rhizogenes
  REGION 1..376: note = tr|A0A546XJR7|A0A546XJR7_AGRRH Queuine tRNA-ribosyltransferase OS=Agrobacterium rhizogenes OX=359; GN = tgt PE=3 SV=1
MHDKFTFTLKATSGGARLGEVAMPRGVIRTPAFMPVGTVGTVKAMYLDQVRELGADIILGNTYHLMLRPGPERVARLGGLHELIRWPHPILTDSGGFQVMSLSGLRKLDEKGVTFKSHVDGSLHHMSPERSIEIQGMLDSDIQMQLDECIALPAERKEIERAMEMSLRWAERCRVAFGEQPGKAMFGIVQGGDQPDLRIRSAEGLKQLDLKGYAVGGLAVGEPQDVMLGMLDITLPVLPTEKPRYLMGVGTPDDILKSVARGIDMFDCVMPTRSGRHGLAFTRRGRVNIRNARHAEDMRPLDEQSNCPASRDYSRAYLHHLTRSNEALGGMLLSWHNLAYYQELMQGIRKSIEEGRFADFYAETIEMWARGDIDPI

SEQ ID NO: 51349 - protein, 376 aa, unidentified
  source 1..376: note = Agrobacterium rosae
  REGION 1..376: note = tr|A0A2S4EF94|A0A2S4EF94_9RHIZ Queuine tRNA-ribosyltransferase OS=Agrobacterium rosae OX=1972867; GN = tgt PE=3 SV=1
MQENFTFTLKATSGGARLGEVAMPRGTIRTPAFMPVGTVGTVKAMYLEQVRELGADVILGNTYHLMLRPGPERVQRLGGLHELIRWPHPILTDSGGFQVMSLSGLRKLDEKGVTFKSHLDGSLHHMSPERSIEIQGMLDSDIQMQLDECIALPAERKEIERAMEMSLRWAERCRVQFGEQPGKAMFGIVQGGDQPDLRIRSAEGLKQLDLKGYAVGGLAVGEPQEVMLGMLDITLPVLPTEKPRYLMGVGTPDDILKSVARGIDMFDCVMPTRSGRHGLAFTRRGRVNIRNARHAEDMRPLDEQSNCPASRDYSRAYLHHLARSNEALGGMLLSWHNLAYYQELMQGIRKSIEEGRFADFYAETIEMWAKGDIDPI

SEQ ID NO: 51350 - protein, 376 aa, unidentified
  source 1..376: note = Agrobacterium rubi
  REGION 1..376: note = tr|A0A081CWF4|A0A081CWF4_9RHIZ Queuine tRNA-ribosyltransferase OS=Agrobacterium rubi TR3 = NBRC 13261 OX=1368415 GN=tgt PE=3 SV=1
MQENFTFTLKATSGGARLGEVAMPRGTIRTPAFMPVGTVGTVKAMYLDQVRDLGADVILGNTYHLMLRPGPERVQRLGGLHELIRWPHPILTDSGGFQVMSLSGLRKLDEKGVTFKSHVDGSLHHMSPERSIEIQGMLDSDIQMQLDECIALPAERKEIERAMEMSLRWAERCRVAFGEQPGKAMFGIVQGGDQPDLRIRSAEGLKQLDLKGYAVGGLAVGEPQEVMLSMLDITLPALPTEKPRYLMGVGTPDDILKSVARGIDMFDCVMPTRSGRHGLAFTRRGRVNIRNARHAEDMRPLDEQSNCPASRDYSRAYLHHLARSNEALGGMLLSWHNLAYYQELMQGIRKSIEEGRFADFYAETIEMWAKGDIDPI

SEQ ID NO: 51351 - protein, 376 aa, unidentified
  source 1..376: note = Agrobacterium rubi
  REGION 1..376: note = tr|A0A1B9T803|A0A1B9T803_9RHIZ Queuine tRNA-ribosyltransferase OS=Agrobacterium rubi OX=28099; GN = tgt PE=3 SV=1
MQENFTFTLKATSGGARLGEVAMPRGTIRTPAFMPVGTVGTVKAMYLDQVRDLGADVILGNTYHLMLRPGPERVQRLGGLHELIRWPHPILTDSGGFQVMSLSGLRKLDEKGVTFKSHVDGSLHHMSPERSIEIQGMLDSDIQMQLDECIALPAERKEIERAMEMSLRWAERCRVAFGEQPGKAMFGIVQGGDQPDLRIRSAEGLKQLDLKGYAVGGLAVGEPQEVMLSMLDITLPALPTEKPRYLMGVGTPDDILKSVARGIDMFDCVMPTRSGRHGLAFTRRGRVNIRNARHAEDMRPLDEQSNCPASRDYSRAYLHHLARSNEALGGMLLSWHNLAYYQELMQGIRKSIEEGRFADFYAETIEMWAKGDIDRI

SEQ ID NO: 51352 - protein, 376 aa, unidentified
  source 1..376: note = Agrobacterium salinitolerans
  REGION 1..376: note = tr|A0A4Z1QWV0|A0A4Z1QWV0_9RHIZ Queuine tRNA-ribosyltransferase OS=Agrobacterium salinitolerans; OX = 1183413 GN=tgt PE=3 SV=1
MHDKFTFTLKATSGGARLGEVAMPRGVIRTPAFMPVGTVGTVKAMYLDQVRELGADIILGNTYHLMLRPGPERVARLGGLHELIRWPHPILTDSGGFQVMSLSGLRKLDEQGVTFKSHVDGSLHHMSPERSIEIQGMLDSDIQMQLDECIALPAERKEIERAMEMSLRWAERCRVAFGEQPGKAMFGIVQGGDQPDLRIRSAEGLKQLDLKGYAVGGLAVGEPQDVMLGMLDITLPVLPTEKPRYLMGVGTPDDILKSVARGIDMFDCVMPTRSGRHGLAFTRRGKVNIRNARHAEDMRPLDEQSNCPASRDYSRAYLHHLTRSNEALGGMLLSWHNLAYYQELMQGIRKSIEEGRFADFYAETIEMWARGDIDPV

SEQ ID NO: 51353 - protein, 376 aa, unidentified
  source 1..376: note = Agrobacterium salinitolerans
  REGION 1..376: note = tr|A0A1S7U5Y6|A0A1S7U5Y6_9RHIZ Queuine tRNA-ribosyltransferase OS=Agrobacterium salinitolerans str. Hayward 0363 OX=1183434 GN=tgt PE=3 SV=1
MHDKFTFTLKATSGGARLGEVAMPRGVIRTPAFMPVGTVGTVKAMYLDQVRELGADIILGNTYHLMLRPGPERVARLGGLHELIRWPHPILTDSGGFQVMSLSGLRKLDEQGVTFKSHVDGSLHHMSPERSIEIQGMLDSDIQMQLDECIALPAERKEIERAMEMSLRWAERCRVAFGEQPGKAMFGIVQGGDQPDLRIRSAEGLKQLDLKGYAVGGLAVGEPQDVMLGMLDITLPVLPTEKPRYLMGVGTPDDILKSVARGIDMFDCVMPTRSGRHGLAFTRRGKVNIRNARHAEDMRPLDEQSNCPASRDYSRAYLHHLTRANEALGGMLLSWHNLAYYQELMQGIRKSIEEGRFADFYAETIEMWARGDIDPI

SEQ ID NO: 51354 - protein, 376 aa, unidentified; identical to SEQ ID NO: 51342
  source 1..376: note = Agrobacterium sp.
  REGION 1..376: note = tr|A0A4U6AQ09|A0A4U6AQ09_9RHIZ Queuine tRNA-ribosyltransferase OS=Agrobacterium sp. LC34; OX = 1643810 GN=tgt PE=3 SV=1

SEQ ID NO: 51355 - protein, 376 aa, unidentified; identical to SEQ ID NO: 51353
  source 1..376: note = Agrobacterium sp.
  REGION 1..376: note = tr|A0A3S2UND0|A0A3S2UND0_9RHIZ Queuine tRNA-ribosyltransferase OS=Agrobacterium sp. CNPSo 2736; OX = 2499627 GN=tgt PE=3 SV=1

SEQ ID NO: 51356 - protein, 376 aa, unidentified
  source 1..376: note = Agrobacterium tumefaciens
  REGION 1..376: note = tr|A0A1S7QSI6|A0A1S7QSI6_RHIRD Queuine tRNA-ribosyltransferase OS=Agrobacterium tumefaciens str. Kerr 14 OX=1183424 GN=tgt PE=3 SV=1
MHEKFTFTLKATSGGARLGEVAMPRGVIRTPAFMPVGTVGTVKAMYLDQVRELGADIILGNTYHLMLRPGPERVARLGGLHELIRWPHPILTDSGGFQVMSLSGLRKLDEKGVTFKSHVDGSLHHMSPERSIEIQGMLDSDIQMQLDECIALPAERKEIERAMEMSLRWAERCRVAFGEQPGKAMFGIVQGGDQPDLRIRSAEGLKELDLKGYAVGGLAVGEPQDVMLGMLDITLPVLPTEKPRYLMGVGTPDDILKSVARGIDMFDCVMPTRSGRHGLAFTRRGRVNIRNARHAEDMRPLDEQSNCPASRDYSRAYLHHLTRSNEALGGMLLSWHNLAYYQELMQGIRKSIEEGRFADFYAETIEMWARGDIDPV

SEQ ID NO: 51357 - protein, 376 aa, unidentified; identical to SEQ ID NO: 51348
  source 1..376: note = Agrobacterium tumefaciens
  REGION 1..376: note = tr|H0HAU7|H0HAU7_RHIRD Queuine tRNA-ribosyltransferase OS=Agrobacterium tumefaciens 5A; OX = 1107544 GN=tgt PE=3 SV=1

SEQ ID NO: 51358 - protein, 376 aa, unidentified
  source 1..376: note = Agrobacterium vitis
  REGION 1..376: note = tr|A0A560ZU53|A0A560ZU53_AGRVI Queuine tRNA-ribosyltransferase OS=Agrobacterium vitis OX=373; GN = tgt PE=3 SV=1
MSEKFTFTLKATSGKARLGEISMPRGTIRTPAFMPVGTVGTVKAMYLDQVREGGADIILGNTYHLMLRPGPERVARLGGLHELIRWPQPILTDSGGFQVMSLSGLRKLDEQGVTFKSHIDGSYHHMSPERSIEIQGLLDSDIQMQLDECVALPAEPREIERAMEMSLRWAERCRVAFGEQPGKAMFGIVQGGDQPALRIRSAEGLKQLDLKGYAVGGLAVGEPQDVMLSMLDITLPALPSEKPRYLMGVGTPDDMLKSVALGVDMFDCVMPTRSGRHGLAFTRRGKVNIRNARHAEDMRPLDEQSSCPAARDYSRAYLHHLVRSNEALGGMLLSWNNLSYYQELMQGIRKSIAEGRFEDFKAETMEMWARGDIDPR

SEQ ID NO: 51359 - protein, 376 aa, unidentified
  source 1..376: note = Agrobacterium vitis
  REGION 1..376: note = tr|A0A368NXX1|A0A368NXX1_AGRVI Queuine tRNA-ribosyltransferase OS=Agrobacterium vitis OX=373; GN = tgt PE=3 SV=1
MSEQFTFTLKATSGKARLGEITMPRGTIRTPAFMPVGTVGTVKAMYLDQVREGGADIILGNTYHLMLRPGAERVARLGGLHELIRWPQPILTDSGGFQVMSLSGLRKLDEQGVTFKSHIDGSLHHMSPERSIEIQGLLDSDIQMQLDECVALPAEPREIERAMEMSLRWAERCRVAFGEQPGKAMFGIVQGGDQPGLRIRSAQGLKQLDLKGYAVGGLAVGEPQEVMLSMLDITLPVLPTEKPRYLMGVGTPDDMLKSVARGIDMFDCVMPTRSGRHGLAFTRRGKVNIRNARHAEDKRPLDEQSSCPAARDYSRAYLHHLVRSNEALGGMLLSWNNLSYYQELMQGIRQSIAEGRFEDFMAETMECWARGDIDAV

SEQ ID NO: 51360 - protein, 375 aa, Agromyces sp.
  REGION 1..375: note = tr|A0A542JQ76|A0A542JQ76_9PSED Queuine tRNA-ribosyltransferase OS=Agromyces sp. SLBN-50 OX=744977; GN = tgt PE=3 SV=1
MSHMSFELLATDGRARRGRLTFPRGVVETPAFMPVGTYGTVKGMLPRDIEGIGAQIILGNTFHLWLRPGTEVIKRHGDLHDFMQWQGPILTDSGGFQVFSLGAMRKIKEEGVYFSSPVDGAKVFMGPEESMQVQRDLGSDIVMIFDECTPYPADFDTAKRSMELSLRWAKRSKNAHEGNPSALFGIVQGGMHEELRLRSLEGLMEIGFDGLAIGGLSVGEPKEEMIRVLDFLPPHLPTDKPRYLMGVGKPEDLVEGVRRGVDMFDCVMPTRNARNGHLFVDTGVIKIRNAVHKHDDAPLDPACDCYTCQHFSRAYLHHLDKCGEMLGSMLNTIHNLRHYQRLMAGLREAIQQGTLAAFVDAFYARRGLPTPPLEP

SEQ ID NO: 51361 - protein, 366 aa, unidentified
  source 1..366: note = Ahniella affigens
  REGION 1..366: note = tr|A0A2P1PZA4|A0A2P1PZA4_9GAMM Queuine tRNA-ribosyltransferase OS=Ahniella affigens OX=2021234; GN = tgt PE=3 SV=1
MQFEILGREGVSRRGRLTFARGTVETPAFMPVGTYGSVKAVTPHQVEAVGAEIILGNTFHLWLRPGTEVIEAHGGLHEFIGWSKPILTDSGGFQVWSLAERRKITPEGVHFASPVDGRKVFLSPEESMRIQRALNSDIVMIFDECTPYPATEPEARKSMELSLAWAERSKRAFEGNPNALFGIVQGGMHSALRARSAKVLTDIGFHGYAIGGLSVGEPAAEREHILDETVPHLVDDAPRYLMGVGRPEDIVEAVRRGVDMFDCVMPTRNARNGHLFTRFGQVRIRNAKYEKDLAPIDKDCTCYTCQHYSRAYLKHLDRCKEMLYSTLATIHNLHYYQELMAGIRLALEQGRFADFVAEFYAARAEP

SEQ ID NO: 51362 - protein, 376 aa, unidentified
  source 1..376: note = Ahrensia marina
  REGION 1..376: note = tr|A0A0N0E7K9|A0A0N0E7K9_9RHOB Queuine tRNA-ribosyltransferase OS=Ahrensia marina OX=1514904; GN = tgt PE=3 SV=1
MTQDFGFTLHNSDGMARRGTVHTGRGDIQTPAFMPVGTVGTVKGLYLDQVKDAGADIILGNTYHLMLRPGAERMDRLGGLHKFIGWDGPILTDSGGFQVMSLSALRKISEEGVTFKSHVDGKLFEMSPERSIEIQGLLGSDIQMQLDECVALPADHDTMKSAMELSLRWAERCKTAFGNQPGKAMFGIVQGGDNVGLREQSAQALVDMDLKGYSIGGLAVGEPQEVMLAMLDVVCPILPTTKPRYLMGVGTPQDLLRSVAHGVDMFDCVMPTRSGRHGLAFTTRGRVNLKNARHAEDTRPLDEGVNCTASNSYSRAYLHHLIRSNEMLGMMLLSWHNIAYYQHLMAGIRDAISNNNFAQFAEETEARWAAGDIDAL

SEQ ID NO: 51363 - protein, 376 aa, Ahrensia sp.
  REGION 1..376: note = tr|A0A2E2RJY0|A0A2E2RJY0_9RHOB Queuine tRNA-ribosyltransferase OS=Ahrensia sp. OX=1872419 GN=tgt; PE = 3 SV=1
MTTPFSFELLATDGAARRGVVHTARGDIRTPAFMPVGTAGTVKAMYLDQVRDCGADIILGNTYHLMLRPGAERVARLGGLHKMIGWKHPILTDSGGFQVMSLAALRKMTEDGVTFQSHIDGKRYEMSPERSIEIQGLLGSDIQMQLDECTKLPAEPDAIRKAMELSLRWAERCKTAFGDQPERAMFGIVQGGDNEIMRAESAKALAEMDLKGYAVGGLAVGEPQDVMLAMLDVTCPLLPADRPRYLMGVGTPQDILRSVGHGVDMFDCVMPTRAGRHGLAFTRHGKVNLKNARHADDHRPLDEESTCPAARGYSRAYLHHLIRSGEMLGAMLLTWNNIHYYQQLMQGIRDAVEAKRYADFSAETEAAWERGDIPAL

SEQ ID NO: 51364 - protein, 385 aa, Ahrensia sp.
  REGION 1..385: note = tr|E0MKN6|E0MKN6_9RHOB Queuine tRNA-ribosyltransferase OS=Ahrensia sp. R2A130 OX=744979; GN = tgt PE=3 SV=1
MSERDETSATFQFAVHNTDGEARRGTLSMPRGSIRTPAYMPVGTAGTVKAMYMDQVRDLGADVILGNTYHLMLRPGAERVAKLGGLHEFARWPHPILTDSGGFQVMSLANLRKMSEQGVTFKSHIDGAKYELTPERSIEIQALLDSDIQMQLDECIALPASRDEIERAMQLSLRWAERSHTAFKTQSDHSARAMFGIVQGGDDEALRVESARALRAMDMKGYSIGGLAVGEPQETMLRMLETVCPELPSEKPRYLMGVGTPDDLLKSIARGVDMFDCVMPTRAGRHATAYTRFGKLNLRNARHAEDHRPLDEQSDCPAARDYSRAYIHHLMRANEALGGMLLTWSNLAYYQQLMAGARDAIEQGRYADYMAETQDGWAKGDIAAL

SEQ ID NO: 51365 - protein, 379 aa, Aidingimonas halophila
  REGION 1..379: note = tr|A0A1H2ZP64|A0A1H2ZP64_9GAMM Queuine tRNA-ribosyltransferase OS=Aidingimonas halophila; OX = 574349 GN=tgt PE=3 SV=1
MRNDCFMTFDHLASDGRARRGRLTFPRGTVETPAFMPVGTYGTVKGMTPADVEAIGADIILGNTFHLWLRPGVEVVEAHGDLHDFAQWQRPILTDSGGFQVFSLGEMRKITEQGVHFRSPVDGAKIFMGPEESMAVQRSLGSDIVMIFDECTPYPATEAEAEASMELSLRWAKRSREAHDDSPSALFGIIQGGMYPHLRERSLAGLSEIGFDGLAIGGLSVGEPKSDMLAVLDYLPTWMPEDKPRYLMGVGKPEDLVEGVRRGIDMFDCVMPTRNARNGHLFTDEGTVKIRNARHRHDINPLEAGCDCYTCQHFSRSYLHHLDRCGEMLGSMLNTIHNLRHYQRLMAGLRGAIEAGTLANFVNAFYEHRGLPVPTAPAA

SEQ ID NO: 51366 - protein, 376 aa, unidentified
  source 1..376: note = Akkermansia glycaniphila
  REGION 1..376: note = tr|A0A1C7PEJ7|A0A1C7PEJ7_9BACT Queuine tRNA-ribosyltransferase OS=Akkermansia glycaniphila; OX = 1679444 GN=tgt PE=3 SV=1
MSFTLHSVDPSGARLGTLHLPHGDVQTPIFMPVGTQGTVKTLHPDDLHALGAQIILGNTYHLSLRPGAETVRDLGGLHTLSGWDKPILTDSGGFQVWSLAKLRKITEEGVRFQNHIDGATMMLTPERSMEIQAQLGSDIAMLFDECPPYPCDRRYAEKSLGYTLRWARRCKQWVDENNPASGSGRQSHFGIVQGSVYADLRRQCAEELAAMDFDGYAIGGVSVGEPEEEMLKAIEHSAPYLPADKPRYAMGLGTPVQLLEMIERGVDMFDCVMPTRLARHGIAMTPDGPIHIKNKKWEKDMRPLDVEGHPHVNRFSRAAIRHFFRSGEILALRLLSFQNLSFYLRLMAQARSAIAAGQFGSFKRAFISRYQANDIS

SEQ ID NO: 51367 - protein, 377 aa, Akkermansia muciniphila
  REGION 1..377: note = tr|A0A2N8I7P7|A0A2N8I7P7_9BACT Queuine tRNA-ribosyltransferase OS=Akkermansia muciniphila; OX = 239935 GN=tgt PE=3 SV=1
MPFILHQKDSTTAARLGSLELPHGRVPTPIFMPVGTQGSVKTMHPQDLEMLGAEIILGNTYHLSLRPGSALIRQMGGLHKFSSWNRPILTDSGGFQVWSLAKLRKITEEGVRFQNHLDGAYMMLSPERSMEIQADLGSDIAMLFDECPPYPCDRKYAEASLGYTLRWARRCKAWVQEHRPRSGEGRQHHFGIVQGSVYADLRKKCAEELAAMDFDGYAIGGVSVGEPEDEMLRAIDHSAPWLPEEKPRYAMGLGTPPQLLEMIARGVDMFDCVMPTRLARHGVALTPDGPMHIKNQRWATDSRPIDPEGHPHVTQFSRAYVRHLFKAGEILALRLLSFQNLEFYLRLMAQAREAIAAGTFGSFKDSFIARYKANDIL

SEQ ID NO: 51368 - protein, 377 aa, Akkermansia muciniphila
  REGION 1..377: note = tr|A0A2N8HL56|A0A2N8HL56_9BACT Queuine tRNA-ribosyltransferase OS=Akkermansia muciniphila; OX = 239935 GN=tgt PE=3 SV=1
MPFTLHQKDSSTAARLGTLDLPHGRVPTPIFMPVGTQGSVKTMHPQDLETLGARIILGNTYHLSLRPGSALIREMGGLHRFSSWNRPILTDSGGFQVWSLAKLRKITEEGVRFQNHLDGAYMMLSPERSMEIQADLGSDIAMLFDECPPYPCDRKYAEASLGYTLRWARRCKDWVQEHRPRSGEGRQHHFGIVQGSVYADLRKRCAEELAAMEFDGYAIGGVSVGEPEEEMLRAIDHSAPWLPEDKPRYAMGLGTPPQLLEMIARGVDMFDCVMPTRLARHGVALTPDGPMHIKNQRWAADSRPIDPEGHPHVTQFSRAYVRHLFKAGEILALRLLSFQNLEFYLRLMAQAREAIAAGTFGSFKDSFIARYKANDIL

SEQ ID NO: 51369 - protein, 377 aa, Akkermansia sp.; identical to SEQ ID NO: 51368
  REGION 1..377: note = tr|R7DWW0|R7DWW0_9BACT Queuine tRNA-ribosyltransferase OS=Akkermansia sp. CAG:344; OX = 1262691 GN=tgt PE=3 SV=1

SEQ ID NO: 51370 - protein, 377 aa, Akkermansia sp.
  REGION 1..377: note = tr|A0A5B6H741|A0A5B6H741_9BACT Queuine tRNA-ribosyltransferase OS=Akkermansia sp. BIOML-A8; OX = 2584564 GN=tgt PE=3 SV=1
MPFTLHQKDSSTNARLGTLELPHGRVQTPIFMPVGTQGSVKTLHSQDLESLGAQIILGNTYHLSLRPGSGLIREMGGLHRFSSWNRPILTDSGGFQVWSLAKLRKITEEGVRFQNHLDGAYMMLSPERSMEIQADLGSDIAMLFDECPPYPCDRKYAENSLGYTLRWARRCKAWVQEHQPCSGEGRQHHFGIVQGSVYADLRKRCAEELAAMDFDGYAIGGVSVGEPEDEMLRAIDHSAPWLPEDKPRYAMGLGTPPQLLEMIARGVDMFDCVMPTRLARHGVALTPDGPMHIKNQRWAADIRPIDSEGHPHVTQFSRAYVRHLFKAGEILALRLLSFQNLEFYLRLMAQAREAIAAGTFGSFKDSFIARYQANDIL

SEQ ID NO: 51371 - protein, 398 aa, Albidiferax sp.
  REGION 1..398: note = tr|A0A1H0UMR8|A0A1H0UMR8_9BURK Queuine tRNA-ribosyltransferase OS=Albidiferax sp. OV413; OX = 1855285 GN=tgt PE=3 SV=1
MLKFDLLATDAPSADGSYAGSHARRGTLTLNHGVVQTPIFMPVGTYGTVKGVMPRSLEEMGAQIILGNTFHLWMRPGLDVMAQFGGLHQFEKWNKPILTDSGGFQVWSLGEMRKISEEGVKFSSPVNGDKLFLTPEISMQIQTTLNSDIVMQFDECTPYDTKGHITTEREARNSMELSLRWAKRCQAEFAKLQNPNALFGIVQGGMFENLRQESLDQLVEMDFPGYAVGGVSVGEPKDEMLRIMAHTPHKLPAHKPRYLMGVGTPEDLVQGVAEGVDMFDCVMPTRNARNGTLFTRYGDLKIRNARHKTDEQPLDVTCTCHACAGTSGVSYANGGRDGFSRAYLHHLDRCAEMLGPMLASIHNLHYFLNLMSEMRAALDTGTFGAFRAQFKADRARGV

SEQ ID NO: 51372 - protein, 376 aa, Albidovulum inexpectatum
  REGION 1..376: note = tr|A0A2S5JJY2|A0A2S5JJY2_9RHOB Queuine tRNA-ribosyltransferase OS=Albidovulum inexpectatum; OX = 196587 GN=tgt PE=3 SV=1
MTSAFTFELRATDGKARTGVITTPRGKIRTPAFMPVGTAATVKAMLPESVAATGADIILGNTYHLMLRPTAERIARLGGLHKFMNWHGPILTDSGGFQVMSLAALRKLTEEGVTFSSHIDGSKHVLTPERSMEIQRLLGSDIVMCFDECPALPAPDEEVARAMRLSMRWAERSKAAFGDRPGHALFGIQQGGVNRELREESAEALKVIGFDGYAIGGLAVGEGQEAMFGVLDYAPQMLPADKPRYLMGVGKPDDIVGAVQRGVDMMDCVLPTRSGRTGQAWTRRGQVNIKNARHADDPRPLDEDCTCPACRNYSRAYLHHVFRAGEMISGMLLTWHNLHYYQELMQGLRDAIAEGRLDAFVSEFHRLRAEGDIEPI

SEQ ID NO: 51373 - protein, 375 aa, unidentified
  source 1..375: note = Albidovulum xiamenense
  REGION 1..375: note = tr|A0A1G9FED4|A0A1G9FED4_9RHOB Queuine tRNA-ribosyltransferase OS=Albidovulum xiamenense; OX = 990712 GN=tgt PE=3 SV=1
MSGFRFTIHATDGKARTGLIETPRGEIRTPAFMPVGTAGTVKAMLPENVRATGADIILGNTYHLMLRPGAERIARLGGLHRFMNWPRPILTDSGGFQVMSLAELRRIDERGVTFQSHIDGARHELTPERSMEIQRLLGSDIVMAFDECPALPADRARIEESMRLSMRWAARSREAFGERPGHALFGIQQGGLERDLRAESAEALKAIGFDGYAIGGLAVGEGQAAMFEVLDYAPDMLPADRPRYLMGVGKPDDIVGAVVRGVDMMDCVLPTRSGRTGQAFTRRGVVNIRNARHRDDPRPLDEACACPACRSYSRAYLHHVVRAGEIIGAMLMTWHNLQYYQDLMAGLREAIAGGRLDAFVAEFEALRAEGDIEPL

SEQ ID NO: 51374 - protein, 376 aa, Albimonas donghaensis
  REGION 1..376: note = tr|A0A1H3A8I8|A0A1H3A8I8_9RHOB Queuine tRNA-ribosyltransferase OS=Albimonas donghaensis OX=356660; GN = tgt PE=3 SV=1
MAQGIDFQISARDGKARRCALSTPRGEIRTPAFMPVGTAATVKAMLPGSVRETGADILLGNTYHLMLRPGAQRVHDLGGLHRFMNWDRPILTDSGGFQVMSLADLRRLSEDGVKFRSHIDGSEHMLSPETSMEIQKLLGSDIVMCFDECPALPADRERIAESMRLSMRWAQRSRDAFGDRPGHALFGIQQGGLEEDLRGESAEALAAIGFDGYAIGGLAVGEGQEAMFGCLDFAPGQLPDDKPRYLMGVGKPDDIVGAVRRGVDMFDCVLPSRSGRTGQGLTRRGPVNLRNARHKDDPRPLDPECACPCCSGYSRAYLHHVVRSGEIIASMLLTWHNLHYYQELMQGLRDAIEAGRLDAFAADFDAQRAQGDLPPV

SEQ ID NO: 51375 - protein, 375 aa, unidentified
  source 1..375: note = Albimonas pacifica
  REGION 1..375: note = tr|A0A1I3PMH4|A0A1I3PMH4_9RHOB Queuine tRNA-ribosyltransferase OS=Albimonas pacifica OX=1114924; GN = tgt PE=3 SV=1
MTRFSYSILARDGLARRGVISTPRGEIRTPAFMPVGTAATVKAMLPGSVRETGADILLGNTYHLMLRPGAERIARLGGLHRFMDWDRPILTDSGGFQVMSLSELRKLTEEGVRFRSHVDGSEHMLTPERSMEIQRLLGSDIVMCFDECPALPADRERIVESMRLSMRWARRSRDAFGDRPGHALFGIQQGGLEEDMRGESAEALASIGFDGYAIGGLAVGEGQEAMFACLDYAPGQLPDDKPRYLMGVGKPDDIVGAVQRGVDMFDCVLPSRSGRTGQALTRFGAVNLKNARHRDDPRPLDPECTCPCCTRYSRAYLHHVMRSGEIISSMLLTWHNLHYYQELMQGLRDAIEAGTLDAFAEGFHARRAEGDMAPV

SEQ ID NO: 51376 - protein, 377 aa, unidentified
  source 1..377: note = Alcaligenaceae bacterium
  REGION 1..377: note = tr|A0A516W831|A0A516W831_9BURK Queuine tRNA-ribosyltransferase OS=Alcaligenaceae bacterium SJ-26; OX = 2593958 GN=tgt PE=3 SV=1
MTGLNFTLEATDGKARRGRMTLNHGVVETPIFMPVGTYGSVKAMLPHELHEIGAQIVLGNTFHLWLRPGTEVMDKHGGLHGFMQWNKPLLTDSGGFQVFSLQGMRKITEEGVRFASPIDGARLFLTPEESMRIQRSLNSDIAMVFDECTPYKIKDRPATLDEAAQSMRMSLRWARRSRDEFDRLENPNALFGIVQGGMYETLRDESLAGLTDIGFHGYAIGGLSVGEPKEDMLRILAHTTPRLPADRPRYLMGVGTPEDLVDGVASGVDMFDCVMPSRNARNGWLFTRFGDVKIRNARYRDDTQPLDESCSCHTCSHFSRAYLHHLQRANEITGARLNTLHNLHFYLTIMREMREAISAGTFEAWCKQFAADRARGV

SEQ ID NO: 51377 - protein, 378 aa, unidentified
  source 1..378: note = Alcaligenaceae bacterium
  REGION 1..378: note = tr|A0A4S1EKL6|A0A4S1EKL6_9BURK Queuine tRNA-ribosyltransferase OS=Alcaligenaceae bacterium 429; OX = 2562948 GN=tgt PE=3 SV=1
MSGLDFKLLKRDGKARRGQVTLNHGVVQTPIFMPVGTYGSVKGMLPHELTEIKSQIILGNTFHLWLRPGTEVIKQHGGLHGFMQWNGPILTDSGGFQVFSLKGMRKITEEGVKFASPINGDQMFLTPEESMRIQHALNSDIVMVFDECTPYLIDERPATHEEAAKSMRMSLRWAKRSRDEFNALENPNALFGIVQGGMYEDLREESLAGLTDIGFEGYAIGGLSVGEPKEDMFRILQHTTPRLPEHAPRYLMGVGTPEDLVEGVSQGVDMFDCVMPTRNARNGWLFTRFGDVKIRNARYRDDTRPLDPSCHCHTCQNFSRAYLHHLQRSNEIAGARLNTYHNLHFYLQIMQEMRDAIEAERFEEWKAAFARDRSRGIE

SEQ ID NO: 51378 - protein, 378 aa, Alcaligenes aquatilis
  REGION 1..378: note = tr|A0A3G2HS30|A0A3G2HS30_9BURK Queuine tRNA-ribosyltransferase OS=Alcaligenes aquatilis OX=323284; GN = tgt PE=3 SV=1
MSGLKFDLLSTDGAARRGQITLNHGVVQTPIFMPVGTYGSVKAMMPHELNEIGSQIILGNTFHLWLRPGTEVMDKYQGLHNFMQWDKPILTDSGGFQVFSLKGMRKITEEGVKFASPITGERLFLTPEVSMQIQYSLNSDISMVFDECTPYLIDDRPATHDEAAKSMRMSLRWARRSREEFKRLTNPNALFGIVQGGMYEDLRDESLSGLTDIGFEGYAIGGLSVGEPKEDMMRILAHTTPKLPTNAPRYLMGVGTPEDLVEGVSQGVDMFDCVMPTRNARNGWLFTRYGDIKIRNARYRDDTRPLDPNCTCHTCQHFSRGYLHHLQRSNEITGSRLNTLHNLHFYLQIMQEMRDAIEQKRFAAWREQFHQDRARGIE

SEQ ID NO: 51379 - protein, 378 aa, Alcaligenes aquatilis
  REGION 1..378: note = tr|A0A3R9GN52|A0A3R9GN52_9BURK Queuine tRNA-ribosyltransferase OS=Alcaligenes aquatilis OX=323284; GN = tgt PE=3 SV=1
MSGLKFDLLSTDGGARRGQITLNHGVVQTPIFMPVGTYGSVKAMMPHELNEIGSQIILGNTFHLWLRPGTEVMDKYQGLHNFMQWDKPILTDSGGFQVFSLKGMRKITEEGVKFASPITGERLFLTPEVSMQIQYSLNSDISMVFDECTPYLIDDRPATHDEAAKSMRMSLRWARRSREEFKRLTNPNALFGIVQGGMYEDLRDESLAGLTDIGFEGYAIGGLSVGEPKEDMMRILAHTTPKLPTNAPRYLMGVGTPEDLVEGVSQGVDMFDCVMPTRNARNGWLFTRYGDIKIRNARYRDDTRPLDPSCTCHTCQHFSRGYLHHLQRSNEITGSRLNTLHNLHFYLQIMQEMRDAIEQKRFAAWREQFHQDRARGIE

SEQ ID NO: 51380 - protein, 378 aa, Alcaligenes faecalis
  REGION 1..378: note = tr|A0A2U2BKZ7|A0A2U2BKZ7_ALCFA Queuine tRNA-ribosyltransferase OS=Alcaligenes faecalis OX=511; GN = tgt PE=3 SV=1
MSGLKFDLLSTDGAARRGQITLNHGVVQTPIFMPVGTYGSVKAMMPHELNEIGSQIILGNTFHLWLRPGTEVMDKYKGLHSFMQWDKPILTDSGGFQVFSLKGMRKITEEGVRFASPITGERLFLTPEVSMQIQYSLNSDISMVFDECTPYLIDDRPATHDEAARSMRMSLRWARRSREEFKKLANPNALFGIVQGGMYEDLRDESLAGLTEIGFEGYAIGGLSVGEPKEDMMRILAHTTPKLPTHAPRYLMGVGTPEDLVEGVSQGVDMFDCVMPTRNARNGWLFTRYGDIKIRNARYRDDTRPLDPGCTCHTCQHFSRGYLHHLQRSNEITGSRLNTLHNLHFYLQIMQEMRDAIEQKRFAAWREQFHQDRARGIE

SEQ ID NO: 51381 - protein, 378 aa, Alcaligenes faecalis
  REGION 1..378: note = tr|A0A3D0KZK8|A0A3D0KZK8_ALCFA Queuine tRNA-ribosyltransferase OS=Alcaligenes faecalis OX=511; GN = tgt PE=3 SV=1
MSGLKFDLLSTDGAARRGQITLNHGVVQTPIFMPVGTYGSVKAMMPHELKDIGSQIILGNTFHLWLRPGTEVMDKYKGLHNFMQWDKPILTDSGGFQVFSLKGMRKITEEGVKFASPITGERLFLTPEVSMQIQYSLNSDISMVFDECTPYLIDDRPATHIEAAKSMRMSLRWARRSRDEFKKLANPNALFGIVQGGMYEDLRDESLAGLTEIGFEGYAIGGLSVGEPKEDMMRILAHTTPKLPTNAPRYLMGVGTPEDLVEGVSQGVDMFDCVMPTRNARNGWLFTRFGDIKIRNARYRDDTRPLDTGCQCHTCQHFSRGYLHHLQRSNEITGSRLNTLHNLHFYLQIMQEMRDAIEQKRFSAWREQFHQDRARGIE

SEQ ID NO: 51382 - protein, 378 aa, Alcaligenes sp.
  REGION 1..378: note = tr|U7U7H2|U7U7H2_9BURK Queuine tRNA-ribosyltransferase OS=Alcaligenes sp. EGD-AK7; OX = 1386079 GN=tgt PE=3 SV=1
MSGLKFDLLSTDGAARRGQITLNHGVVQTPIFMPVGTYGSVKAMMPHELNEIGSQIILGNTFHLWLRPGTEVMDKYQGLHNFMQWDKPILTDSGGFQVFSLKGMRKITEEGVKFASPITGERLFLTPEVSMQIQYSLNSDISMVFDECTPYLIDDRPATHIEAAKSMRMSLRWARRSREEFKRLNNPNALFGIVQGGMYEDLRDESLAGLTEIGFEGYAIGGLSVGEPKEDMMRILAHTTPKLPTHAPRYLMGVGTPEDLVEGVSQGVDMFDCVMPTRNARNGWLFTRYGDIKIRNARYRDDTRPLDPSCTCHTCKHFSRGYLHHLQRSNEITGSRLNTLHNLHFYLQIMQEMRDAIEQKRFAAWREQFHQDRARGIE

SEQ ID NO: 51383 - protein, 378 aa, unidentified
  source 1..378: note = Alcaligenes xylosoxydans
  REGION 1..378: note = tr|A0A0D6IHR2|A0A0D6IHR2_ALCXX Queuine tRNA-ribosyltransferase OS=Alcaligenes xylosoxydans xylosoxydans OX=85698 GN=tgt PE=3 SV=1
MTGLNFELLATDGGARRGRITLNHGVVETPIFMPVGTYGSVKAMMPHELKDIGAQIVLGNTFHLWLRPGTDIMEKHGGLHGFMQWDKPILTDSGGFQVFSLQGMRKITEEGVKFASPIDGARLFLTPEESMRIQRSLNSDIVMVFDECTPYEIDGRPATIEEAARSMRMSLRWARRSREEFDRLQNPNALFGIVQGGMYESLRDESLAGLQDIGFHGYAIGGLSVGEPKEDMMRILAHVTPKLPAQAPRYLMGVGTPEDLVEGVSRGVDMFDCVMPTRNARNGWLFTRFGDVKIRNAKYRDDTRPLDPSCACHTCANFSRAYLHHLQRANEITGARLNTLHNLHFYLTIMKEMREAIAEGRFDAWRAQFAADRARGVE

SEQ ID NO: 51384 - protein, 378 aa, unidentified
  source 1..378: note = Alcaligenes xylosoxydans
  REGION 1..378: note = tr|A0A5C2NGL8|A0A5C2NGL8_ALCXX Queuine tRNA-ribosyltransferase OS=Alcaligenes xylosoxydans xylosoxydans OX=85698 GN=tgt PE=3 SV=1
MTGLNFELLATDGGARRGRITLNHGVVETPIFMPVGTYGSVKAMMPHELKDIGSQIVLGNTFHLWLRPGTDIMEKHGGLHGFMQWDKPILTDSGGFQVFSLQGMRKITEEGVKFASPIDGARLFLTPEESMRIQRSLNSDIVMVFDECTPYEIDGRPATIEEAARSMRMSLRWARRSREEFDRLQNPNALFGIVQGGMYESLRDESLAGLQDIGFHGYAIGGLSVGEPKEDMMRILAHVTPKLPAQAPRYLMGVGTPEDLVEGVSRGVDMFDCVMPTRNARNGWLFTRFGDVKIRNAKYRDDTRPLDPSCACHTCANFSRAYLHHLQRANEITGARLNTLHNLHFYLTIMKEMREAIAEGRFDAWRAQFAADRARGVE

SEQ ID NO: 51385 - protein, 370 aa, unidentified
  source 1..370: note = Alcanivoracaceae bacterium
  REGION 1..370: note = tr|A0A2E2DDU4|A0A2E2DDU4_9GAMM Queuine tRNA-ribosyltransferase OS=Alcanivoracaceae bacterium; OX = 2024895 GN=tgt PE=3 SV=1
  VARIANT 17: note = Xaa can be any naturally occurring amino acid
  VARIANT 86: note = Xaa can be any naturally occurring amino acid
  VARIANT 106: note = Xaa can be any naturally occurring amino acid
  VARIANT 122: note = Xaa can be any naturally occurring amino acid
  VARIANT 296: note = Xaa can be any naturally occurring amino acid
MQFSLKTTDGDARRGEXTFPRGTIQTPAFMPVGTYGTVKGMLPKDLADTGAEICLGNTFHLMLRPGTEVIEAHGSLHGFMQWDKPXLTDSGGFQVFSLGEMRKISXHGVVFKNPINGDKVEXTPERAMQVQRSLGSDICMIFDECTPFPATEQQARDSMELSLRWAQRSKDAHQGNDAACFGIVQGGMYDNLRRESLAGLVDIGFDGYAVGGLSVGEPQEEMLRTLGNLTPHMPAERPRYLMGVGKPEDIVEAVRRGVDMFDCVMPTRNARNGHLFTSQGVIKIRNAKHRHDLAPXEAECDCYTCQHFSRSYLHHLDRCNEMLGSQLNTIHNLRYYQRLMAGLRGAIEGGTLSAFVDDFYAARGEQTPAL

SEQ ID NO: 51386 - protein, 373 aa, unidentified
  source 1..373: note = Alcanivoracaceae bacterium
  REGION 1..373: note = tr|A0A3L8AVV9|A0A3L8AVV9_9GAMM Queuine tRNA-ribosyltransferase OS=Alcanivoracaceae bacterium GenoA1_TS13_700 OX=2072747 GN=tgt PE=3 SV=1
MKFELAGTDAGARRGRLVFDRGVVETPAFMPVGTYGSVKAMLPRDIGDIGAHIILGNTFHLMLRPGTDIIRLHGDLHDFMHWQGPILTDSGGFQVFSLGKMRKISEEGVKFQSPVDGSPVFLTPEISMQVQKDLGSDIVMIFDECTPYPATEQQARDSMALSLRWARRSKDAHQGNPSALFGIVQGGMYENLRLESLAGLTDIGFDGYAIGGLSVGEPKEEMLNVLNYLQPHMPKDRPRYLMGVGKPEDIVEAVRRGVDMFDCVMPTRNARNGHLFTADGVVKIRNAAHKTDTGPLEPGCDCYTCQNFSRAYLHHLDRCKEILGCQLNTIHNLRYYQRLMHGLRTAIETGTFERFVTEFYQRRGEPVPPLASN

SEQ ID NO: 51387 - protein, 373 aa, Alcanivorax borkumensis
  REGION 1..373: note = tr|Q0VS99|Q0VS99_ALCBS Queuine tRNA-ribosyltransferase OS=Alcanivorax borkumensis (strain ATCC 700651 / DSM 11573 / NCIMB 13689 / SK2) OX=393595; GN = tgt PE=3 SV=1
MSRMTFKLSTTDGAARRGEITFPRGTIQTPAFMPVGTYGTVKSMLPRDLADTGAEICLGNTFHLMLRPGTEVIEAHGSLHGFMQWDKPILTDSGGFQVFSLGEMRKISEQGVVFRNPINGDKVELSPEKAMQVQRSLGSDICMIFDECTPFPATEKQARDSMELSLRWAKRSKDAHEGNDAACFGIVQGGMYDDLRRESLAGLVDIGFDGYAVGGLSVGEPQNEMLRTLGNLTPHMPEDHPRYLMGVGKPDDIVEAVRRGVDMFDCVMPTRNARNGHLFIAEGVVKIRNARHRHDLAPLEAECDCYTCQNFSRSYLHHLDRCNEMLGSQLNTIHNLRYYQRLMAGLRGAIEGGTLSAFVDDFYAARGQQTPAL

SEQ ID NO: 51388 - protein, 376 aa, Alcanivorax dieselolei
  REGION 1..376: note = tr|K0CK51|K0CK51_ALCDB Queuine tRNA-ribosyltransferase OS=Alcanivorax dieselolei (strain DSM 16502 / CGMCC 1.3690 / B-5) OX=930169 GN=tgt PE=3 SV=1
MSRMSFDLLTTDGSARRGRLTFPRGEVETPAFMPVGTYGTVKAMLPRDLADSGAQICLGNTFHLMLRPGTEIIERHGSLHGFMQWDKPILTDSGGFQVFSLGELRKISEQGVVFKNPINGDRVELTPERAMQVQRSLGSDICMIFDECTPYPATETQAAESMRLSLRWARRSKAAHVAHEGNDAACFGIVQGGMYDNLRRESLAGLTDIGFDGYAIGGLSVGEPQEEMRRTLAGITPHMPADRPRYLMGVGRPEDIVEGVRRGVDMFDCVMPTRNARNGHLFTREGVIKIRNARHRDDLSPLEEGCDCYTCRQFSRSYLHHLDRCGEMLGAQLNTIHNLRYYQRLMAGLRGAIEAGTLSAFVGDFYAAMGRDVPAL

SEQ ID NO: 51389 - protein, 370 aa, Alcanivorax hongdengensis
  REGION 1..370: note = tr|L0WDB8|L0WDB8_9GAMM Queuine tRNA-ribosyltransferase OS=Alcanivorax hongdengensis A-11-3 OX=1177179 GN=tgt PE=3 SV=1
MTFQLNATDGAARRGQITFPRGTVQTPAFMPVGTYGTVKAMLPRDLAGTGAEICLGNTFHLMLRPGTEVIEAHGSLHSFMQWDKPILTDSGGFQVFSLGEMRKISEQGVVFKNPINGDRVELSPEKAMQVQRSLGSDICMIFDECTPFPATERQARDSMELSLRWAQRSRAAHEGNDAACFGIVQGGMYDTLRQASLAGLTDIGFDGYAVGGLSVGEPQEEMLRTLGGITPHMPADRPRYLMGVGKPEDIVEAVRRGVDMFDCVMPTRNARNGHLFTAEGVIKIRNARHRHDLAPLEADCDCYTCQHFSRSYLHHLDRCGEMLGSQLNTIHNLRYYQRLMAGLRGAIEGGTLSAFVNDFYAARGQQAPAL

SEQ ID NO: 51390 - protein, 370 aa, Alcanivorax jadensis
  REGION 1..370: note = tr|A0A095S9G3|A0A095S9G3_9GAMM Queuine tRNA-ribosyltransferase OS=Alcanivorax jadensis T9; OX = 1177181 GN=tgt PE=3 SV=1
MQFSLNKTDGAARRGHLTFPRGTIQTPAFMPVGTYGTVKGMLPRDLADTGAEICLGNTFHLMLRPGTEVIEAHGSLHGFMQWDKPILTDSGGFQVFSLGDMRKISEQGVVFKNPINGDRVELTPEKAMQVQRSLGSDICMIFDECTPFPATEQQARDSMQLSLRWAQRSKEAHEGNDAACFGIVQGGMYDNLRQESLAGLVDIGFDGYAIGGLSVGEPQEEMLRTLGAIAPHMPEDRPRYLMGVGKPDDIVEAVRRGVDMFDCVMPTRNARNGHLFTAEGVVKIRNARHRHDLAPLESDCDCYTCQHFSRSYLHHLDRCNEMLGSQLNTIHNLRYYQRLMAGLRGAIEGGTLSAFVDDFYAARGQQTPAL

SEQ ID NO: 51391 - protein, 370 aa, unidentified
  source 1..370: note = Alcanivorax nanhaiticus
  REGION 1..370: note = tr|A0A095USR6|A0A095USR6_9GAMM Queuine tRNA-ribosyltransferase OS=Alcanivorax nanhaiticus; OX = 1177154 GN=tgt PE=3 SV=1
MTFQLNTTDGAARRGEITFPRGTIQTPAFMPVGTYGTVKGMLPKDLADTGAEICLGNTFHLMLRPGTEVIEAHGSLHGFMQWDKPILTDSGGFQVFSLGEMRKISEQGVVFKNPINGDRVELTPERAMQVQRSLGSDICMIFDECTPFPATEQQARDSMELSLRWAQRSKDAHEGNDAACFGIVQGGMYDNLRRESLAGLVDIGFDGYAVGGLSVGEPQEEMLRTLGNLTPHMPEDRPRYLMGVGKPEDIVEAVRRGVDMFDCVMPTRNARNGHLFTSQGVIKIRNAKHRHDLAPLEEGCDCYTCQHFSRSYLHHLDRCNEMLGSQLNTIHNLRYYQRLMAGLRGAIEGGTLSAFVDDFYAARGEQTPAL

SEQ ID NO: 51392 - protein, 373 aa, Alcanivorax pacificus
  REGION 1..373: note = tr|A0A0B4XL82|A0A0B4XL82_9GAMM Queuine tRNA-ribosyltransferase OS=Alcanivorax pacificus W11-5; OX = 391936 GN=tgt PE=3 SV=1
MSFSLLGQDGAARRGQLAFPRGTVQTPAFMPVGTYGTVKGMLPSDLLATGAEICLGNTFHLMLRPGTDIIEQHGSLHGFMQWPKPILTDSGGFQVFSLGELRKITEEGVTFRSPINGDKVFLSPERAMQVQRSLGSDICMIFDECTPFPATEQQARQSMELSLRWAQRSKAAHEGNDAACFGIIQGGMYPALRQASLAGLADIGFDGYAIGGLSVGEPQEEMLRILGEITPHMPQDRPRYLMGVGRPEDIVEAVRRGVDMFDCVMPTRNARNGHLFTREGVIKIRNARHREDTGPLDETCDCYTCRHFSRSYLHHLDRCGEMLGAQLGTIHNLRYYQNLMAGLRGAIEAGTLSAFIDDFYRARGLPVPVLTAV

SEQ ID NO: 51393 - protein, 370 aa, unidentified
  source 1..370: note = Alcanivorax profundi
  REGION 1..370: note = tr|A0A418XVY7|A0A418XVY7_9GAMM Queuine tRNA-ribosyltransferase OS=Alcanivorax profundi OX=2338368; GN = tgt PE=3 SV=1
MQFSLKTTDGDARRGEITFPRGTIQTPAFMPVGTYGTVKGMLPKDLADTGAEICLGNTFHLMLRPGTEVIEAHGSLHGFMQWDKPILTDSGGFQVFSLGEMRKISEHGVVFKNPINGDKVELTPERAMQVQRSLGSDICMIFDECTPFPATEQQARDSMELSLRWAQRSKDAHQGNDAACFGIVQGGMYDNLRRESLAGLVDIGFDGYAVGGLSVGEPQEEMLRTLGNLTPHMPADRPRYLMGVGKPEDIVEAVRRGVDMFDCVMPTRNARNGHLFTSQGVIKIRNAKHRHDLAPLEAECDCYTCQHFSRSYLHHLDRCNEMLGSQLNTIHNLRYYQRLMAGLRGAIEGGTLSAFVDDFYAARGEQTPAL

SEQ ID NO: 51394 - protein, 373 aa, Alcanivorax sp.
  REGION 1..373: note = tr|A0A220SN94|A0A220SN94_9GAMM Queuine tRNA-ribosyltransferase OS=Alcanivorax sp. N3-2A; OX = 2014542 GN=tgt PE=3 SV=1
MTFQHLASDGAARRGRLTFPRGSVETPAFMPVGTYGTVKGMLPRDLDETGAEICLGNTFHLMLRPGTEVIGQHGGLHGFMQWPRPILTDSGGFQVFSLGAMRKISEQGVVFKSPINGDRIELSPERAMQVQHALGSDICMIFDECTPFPATETQAAESMRLSLRWAARSKQAHFEQAGNDAACFGIVQGGMYDALRRESLHGLVDIGFDGYAVGGLSVGEPQQEMLRTLGEIAPHMPADKPRYLMGVGKPEDIVEAVRRGVDMFDCVMPTRNARNGHLFTASGVVKIRNARHRHDLSPLEEGCDCYTCGRFSRGYLHHLDRCGEMLGAQLNTIHNLRYYQRLMAGLRGAIEAGTLSAFVGGFYAALERPVPAL

SEQ ID NO: 51395 - protein, 67 aa, Alcanivorax sp.
  REGION 1..67: note = tr|A0A356PMT0|A0A356PMT0_9GAMM tRNA guanosine(34) transglycosylase Tgt (Fragment) OS=Alcanivorax sp.; OX = 1872427 GN=tgt PE=4 SV=1
MTFQHLASDGAARRGRLTFPRGSVETPAFMPVGTYGTVKGMLPRDLEDIGAEICLGNTFHLMLRPGT

SEQ ID NO: 51396 - protein, 376 aa, unidentified
  source 1..376: note = Algibacter alginicilyticus
  REGION 1..376: note = tr|A0A0P0CE48|A0A0P0CE48_9FLAO Queuine tRNA-ribosyltransferase OS=Algibacter alginicilyticus; OX = 1736674 GN=tgt PE=3 SV=1
MKFELKAKDLQSKARAATIKTDHGVIETPIFMPVGTVASVKGVHQRELKQDINPDIILGNTYHLYLRPQTPILEQAGGIHKFMNWDRNILTDSGGYQVYSLSSNRKIKEEGVKFKSHIDGSYHTFTPENVMEIQRSIGADIIMAFDECTPYPCEYNYAKRSMHMTHRWLDRCISHLKKTPLKYDYNQAFFPIVQGSTYKDLRKQSAEYIANTGAVGNAIGGLSVGEPAEEMYAMTEVVCEVLPEDKPRYLMGVGTPINILENIALGIDMFDCVMPTRNARNGMLFTAHGTVNIKNLKWANDFSPVDAMGITFVDTDYSKAYLRHLFSVNERLGAQIATIHNLGFYLWLVREARKHILAGDFRVWKDMMVKQMDKRL

SEQ ID NO: 51397 - protein, 376 aa, unidentified
  source 1..376: note = Algibacter amylolyticus
  REGION 1..376: note = tr|A0A556QEU4|A0A556QEU4_9FLAO Queuine tRNA-ribosyltransferase OS=Algibacter amylolyticus; OX = 1608400 GN=tgt PE=3 SV=1
MKFELLAKDAQSKARAGKLTTDHGVIETPIFMPVGTVATVKGVHQRELKDDINPDIILGNTYHLYLRPQTHIIEKAGGLHKFMNWDRNILTDSGGYQVYSLSANRKIKEEGVKFKSHIDGSYHTFTPENVMEIQRSIGADIIMAFDECTPYPCDYNYAKRSMHMTHRWLDRCINHLEKTPLKYDYNQAFFPIVQGSTYTDLRKQSAEYIANSGAVGNAIGGLSVGEPAEEMYAMTDVVCSILPEEKPRYLMGVGTPINILENIALGVDMFDCVMPTRNARNGMLFTAHGSINIKNLKWADDFSPIDDMGITFVDTEYSKAYLRHLFTVNELLGKQIATIHNLGFYLWLVREARKHILAGDFRTWKDKMVKQMDNRL

SEQ ID NO: 51398 - protein, 376 aa, unidentified
  source 1..376: note = Algibacter aquaticus
  REGION 1..376: note = tr|A0A1E5SI46|A0A1E5SI46_9FLAO Queuine tRNA-ribosyltransferase OS=Algibacter aquaticus OX=1849968; GN = tgt PE=3 SV=1
MKFELKAKDAQSKARAGKITTDHGVIETPIFMPVGTVATVKGVHQRELKDDINPDIILGNTYHLYLRPQTKIIEKAGGLHKFMNWDRNILTDSGGYQVYSLSANRKIKEEGVKFKSHIDGSYHTFTPENVMEIQRSIGADIIMAFDECTPYPCDYNYAKRSMHMTHRWLDRCINHLEKTPLKYDYNQAFFPIVQGSTYKDLRKQSAEYIANSGAVGNAIGGLSVGEPADEMYAMTDVVCSILPEDKPRYLMGVGTPINILENIALGVDMFDCVMPTRNARNGMLFTAHGTINIKNLKWAEDFSPIDEMGITFVDTEYSKAYLRHLFTVNELLGKQIATIHNLGFYLWLVREARKHILAGDFRSWKDKMVKQMDNRL

SEQ ID NO: 51399 - protein, 83 aa, Algibacter lectus
  REGION 1..83: note = tr|A0A090X4L0|A0A090X4L0_9FLAO tRNA-guanine transglycosylase OS=Algibacter lectus OX=221126; GN = JCM19274_4466 PE=4 SV=1
MKFELNAKDPQSKARAGKLTTDHGVIETPIFMPVGTVGTVKGVHQRELKNDINPDIILGNTYHLYLRPPQTHVLEKQVDFINL

SEQ ID NO: 51400 - protein, 294 aa, Algibacter lectus
  REGION 1..294: note = tr|A0A090VDW4|A0A090VDW4_9FLAO Queuine tRNA-ribosyltransferase OS=Algibacter lectus OX=221126; GN = JCM19274_4465 PE=3 SV=1
MNWDRNILTDSGGYQVYSLSANRKIKEEGVKFKSHIDGSYHTFTPENVMEIQRTIGADIIMAFDECTPYPCDYNYAKRSMHMTHRWLDRCINHLEKTPLKYDYNQAFFPIVQGSTYKDLRKQSAEYIANSGAVGNAIGGLSVGEPAEEMYAMTDVVCSILPEEKPRYLMGVGTPINILENIALGVDMFDCVMPTRNARNGMLFTAHGSINIKNLKWAEDFSPIDEMGITFVDTEYSKAYLRHLFTVNELLGKQIATIHNLGFYMWLVREARKHILAGDFNDWKNQMVKQMANRL

SEQ ID NO: 51401 - protein, 376 aa, unidentified
  source 1..376: note = Algibacter pectinivorans
  REGION 1..376: note = tr|A0A1I1RM96|A0A1I1RM96_9FLAO Queuine tRNA-ribosyltransferase OS=Algibacter pectinivorans; OX = 870482 GN=tgt PE=3 SV=1
MKFELLAKDAQSKARAGKITTDHGVIETPIFMPVGTVATVKGVHQRELKEEINPDIILGNTYHLYLRPQTHIIEKAGGLHKFMNWDRNILTDSGGYQVYSLSANRKIKEEGVKFKSHIDGSYHTFTPENVMEIQRSIGADIIMAFDECTPYPCDYNYAKRSMHMTHRWLDRCINHLEKTPLKYDYNQAFFPIVQGSTYTDLRKQSAEYIANSGAVGNAIGGLSVGEPAEEMYAMTDVVCSILPEEKPRYLMGVGTPINILENIALGVDMFDCVMPTRNARNGMLFTAHGSINIKNLKWADDFSPIDEMGITFVDTEYSKAYLRHLFTVNELLGKQIATIHNLGFYLWLVREARKHILAGDFRAWKDKMVKQMDNRL

SEQ ID NO: 51402 - protein, 376 aa, Algibacter sp.
  REGION 1..376: note = tr|A0A2N0JDF0|A0A2N0JDF0_9FLAO Queuine tRNA-ribosyltransferase OS=Algibacter sp. RHA_19; OX = 1798237 GN=tgt PE=3 SV=1
MKFTLEKKDPQSKARAATMVTDHGVIETPIFMPVGTVASVKGVHQRELKEEINPDIILGNTYHLYLRPKLDILEAAGGLHKFMGWDRNILTDSGGYQVYSLSANRKIKEEGVKFKSHIDGSYHFFTPENVMEIQRTIGADIIMAFDECTPYPCDYNYAKRSMHMTHRWLDRCMNHLEKLPFKYGYEQTFFPIVQGSTYKDLRKQSAEYIANAGAEGNAIGGLSVGEPAEEMYAMTEVVCDILPEEKPRYLMGVGTPINILENIALGVDMFDCVMPTRNARNGMLFTAHGTINIKNKKWEADFSPIDEMGITFVDTEYTKAYLRHLFAANEYLGKQIATIHNLGFYLWLTREARKHIIAGDFTEWKNMMVKQMDKRL

SEQ ID NO: 51403 - protein, 376 aa, Algibacter sp.
  REGION 1..376: note = tr|A0A2U2X5H1|A0A2U2X5H1_9FLAO Queuine tRNA-ribosyltransferase OS=Algibacter sp. ZY111 OX=2100723; GN = tgt PE=3 SV=1
MKFELHSKDTQSKARAGKITTDHGVIETPIFMPVGTVATVKGVHQRELKDDINPDIILGNTYHLYLRPQTHIIEKAGGLHKFMNWDRNILTDSGGYQVYSLSANRKIKEEGVKFKSHIDGSYHTFTPENVMEIQRSIGADIIMAFDECTPYPCDYNYAKRSMHMTHRWLDRCINHLEKTPLKYDYNQTFFPIVQGSTYKDLRKQSAEYIANAGAVGNAIGGLSVGEPAEEMYAMTDVVCSILPEDKPRYLMGVGTPINILENIALGVDMFDCVMPTRNARNGMLFTAHGSINIKNLKWADDFSPIDEMGITFVDTEYSKAYLRHLFTVNELLGKQIATIHNLGFYLWLVREARKHILAGDFKVWKEKMVKQMNNRL

SEQ ID NO: 51404 - protein, 376 aa, unidentified
  source 1..376: note = Algibacter wandonensis
  REGION 1..376: note = tr|A0A4R8MBS3|A0A4R8MBS3_9FLAO Queuine tRNA-ribosyltransferase OS=Algibacter wandonensis; OX = 1343161 GN=tgt PE=3 SV=1
MKFELNAKDPQSKARAGKLTTDHGVIETPIFMPVGTVGTVKGVHQRELKNDINPDIILGNTYHLYLRPQTHVLEKAGGLHKFMNWDRNILTDSGGYQVYSLSANRKIKEEGVKFKSHIDGSYHTFTPENVMEIQRTIGADIIMAFDECTPYPCDYNYAKRSMHMTHRWLDRCINHLEKTPLKYDYNQAFFPIVQGSTYKDLRKQSAEYIANSGAVGNAIGGLSVGEPAEEMYAMTDVVCSILPEEKPRYLMGVGTPINILENIALGVDMFDCVMPTRNARNGMLFTAHGSINIKNLKWAEDFSPIDEMGITFVDTEYSKAYLRHLFTVNELLGKQIATIHNLGFYMWLVREARKHILAGDFNDWKNQMVKQMANRL

SEQ ID NO: 51405 - protein, 376 aa, unidentified
  source 1..376: note = Algoriella xinjiangensis
  REGION 1..376: note = tr|A0A1I5AXQ2|A0A1I5AXQ2_9FLAO Queuine tRNA-ribosyltransferase OS=Algoriella xinjiangensis; OX = 684065 GN=tgt PE=3 SV=1
MKFSIDKKDEFSKARAGVVETDHGKIQTPIFMPVGTVGTVKSVHQRELEEDIKAQIILGNTYHLYLRPGTDILHKAGGLHQFMNWQKPILTDSGGFQVYSLSTSRKKSEEGVRFKSHIDGSYHMFTPEKSMEIQRFIGGDIFMAFDELTGIPAKYHDAKRAMHVTHRWLERCRTWLDNNPEYYGHKQTLFPIVQGNDFKDLRQESAKYISDFGAEGNAIGGLSVGEPEPIMYEMTDIVTEILPQDKPRYLMGVGTPWNIIECIALGVDMFDCVMPTRNARNGMLFTWNGVMNMKNAKWKDCFEPLDESGTSYVDSFYSKSYVRHLFNANESLGKQIASIHNLAFYLDLVRVAREHILAGDFAQWKEQIVPQLKKRL

SEQ ID NO: 51406 - protein, 376 aa, Algoriphagus alkaliphilus
  REGION 1..376: note = tr|A0A1G5WSB9|A0A1G5WSB9_9BACT Queuine tRNA-ribosyltransferase OS=Algoriphagus alkaliphilus; OX = 279824 GN=tgt PE=3 SV=1
MKFTLRKKDLQTKARTGTLFTDHGEIQTPIFMPVGTAATVKAVHQRELKEDIKAQIILGNTYHLYLRPGLDILEKAGGLHKFNGWERPILTDSGGYQVFSLSGTRKIKEEGVTFKSHIDGSKHEFTPENVMDIQRTIGADIIMAFDECTPYPCEYGYARNSMEMTHRWLTRCIDRFDSTEGKYGYRQTFFPIVQGSVYKDLRKQSAEFIAAQGREGNAIGGLSVGEPAEMMYEMTELVTDILPADKPRYLMGVGTPANILECIALGVDMFDCVMPTRNARNGMLFTSEGIINIRNEKWKDDFSPIDPAIGNYASTFYSKAYLRHLTVSKEILAAQIASIHNLAFYLWLVGQAREHIQAGDFAVWKDQMVKKVSTRL

SEQ ID NO: 51407 - protein, 376 aa, Algoriphagus antarcticus
  REGION 1..376: note = tr|A0A3E0DP96|A0A3E0DP96_9BACT Queuine tRNA-ribosyltransferase OS=Algoriphagus antarcticus; OX = 238540 GN=tgt PE=3 SV=1
MKFTLEYSDPKSKARAGVVKTDHGDIQTPIFMPVGTAGSVKAVHQRELDQDIKAQIILGNTYHLYLRPGLDVLEKAGGLHKFNGWGKPILTDSGGYQVFSLSGTRKIKEDGVMFKSHIDGSKHHFTPENVMDIQRTIGADIIMAFDECTPYPCEYGYARNSMEMTHRWLTRCIDRFDATEGKYGYHQTLFPIVQGSVYKDLRKQSAEFIASTNQQGNAIGGLSVGEPAEMMYEMTELVTDILPHDKPRYLMGVGTPANILECIALGVDMFDCVMPTRNARNGMLFTSEGFINIRNEKWKDDFSGIDPAIGGYVSTFYSKAYLRHLTISKEILAAQIASIHNLSFYLWLVGQAREHILAGDFAVWKDQMVKKVSTRL

SEQ ID NO: 51408 - protein, 376 aa, Algoriphagus aquaeductus
  REGION 1..376: note = tr|A0A326RVC1|A0A326RVC1_9BACT Queuine tRNA-ribosyltransferase OS=Algoriphagus aquaeductus; OX = 475299 GN=tgt PE=3 SV=1
MKFTLEKKDSQSQARAGQIQTDHGLINTPIFMPVGTAGTVKAVHQRELKEDIQAQIILGNTYHLYLRPGLDILEKAGGLHKFNGWDRPILTDSGGYQVFSLAGTRKIKEEGVTFKSHIDGSKHNFTPENVMDIQRTIGADIIMAFDECTPYPCEYGYARNSMDMTHRWLKRCIDRFDATEGKYGYHQTLFPIVQGSVYKDLRKQSAEFIAAQGREGNAIGGLSVGEPAEMMYEMTELVTEILPADKPRYLMGVGTPANILECIALGVDMFDCVMPTRNARNGMLFTSEGIINIRNEKWKDDFSPIDPLIGNYASSFYSKAYLRHLTVSKEILAAQIASIHNLSFYLWLVGQAREHILSGDFGVWKDAMVKKVSTRL

SEQ ID NO: 51409 - protein, 376 aa, Algoriphagus aquimarinus
  REGION 1..376: note = tr|A0A5C7B0W8|A0A5C7B0W8_9BACT Queuine tRNA-ribosyltransferase OS=Algoriphagus aquimarinus; OX = 237018 GN=tgt PE=3 SV=1
MKFTLEYSDSKSKARAGVVRTDHGDIQTPIFMPVGTAGSVKAVHQRELDQDIKAQIILGNTYHLYLRPGLDVLEKAGGLHKFNGWEKPILTDSGGYQVFSLSGTRKIKEDGVMFKSHIDGSKHHFTPENVMDIQRTIGADIIMAFDECTPYPCEYGYARNSMEMTHRWLTRCIGRFDETEGKYGYNQTLFPIVQGSVYKDLRKQSAEFIASTNQQGNAIGGLSVGEPAEMMYEMTELVTDILPKDKPRYLMGVGTPANILECIALGVDMFDCVMPTRNARNGMLFTSEGFINIRNEKWKDDFTGIDPAIGGYVSTFYSKAYLRHLTISKEILAAQIASIHNLSFYLWLVGQAREHILAGDFAVWKDQMVKKVSTRL

SEQ ID NO: 51410 - protein, 376 aa, Algoriphagus aquimarinus
  REGION 1..376: note = tr|A0A1I1BGC0|A0A1I1BGC0_9BACT Queuine tRNA-ribosyltransferase OS=Algoriphagus aquimarinus; OX = 237018 GN=tgt PE=3 SV=1
MKFTLEYSDSKSKARAGVVKTDHGDIQTPIFMPVGTAGSVKAVHQRELDQDIKAQIILGNTYHLYLRPGLDVLEKAGGLHKFNGWEKPILTDSGGYQVFSLSGTRKIKEDGVMFKSHIDGSKHHFTPENVMDIQRTIGADIIMAFDECTPYPCEYGYARNSMEMTHRWLTRCIGRFDETEGKYGYNQTLFPIVQGSVYKDLRTQSAEFIASTNQQGNAIGGLSVGEPAEMMYEMTELVTDILPKDKPRYLMGVGTPANILECIALGVDMFDCVMPTRNARNGMLFTSEGFINIRNEKWKDDFTGIDPAIGGYVSTFYTKAYLRHLTISKEILAAQIASIHNLSFYLWLVGQAREHILAGDFAVWKDQMVKKVSTRL

SEQ ID NO: 51411 - protein, 376 aa, Algoriphagus boritolerans
  REGION 1..376: note = tr|A0A1H5UPR7|A0A1H5UPR7_9BACT Queuine tRNA-ribosyltransferase OS=Algoriphagus boritolerans DSM 17298 = JCM 18970 OX=1120964 GN=tgt PE=3 SV=1
MKFTLGKKDLKTKARTGTLFTDHGEIQTPIFMPVGTAATVKAVHQRELIEDIKAQIILGNTYHLYLRPGLDILEKAGGLHKFNGWDRPILTDSGGYQVFSLAGTRKIKEAGVTFKSHIDGSKHEFTPENVMDIQRTIGADIIMAFDECTPYPCEYGYARNSMELTHRWLKRCIDRFDSTEGKYGYTQTFFPIVQGSVYKDLRKQSAEFIAAQGREGNAIGGLSVGEPVEMMYEMTELVTDILPADKPRYLMGVGTPANILECIALGVDMFDCVMPTRNARNGMLFTSAGIINIRNEKWKDDFSPIDPELGNYASTFYSKAYLRHLTISKEILAAQIASIHNLAFFLWLVGQAREHILAGDFAVWKDQMVKKVSTRL

SEQ ID NO: 51412 - protein, 394 aa, unidentified
  source 1..394: note = Algoriphagus boseongensis
  REGION 1..394: note = tr|A0A4R6T7M5|A0A4R6T7M5_9BACT Queuine tRNA-ribosyltransferase OS=Algoriphagus boseongensis; OX = 1442587 GN=tgt PE=3 SV=1
MQAEPVNMQDVPLGRLKVMKFTLEKKDLQTKARVGRVETDHGTIQTPIFMPVGTAGTVKAVHQRELKEDIKAQIILGNTYHLYLRPGLDVLEKAGGLHQFNGWDRPILTDSGGYQVFSLAGTRKINEEGVTFKSHIDGSKHIFSPEGVMDIQRTIGADIIMAFDECTPYPCEYGYARKSMEMTHRWLDRCIDRFDSTEGKYGYRQTLFPIVQGSVYKDLRVQSAEFIASRNREGNAIGGLSVGEPAEMMYEMTELVTDILPTEKPRYLMGVGTPANILECIALGVDMFDCVMPTRNARNGMLFTSEGIINIRNEKWKEDFSPIDPAIGNYASSFYSKAYLRHLTISKEILAAQIASIHNLAFYLWLVGQAREHILLGDFGVWKDQMVKKVSTRL

SEQ ID NO: 51413 - protein, 376 aa, Algoriphagus chordae
  REGION 1..376: note = tr|A0A2W7QYG7|A0A2W7QYG7_9BACT Queuine tRNA-ribosyltransferase OS=Algoriphagus chordae OX=237019; GN = tgt PE=3 SV=1
MKFTLSHQDPKSKARAGVVKTDHGDIQTPIFMPVGTAGSVKAVHQRELDQDIKAQIILGNTYHLYLRPGLDVLEKAGGLHKFNGWEKPILTDSGGYQVFSLSGTRKIKEDGVMFKSHIDGSKHHFTPENVMDIQRTIGADIIMAFDECTPYPCEYGYARNSMEMTHRWLTRCIDRFDATEGKYGYNQTLFPIVQGSVYKDLRKQSAEFIASTNQQGNAIGGLSVGEPAEMMYEMTELVTDILPQDKPRYLMGVGTPANILECIALGVDMFDCVMPTRNARNGMLFTSEGFINIRNEKWKDDFTSIDPAIGGYVSTFYSKAYLRHLTVSKEILAAQIASIHNLSFYLWLVGQAREHILAGDFAVWKDQMVKKVSTRL

SEQ ID NO: 51414 - protein, 376 aa, Algoriphagus faecimaris
  REGION 1..376: note = tr|A0A1G6QIT9|A0A1G6QIT9_9BACT Queuine tRNA-ribosyltransferase OS=Algoriphagus faecimaris; OX = 686796 GN=tgt PE=3 SV=1
MKFTLEKKDSQSQARAGEILTDHGMIQTPIFMPVGTAGTVKAVHQRELKEDIQAQIILGNTYHLYLRPGLDILEKAGGLHQFNGWDRPILTDSGGYQVFSLAGTRKIKEEGVTFKSHIDGSKHNFTPENVMDIQRTIGADIIMAFDECTPYPCEYGYARNSMEMTHRWLKRCIHRFDATEGKYGYSQTLFPIVQGSVYKDLRKQSAEFIAAQGREGNAIGGLSVGEPAEMMYEMTELVTEILPQEKPRYLMGVGTPANILECIALGVDMFDCVMPTRNARNGMLFTSEGIINIRNEKWKDDFSPIDPAIGNYASSFYSRAYLRHLTISKEILAAQIASIHNLAFYLWLVGQAREHILAGDFVTWKDQMVKKVSTRL

SEQ ID NO: 51415 - protein, 376 aa, Algoriphagus halophilus
  REGION 1..376: note = tr|A0A1N6FFJ8|A0A1N6FFJ8_9BACT Queuine tRNA-ribosyltransferase OS=Algoriphagus halophilus; OX = 226505 GN=tgt PE=3 SV=1
MKFTLSHQDSKSKARAGLVKTDHGEIETPIFMPVGTAGSVKAVHQRELLYDVKAEIILGNTYHLYLRPGLGILEKAGGLHKFNGWSKPILTDSGGYQVFSLSGTRKIKEDGVMFKSHIDGSKHHFTPENVMDIQRTIGADIIMAFDECTPYPCEYGYARNSMEMTHRWLKRCIERFDATEGKYGYSQTLFPIVQGSVYKDLRQKSAEFIANTHQEGNAIGGLSVGEPAEMMYEMTELVTDILPTDKPRYLMGVGTPANILECIALGVDMFDCVMPTRNARNGMLFTSEGIINIRNEKWKDDFSPIDSAIGGHVSTFYSKAYLRHLVISKEILAAQIASIHNLSFYLWLVKQAREHILAGDFAVWKDQMVKKVSTRL

SEQ ID NO: 51416 - protein, 376 aa, Algoriphagus hitonicola
  REGION 1..376: note = tr|A0A1I2VH47|A0A1I2VH47_9BACT Queuine tRNA-ribosyltransferase OS=Algoriphagus hitonicola; OX = 435880 GN=tgt PE=3 SV=1
MKFRLEKSDNQSKARAGKLETDHGTIQTPIFMPVGTAGTVKAVHQRELKEDIQAQIILGNTYHLYLRPGLDILEKAGGLHKFNGWDRPILTDSGGYQVFSLAGTRKIKEEGVTFKSHIDGSKHHFTAENVMDIQRTIGADIIMAFDECTPYPCEYGYARNSMEMTHRWLKRCIHRFDATEGKYGYSQTLFPIVQGSVYKDLRKQSAEFIAEQGREGNAIGGLSVGEPAEMMYEMTELVTDILPVDKPRYLMGVGTPANILECIALGVDMFDCVMPTRNARNGMLFTSEGIINIRNEKWKDDFSPIDPAIGNYASTFYSRAYLRHLTISKEILAAQIASIHNLSFYLWLVGQAREHILAGDFAVWKDQMVKKVSTRL

SEQ ID NO: 51417 - protein, 376 aa, Algoriphagus locisalis
  REGION 1..376: note = tr|A0A1I7D0M6|A0A1I7D0M6_9BACT Queuine tRNA-ribosyltransferase OS=Algoriphagus locisalis; OX = 305507 GN=tgt PE=3 SV=1
MKFTLEYSDSKSKARAGVVKTDHGEIQTPIFMPVGTAGSVKAVHQRELDQDIKAQIILGNTYHLYLRPGLEVLEKAGGLHKFNGWGKPILTDSGGYQVFSLSGTRKIKEDGVMFKSHIDGSKHHFTPENVMDIQRTIGADIIMAFDECTPYPCEYGYARNSMEMTHRWLTRCIDRFEATEGKYGYNQTLFPIVQGSVYKDLRKQSAEFIASTNQQGNAIGGLSVGEPAEMMYEMTELVTDILPQDKPRYLMGVGTPANILECIALGVDMFDCVMPTRNARNGMLFTSEGFINIRNEKWKDDFTGIDPAIGGYVSTFYTKAYLRHLTISKEILAAQIASIHNLSFYLWLVGQAREHILAGDFAVWKDQMVKKVSTRL

SEQ ID NO: 51418 - protein, 376 aa, unidentified
  source 1..376: note = Algoriphagus machipongonensis
  REGION 1..376: note = tr|A3I2C5|A3I2C5_9BACT Queuine tRNA-ribosyltransferase OS=Algoriphagus machipongonensis; OX = 388413 GN=tgt PE=3 SV=1
MKFNLSHQDPKSKARAGVVKTDHGDIQTPIFMPVGTAGSVKAVHQRELMYDIKAEIILGNTYHLYLRPGLDILEKAGGLHKFNGWSKPILTDSGGYQVFSLAGTRKIKEDGVMFKSHIDGSKHHFTPENVMDIQRTIGADIIMAFDECTPYPCEYGYARNSMEMTHRWLKRCIDRFDSTEGKYGYSQTLFPIVQGSVYKDLRKQSAEFIASTNQEGNAIGGLSVGEPAEMMYEMTELVTDILPTDKPRYLMGVGTPANILECIALGVDMFDCVMPTRNARNGMLFTSEGIINIRNEKWKDDFSAIDPAIGGHVSTFYSKAYLRHLVISKEILAAQIASIHNLSFYLWLVKQAREHILSGDFAVWKDQMVKKVSTRL

SEQ ID NO: 51419 - protein, 376 aa, Algoriphagus marincola
  REGION 1..376: note = tr|A0A0P8CBI7|A0A0P8CBI7_9BACT Queuine tRNA-ribosyltransferase OS=Algoriphagus marincola HL-49; OX = 1305737 GN=tgt PE=3 SV=1
MKFTLAQEDPQSKARAGLVETDHGKIETPIFMPVGTAGTVKAVHQRELKEDVQAQIILGNTYHLYLRPGLDILEKAGGLHKFNGWDRPILTDSGGYQVFSLAGTRKIKEEGVTFKSHIDGSKHNFTPENVMDIQRTIGADIIMAFDECTPYPCEYGYARKSMEMTHRWLKRCAERFDSTEGKYGYNQTLFPIVQGSVYKDLRKQSAEFIAEQGREGNAIGGLSVGEPAEMMYEMTEIVTDLLPRDKPRYLMGVGTPANILECIALGVDMFDCVMPTRNARNGMLFTSEGIINIRNEKWKDDFTPIDPAIGNYASTFYSKAYLRHLTISKEILAAQIASIHNLSFYLWLVKEARNHILAGDFASWKTQMVKKVSTRL

SEQ ID NO: 51420 - protein, 398 aa, Algoriphagus ornithinivorans
  REGION 1..398: note = tr|A0A1I5ICP8|A0A1I5ICP8_9BACT Queuine tRNA-ribosyltransferase OS=Algoriphagus ornithinivorans; OX = 226506 GN=tgt PE=3 SV=1
MDIFAGQSHHFVDEVHIIENQEMKFTLKHTDPQTKARVGTVETDHGTIQTPIFMPVGTAGSVKAVHQRELKEDIQAQIILGNTYHLYLRPGLDIIEKAGGLHRFNGWDRPILTDSGGYQVFSLSGSRKIKEDGVMFKSHIDGSKHHFTPENVMDIQRTIGADIIMAFDECTPYPCEYGYARKSMEMTHRWLDRCITQFDSTTGKYGYSQTLFPIVQGSVYKDLRKQSAEFIASREREGNAIGGLSVGEPAEMMYEMTELVTDILPQDKPRYLMGVGTPANILECIALGVDMFDCVMPTRNARNGMLFTSEGIINIRNKKWEDDFSAIDPAIGNYASTFYSKAYLRHLTISKEILAAQIASIHNLAFYLWLVGQAREHILAGDFAVWKEQMVKKVSTRL

SEQ ID NO: 51421 - protein, 376 aa, Algoriphagus ratkowskyi
  REGION 1..376: note = tr|A0A2W7RKU7|A0A2W7RKU7_9BACT Queuine tRNA-ribosyltransferase OS=Algoriphagus ratkowskyi; OX = 57028 GN=tgt PE=3 SV=1
MKFTLEYSDSKSKARAGVVKTDHGEIQTPIFMPVGTAGSVKAVHQRELDQDIKAQIILGNTYHLYLRPGLDVLEKAGGLHKFNGWEKPILTDSGGYQVFSLSGTRKIKEDGVMFKSHIDGSKHHFTPENVMDIQRTIGADIVMAFDECTPYPCEYGYARNSMEMTHRWLTRCVGRFDETEGKYGYNQTLFPIVQGSVYKDLRKQSAEFIASTNQQGNAIGGLSVGEPAEMMYEMTELVTDILPKDKPRYLMGVGTPANILECIALGVDMFDCVMPTRNARNGMLFTSEGFINIRNEKWKDDFSGIDPAIGGYVSTFYSKAYLRHLTISKEILAAQIASIHNLSFYLWLVGQAREHILAGDFAVWKDQMVKKVSTRL

SEQ ID NO: 51422 - protein, 376 aa, Algoriphagus sp.
  REGION 1..376: note = tr|A0A418PTM4|A0A418PTM4_9BACT Queuine tRNA-ribosyltransferase OS=Algoriphagus sp. N3 OX=2056311; GN = tgt PE=3 SV=1
MKFTLGKKDTQTKARTGTLITDHGDIQTPIFMPVGTAATVKAVHQRELKDDIKAQIILGNTYHLYLRPGLDILEKAGGLHKFNGWDRPILTDSGGYQVFSLAGTRKIKEEGVMFKSHIDGSKHEFTPENVMDIQRTIGADIIMAFDECTPYPCEYGYARNSMELTHRWLKRCINRFDTTEGKYGYSQTLFPIVQGSVYKDLRKQSAEFIASCDREGNAIGGLSVGEPAEMMYEMTELVTDILPSDKPRYLMGVGTPANILECIALGVDMFDCVMPTRNARNGMLFTSEGIINIRNEKWKDDFNPIDPAIGNYASTFYSKAYLRHLTISKEILAAQIASIHNLAFYLWLVGQAREHILAGDFGVWKDHMVKKVSTRL

SEQ ID NO: 51423 - protein, 376 aa, Algoriphagus sp.
  REGION 1..376: note = tr|A0A142ESL6|A0A142ESL6_9BACT Queuine tRNA-ribosyltransferase OS=Algoriphagus sp. M8-2; OX = 1727163 GN=tgt PE=3 SV=1
MKFTLEKTDSQSKARVGLIETDHGTIQTPIFMPVGTAATVKAVHQRELKEDIKAQIILGNTYHLYLRPGLEVLEKAGGLHRFNGWDRPILTDSGGYQVFSLAGTRKIKEEGVTFKSHIDGSKHNFTPENVMDIQRTIGADIIMAFDECTPYPCEYGYARNSMDLTHRWLKRCISRFDSTEGKYGYSQTLFPIVQGSVYKDLRKQSAEFIAEQGREGNAIGGLSVGEPAEMMYEMTELVTDILPTEKPRYLMGVGTPANILECIALGVDMFDCVMPTRNARNGMLFTSEGIINIRNEKWKDDFTSIDPAIGNYASTFYTKAYLRHLTISKEILAAQIASIHNLAFYLWLVNQAREHILAGDFAVWKDQMVKKVSTRL

SEQ ID NO: 51424 - protein, 385 aa, Algoriphagus yeomjeoni
  REGION 1..385: note = tr|A0A327PBB0|A0A327PBB0_9BACT Queuine tRNA-ribosyltransferase OS=Algoriphagus yeomjeoni; OX = 291403 GN=tgt PE=3 SV=1
MSQQQPISDMKFTLAQQDSKSKARAGVIKTDHGDIQTPIFMPVGTAGSVKAVHQRELDQDVKAQIILGNTYHLYLRPGLDVLEKAGGLHKFNGWEKPILTDSGGYQVFSLSGTRKIKEDGVMFKSHIDGSKHHFTPENVMDIQRTIGADIIMAFDECTPYPCEYGYARNSMEMTHRWLTRCINQFDATEGKYGYNQTLFPIVQGSVYKDLRKQSAEFIASTNQQGNAIGGLSVGEPAEMMYEMTELVTDILPQDKPRYLMGVGTPANILECIALGVDMFDCVMPTRNARNGMLFTSEGFINIRNEKWKEDFSAIDPAIGGYVSTFYSKAYLRHLTVSKEILAAQIASIHNLSFYLWLVGQAREHILAGDFAVWKDQMVKKVSTRL

SEQ ID NO: 51425 - protein, 395 aa, unidentified
  source 1..395: note = Algoriphagus zhangzhouensis
  REGION 1..395: note = tr|A0A1M7ZII6|A0A1M7ZII6_9BACT Queuine tRNA-ribosyltransferase OS=Algoriphagus zhangzhouensis; OX = 1073327 GN=tgt PE=3 SV=1
MQAKPIKTWIISTGQKSKKMKFTLQHADPQSKARAGQLETDHGTIQTPIFMPVGTAASVKAVHQRELKEDIKAQIILGNTYHLYLRPGLDVLEKAGGLHKFNGWDGPILTDSGGYQVFSLSGTRKIKEDGVMFKSHIDGSKHHFTPENVMDIQRTIGADIIMAFDECTPYPCEYGYARNSMEMTHRWLDRCIDRFDSTEGKYGYSQTLFPIVQGSVYKDLRQKSAEFIASRGREGNAIGGLSVGEPAEMMYEMTELVTDILPNDKPRYLMGVGTPANILECIALGVDMFDCVMPTRNARNGMLFTSEGIINIRNEKWKDDFTPIDPAIGNYASTFYSKAYLRHLTISKEILAAQIASIHNLAFYLWLVGQAREHILAGDFAVWKDHMVKKVSTRL

SEQ ID NO: 51426 - protein, 390 aa, Alicycliphilus denitrificans
  REGION 1..390: note = tr|A0A3R7IGY3|A0A3R7IGY3_9BURK Queuine tRNA-ribosyltransferase OS=Alicycliphilus denitrificans; OX = 179636 GN=tgt PE=3 SV=1
MLQFQLLANDPSSHARRGTLTLNHGVVQTPIFMPVGTYGTVKGVMPRSLREMGAQIILGNTFHLWMRPGLDIVKDFGGLHGFEQWDRPILTDSGGFQVWSLGAMRKITEEGVHFASPVNGDKLFMSPEVSMQIQTILNSDIVMQLDECTPYETNGHKTTEAEARKSMEMSRRWAARSKAEFERLANPNALFGIVQGGMYEHLRQESLDALVEMDFPGYAIGGVSVGEPKDEMLRIMAHTPHRLPAHKPRYLMGVGTPEDLVEGVAQGVDMFDCVMPTRNARNGTIFTRYGDLKIRNARHKTDHQPLDPSCTCHACAGTEGVAWNDGGRGGFSRAYLHHLDRCGEMLGPMLTTIHNLHYYLNLMQEIRDALDAGAFAAFRARFKADRARGV

SEQ ID NO: 51427 - protein, 390 aa, Alicycliphilus denitrificans
  REGION 1..390: note = tr|E8TTQ6|E8TTQ6_ALIDB Queuine tRNA-ribosyltransferase OS=Alicycliphilus denitrificans (strain DSM 18852 / JCM 14587 / BC) OX=596153 GN=tgt PE=3; SV = 1
MLQFQLLATDPSSHARRGTLTLNHGVVQTPIFMPVGTYGTVKGVMPRSLREMGAQIILGNTFHLWMRPGLDIVKDFGGLHGFEQWDRPILTDSGGFQVWSLGAMRKITEEGVHFASPVNGDKLFMSPEVSMQIQTILNSDIVMQLDECTPYETNGHKTTEAEARKSMEMSRRWAARSKAEFERLANPNALFGIVQGGMYEHLRQESLDALVEMDFPGYAIGGVSVGEPKDEMLRIMAHTPHRLPAHKPRYLMGVGTPEDLVEGVAQGVDMFDCVMPTRNARNGTLFTRYGDLKIRNARHKADHQPLDPSCTCHACAGTEGVAWNDGGRGGFSRAYLHHLDRCGEMLGPMLTTIHNLHYYLRLMQEIRDALDAGAFAAFRARFKADRARRV

SEQ ID NO: 51428 - protein, 459 aa, Alicycliphilus sp.
  REGION 1..459: note = tr|A0A0E9LJA1|A0A0E9LJA1_9BURK Queuine tRNA-ribosyltransferase OS=Alicycliphilus sp. B1; OX = 1603291 GN=tgt PE=3 SV=1
MLQFQLLATDPSSHARRGTLTLNHGVVQTPIFMPVGTYGTVKGVMPRSLREMGAQIILGNTFHLWMRPGLDIVKDFGGLHGFEQWDRPILTDSGGFQVWSLGAMRKITEEGVHFASPVNGDKLFMSPEVSMQIQTILNSDIVMQLDECTPYETNGHKTTEAEARKSMEMSRRWAARSKAEFERLANPNALFGIVQGGMYEHLRQESLDALVEMDFPGYAIGGVSVGEPKDEMLRIMAHTPHRLPAHKPRYLMGVGTPEDLVEGVAQGVDMFDCVMPTRNARNGTLFTRYGDLKIRNARHKADHQPLDPSCTCHACAGTEGVAWNDGGRGGFSRAYLHHLDRCGEMLGPMLTTIHNLHYYLRLMQEIRDALDAGAFAAFRARFKADRARRRLMDQPCAAAAAPQAWQNRANALLRVLQCPQRSNSPMPQCGQKSIFSFFKSTARSQPGHTPLAWRARATS

SEQ ID NO: 51429 - protein, 379 aa, Alicyclobacillus acidocaldarius
  REGION 1..379: note = tr|B7DNX2|B7DNX2_9BACL Queuine tRNA-ribosyltransferase OS=Alicyclobacillus acidocaldarius LAA1 OX=543302 GN=tgt PE=3 SV=1
MQAPVRYELLKRCSRTEARRGRLFTPHGVIDTPVFMPVGTQATVKTMAPWELEELGAGIILANTYHLHLRPGEDIVQRAGGLHAFMQWKGAILTDSGGFQVFSLASLRKITDEGVQFRSHIDGSPRFFSPETVMAIENALGADIIMQLDECPPYGASRSYLETSLRRTLAWAKRCKDAHARPEDQALFGIVQGGEHLDLRRRAVEELVELDLPGYAIGGLSVGEPKPLMYEILSHVAPLLPQGKPRYLMGVGSPDDLFEGVERGVDMFDCVLPTRIARNGTVFTSTGKMVMKHAQYRDDFRPIDPSCSCRVCRTFSRAYVRHLLKAEEILGVRLTTYHNVHFLLNLMKEIRKSIEEDRFLAFKREFYDRYGYTSEREDV

SEQ ID NO: 51430 - protein, 375 aa, Alicyclobacillus acidocaldarius
  REGION 1..375: note = tr|F8IFP9|F8IFP9_ALIAT Queuine tRNA-ribosyltransferase OS=Alicyclobacillus acidocaldarius (strain Tc-4-1) OX=1048834 GN=tgt PE=3 SV=1
MRYELLKRCSRTEARRGRLYTPHGVIDTPVFMPVGTQATVKTMAPWELEELGAGIILANTYHLHLRPGEDIVQRAGGLHGFMQWKGAILTDSGGFQVFSLASLRKITDEGVQFRSHIDGSPRFFSPETVMAIENALGADIIMQLDECPPYGATRSYLETSLRRTLAWAKRCKESHARPEEQALFGIVQGGEHLDLRRQAVEALVELDLPGYAIGGLSVGEPKSLMYEILSHVAPLLPEEKPRYLMGVGSPDDLFEGVERGVDMFDCVLPTRIARNGTVFTSTGKMVMKHAQYRDDLLPIDPSCSCRVCRTFSRAYIRHLLKAEEILGVRLTTYHNVHFLLNLMREIRKSIEEDRFLAFKREFYSRYGYTSEREDV

SEQ ID NO: 51431 - protein, 380 aa, Alicyclobacillus acidoterrestris
  REGION 1..380: note = tr|A0A512CSC3|A0A512CSC3_9BACL Queuine tRNA-ribosyltransferase OS=Alicyclobacillus acidoterrestris OX=1450 GN=tgt PE=3 SV=1
MTVPVRYELIQRCKDTSARRGRVYTPHGVIETPVFMPVGTQATVKTMAPWELEELGAKIILSNTYHLHLRPGEELVKQGGGLHGFMNWSGAVLTDSGGFQVFSLSELRKITDEGVAFRSHIDGSPRFFSPESVMGIENALGADIIMQLDECPPYPASREYLRTSLDRTLAWAKRCVAAHARPDEQALFGIVQGGEHLDLRREAAEALVELDLPGYAIGGLSVGEPKSLMYEILAYTTPFLPVDKPRYLMGVGSPDDLFEGVERGVDMFDCVLPTRIARNGTIFTSKGKLVLKNARFKDDFSPIDEDCDCRVCKTFTRAYIRHLLKAEEVLGIRLTTYHNVHFLLDLMEKMRKSIEENRFLAFKREFYDSYGYTEHREDVF

SEQ ID NO: 51432 - protein, 380 aa, Alicyclobacillus acidoterrestris
  REGION 1..380: note = tr|T0DN36|T0DN36_ALIAG Queuine tRNA-ribosyltransferase OS=Alicyclobacillus acidoterrestris (strain ATCC 49025 / DSM 3922 / CIP 106132 / NCIMB 13137 / GD3B) OX=135685 4 GN=tgt PE=3 SV=1
MTVPVRYELIQRCKDTSARRGRVYTPHGVIETPVFMPVGTQATVKTMAPWELEELGAKIILSNTYHLHLRPGEELVKQGGGLHGFMNWSGAVLTDSGGFQVFSLSELRKITDEGVAFRSHIDGSPRFFSPESVMGIENALGADIIMQLDECPPYPASREYLRTSLDRTLAWAKRCVAAHARPDEQALFGIVQGGEHLDLRREAAEALVDLDLPGYAIGGLSVGEPKPLMYEILAYTTPFLPADKPRYLMGVGSPDDLFEGVERGIDMFDCVLPTRIARNGTIFTSKGKLVLKNARFKDDFSPIDEDCNCRVCKTFTRAYIRHLLKAEEVLGIRLTTYHNVHFLLDLMEKMRKSIEENRFLAFKREFYDSYGYTEHREDVF

SEQ ID NO: 51433 - protein, 381 aa, Alicyclobacillus ferrooxydans
  REGION 1..381: note = tr|A0A0P9CRV2|A0A0P9CRV2_9BACL Queuine tRNA-ribosyltransferase OS=Alicyclobacillus ferrooxydans; OX = 471514 GN=tgt PE=3 SV=1
MTQPIRYELLRRDEHSLARRGRLTTPHGVIETPVFMPVGTQATVKTMAPWELAEVGAGIILSNTYHLHLRPGEELVRKAGGLHGFMHWDGAVLTDSGGFQVFSLADLRKITDDGVTFRSHLDGSLHSFTPESVMEIENALGADIIMAFDECPPYPATREYVETSLRRTLDWAARCKAAHRRPDEQGLFGIVQGGEHIDLRKESAQRLVELDFPGYAIGGLSVGEPKPLMYEILSATTPWLPADKPRYLMGVGSPDDLFEGVERGVDMFDCVLPTRIARNGTVLTSEGKRVMKNARYGDDFLPLDPNCQCKVCQTFSRAYIRHLLKADEVLGIRLTTYHNVYFMLDLMKQIRQSLDEGRFLLYKQEFYARYGYNETNAGEEV

SEQ ID NO: 51434 - protein, 381 aa, Alicyclobacillus hesperidum
  REGION 1..381: note = tr|A0A1H2Q2S1|A0A1H2Q2S1_9BACL Queuine tRNA-ribosyltransferase OS=Alicyclobacillus hesperidum; OX = 89784 GN=tgt PE=3 SV=1
MKQPVTYERIARCSHTLARRGRVHTPHGEIETPVFMPVGTQATVKTMAPWELTELGAQIILSNTYHLHLRPGEDIVRQAGGLHGFMQWPGAVLTDSGGFQVFSLASLRKITDEGVAFRSHIDGSPRFFSPESVMGIENALGADIIMQLDECPPYPASRGYLRTSLDRTLAWAKRCKEAHRRPEEQALFGIVQGGEHLDLRREAAERLVELDLPGYAVGGLSVGEPKPLMYEILAYTTPLLPADKPRYLMGVGSPDDLFEGVERGIDMFDCVLPTRIARNGTVFTATGKRVLKHARYRDDFRPLDEACSCRVCKTFSRAYIRHLLKADEILGLRLTSYHNVHFLLDMMAKIRKSIEEDRFLQLKREFYETYGYTGQREDVLD

SEQ ID NO: 51435 - protein, 381 aa, Alicyclobacillus hesperidum
  REGION 1..381: note = tr|J9HF84|J9HF84_9BACL Queuine tRNA-ribosyltransferase OS=Alicyclobacillus hesperidum URH17-3-68 OX=1200346 GN=tgt PE=3 SV=1
MKQPVTYERIARCSHTLARRGRVHTPHGEIETPVFMPVGTQATVKTMAPWELTELGAQIILSNTYHLHLRPGEDIVRQAGGLHGFMQWPGAVLTDSGGFQVFSLASLRKITDEGVAFRSHIDGSPRFFSPESVMGIENALGADIIMQLDECPPYPASREYLRTSLDRTLAWAKRCKEAHRRPEEQALFGIVQGGEHLDLRREAAERLVELDLPGYAVGGLSVGEPKPLMYEILAYTTPLLPADKPRYLMGVGSPDDLFEGVERGIDMFDCVLPTRIARNGTVFTATGKRVLKHARYRDDFRPLDEACSCRVCKTFSRAYIRHLLKADEILGLRLTSYHNVHFLLDMMAKIRKSIEEDRFLQLKREFYETYGYTGQREDVLD

SEQ ID NO: 51436 - protein, 383 aa, Alicyclobacillus macrosporangiidus
  REGION 1..383: note = tr|A0A1I7J0C6|A0A1I7J0C6_9BACL Queuine tRNA-ribosyltransferase OS=Alicyclobacillus macrosporangiidus OX=392015 GN=tgt PE=3 SV=1
MEPVRFELIRRCPRTLARRGRLHTPHGTVETPVFMPVGTQATVKTMAPWELAEMGAGIILSNTYHLHLRPGEDMVREMGGLHAFMQWPGAILTDSGGFQVFSLADLRKITDEGVQFRSHLDGSLRFFSPERVMEIENALGADIIMAFDECPPYPASREYLETSLRRTLDWARRCQRAHARPEEQALFGIVQGGEHLDLRRQAVEALVELDLPGYAVGGLSVGEPKPVMHEVLAYTTPLLPADKPRYLMGVGTPEDLFEGVERGIDMFDCVLPTRIARNGTVLTSRGKLVIRNARYARDPRPLDEACDCRVCRTFSRAYIRHLIKAGEVLGIRLTTYHNVYFLLRLMEGIRRAIEAGRFPEYKREFYDTYGYNESGNIGEEGLD

SEQ ID NO: 51437 - protein, 378 aa, unidentified
  source 1..378: note = Alicyclobacillus montanus
  REGION 1..378: note = tr|A0A1M6KAJ1|A0A1M6KAJ1_9BACL Queuine tRNA-ribosyltransferase OS=Alicyclobacillus montanus; OX = 1830138 GN=tgt PE=3 SV=1
MTSSIQFKILSTSSNTNARRGRLITPHGTIDTPVFMPVGTQATVKTLSPFELREMGAGIILSNTYHLHLRPGEDLVDEAGGLHQFMRWPGAVLTDSGGFQVFSLAKLRKITDEGVTFRSHIDGSPRFFSPETVMEIENKLGADIIMAFDECPPYPATREYIETSLKRTLAWAKRCKASHQRSDQQALFGIVQGGMYADLRREAALSLVDLDFPGYAIGGLSVGEPKPMMNEVLADVVCHLPVDKPRYLMGVGSPDDLFEGVERGVDMFDCVLPTRIARNGTVMTSRGKVVLKNAQYSRDFGPLDENCDCQVCKVYTRAYLRHLLKAGEVLGIRLTSYHNVYFLLDMMKKIRKSIEEDRFLAFKREFYESYGFASNDSE

SEQ ID NO: 51438 - protein, 381 aa, Alicyclobacillus sacchari
  REGION 1..381: note = tr|A0A4R8LU61|A0A4R8LU61_9BACL Queuine tRNA-ribosyltransferase OS=Alicyclobacillus sacchari; OX = 392010 GN=tgt PE=3 SV=1
MKQPVTYELIGRCSHTLARRGRVHTPHGAIETPVFMPVGTQATVKTMAPWELTELGAQIILSNTYHLHLRPGEDIVRQAGGLHGFMQWPGAVLTDSGGFQVFSLASLRKITDEGVAFRSHIDGSPRFFSPESVMGIENALGADIIMQLDECPPYPASREYLRTSLERTLAWAKRCKEAHRRPDEQALFGIVQGGEHLDLRREAAERLVELDLPGYAVGGLSVGEPKPLMYDILGYTTPFLPADKPRYLMGVGSPDDLFEGVERGIDMFDCVLPTRIARNGTVFTATGKRVLKHARYRDDFRPLDEACSCRVCQTFSRAYIRHLLKADEILGLRLTSYHNVHFLLDMMARIRKSIEEDRFLQLKREFYETYGYTGQREDVLD

SEQ ID NO: 51439 - protein, 381 aa, unidentified
  source 1..381: note = Alicyclobacillus tengchongensis
  REGION 1..381: note = tr|A0A0V0PS25|A0A0V0PS25_9BACL Queuine tRNA-ribosyltransferase OS=Alicyclobacillus tengchongensis; OX = 368812 GN=tgt PE=3 SV=1
MKQPVTYELIGRCSHTLARRGRVHTPHGAIETPVFMPVGTQATVKTMAPWELTELGAQIILSNTYHLHLRPGEDIVRQAGGLHGFMQWPGAVLTDSGGFQVFSLASLRKITDEGVAFRSHIDGSPRFFSPESVMGIENALGADIIMQLDECPPYPASREYLRTSLDRTLAWAKRCKEAHRRPEEQALFGIVQGGEHLDLRREAAERLVELDLPGYAVGGLSVGEPKPLMYEILAYTTPLLPADKPRYLMGVGSPDDLFEGVERGIDMFDCVLPTRIARNGTVFTATGKRVLKHARYRDDFSPLDEACSCRVCKTFSRAYIRHLLKADEILGLRLTSYHNVHFLLDMMAKIRKSIEEDRFLQLKREFYETYGYTGQREDVLD

SEQ ID NO: 51440 - protein, 380 aa, Alicyclobacillus vulcanalis
  REGION 1..380: note = tr|A0A1N7P9G2|A0A1N7P9G2_9BACL Queuine tRNA-ribosyltransferase OS=Alicyclobacillus vulcanalis; OX = 252246 GN=tgt PE=3 SV=1
MLQAPVRFELIKRCSQTEARRGRLFTPHGVIETPVFMPVGTQATVKTMAPWELEELGAGIILSNTYHLHLRPGEDVVARAGGLHGFMQWKGAVLTDSGGFQVFSLASLRKITDEGVRFRSHIDGSPRFFSPETVMAIENALGADIIMQLDECPPYGATRSYLETSLQRTLAWAKRCKAAHARPEDQALFGIVQGGEHLDLRRRAVEELAELDLPGYAIGGLSVGEPKPLMYEILGHVAPLMPRDKPRYLMGVGSPDDLLEGVERGVDMFDCVLPTRIARNGTVFTSAGKVVMKHAKYREDFGPIDPACSCRVCRTFSRAYIRHLLKADEILGVRLTTYHNVHFLLNLMREIRKSIEEDRFLAFKREFYDRYGYTSEREDV

SEQ ID NO: 51441 - protein, 371 aa, unidentified
  source 1..371: note = Aliidiomarina haloalkalitolerans
  REGION 1..371: note = tr|A0A432VTJ4|A0A432VTJ4_9GAMM Queuine tRNA-ribosyltransferase OS=Aliidiomarina haloalkalitolerans OX=859059 GN=tgt PE=3 SV=1
MKFELLKKTGKARRGQLKFARGTVDTPAFMPVGTLGTVKGMSPEELADTGAQICLGNTFHLMLRPGTSIIRQHGDLHDFMNWDKPILTDSGGFQVFSLGDLRKISEEGVTFRSPINGEKILLTPEKSMEVQRELGSDIVMIFDECTPYPATEKQAEDSMQLSLRWAERSKTAHGDNEAALFGIIQGGMYEHLRDVSLNGLTAIGFDGYAIGGLSVGEPKEDMMRILEHTAPQMPEDKPRYLMGVGKPEDLVEAVRRGIDMFDCVMPTRNARNGHLFTSEGVIKIRNARHRTDTAPLDPECDCYTCQNYSRAYLHHLDRCNEILGARLNTIHNLHFYQSLMKGMRDAIENDQFDQFVETFYAKRGETVPELD

SEQ ID NO: 51442 - protein, 371 aa, unidentified
  source 1..371: note = Aliidiomarina iranensis
  REGION 1..371: note = tr|A0A432VV57|A0A432VV57_9GAMM Queuine tRNA-ribosyltransferase OS=Aliidiomarina iranensis; OX = 1434071 GN=tgt PE=3 SV=1
MKFELLKSTGKVRRGRMTFERGTVETPAFMPVGTLGTVKGMSPEELKATGAEICLGNTFHLMLRPGTQIIQQHGDLHDFMNWDKPILTDSGGFQVFSLGDLRKISEEGVVFRSPINGEKILLTPEKSMEVQRELGSDIVMIFDECTPHPATVKQAEDSMQLSLRWAQRSKEAHGDSKAALFGIIQGGMYEDLRDVSLTGLTNIGFDGYAIGGLSVGEPKEDMMRILDHVAPKMPEDKPRYLMGVGKPEDLVEAVRRGVDMFDCVMPTRNARNGHLFTSEGVIKIRNARHRTDTSPLDSRCDCYTCKHYSRAYLHHLDRCNEILGARLNTIHNLHYYQALMQGMRDAIENDQFDQFVNEFYAQRGENVPESA

SEQ ID NO: 51443 - protein, 425 aa, unidentified
  source 1..425: note = Aliidiomarina maris
  REGION 1..425: note = tr|A0A327WS59|A0A327WS59_9GAMM Queuine tRNA-ribosyltransferase OS=Aliidiomarina maris OX=531312; GN = tgt PE=3 SV=1
MQRIKLAVHCDGNLKSIAQADKSARGCPFTERFVYNRASLCNINVVTMKFELDTTSGRARRGRMVFARGTVETPAFMPVGTLGTVKGMTPEEVKETGAQICLGNTFHLMLRPGTQIIQQHGDLHDFMHWDGPILTDSGGFQVFSLGELRKISEEGATFRSPINGEKILLTPEKSMQVQRELGSDIVMIFDECTPYPATYEQAQVSMELSLRWAQRSKDAHEGNPAALFGIIQGGMYEDLRDVSLHGLTDIGFDGYAIGGLSVGEPKEDMMRVLDHTAPQMPVDKPRYLMGVGKPEDLVEAVRRGVDMFDCVMPTRNARNGHLFVSDGVLKIRNAKHRTDPSPLDANCDCYTCKNYSRAYLHHLDRCNEILGARLNTIHNLRFYQIVMQGMRDALDNGTFDDFVSEFYAQRGLPVPPLGDAPAASA

SEQ ID NO: 51444 - protein, 375 aa, unidentified
  source 1..375: note = Aliidiomarina minuta
  REGION 1..375: note = tr|A0A432W4A9|A0A432W4A9_9GAMM Queuine tRNA-ribosyltransferase OS=Aliidiomarina minuta OX=880057; GN = tgt PE=3 SV=1
MKFELDKTIGRARRGRMIFERGTVETPAFMPVGTLGTVKGMTPEELKETGAQICLGNTFHLMLRPGTQIIQQHGDLHDFMHWDGPILTDSGGFQVFSLGELRKITEEGATFRSPINGEKILLTPEKSMQVQRELGADIVMIFDECTPHPATTEEAETSMQLSLRWAQRSKEAHEGNSAALFGIIQGGMYEELRDVSLNGLTDIGFDGYAIGGLSVGEPKEDMMRILDHTAPQMPEDKPRYLMGVGKPEDLVEAVRRGIDMFDCVMPTRNARNGHLFVSEGVLKIRNARHRTDTSPLDASCDCYTCKNYSRAYLHHLDRCNEILGARLNTIHNLRFYQNVMQGLRDAIATDTLDQFVAEFYASRDLPVPVLPWEEA

SEQ ID NO: 51445 - protein, 371 aa, unidentified
  source 1..371: note = Aliidiomarina sanyensis
  REGION 1..371: note = tr|A0A432WCS1|A0A432WCS1_9GAMM Queuine tRNA-ribosyltransferase OS=Aliidiomarina sanyensis; OX = 1249555 GN=tgt PE=3 SV=1
MKFELKKTIGKARRGQLQFDRGVVDTPAFMPVGTLGTVKGMTPEELKDTGAQICLGNTFHLMLRPGTSIVQQHGDLHDFMHWDKPILTDSGGFQVFSLGDLRKISEEGVTFRSPINGEKILLTPEKSMEVQRELGSDIVMIFDECTPYPATEKQAEDSMQLSLRWAERSKTAHGDSSAALFGIIQGGMYEHLRDVSLAGLTEIGFDGYAIGGLSVGEPKEDMMRILDHTAPKMPADKPRYLMGVGKPEDLVEAVRRGIDMFDCVMPTRNARNGHLFTSEGVIKIRNARHRTDTAPLDPECDCYTCKNYSRAYLHHLDRCNEILGARLNTIHNLHFYQTLMKGMRDAIENDQFDQFVADFYAKRGESVPPLD

SEQ ID NO: 51446 - protein, 371 aa, unidentified
  source 1..371: note = Aliidiomarina shirensis
  REGION 1..371: note = tr|A0A432WQX3|A0A432WQX3_9GAMM Queuine tRNA-ribosyltransferase OS=Aliidiomarina shirensis; OX = 1048642 GN=tgt PE=3 SV=1
MKFELIKSIGKVRRGRMTFDRGTVETPAFMPVGTLGTVKGMSPEELKATGAEICLGNTFHLMLRPGTQIIQQHGDLHDFMNWDKPILTDSGGFQVFSLGDLRKISEEGVVFRSPINGEKILLTPEKSMEVQRELGSDVVMIFDECTPHPATVKQAEDSMQLSLRWAQRSKEAHGDSKAALFGIIQGGMYEDLRDVSLTGLTNIGFDGYAIGGLSVGEPKEDMMRILDHVAPKMPEDKPRYLMGVGKPEDLVEAVRRGVDMFDCVMPTRNARNGHLFTSEGVVKIRNARHRTDTAPLDTSCDCYTCKHYSRAYLHHLDRCNEILGARLNTIHNLHYYQALMQGMRDAIENDQFDQFVSDFYAKRGENVPESA

SEQ ID NO: 51447 - protein, 372 aa, unidentified
  source 1..372: note = Aliidiomarina soli
  REGION 1..372: note = tr|A0A432WDV2|A0A432WDV2_9GAMM Queuine tRNA-ribosyltransferase OS=Aliidiomarina soli OX=1928574; GN = tgt PE=3 SV=1
MKFELDTTSGQARRGRMIFQRGTVETPAFMPVGTLGTVKGMTPEEVRETGAQICLGNTFHLMLRPGTQIIQQHGDLHDFMHWDGPILTDSGGFQVFSLGELRKISEEGATFRSPINGEKILLTPEKSIQVQRELGSDIVMIFDECTPHPATEEQAKSSMELSLRWAQRSKDAHEGNPAALFGIIQGGMYEELRDVSLNGLTDIGFDGYAIGGLSVGEPKEDMMRILSHTAPQMPADKPRYLMGVGKPEDLVEAVRRGVDMFDCVMPTRNARNGHLFVSDGVLKIRNARHRTDPGPLDETCDCYTCKNYSRAYLHHLDRCNEILGARLNTIHNLRFYQVVMQGMRDALDNGTFDDFVENFYAKRSLPVPALND

SEQ ID NO: 51448 - protein, 371 aa, Aliidiomarina sp.
  REGION 1..371: note = tr|A0A552X0M9|A0A552X0M9_9GAMM Queuine tRNA-ribosyltransferase OS=Aliidiomarina sp. IM1326; OX = 2593535 GN=tgt PE=3 SV=1
MKFELMKTAGRARRGQLQFERGVVDTPAFMPVGTLGTVKGMSPEELKDTGAQICLGNTFHLMLRPGTSIIRQHGDLHDFMNWDRPILTDSGGFQVFSLGELRKISEEGVTFRSPINGEKILLTPEKSMEVQRELGADVVMIFDECTPYPATEKQAEDSMQLSLRWAERSKEAHSDNPAALFGIIQGGMYEELRDVSLEGLTNIGFDGYAIGGLSVGEPKDDMMRILDHTAPKMPEDKPRYLMGVGKPEDLVEAVRRGVDMFDCVMPTRNARNGHLFTSEGVIKIRNARHRTDTAPLDADCDCYTCQNYSRAYLHHLDRCNEILGARLNTIHNLHYYQTLMQGMRDAIENDQFDQFVAAFYAKRGENVPPLD

SEQ ID NO: 51449 - protein, 372 aa, Aliidiomarina taiwanensis
  REGION 1..372: note = tr|A0A432X1J7|A0A432X1J7_9GAMM Queuine tRNA-ribosyltransferase OS=Aliidiomarina taiwanensis; OX = 946228 GN=tgt PE=3 SV=1
MSFELISTTGKARRGRLTFPRGEVDTPAFMPVGTLGTVKGMTPEEVAATGAQICLGNTFHLMLRPGTDIIEQHGDLHDFMNWEKPILTDSGGFQVFSLGKLRKISEEGVDFRSPINGEKIMLTPEISIDVQRKLGSDIVMIFDECTPYPATHEEARVSMELSLRWAERSKRAHEGNDAALFGIVQGGMYEELRTISLEGLESIGFDGYAIGGLSVGEPKEDMMRILDHITPEMPEHKPRYLMGVGKPEDLVEAVRRGVDMFDCVMPTRNARNGHLFVREGVIKIRNARHKTDTGPLDPECSCYTCQNYSRAYLHHLHRSNEILGARLNTIHNLQYYQDVMQGMRHALDNNTFEDFVTEFYERKGLDVPDLLK

SEQ ID NO: 51450 - protein, 375 aa, unidentified
  source 1..375: note = Aliifodinibius roseus
  REGION 1..375: note = tr|A0A1M4XXR3|A0A1M4XXR3_9BACT Queuine tRNA-ribosyltransferase OS=Aliifodinibius roseus; OX = 1194090 GN=tgt PE=3 SV=1
MFDLHKTALSTKARMGTLSTDHGTISTPIFMPVGTLGTVKAVKQDELIDKVKAQIILGNTYHLYLRPGCDIIENAGGLHSFINWDHPILTDSGGYQIFSLSDNRELKEEGAHFKSHLDGSKHLFTPENVVDIQRTLGSDIIMVLDECPPYPSSRDYAKESMELTHRWEKRGRQAFLNTSSKYEHGQFQFGIVQGGTYPDLRKESSKYVTDLDFEGIAIGGLSVGEPTELMYEMTDLNTDYLPENKPRYLMGVGKPANLLHCIARGIDMFDCVLPTRNARNGQIFTRNGYINIRNAKWKNHNRPLDPDFPTDLCSQYKMSYIHHLFRNSELLGLELASLHNLTFYLWLMEKVKERIANDSFHNWYQEKAKVLDTKI

SEQ ID NO: 51451 - protein, 375 aa, unidentified
  source 1..375: note = Aliifodinibius sediminis
  REGION 1..375: note = tr|A0A521F449|A0A521F449_9BACT Queuine tRNA-ribosyltransferase OS=Aliifodinibius sediminis; OX = 1214077 GN=tgt PE=3 SV=1
MFELHKTATTTKARLGTLTTDHGTIETPIFMPVGTLGTVKAVKQDELIRKVKAQIILGNTYHLYLRPGCEIIENAGGLHSFISWDHPILTDSGGYQIFSLSDNRELKEEGAHFKSHLDGSKHLFTPENVVEIQRILGSDIMMILDECPPYPSSHDYAKESMELTHRWEKRGRDAFLNSIPHYNHQQFQFGIVQGGTYPDLRKESAKYITDLDFEGIAIGGLSVGEPIELMYEMTDLNTDYLPKEKPRYLMGVGKPANLLHCIARGIDMFDCVLPTRNARNGQIFTPDGYVNIRNAKWKNHNRPLDPDFPTDLCSRYKMSYIHHLFRNNELLGLALASLHNLTFYLWLMEEARNRIADDTFHSWYKQKAELLDTKI

SEQ ID NO: 51452 - protein, 375 aa, unidentified
  source 1..375: note = Aliifodinibius sp.
  REGION 1..375: note = tr|A0A2A2G746|A0A2A2G746_9BACT Queuine tRNA-ribosyltransferase OS=Aliifodinibius sp. WN023; OX = 2032627 GN=tgt PE=3 SV=1
MFKLKKTASSTKARLGTLSTDHGKIDTPIFMPVGTLGTVKAVKQDELIDKVKAQIILGNTYHLYLRPGCDIIENAGGLHSFINWDRPILTDSGGYQIFSLSDNRELTEEGAKFKSHLDGSKHMFTPENIVDIQRTLGSDIMMVLDECPPYPSSYEYAKESMELTHRWEKRGREAFLNTKPKYSHKQAQFGIVQGGTYEDLRIESSKYVTDLDFEGIAIGGLSVGEPTELMYEMTDLNTDYLPEDKPRYLMGVGKPENLLHAIARGIDMFDCVLPTRNARNGQIFTRNGYINIRNAKWKNHQKPLDPDFPTDLCQKYKMSYIHHLFRNNELLGLELASLHNLTFYLWLMDKVKERITNDTFHTWYKEKAEVLGTKI

SEQ ID NO: 51453 - protein, 370 aa, unidentified
  source 1..370: note = Aliiglaciecola lipolytica
  REGION 1..370: note = tr|K6YH36|K6YH36_9ALTE Queuine tRNA-ribosyltransferase OS=Aliiglaciecola lipolytica E3; OX = 1127673 GN=tgt PE=3 SV=1
MKFELDTTDGKARRGRLVFDRGVVETPAFMPVGTYGTVKGMTPEELDETGAHICLGNTFHLMLRPGTEIMKQHGDLHDFMHWDKPILTDSGGFQVFSLGDLRKITEEGVTFRSPINGEKILLTPEKSMEVQRDLGSDIVMIFDECTPYPATEPDARRSMELSLRWAKRSKQAHEGNPSALFGIIQGGMYEGLRDQSLKGLEDIGFDGYAIGGLSVGEPKEDMIRILDHTADKIPAEKPRYLMGVGRPEDIVEAVRRGIDMFDCVMPTRNARNGHLFVTEGVIKIRNAKHKTDIGPLDEKCDCYTCKNYSRSYLHHLDKCNEILGARLNTIHNLRYYQRVMQGLRDAIAEQKLDQFVEQFYAQKDMPVPAL

SEQ ID NO: 51454 - protein, 374 aa, unidentified
  source 1..374: note = Aliiglaciecola sp.
  REGION 1..374: note = tr|A0A553KXU1|A0A553KXU1_9ALTE Queuine tRNA-ribosyltransferase OS=Aliiglaciecola sp. M165; OX = 2593649 GN=tgt PE=3 SV=1
MKFELETTDGNARRGRLVFERGVVETPAFMPVGTYGTVKGMTPEELKDTGAHICLGNTFHLMLRPGTEIMKQHGDLHDFMHWDKPILTDSGGFQVFSLGDLRKITEEGVTFRSPINGEKILLTPEKSMEVQKDLGSDIVMIFDECTPYPATEAEARRSMELSLRWAKRSKDSHQGNPSALFGIIQGGMYEGLRDLSLKGLEDIGFDGYAIGGLSVGEPKEDMIRVLDHTAHKIPQDKPRYLMGVGRPEDIVEAVRRGIDMFDCVMPTRNARNGHLFVTDGVIKIRNAKHKTDTGPLDEKCDCYTCKNYSRSYLHHLDKCNEILGARLNTIHNLRYYQRVMQGLRDAIAEHKLDDFVAQFYADKNMPVPALEQQK

SEQ ID NO: 51455 - protein, 373 aa, unidentified
  source 1..373: note = Aliikangiella marina
  REGION 1..373: note = tr|A0A545TI04|A0A545TI04_9GAMM Queuine tRNA-ribosyltransferase OS=Aliikangiella marina OX=1712262; GN = tgt PE=3 SV=1
MKFKLLTTDGAARRAQLEFERGTVNTPAFMPVGTYGSVKGMSPERVEHTGAEIILGNTFHLMLRPGTEIIQMHGDLHDFTHWQGPILTDSGGFQVFSLGDLRKITEEGVTFRSPVNGEKVFLGPEESMQVQRELGSDIVMIFDECTPYPATEEEAKVSMELSLRWAKRSKEAHGDNPAALFGIVQGGMYPELREVSRIGLEAIGFDGYAIGGLSVGESKEEMKMVLDNLMPNMPDNKPRYLMGVGKPEDIVEAVRRGVDMFDCVIPTRNARNGHLFTSTGVVRIRNSPNKKDTGPIDPNCDCYTCQNYSRAYIHHMDKCGEMFGAELATIHNLHYYQHLMKGLREAIETGTLTDFVEKFYADRGLEVPPMASL

SEQ ID NO: 51456 - protein, 372 aa, unidentified
  source 1..372: note = Aliikangiella sp.
  REGION 1..372: note = tr|A0A545UA94|A0A545UA94_9GAMM Queuine tRNA-ribosyltransferase OS=Aliikangiella sp. M105; OX = 2592383 GN=tgt PE=3 SV=1
MKFTLQATDGQARRGQLSFERGTINTPAFMPVGTYGSVKGMSPERVVETGAEIILGNTFHLMLRPGTEIIQMHGDLHDFMNWQGPILTDSGGFQVFSLGELRKISEKGVTFRSPVNGDKVFLGPEESMQVQKALGSDIVMIFDECTPYPATEKQAKESMELSLRWAERSKIAHGDNKSALFGIVQGGMYPELREVSLQGLTKIGFDGYAIGGLSVGESKEEMRLVLNNLTPKMPTDKPRYLMGVGKPEDIVEAVRRGVDMFDCVMPTRNARNGHLFTSTGVVRLRNSPNKRDTGPIDDNCSCYTCANYSRAYLHHLDKCGEMFGAELATIHNLHYYQHLMKGLREAIETGTLCDFVENFYAARGLPVPPLEN

SEQ ID NO: 51457 - protein, 379 aa, unidentified
  source 1..379: note = Aliiroseovarius crassostreae
  REGION 1..379: note = tr|A0A0P7IGT2|A0A0P7IGT2_9RHOB Queuine tRNA-ribosyltransferase OS=Aliiroseovarius crassostreae; OX = 154981 GN=tgt PE=3 SV=1
MTQDTTTFSYTLKATDGRARTGVISTPRGEIRTPAFMPVGTAATVKAMMPESVAATGADILLGNTYHLMLRPTAERIHALGGLHKFMNWSKPILTDSGGFQVMSLSSLRKLTEKGVTFRSHIDGSKHELTPERSMEIQRLLGSDIVMCFDECPALPADRKRIAESMRLSMRWAERSREAFGDRPGHALFGIMQGGLEKDFREESAKALIEIGFDGYAIGGLAVGEGQEAMFDCLEFAPGFLPEDKPRYLMGVGKPDDIVGAVKRGVDMMDCVLPSRSGRTGQVWTRHGVLNIKNARHADDPRPVDENCTCPACRNYSRAYLHHVFRSNEMISGMLLTWHNLHYFQEIMQGMRDAIFEGRFDAWEAEFHAQRAQGDIAPL

SEQ ID NO: 51458 - protein, 380 aa, unidentified
  source 1..380: note = Aliiroseovarius halocynthiae
  REGION 1..380: note = tr|A0A545SS94|A0A545SS94_9RHOB Queuine tRNA-ribosyltransferase OS=Aliiroseovarius halocynthiae; OX = 985055 GN=tgt PE=3 SV=1
MTDQSTTKFSYTLKATDGRARTGVIHTPRGDIRTPAFMPVGTAATVKAMMPESVAATGADILLGNTYHLMLRPTAERIDRLGGLHKFMNWDKPILTDSGGFQVMSLAGLRKLTEKGVTFKSHIDGSKHELTPERSMEIQKLLGSDIVMCFDECPALPADRKRIAESMRLSMRWAQRSRDAFGDRPGHALFGIMQGGLEADLREESAKALREIEFDGYAIGGLAVGEGQEAMFDCLDYAPGYLPEDKPRYLMGVGKPDDIVGAVKRGVDMMDCVLPSRSGRTGQVWTRHGVLNIKNARHQDDPRPIDENCTCPACQNYSRAYLHHVFRSNEMISGMLLTWHNLHYFQEIMQGMRDAISEGRFDAWEADFHANRAQGDIDPL

SEQ ID NO: 51459 - protein, 380 aa, unidentified
  source 1..380: note = Aliiroseovarius pelagivivens
  REGION 1..380: note = tr|A0A2R8AL92|A0A2R8AL92_9RHOB Queuine tRNA-ribosyltransferase OS=Aliiroseovarius pelagivivens; OX = 1639690 GN=tgt PE=3 SV=1
MTDQSTKKFSYTLKATDGRARTGVIHTPRGDIRTPAFMPVGTAATVKAMMPESVAATGADILLGNTYHLMLRPTAERIDRLGGLHKFMNWDKPILTDSGGFQVMSLASLRKLTEKGVTFKSHIDGSKHELTPERSMEIQKLLGSDIVMCFDECPALPADRKRIAESMRLSMRWAQRSRDAFGDRPGYALFGIMQGGLERDFREESAEALKEIGFEGYAIGGLAVGEGQEAMFDCLDYAPGFLPEDKPRYLMGVGKPDDIVGAVKRGVDMMDCVLPSRSGRTGQVWTRMGVLNIKNARHQDDPRPIDENCTCPACTNYSRAYLHHVFRSNEMISGMLLTWHNLHYFQEIMQGMRDAISEGRFDAWEADFHANRAQGDIDPL

SEQ ID NO: 51460 - protein, 383 aa, unidentified
  source 1..383: note = Aliiroseovarius sediminilitoris
  REGION 1..383: note = tr|A0A1I0Q477|A0A1I0Q477_9RHOB Queuine tRNA-ribosyltransferase OS=Aliiroseovarius sediminilitoris; OX = 1173584 GN=tgt PE=3 SV=1
MSRMQDQSQNRITFSLNATDGKARTGVISTPRGDIRTPAFMPVGTAATVKAMMPESVAATGADILLGNTYHLMLRPTAERIDRLGGLHKFMNWDKPILTDSGGFQVMSLAGLRKLTEKGVTFKSHIDGSKHELTPERSMDIQRLLGSDIVMCFDECPALPADRGRIAESMRLSMRWAARSKEAFGDRPGHALFGIMQGGLERDFREESAEALKKIGFDGYAVGGLAVGEGQASMFDCLDFAPGFLPDDKPRYLMGVGKPDDIVGAVKRGIDMMDCVLPSRSGRTGQVFTRHGVLNIKNARHQDDPRPLDESCGCPACRNYSRAYLHHVFRAQEMISGMLLTWHNLHYFQDIMQGMRDAIAKQAFAEWETAFHAGRAQGDIDPL

SEQ ID NO: 51461 - protein, 375 aa, unidentified
  source 1..375: note = Aliishimia ponticola
  REGION 1..375: note = tr|A0A4S4NRG5|A0A4S4NRG5_9RHOB Queuine tRNA-ribosyltransferase OS=Aliishimia ponticola OX=2499833; GN = tgt PE=3 SV=1
MTSFSFDLQATDGRARTGVISTPRGDIRTPAFMPVGTAATVKAMMPESVRATGADILLGNTYHLMLRPTAERIDRLGGLHKFMNWDRPILTDSGGFQVMSLAGLRKLTEEGVTFKSHVDGSKHMLSPERSMEIQRLLGSDIVMCFDECPALPADRDRIAASMELSMRWAARSREAFGDRPGHALFGIQQGGLEEDLRAQSAEALREIGFEGYAVGGLAVGEGQEAMFGCLDYAPEQLPQDKPRYLMGVGKPDDIVGAVARGIDMMDCVLPSRSGRTGQVFTRLGVLNIKNARHQDDPRPLDEECTCPACRNYSRAYLHHVFRTQEIISSMLLTWHNLHYYQQIMDQMRHAIAEGRFEAWQTEFTQTRAQGDIDPL

SEQ ID NO: 51462 - protein, 375 aa, Aliivibrio finisterrensis
  REGION 1..375: note = tr|A0A4Q5KP91|A0A4Q5KP91_9GAMM Queuine tRNA-ribosyltransferase OS=Aliivibrio finisterrensis; OX = 511998 GN=tgt PE=3 SV=1
MKYELLKKQGRARRGQLQFDRGTVETPAFMPVGTYGTVKGMTPEEVKGTGAEILLGNTFHLWLRPGQEIMKLHGDLHDFMNWKGPILTDSGGFQVFSLGKTRKITEEGVHFRSPVNGDKVFMDAEKSMQIQYDLGSDVVMIFDECTPYPATHDEARISMERSIRWADRSRNEFDRQENPNALFGIVQGGVYEDLRDVSVEALTKIGFDGYAVGGLAVGEPKEDMHRILEHTCPQLPEDKPRYLMGVGKPEDLVEGVRRGIDMFDCVMPTRNARNGHLFVTGGVIKIRNAKHKTDTTPLDPECDCYTCQNYSKSYLHHLDRCNEILGARLNTIHNLRYYQRIMASIRKALEEERFEQFVEEFYARRDREVPPLKDL

SEQ ID NO: 51463 - protein, 375 aa, Aliivibrio fischeri
  REGION 1..375: note = sp|Q5E3D2|TGT_ALIF1 Queuine tRNA-ribosyltransferase; OS = Aliivibrio fischeri (strain ATCC 700601 / ES114); OX = 312309 GN=tgt PE=3 SV=1
MKYELIKKQGRARRGQLQFDRGTVETPAFMPVGTYGTVKGMTPEEVKGTGAEILLGNTFHLWLRPGQEIMKLHGDLHDFMNWKGPILTDSGGFQVFSLGKTRKITEEGVHFRSPVNGDKIFMDAEKSMQIQYDLGSDVVMIFDECTPYPATHDEARISMERSIRWAERSRNEFDRQENPNALFGIVQGGVYEDLRDVSVEALTKIGFDGYAVGGLAVGEPKEDMHRILEHTCPQLPEDKPRYLMGVGKPEDLVEGVRRGIDMFDCVMPTRNARNGHLFVTGGVIKIRNAKHKTDTTPLDPECDCYTCQNYSKSYLHHLDRCNEILGARLNTIHNLRYYQRIMASIRKALEEDRFEQFVEEFYARRDREVPPLKDL

SEQ ID NO: 51464 - protein, 375 aa, Aliivibrio fischeri; identical to SEQ ID NO: 51463
  REGION 1..375: note = sp|B5F9Y3|TGT_ALIFM Queuine tRNA-ribosyltransferase; OS = Aliivibrio fischeri (strain MJ11) OX=388396 GN=tgt PE=3; SV = 1

SEQ ID NO: 51465 - protein, 375 aa, Aliivibrio logei
  REGION 1..375: note = tr|A0A1B9NXY3|A0A1B9NXY3_ALILO Queuine tRNA-ribosyltransferase OS=Aliivibrio logei OX=688 GN=tgt; PE = 3 SV=1
MKYELIKKQGRARRGQLQFDRGTVETPAFMPVGTYGTVKGMTPEEVKDTGAEILLGNTFHLWLRPGQEIMKLHGDLHDFMNWKGPILTDSGGFQVFSLGKTRKITEEGVHFRSPVNGDKIFMDAEKSMQIQYDLGSDVVMIFDECTPYPATHDEARISMERSIRWADRSRNEFDRQENPNALFGIVQGGVYEDLRDVSVEALTKIGFDGYAVGGLAVGEPKEDMHRILEHTCPQLPEDKPRYLMGVGKPEDLVEGVRRGIDMFDCVMPTRNARNGHLFVTGGIVKIRNAKHKVDTTPLDPECDCYTCQNYSKSYLHHLDRCNEILGARLNTIHNLRYYQRIMASIRKALEEDRFEQFVEEFYARRDREVPPLKDL

SEQ ID NO: 51466 - protein, 375 aa, Aliivibrio salmonicida
  REGION 1..375: note = sp|B6EK65|TGT_ALISL Queuine tRNA-ribosyltransferase; OS = Aliivibrio salmonicida (strain LFI1238) OX=316275; GN = tgt PE=3 SV=1
MKYELIKKQGRARRGQLQFDRGTVETPAFMPVGTYGTVKGMTPEEVKDTGAEILLGNTFHLWLRPGQEIMKLHGDLHDFMNWKGPILTDSGGFQVFSLGKTRKITEEGVHFRSPVNGDKIFMDAEKSMQIQYDLGSDVVMIFDECTPYPATHDEARISMERSIRWADRSRNEFDRQENPNALFGIVQGGVYEDLRDVSVEALTKIGFDGYAVGGLAVGEPKEDMHRILEHTCPLLPEDKPRYLMGVGKPEDLVEGVRRGIDMFDCVMPTRNARNGHLFVTGGIVKIRNAKHKVDTTPLDPECDCYTCQNYSKSYLHHLDRCNEILGARLNTIHNLRYYQRIMASIRKALEEDRFEQFVEEFYARRDREVPPLKDL

SEQ ID NO: 51467 - protein, 375 aa, Aliivibrio sifiae
  REGION 1..375: note = tr|A0A2S7XES8|A0A2S7XES8_9GAMM Queuine tRNA-ribosyltransferase OS=Aliivibrio sifiae OX=566293; GN = tgt PE=3 SV=1
MKYELLKKQGRARRGQLQFDRGTVETPAFMPVGTYGTVKGMTPEEVKDTGAEILLGNTFHLWLRPGQEIMKLHGDLHDFMNWKGPILTDSGGFQVFSLGKTRKITEEGVHFRSPVNGDKVFMDAEKSMQIQYDLGSDVVMIFDECTPYPATHDEARISMERSIRWADRSRNEFDRQENPNALFGIVQGGVYEDLRDVSVEALTKIGFDGYAVGGLAVGEPKEDMHRILEHTCPQLPEDKPRYLMGVGKPEDLVEGVRRGIDMFDCVMPTRNARNGHLFVTGGVIKIRNAKHKTDTTPLDPECDCYTCQNYSKSYLHHLDRCNEILGARLNTIHNLRYYQRIMASIRKALEEERFEQFVEEFYARRDREVPPLKDL

SEQ ID NO: 51468 - protein, 375 aa, Aliivibrio sifiae
  REGION 1..375: note = tr|A0A2S7XG97|A0A2S7XG97_9GAMM Queuine tRNA-ribosyltransferase OS=Aliivibrio sifiae OX=566293; GN = tgt PE=3 SV=1
MKYELLKKQGRARRGQLQFDRGTVETPAFMPVGTYGTVKGMTPEEVKDTGAEILLGNTFHLWLRPGQEIMKLHGDLHDFMNWKGPILTDSGGFQVFSLGKTRKITEEGVHFRSPVNGDKIFMDAEKSMQIQYDLGSDVVMIFDECTPYPATHDEARISMERSIRWADRSRNEFDRQENPNALFGIVQGGVYEDLRDVSVEALTKIGFDGYAVGGLAVGEPKEDMHRILEHTCPQLPEDKPRYLMGVGKPEDLVEGVRRGIDMFDCVMPTRNARNGHLFVTGGVIKIRNAKHKTDTTPLDPECDCYTCQNYSKSYLHHLDRCNEILGARLNTIHNLRYYQRIMASIRKALEEERFEQFVEEFYARRDREVPPLKDL

SEQ ID NO: 51469 - protein, 375 aa, Aliivibrio sp.
  REGION 1..375: note = tr|A0A1B9P8P7|A0A1B9P8P7_9GAMM Queuine tRNA-ribosyltransferase OS=Aliivibrio sp. 1S175 OX=1840087; GN = tgt PE=3 SV=1
MKYELLKKQGRARRGQLQFDRGTVETPAFMPVGTYGTVKGMTPEEVKDTGAEILLGNTFHLWLRPGQEIMKLHGDLHDFMNWKGPILTDSGGFQVFSLGKTRKITEEGVHFRSPVNGDKIFMDAEKSMQIQYDLGSDVVMIFDECTPYPATHDEARISMERSIRWADRSRNEFDRQENPNALFGIVQGGVYEDLRDVSVEALTKIGFDGYAVGGLAVGEPKEDMHRILEHTCPQLPEDKPRYLMGVGKPEDLVEGVRRGIDMFDCVMPTRNARNGHLFVTGGVIKIRNAKHKIDTTPLDPECDCYTCQNYSKSYLHHLDRCNEILGARLNTIHNLRYYQRIMASIRKALEEERFEQFVEEFYARRDREVPPLKDL

SEQ ID NO: 51470 - protein, 375 aa, Aliivibrio wodanis; identical to SEQ ID NO: 51468
  REGION 1..375: note = tr|A0A090INT4|A0A090INT4_9GAMM Queuine tRNA-ribosyltransferase OS=Aliivibrio wodanis OX=80852; GN = tgt PE=3 SV=1

SEQ ID NO: 51471 - protein, 376 aa, Alishewanella aestuarii
  REGION 1..376: note = tr|J2IHW9|J2IHW9_9ALTE Queuine tRNA-ribosyltransferase OS=Alishewanella aestuarii B11; OX = 1197174 GN=tgt PE=3 SV=1
MKFELLATDGKARRGQLIFERGVVDTPAFMPVGTYGTVKGMTPEELDATGAQICLGNTFHLMLRPGTEIIRKHGDLHDFMHWHKPILTDSGGFQVFSLGELRKITEEGVKFRSPLNGEKIMLTPERSMQVQRALGSDIVMIFDECTPYPATEPQARKSMELSLRWAKRSKEAHGDNPSALFGIIQGGMYPHLRDISLQGLEEIGFDGYAIGGLSVGEPKADMINILNHTTDKMPAHKPRYLMGVGKPEDIVEAVRRGVDMFDCVMPTRNARNGHLFVSDGVVKIRNAKHKDDTAPLDKECDCYTCKNYSRAYLHHLDRCNEILGARLNTIHNLHHYQKLMQGLRAAIAAGKLDDFVADFYAKRGLPVPALADETNQ

SEQ ID NO: 51472 - protein, 376 aa, Alishewanella agri
  REGION 1..376: note = tr|I9P1I2|I9P1I2_9ALTE Queuine tRNA-ribosyltransferase OS=Alishewanella agri BL06; OX = 1195246 GN=tgt PE=3 SV=1
MKFELLATDGKARRGQLIFQRGVVDTPAFMPVGTYGTVKGMTPEELDATGAQICLGNTFHLMLRPGTEIIRKHGDLHDFMHWHKPILTDSGGFQVFSLGELRKITEEGVKFRSPLNGEKIMLTPERSMEVQRDLGSDIVMIFDECTPYPATEPQARKSMELSLRWAKRSKDAHGDNPSALFGIIQGGMYPHLRDISLQGLEEIGFDGYAIGGLSVGEPKADMINILNHTTDKMPAQKPRYLMGVGKPEDIVEAVRRGVDMFDCVMPTRNARNGHLFVSDGVVKIRNAKHKDDTAPLDKECDCYTCKNYSRAYLHHLDRCNEILGARLNTIHNLHHYQKLMQGLRAAIAAGKLDDFVADFYAKRGLPVPALSAATNE

SEQ ID NO: 51473 - protein, 376 aa, Alishewanella jeotgali
  REGION 1..376: note = tr|H3ZGM4|H3ZGM4_9ALTE Queuine tRNA-ribosyltransferase OS=Alishewanella jeotgali KCTC 22429 OX=1129374 GN=tgt PE=3 SV=1
MKFELLATDGKARRGQLIFERGVVDTPAFMPVGTYGTVKGMTPEELDATGAQICLGNTFHLMLRPGTEIIRKHGDLHDFMHWHKPILTDSGGFQVFSLGELRKITEEGVKFRSPLNGEKIMLTPERSMEVQRALGSDIVMIFDECTPYPATEPQARKSMELSLRWAKRSKDAHGDNPSALFGIIQGGMYPHLRDISLQGLEEIGFDGYAIGGLSVGEPKADMINILNHTTDKMPAHKPRYLMGVGKPEDIVEAVRRGVDMFDCVMPTRNARNGHLFVSDGVVKIRNAKHKDDTAPLDKECDCYTCKNYSRAYLHHLDRCNEILGARLNTIHNLHHYQKLMQGLRAAIAAGKLDDFVADFYAKRGLPVPALADETNQ

SEQ ID NO: 51474 - protein, 376 aa, Alishewanella sp.; identical to SEQ ID NO: 51473
  REGION 1..376: note = tr|A0A1C2C818|A0A1C2C818_9ALTE Queuine tRNA-ribosyltransferase OS=Alishewanella sp. HH-ZS; OX = 1856684 GN=tgt PE=3 SV=1

SEQ ID NO: 51475 - protein, 376 aa, Alishewanella sp.
  REGION 1..376: note = tr|A0A259NRZ3|A0A259NRZ3_9ALTE Queuine tRNA-ribosyltransferase OS=Alishewanella sp. 34-51-39; OX = 1970316 GN=tgt PE=3 SV=1
MKFELLATDGKARRGQLIFQRGVVDTPAFMPVGTYGTVKGMTPEELDATGAQICLGNTFHLMLRPGTEIIRKHGDLHDFMHWHKPILTDSGGFQVFSLGELRKITEEGVKFRSPLNGEKIMLTPERSMEVQRDLGSDIVMIFDECTPYPATEPQARKSMELSLRWAKRSKDAHGDNPSALFGIIQGGMYPHLRDISLQGLEEIGFDGYAIGGLSVGEPKADMINILNHTTDKMPAQKPRYLMGVGKPEDIVEAVRRGVDMFDCVMPTRNARNGHLFVSDGVVKIRNAKHKDDTAPLDKECDCYTCKNYSRAYLHHLDRCNEILGARLNTIHNLHHYQKLMQGLRAAIAAGKLDDFVADFYAKRGLPVPALTAETNE

SEQ ID NO: 51476 - protein, 378 aa, Alistipes finegoldii
  REGION 1..378: note = tr|I3YL34|I3YL34_ALIFI Queuine tRNA-ribosyltransferase OS=Alistipes finegoldii (strain DSM 17242 / JCM 16770 / AHN 2437 / CCUG 46020 / CIP 107999) OX=679935 GN=tgt P E=3 SV=1
MSMKFTLQHKDPATKARAGELTTDHGVIRTPIFMPVGTAATVKGIFHRDVRDEARAQIILANTYHLYMRPGMEVIEKAGGVHRFSTWEGPMLTDSGGFQVFSLAACRKLKEEGCHFRSHIDGSKHLFTPESVMDTERTIGADIMMAFDECPPGDAPREYAAKSLALTERWLERCFNRYHQTEPKYGHYQALFPIVQGCTYPDLRAHAAENVKQYDADGYAIGGLAVGEPTDVMYEMIEVVNAILPEERPRYLMGVGTPVNILEAIERGVDMFDCVMPTRNGRNGQLFTAEGVINIRNKKWEDDFSPIDPEGTAFVDTLYTKAYLHHLVTCGEMLAAQIASLHNIAFYLRLVGMAREHIAAGDFKPWKDAMVAKLTRRL

SEQ ID NO: 51477 - protein, 378 aa, Alistipes finegoldii
  REGION 1..378: note = tr|A0A174ZEB4|A0A174ZEB4_9BACT Queuine tRNA-ribosyltransferase OS=Alistipes finegoldii OX=214856; GN = tgt PE=3 SV=1
MSMKFTLQHKDPASKARAGELATDHGVIRTPIFMPVGTAATVKGIFHRDVRDEARAQIILANTYHLYMRPGMEIIEKAGGVHRFSTWEGPMLTDSGGFQVFSLAACRKLKEEGCHFRSHIDGSKHLFTPESVVDTERTIGADIMMAFDECPPGDAPREYAAKSLALTERWLDRCFDRYHQTEPKYGHYQALFPIVQGCTYPDLRAHAAENVQQYGADGYAIGGLAVGEPTEVMYEMIEVVNAILPEDRPRYLMGVGTPVNILEGIERGVDMFDCVMPTRNGRNGQLFTAEGVINIRNKKWEDDFSPIDPEGTAFVDTLYTKAYLHHLVTCGEMLAAQIASLHNIAFYLRLVTMAREHIAAGDFRPWKETMVQKLTQRL

SEQ ID NO: 51478 - protein, 376 aa, Alistipes indistinctus
  REGION 1..376: note = tr|A0A412SFH7|A0A412SFH7_9BACT Queuine tRNA-ribosyltransferase OS=Alistipes indistinctus; OX = 626932 GN=tgt PE=3 SV=1
MEFQLLHTDSRSAARAGVLSTDHGEIRTPIFMPVGTVGSVKGVFHRDLEQEVGAQIILGNTYHLYLRPGTDILEQAGGLHRFSAWNRPILTDSGGFQVFSLADCRKLAEEGCRFHSHIDGSAHLFTPERVIDIQRSIGADIMMAFDECPPGDAEYDYAKKSWELTSRWLGRCFEQYAKTEPKYGHYQSLFPIVQGCTYPDLRARSAEFVQQFGADGYAIGGLAVGEPAPVMYEMIELVNSILPQDKPRYLMGVGTPVNLLEAIERGVDMFDCVMPTRNGRNGMLFTSEGIINIRNQKWRDDFSPVDPMGHCFADTAYTKAYLRHLTIAGEMMAAQIASLHNLAFYLWLVGEAREQILQGTFSEWKPVMVEKLSRRL

SEQ ID NO: 51479 - protein, 376 aa, Alistipes indistinctus
  REGION 1..376: note = tr|A0A5B5UAY3|A0A5B5UAY3_9BACT Queuine tRNA-ribosyltransferase OS=Alistipes indistinctus; OX = 626932 GN=tgt PE=3 SV=1
MEFQLLHTDSRSAARAGVLSTDHGEIRTPIFMPVGTVGSVKGVFHRDLEQEVGAQIILGNTYHLYLRPGTDILEQAGGLHRFSAWNRPILTDSGGFQVFSLADCRKLAEEGCRFHSHIDGSAHLFTPERVIDIQRSIGADIMMAFDECPPGDAEYDYAKKSWELTSRWLGRCFEQYAKTEPKYGHYQSLFPIVQGCTYPDLRARSAEFVQQFGADGYAIGGLAVGEPAPVMYEMIELVNSILPQDKPRYLMGVGTPVNLLEAIERGVDMFDCVMPTRNGRNGMLFTSEGIINIRNQKWRDDFSPVDPMGHCFADTAYTKAYLRHLTIAGEMMAAQIASLHNLAFYLWLVGEAREQILQGTFSEWKHVMVEKLSRRL

SEQ ID NO: 51480 - protein, 375 aa, unidentified
  source 1..375: note = Alistipes inops
  REGION 1..375: note = tr|A0A0B0BTY4|A0A0B0BTY4_9BACT Queuine tRNA-ribosyltransferase OS=Alistipes inops OX=1501391; GN = tgt PE=3 SV=1
MTFEVEHRAAGSAARAGRFTTDHGTVETPVFMPVGTAASVKGVFHRDLAEAGARIILANTYHLYLRPGMEVIEAAGGVHRFCTWDKPMLTDSGGFQVFSLAQCRKLTEEGCRFSSHIDGSRHLFTPENVIDTQRTIGADIMMAFDECPPGDSPRDYAAKSLLLTQRWLERCFERYAATAPKYGHRQSLFPIVQGCTYPDLRAGAAEFVQQFGADGYAIGGLAVGEPAPVMYEMIEIVNGILPQDKPRYLMGVGTPVNILEAIDRGVDMFDCVMPTRNGRNGMLFTSEGIINIRNQKWREDFSPIDPMGHCFADTLYSKAYLRHLAVSGEMLAAQIASLHNIAFYMWLVDEARRRIADGTFAEWKRGMVVKLTRRL

SEQ ID NO: 51481 - protein, 52 aa, unidentified
  source 1..52: note = Alistipes obesi
  REGION 1..52: note = tr|A0A3D3YLP0|A0A3D3YLP0_9BACT tRNA guanosine(34) transglycosylase Tgt (Fragment) OS=Alistipes obesi; OX = 1118061 GN=tgt PE=4 SV=1
MQFTLRHTDTRTEARAGELATDHGVIRTPIFMPVGTAAAVKGIFHRDVRDEA

SEQ ID NO: 51482 - protein, 376 aa, Alistipes onderdonkii
  REGION 1..376: note = tr|A0A5B5PRK2|A0A5B5PRK2_9BACT Queuine tRNA-ribosyltransferase OS=Alistipes onderdonkii OX=328813; GN = tgt PE=3 SV=1
MKFTLQHKDPASKARAGELATDHGVIRTPIFMPVGTAATVKGIFHRDVRDEARAQIILANTYHLYMRPGMEIIEKAGGVHRFSTWEGPMLTDSGGFQVFSLAACRKLKEEGCHFRSHIDGSKHLFTPESVVDTERTIGADIMMAFDECPPGDAPREYAAKSLALTERWLDRCFDRYHQTEPKYGHYQALFPIVQGCTYPDLRAHAAENVQQYGADGYAIGGLAVGEPTEVMYEMIEVVNAILPEDRPRYLMGVGTPVNILEGIERGVDMFDCVMPTRNGRNGQLFTAEGVINIRNKKWEDDFSPIDPEGTAFVDTLYTKAYLHHLVTCGEMLAAQIASLHNIAFYLRLVTMAREHIAAGDFRPWKETMVQKLTQRL

SEQ ID NO: 51483 - protein, 376 aa, Alistipes onderdonkii
  REGION 1..376: note = tr|A0A4Q5I8E3|A0A4Q5I8E3_9BACT Queuine tRNA-ribosyltransferase OS=Alistipes onderdonkii OX=328813; GN = tgt PE=3 SV=1
MKFTLQHKDPASKARAGELATDHGVIRTPIFMPVGTAATVKGIFHRDVRDEARAQIILANTYHLYMRPGMEIIEKAGGVHRFSTWEGPMLTDSGGFQVFSLAACRKLKEEGCHFRSHIDGSKHLFTPESVVDTERTIGADIMMAFDECPPGDAPREYAAKSLALTERWLDRCFDRYHQTEPKYGHYQALFPIVQGCTYPDLRAHAAENVQQYGADGYAIGGLAVGEPTEVMYEMIEVVNAILPEDRPRYLMGVGTPVNILEGIERGVDMFDCVMPTRNGRNGQLFTAEGVINIRNKKWEDDFSPIDPEGTAFVDTLYTKAYLHHLVTCGEMLAAQIASLHNIAFYLRLVTMAREHIAAGDFRPWKEAMVGKLQRRL

SEQ ID NO: 51484 - protein, 376 aa, Alistipes putredinis
  REGION 1..376: note = tr|R7JP04|R7JP04_9BACT Queuine tRNA-ribosyltransferase OS=Alistipes putredinis CAG:67; OX = 1263036 GN=tgt PE=3 SV=1
MKFTLQHKDPSSQARAGELQTDHGVVKTPIFMPVGTAATVKGIFHRDVRDEARAQIILANTYHLYLRPGMDILERAGGVHRFSTWDGPMLTDSGGFQVFSLAGCRKLKEEGCHFQSHIDGSRHLFTPESVIDTERTIGADIMMAFDECPPGDSPRDYAAKSLALTERWLDRCFNRYRQTSPKYGHYQALFPIVQGCTYPDLRARAAENVKQYDADGYAIGGLAVGEPTDVMYEMIEVVNAILPEDRPRYLMGVGTPINILEGIARGVDMFDCVMPTRNGRNGQIFTSEGTINIRNKKWEDDFSPIDPEGTAFVDHVYTKAYLHHLTICQEMLGAQIASLHNIAFYLRLVTEARRHIGAGDFTPWKERMVAKLGRRL

SEQ ID NO: 51485 - protein, 376 aa, Alistipes putredinis; identical to SEQ ID NO: 51484
  REGION 1..376: note = tr|A0A1Q6F429|A0A1Q6F429_9BACT Queuine tRNA-ribosyltransferase OS=Alistipes putredinis OX=28117; GN = tgt PE=3 SV=1

SEQ ID NO: 51486 - protein, 376 aa, Alistipes shahii
  REGION 1..376: note = tr|A0A5B3GDS6|A0A5B3GDS6_9BACT Queuine tRNA-ribosyltransferase OS=Alistipes shahii OX=328814; GN = tgt PE=3 SV=1
MKFILQHKDPSSHARAGELHTDHGVIRTPIFMPVGTAATVKGIFHRDVCDEARAQIILANTYHLYLRPGTEILERAGGVHRFSTWEGPMLTDSGGFQVFSLAACRKLKEEGCHFRSHIDGSKHLFTPESVIDTERTIGADIMMAFDECPPGDAPREYAAKSLGLTERWLDRCFNQYHRTSPKYGHYQALFPIVQGCTYPDLRARAAENVKQYDADGYAIGGLAVGEPTEVMYEMIEVVNAILPEDRPRYLMGVGTPVNILEGIERGVDMFDCVMPTRNGRNGQLFTAEGVINIRNKKWEDDFSPVDPAGTAFVDRLYSKAYLHHLCVCGEMLAAEIASLHNIAFYLRLVGAAREHILAGDFRAWKEGMVEKLTRRL

SEQ ID NO: 51487 - protein, 376 aa, Alistipes shahii
  REGION 1..376: note = tr|A0A5B3GUK1|A0A5B3GUK1_9BACT Queuine tRNA-ribosyltransferase OS=Alistipes shahii OX=328814; GN = tgt PE=3 SV=1
MKFILQHKDPSSHARAGELHTDHGVIRTPIFMPVGTAATVKGIFHRDVRDEARAQIILANTYHLYLRPGMEILERAGGVHRFSTWEGPMLTDSGGFQVFSLAACRKLKEEGCHFRSHIDGSKHLFTPESVIDTERTIGADIMMAFDECPPGDAPREYAAKSLGLTERWLDRCFNQYHRTSPKYGHYQALFPIVQGCTYPDLRARAAENVKQYDADGYAIGGLAVGEPTEVMYEMIEVVNAILPEDRPRYLMGVGTPVNILEGIERGVDMFDCVMPTRNGRNGQLFTAEGVINIRNKKWEDDFSPVDPAGTAFVDRLYSKAYLHHLCVCGEMLAAEIASLHNIAFYLRLVGAAREHILAGDFRAWKEGMVEKLTRRL

SEQ ID NO: 51488 - protein, 376 aa, Alistipes sp.
  REGION 1..376: note = tr|R5II36|R5II36_9BACT Queuine tRNA-ribosyltransferase OS=Alistipes sp. CAG:831; OX = 1262698 GN=tgt PE=3 SV=1
MRFTLLSADPASCARRGRIETDHGIIETPIFMPVGTVGSVKGVYHRDLKNDIGAQIILGNTYHLYLRPGLETLRMAGGLHKFAGWDRPILTDSGGFQVFSLADSRKLTPEGCTFRSHIDGSAHSFTPENNVDTQRIIGADIIMALDECTPGDADRNYARKSLDLTEQWLKRGIARFRETEPLYGYSQAFFPIVQGCVYPDLRIEAAENVASYDCEGYAIGGLSVGEPTDVMYGMIETVHPVLPKDRPRYLMGVGTPENLLEGIARGIDMFDCVMPTRNGRNGMLFTWEGRMNMRNKKWERDFSPIDPHGTSFVDTAYTKAYLRHLFVAGEMLAAQIASEHNLAFYLDVVAQARKHIEAGDFLPWKEAAVKRLQNRL

SEQ ID NO: 51489 - protein, 376 aa, Alistipes sp.
  REGION 1..376: note = tr|A0A1Q6EAI0|A0A1Q6EAI0_9BACT Queuine tRNA-ribosyltransferase OS=Alistipes sp. 56_sp_Nov_56_25; OX = 1896969 GN=tgt PE=3 SV=1
MKFTLQHKDPSSHARAGELHTDHGVIRTPIFMPVGTAATVKGIFHRDVRDEARAQIILANTYHLYLRPGTEILERAGGVHRFSTWEGPMLTDSGGFQVFSLAACRKLKEEGCHFRSHIDGSKHLFTPESVIDTERTIGADIMMAFDECPPGDAPREYAAKSLGLTERWLDRCFNQYHRTSPKYGHYQALFPIVQGCTYPDLRARAAENVKQYDADGYAIGGLAVGEPTEVMYEMIEVVNAILPEDRPRYLMGVGTPVNILEGIERGVDMFDCVMPTRNGRNGQLFTAEGVINIRNKKWEDDFSPVDPAGTAFVDRLYSKAYLHHLCVCGEMLAAEIASLHNIAFYLRLVGAAREHILAGDFRAWKEGMVEKLTRRL

SEQ ID NO: 51490 - protein, 376 aa, unidentified
  source 1..376: note = Alistipes timonensis
  REGION 1..376: note = tr|A0A1H4B0K3|A0A1H4B0K3_9BACT Queuine tRNA-ribosyltransferase OS=Alistipes timonensis JC136; OX = 1033731 GN=tgt PE=3 SV=1
MKFTLQHKDPSSRARAGELQTDHGTIRTPIFMPVGTAATVKGIFHRDVRDEARAQIILANTYHLYLRPGMEIIEKAGGVHRFSTWEGPMLTDSGGFQVFSLAACRKLKEEGCHFRSHIDGSKHLFTPESVIDTERTIGADIMMAFDECPPGDAPREYAARSLDLTERWLDRCFNQYHRTDPKYGHYQALFPIVQGCTYPDLRARAAENVKQYDADGYAIGGLAVGEPTEVMYEMIDVVNAILPEDRPRYLMGVGTPVNILEGIARGVDMFDCVMPTRNGRNGQLFTAEGVINIRNKKWEDDFSPIDPQGTAFVDTLYSKAYLHHLTVCGEMLAAQIASLHNIAFYLRLVGAAREHILAGDFAAWKEEMVAKLQKRL

SEQ ID NO: 51491 - protein, 371 aa, unidentified
  source 1..371: note = Aliterella atlantica
  REGION 1..371: note = tr|A0A0D8ZQY6|A0A0D8ZQY6_9CYAN Queuine tRNA-ribosyltransferase OS=Aliterella atlantica CENA595; OX = 1618023 GN=tgt PE=3 SV=1
MADFSFQALANCSETKARVGVFYTPHGVVETPRFMPVGTLANVKTITPKQLQETGAQMVLSNTYHLHLQPGESIVGQAGGLHAFMGWQGPMLTDSGGFQVFSLSQMRKISEAGVVFRSPHGGEIINFTPELSIQIQNILGADVIMAFDECPPYPATRGEVQAACDRTYRWLERCIVAHNRPDQALFGIVQGGVHLDLRATAAEALAALNLPGYAIGGVSVGEPPELIAKIVAATTPLLPLDKPRYLMGVGTYREMAQAIASGIDLFDCVIPTRLARHGAALVQGERWNLKNAQFRADFTPLDATCPCYACQNFTRAYISHLVRSQEILAYTLLSIHNITELVGFTQKIRDSILSDRFATDFEDWLAPTDNS

SEQ ID NO: 51492 - protein, 378 aa, Alkalibacillus haloalkaliphilus
  REGION 1..378: note = tr|A0A511W625|A0A511W625_9BACI Queuine tRNA-ribosyltransferase OS=Alkalibacillus haloalkaliphilus; OX = 94136 GN=tgt PE=3 SV=1
MAITYELIKTCKQTGARLGKVHTPHGSFETPVFMPVGTLATVKTMAPEELKEIGANIILSNTYHLWLRPGEDVVEEAGGLHKFMNWDGSILTDSGGFQVFSLSDMRQIEEEGVHFRNHISGAKLFLSPEKAMHIQNSLGSDIMMAFDECPPYPASYDYMKASVERTSRWAERCLEAHQKPGQQGLFGIIQGGEYEELRKQSARDLTSLDFPGYAIGGLSVGEPKDVMNKVLDFTTPLLPDEKPRYLMGVGSPDSLVDGAMRGVDMFDCVLPTRIARNGTCMTSNGRLVVRNAKFAKDFTPIDENCDCYTCRNYTKAYIRHLIKANETLGIRLTTYHNLYFLVKLMGQVRNAIKEDRLGDFRDEFFEQYGFNKPDAKNF

SEQ ID NO: 51493 - protein, 370 aa, Alkalibacter saccharofermentans
  REGION 1..370: note = tr|A0A1M4S4S5|A0A1M4S4S5_9FIRM Queuine tRNA-ribosyltransferase OS=Alkalibacter saccharofermentans DSM 14828 OX=1120975 GN=tgt PE=3 SV=1
MAVRYEHIKTCKQTGARLGRLHTPHGIIETPIFMPVGTQATVKSLTPEDIKSTGAQVILSNTYHLYIRPGTEVIKKAGGLHKFMNWDMPILTDSGGYQVFSLGDLRRIEEEGVTFRSHLDGSKHFISPEDAIKIQNILGSDIIMAFDECTPYPADYQYAKKSMERTLRWAQRCKDAHTNTQNQALFGIVQGGMYDDLRVESAKETVKIGFPGYAIGGLSVGEPKELMYKALDAVVPHLPEDKARYLMGVGSIDALFEGVLRGIDMFDCVLQTRIARNGTAMTSSGKVVIKNAKYEMDFSPLDPECDCYTCKNFTKAYLRHLIKANEILGLRLLSSHNLHFTLKTMGNIRKAILEDRLADYKDEFFNKYRY

SEQ ID NO: 51494 - protein, 381 aa, unidentified
  source 1..381: note = Alkalibacterium gilvum
  REGION 1..381: note = tr|A0A1H6UHL4|A0A1H6UHL4_9LACT Queuine tRNA-ribosyltransferase OS=Alkalibacterium gilvum; OX = 1130080 GN=tgt PE=3 SV=1
MSDHPVTYQLEKKEKHTGARLGKITTPHGTFETPMFMPVGTLATVKTIAPEELEEMGAGIILSNTYHLWLRPGADIVEEAGGLHEFMNWDKGILTDSGGFQVFSLSDLRDIKEEGVHFRSHLDGSKLFLSPEKAINVQNQLGPDIMMSFDECPPFDESYDYVKKSVERTSRWAERGLNAHKKPNSQGLFGIVQGAGFEDLRKQSAKDLTSMDFAGYSIGGLSVGEPKSEMYRVLDFTTPLLPENKPRYLMGVGTPDALIEGVMRGVDMFDCVLPTRIARNGTTMTSKGRLVVKNAAYARDYRPLDEKCECYTCRNYTRAYLRHLIKSNETLGLRLASYHNLYFLLNLMKNVRQAIREDNLLEFKNQFFEEYGYNEPNAKNF

SEQ ID NO: 51495 - protein, 381 aa, Alkalibacterium kapii
  REGION 1..381: note = tr|A0A511ATD7|A0A511ATD7_9LACT Queuine tRNA-ribosyltransferase OS=Alkalibacterium kapii OX=426704; GN = tgt PE=3 SV=1
MSNHPVTYKLEKKEKHTGARLGTITTPHGTFDTPMFMPVGTLATVKTIAPEELEEMGAGIILSNTYHLWLRPGSDIVEEAGGLHQFMNWDKGILTDSGGFQVFSLSDLRDIKEEGVHFRSHLDGSKLFLSPEKAINVQNQLGSDIMMSFDECPPFDESYDYVKKSVERTSRWAERGLEAHKRKDTQGLFGIVQGAGFEDLRKQSAKDLTSMDFAGYSIGGLSVGEPKSEMYRVLDFTTPLLPEDKPRYLMGVGTPDALIEGVMRGVDMFDCVLPTRIARNGTTMTSKGRLVVKNAAFARDFRPLDEKCDCYTCRNYTRAYLRHLIKSNETLGLRLTSYHNLYFLLNLMKNVRQAIREDNLLEFRNQFFEEYGYNEPNAKNF

SEQ ID NO: 51496 - protein, 381 aa, Alkalibacterium olivapovliticus
  REGION 1..381: note = tr|A0A2T0W268|A0A2T0W268_9LACT Queuine tRNA-ribosyltransferase OS=Alkalibacterium olivapovliticus; OX = 99907 GN=tgt PE=3 SV=1
MTNHPVTYQLEKKDKRTGARLGKITTPHGTFETPMFMPVGTLATVKTIAPEELEEMGAGIILSNTYHLWLRPGEDLIEEAGGLHKFMNWSKGILTDSGGFQVFSLSDMRKIEEEGVHFKSHLDGSKLFLSPEKAINIQNKLGPDIMMSFDECPPFDESFDYVKKSVERTSRWAERGLEAHQKPDSQGLFGIVQGAGFEELRKQSAKDLTSMNFAGYSIGGLSVGEPKEDMYRVLDFTTPLLPEDKPRYLMGVGTPDALIEGVMRGVDMFDCVLPTRIARNGTTMTSKGRVVIKNATYARDFRPLDEKCDCYTCRNYTRAYLRHLLKSDETFGLRLTSYHNLYFLLDLMKKVRQAIREDNLLEFKEAFFEEYGYNKPNAKNF

SEQ ID NO: 51497 - protein, 381 aa, Alkalibacterium pelagium
  REGION 1..381: note = tr|A0A1H7NAL6|A0A1H7NAL6_9LACT Queuine tRNA-ribosyltransferase OS=Alkalibacterium pelagium; OX = 426702 GN=tgt PE=3 SV=1
MSNHPVTYTLEKKDKRTGARLGKITTPHGTFETPMFMPVGTLATVKTIAPEELEEMGAGIILSNTYHLWLRPGEDLIAEAGGLHAFMNWDKGILTDSGGFQVFSLSDMRRIEEEGVHFKSHLDGSKLFLSPEKAINIQNKLGPDIMMSFDECPPFDESYDYVKKSVERTSRWAERGLEAHQNPDRQGLFGIVQGAGFEDLRKQSAKDLTSMDFAGYSIGGLSVGEPKEDMYRVLDFTTPLLPEHKPRYLMGVGTPDALIEGVMRGVDMFDCVLPTRIARNGTTMTSKGRVVIKNAIYARDFRPLDEKCGCYTCRNYTRAYLRHLLKSDETFGLRLTSYHNLYFLLDLMKKVRQAIREDNLLEFKEQFFEEYGYNKPNAKNF

SEQ ID NO: 51498 - protein, 381 aa, Alkalibacterium putridalgicola
  REGION 1..381: note = tr|A0A1H7SZK7|A0A1H7SZK7_9LACT Queuine tRNA-ribosyltransferase OS=Alkalibacterium putridalgicola; OX = 426703 GN=tgt PE=3 SV=1
MSNHPVTYKLEKKEKHTGARLGTITTPHGTFETPMFMPVGTLATVKTIAPEELEEMGAGIILSNTYHLWLRPGADIVEEAGGLHKFMNWDKGILTDSGGFQVFSLSDLRDIKEEGVHFRSHLDGSKLFLSPEKAINVQNQLGPDIMMSFDECPPYDESYDYVKKSVERTSRWAERGLEAHKNRDTQGLFGIVQGAGFEDLRRQSAKDLTSMDFAGYSIGGLSVGEPKSEMYRVLDFTTPLLPEDKPRYLMGVGTPDALIEGVMRGVDMFDCVLPTRIARNGTTMTSKGRLVVKNAAYARDFRPLDEKCDCYTCRNYSRAYLRHLIKSNETFGLRLTSYHNLYFLLNLMKNVRQAIREDNLLEFKEQFFEEYGYNEPNAKNF

SEQ ID NO: 51499 - protein, 381 aa, Alkalibacterium sp.
  REGION 1..381: note = tr|A0A011QRM8|A0A011QRM8_9LACT Queuine tRNA-ribosyltransferase OS=Alkalibacterium sp. AK22; OX = 1229520 GN=tgt PE=3 SV=1
MSNHPVTYQLEKKDKRTGARLGKITTPHGTFETPMFMPVGTLASVKTIAPEELEEMGAGIILSNTYHLWLRPGEDIVEEAGGLHQFMNWDKGILTDSGGFQVFSLSDMRKIEEEGVHFRSHLDGSKLFLSPEKAINVQNKLGPDIMMSFDECPPFDESYDYVKKSVERTSRWAERGLKAHKKPDTQGLFGIVQGAGFEELRKQSAKDLTSMDFAGYSIGGLSVGEPKPDMYRVLDFTTPLLPEDKPRYLMGVGTPDALIEGVMRGVDMFDCVLPTRIARNGTTMTSKGRVVIKNAAYARDFRPLDEKCGCYTCRNYSRAYIRHLIKSDETFGLRLTSYHNLYFLLDLMKKVRQAIREDNLTEFKEAFFEEYGYNKPNAKNF

SEQ ID NO: 51500 - protein, 381 aa, Alkalibacterium sp.
  REGION 1..381: note = tr|A0A1L8PKI6|A0A1L8PKI6_9LACT Queuine tRNA-ribosyltransferase OS=Alkalibacterium sp. 20; OX = 1798803 GN=tgt PE=3 SV=1
MSDQPVTYKLEKKEKHTGARLGTITTPHGTFETPMFMPVGTLATVKTLAPEELEAMGAGIILSNTYHLWLRPGADIIEEAGGLHKFMNWDKGILTDSGGFQVFSLSDLRDIKEEGVHFRSHLDGSKLFLSPEKAINVQNQLGPDIMMSFDECPPYDESYDYVKKSVERTSRWAERGLEAHRKPDTQGLFGIVQGAGFEDLRRQSAKDLTSLDFAGYSIGGLSVGEPKSEMYRVLDFTTPLLPENKPRYLMGVGTPDALIEGVMRGVDIFDCVLPTRIARNGTTMTSKGRLVLKNAAFARDFRPLDEKCDCYTCRNYSRAYLRHLIKSNETFGLRLTSYHNLYFLINLMKNVRQAIREDNLLEFKENFFEEYGYNKPDAKNF

SEQ ID NO: 51501 - protein, 381 aa, Alkalibacterium subtropicum
  REGION 1..381: note = tr|A0A1I1E7R2|A0A1I1E7R2_9LACT Queuine tRNA-ribosyltransferase OS=Alkalibacterium subtropicum; OX = 753702 GN=tgt PE=3 SV=1
MSNHPVTYQLEKKEKHTGARLGTITTPHGTFETPMFMPVGTLATVKTIAPEELEEMGAGIILSNTYHLWLRPGADIVEEAGGLHKFMNWDKGILTDSGGFQVFSLSDLRDIKEEGVHFRSHLDGSKLFLSPEKAINVQNQLGPDIMMSFDECPPYDESYDYVKKSVERTSRWAERGLEAHKNPDTQGLFGIVQGAGFEDLRRQSAKDLTSMDFAGYSIGGLSVGEPKSEMYRVLDFTTPLLPENKPRYLMGVGTPDALIEGVMRGVDMFDCVLPTRIARNGTTMTSQGRLVVKNAAYARDYRPLDEKCDCYTCRNYSRAYLRHLIKSNETFGLRLTSYHNLYFLLNLMKDVRQAIREDNLLEFKERFFEEYGYNKPNAKNF

SEQ ID NO: 51502 - protein, 381 aa, Alkalibacterium thalassium
  REGION 1..381: note = tr|A0A1G9BFV9|A0A1G9BFV9_9LACT Queuine tRNA-ribosyltransferase OS=Alkalibacterium thalassium; OX = 426701 GN=tgt PE=3 SV=1
MSNHPVTYTLEKKDKHTGARLGKITTPHGTFETPMFMPVGTLATVKTIAPEELEEMGAGIILSNTYHLWLRPGEDLIAEAGGLHAFMNWDKGILTDSGGFQVFSLSDMRRIEEEGVHFKSHLDGSKLFLSPEKAINIQNKLGPDIMMSFDECPPFDESYDYVKKSVERTSRWAERGLKAHQNTDRQGLFGIVQGAGFEDLRKQSAKDLTSMDFAGYSIGGLSVGEPKEDMYRVLDFTTPLLPEDKPRYLMGVGTPDALIEGVMRGVDMFDCVLPTRIARNGTTMTSKGRVVIKNAIYARDFRPLDEKCGCYTCRNYTRAYLRHLLKSDETFGLRLTSYHNLYFLLDLMKKVRQAIREDNLLEFKEQFFEEYGYNKPNAKNF

SEQ ID NO: 51503 - protein, 372 aa, Alkalibaculum bacchi
  REGION 1..372: note = tr|A0A366ICR0|A0A366ICR0_9FIRM Queuine tRNA-ribosyltransferase OS=Alkalibaculum bacchi OX=645887; GN = tgt PE=3 SV=1
MGAIKYELIKECKQTGARRGRLHTPHGIIETPIFMPVGTQATVKSMTPEELKEIGSQIILSNTYHLYLRPGHELVQKAGGLHQFMNWDKPILTDSGGFQVFSLGELRKIKEEGVTFQSHLDGSKHFLSPEKVMEIQNALGSDIIMCFDECAPYPATYEYTRDSLDRTIRWAKRCKDAHKNTENQALFGIIQGGMYRDLREKSVKEMLEIDFPGYSIGGLSVGEPKHLMYEMLEYTTPLLPKDKPRYLMGVGSPDALLEGVLRGVDMFDCVLQTRIARNGTAMTSGGRVVIRNAKYMEDFTPLDHECDCYVCKNYTRAYLRHLIKAGEILGARLLTYHNLYFSLNLMKNVRLAIEEDRLLDFKEEFFKKYGYC

SEQ ID NO: 51504 - protein, 379 aa, unidentified
  source 1..379: note = Alkalicoccus halolimnae
  REGION 1..379: note = tr|A0A5C7FMA1|A0A5C7FMA1_9BACI Queuine tRNA-ribosyltransferase OS=Alkalicoccus halolimnae; OX = 1667239 GN=tgt PE=3 SV=1
MPAVTYEHIKTCKQSGARLGIVHTPHGSFETPMFMPVGTLATVKTMSPDELIEMNAQIILSNTYHLWLRPGEDIIKEAGGLHKFMNWDRPILTDSGGFQVFSLSDLRNISEDGVEFRNHLSGEKLFLTPEKSMQIQNDLGPDIMMAFDECPPYPAEFDYMKASVERTSRWAERCLEAHGRPQDQGLFGIVQGGEYPELRKQSAEDLVSLDFPGYAIGGLSVGEPKDVMNQVLEETMPFLPADKPRYLMGVGSADSLIDGAIRGVDMFDCVLPTRIARNGTLMTSSGRLVVRNAKFARDFRPLDENCSCSVCRNYSRAYIRHLIKSNEMLGLRLCSYHNLYFLLQLMENVREAIRQDRLLDYREEFFEAYGFNKPNAKNF

SEQ ID NO: 51505 - protein, 379 aa, unidentified
  source 1..379: note = Alkalicoccus saliphilus
  REGION 1..379: note = tr|A0A2T4U2P7|A0A2T4U2P7_9BACI Queuine tRNA-ribosyltransferase OS=Alkalicoccus saliphilus; OX = 200989 GN=tgt PE=3 SV=1
MPAVTYEHIKTCRQSGARLGKVHTPHGSFETPIFMPVGTLATVKTMSPDELVEMNAQIILSNTYHLWLRPGEDIIQEAGGLHKFMNWDRPILTDSGGFQVFSLSDLRNISEEGVEFRSHLSGEKLFLTPEKSMHIQNALGPDIMMAFDECPPYPAEHDYMKASVERTSRWAERCLEAHQRPHDQGLFGIVQGGEHPDLRRQSAEDLVSLDFPGYAIGGLSVGEPKDVMNRVLEETTPFLPDNKPRYLMGVGSADSLIDGAVRGVDMFDCVLPTRIARNGTLMTSSGRLVVRNAAYARDFRPLDEKCSCRVCRNYSRAYIRHLIKSNETLGLRLCSYHNLHFLLQLMENVREAIRNDRLLDFREEFFEAYGFNKPNAKNF

SEQ ID NO: 51506 - protein, 385 aa, Alkalilimnicola ehrlichii
  REGION 1..385: note = tr|Q0A9C3|Q0A9C3_ALKEH Queuine tRNA-ribosyltransferase OS=Alkalilimnicola ehrlichii (strain ATCC BAA-1101 / DSM 17681 / MLHE-1) OX=187272; GN = tgt PE=3 SV=1
MSDQPPIAERLDFALIAEDGLARRGRVTLPRGEIDTPAFMPVGTYGTVKAMTPEELQAMGAQIILGNTFHLWLRPGTGIIREHGDLHDFCHWQGPILTDSGGFQVFSLGELRKITEDGVHFRSPVDGSKVFMGPEESMAVQRELGSDIVMIFDECTPYPADLATARRSMELSLRWAARSKQAHGDNPAALFGIVQGGMYPELRRQSLEGLQAIGFDGYAIGGLSVGEPHEERVAVLDSLALQLPQDRPRYLMGVGKPEDIVEAVRRGVDMFDCVIPTRNARTGFLYTHEGLIRLRNARHARDTGPLDPHCDCYTCRHYSRAYLRHLDKCNEILGARLNTIHNLHYYQTLMRGLREAIAEGRLGAFMETFYALRGQAVPPAPAVPR

SEQ ID NO: 51507 - protein, 371 aa, Alkalimonas amylolytica
  REGION 1..371: note = tr|A0A1H4E0V0|A0A1H4E0V0_ALKAM Queuine tRNA-ribosyltransferase OS=Alkalimonas amylolytica; OX = 152573 GN=tgt PE=3 SV=1
MKFELLATDGKARRGQMMFERGVVDTPAFMPVGTYGTVKGMTPEELEQTGAQICLGNTFHLMLRPGTDIIKLHGDLHDFMHWHKPILTDSGGFQVFSLGELRKITEEGVLFRSPLNGEKIMLTPERSMEVQQALGSDIVMIFDECTPYPATEQQAKKSMELSLRWAARSKAAHGDNPSALFGIIQGGMYPGLRDVSLQGLEDIGFDGYAIGGLSVGEPKEDMINILNHTTDKMPAHKPRYLMGVGKPEDIVEAVRRGIDMFDCVMPTRNARNGHLFVSDGVVKIRNAKHKADTAPLDKNCDCYTCKNYSRAYLHHLDRCNEIQGARLNTIHNLHFYQKLMQGLREAIAAGNLDQFVADFYAARGMAVPALD

SEQ ID NO: 51508 - protein, 370 aa, unidentified
  source 1..370: note = Alkalinema sp.
  REGION 1..370: note = tr|A0A251WL41|A0A251WL41_9CYAN Queuine tRNA-ribosyltransferase OS=Alkalinema sp. CACIAM 70d; OX = 1934309 GN=tgt PE=3 SV=1
MSFTFEVQATCSYTNARAGVFQTPHGVVETPRFMPVGTLANVKTVTPAQLQDTGAQMVLSNTYHLHLQPGEDIVQMAGGLHKFMGWSGPMLTDSGGFQVFSLSEINQINDDGVTFRSPRDGSLIHLTPEKSIAIQNTLGADVIMAFDECAPPGVGRDTVEKAMERTYEWLKRCVAAHSRKEDQALFGIVQGGEFLDLRAEAARQLVDLNLPGYAIGGVSVGEAPEVIDQVVQHTAPLLPQNKLRYLMGVGSYREMARAIAAGVDVFDCVIPTRLARHGCALVGGERWNLKNAKFREDFRPLDETCSCYACQNFSRAYISHLLRSQELLAYTLLSIHNITELVRFTQRIRQSILAGTFTTEFAEWIAPVTD

SEQ ID NO: 51509 - protein, 381 aa, unidentified
  source 1..381: note = Alkaliphilus metalliredigens
  REGION 1..381: note = tr|A6TQM8|A6TQM8_ALKMQ Queuine tRNA-ribosyltransferase OS=Alkaliphilus metalliredigens (strain QYMF) OX=293826 GN=tgt PE=3 SV=1
MCRKVGMYMAIRYELIKECKQSGARLGRLHTPHGVIDTPIFMPVGTQATVKTMTPEELKEMNAEIILSNTYHLYLRPGHETVERAGGLHKFMNWDGPILTDSGGFQVFSLGDMRTIKEEGVTFRSHIDGSKHFISPEKAVEIQTALGADIMMAFDECAPYPAERDYVKKSLERTSRWAKRCKEAHENTSKQALFGIIQGGMYEDLRRQSAEEIIDLDFPGYAVGGLSVGEPKALMYEVLEYTTPLMPKDKPRYLMGVGSPDDLIEGVIRGIDMFDCVLPTRIGRNGTAMTSKGKVVIKNAKYKEDFEPLDPECQCYTCKNYSRAYLRHLIKANEILGMRLMTTHNLAFLLKLMKDVRGAIIEDRLLDFRKEFFTQYGYALE

SEQ ID NO: 51510 - protein, 372 aa, Alkaliphilus oremlandii
  REGION 1..372: note = tr|A8MGN9|A8MGN9_ALKOO Queuine tRNA-ribosyltransferase OS=Alkaliphilus oremlandii (strain OhILAs) OX=350688 GN=tgt PE=3 SV=1
MAIRYELIKTCKQSGARLGRLHTPHGVIETPIFMPVGTQATVKAMTPEELKDMNAQIILSNTYHLYLRPGHKLIEKAGGLHKFMNWDRPILTDSGGFQVFSLGPLRKIREEGVEFRSHLDGSKHFISPEIAVEIQNSLGSDIMMAFDECAPYPADYDYVKNSLERTTRWAKRCKDAHKNTDQQALFGIIQGGMYKDLRKQSAEEIIGLDFPGYSVGGLSVGEPKDIMYDVLEYTTPLMPKDKPRYLMGVGSPDDLIEGVIRGIDMFDCVLPSRIGRNGTAMTSRGKVVIKNASHTESFEPLDTECGCYTCKNYSKAYLRHLFKANEILGLRLLTNHNLHFLLNLMEEVRQAIREDRLLDYRKDFFEKYGYNL

SEQ ID NO: 51511 - protein, 371 aa, Alkaliphilus peptidifermentans
  REGION 1..371: note = tr|A0A1G5L3A7|A0A1G5L3A7_9CLOT Queuine tRNA-ribosyltransferase OS=Alkaliphilus peptidifermentans DSM 18978 OX=1120976 GN=tgt PE=3 SV=1
MAIKYELIKECKQTGARLGKLHTPRGVIETPIFMPVGTQATVKTMTPEELKEIKSQIILSNTYHLYLRPGHKLIENAGGLHKFMNWDGPILTDSGGFQVFSLGDLRKISEEGVEFRSHLDGSKHFISPEKAVEIQNSLGSDIMMVFDECAPYPAEKQYVKNSLERTTRWAKRCKDAHKNTDKQALFGIIQGGMYEDLRKQSLEELIELDFPGYAVGGLSVGEPKPLMYEVLEYTTPFMPKNKPRYLMGVGSPDCLIEGAIRGIDMFDCVLPSRIGRNGTAMTSVGKIVIKNSAHTEAFDALDPECSCYTCKNYSRAYLRHLFKANEVLGLRLLTYHNLHFLLKLMEEVRQAIREDRLLDYRNEFFKKYGYE

SEQ ID NO: 51512 - protein, 370 aa, Alkaliphilus sp.
  REGION 1..370: note = tr|A0A2G2MMA8|A0A2G2MMA8_9CLOT Queuine tRNA-ribosyltransferase OS=Alkaliphilus sp. OX=1872455; GN = tgt PE=3 SV=1
MAIRYELIKECKQSGARLGRLHTPHGVIETPIFMPVGTQATVKAMTPEELKDIKAQIILSNTYHLYLRPGHKLIEKAGGLHKFMGWDRPILTDSGGFQVFSLGDLRKITEEGVEFRSHIDGSKHFLSPEKAVEIQNSLGSDIMMVLDECPPPDADREYIKNSLERTTRWAKRCMEAHENTEVQALFGIVQGGMFEDLRRQSASELLELDFPGYAIGGLSVGEPKPLMYEVLDYTAPLLPKNKPRYLMGVGTPDVLLEAVIRGMDMFDCVLPTRIARNGTAMTSEGKVIIKNAKHKESFIPLDKECDCYTCKTYTRAYLRHLFKTNEILGLRLMTYHNLYFVLDLMKNIRNAILEDRLLDFKDEFYEKYGY

SEQ ID NO: 51513 - protein, 385 aa, Alkalispirillum mobile
  REGION 1..385: note = tr|A0A498C4R1|A0A498C4R1_9GAMM Queuine tRNA-ribosyltransferase OS=Alkalispirillum mobile OX=85925; GN = tgt PE=3 SV=1
MSEQQPDQARLGFDLMATDGAARRARIHLPRGQIDTPAFMPVGTYGTVKAMTPEELEGMGAQIILGNTFHLWLRPGTDIIREHGDLHDFCHWQGPILTDSGGFQVFSLGDLRKITEEGVHFRSPVDGARVFMGPEESMAVQRALGSDIVMIFDECTPYPADHETARRSMALSLRWAARSKAAHGDNPAALFGIVQGGMYPDLRSESLEGLLEIGFDGYAIGGLSVGEPHEERVAVLDHLSGQLPTDRPRYLMGVGKPEDIVEAVRRGVDMFDCVIPTRNARTGFLYTHEGLIRLRNAKHARDTGPLDPHCDCYTCRNFSRAYLRHLDKCNEILGSRLNTIHNLHYYQDLMRGMRQAIAEGRLEAWVETFYGLRGETAPPAPSRAG

SEQ ID NO: 51514 - protein, 385 aa, unidentified
  source 1..385: note = Alkalispirochaeta americana
  REGION 1..385: note = tr|A0A1N6P856|A0A1N6P856_9SPIO Queuine tRNA-ribosyltransferase OS=Alkalispirochaeta americana; OX = 159291 GN=tgt PE=3 SV=1
MKIFTIDANDKNCAARTGTLLLPHGPVSTPAFMPVGTAGTVKAVDHDQLHQMGYRLILANTYHLFLRPGMDTIGSFGGLHTFSSWNHNILTDSGGYQIFSLAPFRKITDEGASFRSHLDGSRHLLTPERTVDIQVTIGSDIQMVLDVCTGPEIDHRAALEALTTTTTWAARARRRWEEQQEESGYAGALFGIVQGNFFPDLRTQAVQRTEELDFPGLALGGLSVGEPFSTYCDILAHTAPQLPREKPRYVMGIGTPEYILAAIEQGIDMFDCVFPTRAARTGTLFTTDGRINFKSARYARTMDSPDRQIDSFGGRQYSLGYLRHLTKSNEILGCMLAAQHNLRFMKWLVDQSARAIREGTFLSFKKDFLERYTEGTKAAREASSP

SEQ ID NO: 51515 - protein, 266 aa, unidentified
  source 1..266: note = Alkalispirochaeta odontotermitis
  REGION 1..266: note = tr|A0A0A0E1T7|A0A0A0E1T7_9SPIO Queuine tRNA-ribosyltransferase (Fragment) OS=Alkalispirochaeta odontotermitis OX=1329640 GN=JY97_01165 PE=3 SV=1
MVANDKDCSARTGTLHLPRGDVEIPTFLPVGTNGTVKAIQHSTLRHIGYSLILSNTYHLYLRPGVQVIEKYGGLHNFSSWNGSILTDSGGFQVFSLASFRKIARDGVAFTSHIDGSRHFLTPESVVDIQVALGSDIQMQLDVCTAPGIEADEAREAVELTALWAKRAKQRYLEHSASSRGYLFGIVQGNFFKELRVLSSSLLSELDLPGYAIGGLSVGEKPEVFKEFLGYTAPLLPRDKPRYIMGIGTPEYMLESIEEGIDFFDCA

SEQ ID NO: 51516 - protein, 385 aa, unidentified
  source 1..385: note = Alkalispirochaeta sphaeroplastigenens
  REGION 1..385: note = tr|A0A2S4JFE9|A0A2S4JFE9_9SPIO Queuine tRNA-ribosyltransferase OS=Alkalispirochaeta sphaeroplastigenens OX=1187066 GN=tgt PE=3 SV=1
MAFFSIDKTDKDCAARTGTLVLPHGPVSTPAFMPVGTAGTVKAVDHDQLHQMGYRLILANTYHLFLRPGMETIGSFGGLHNFSSWNHNILTDSGGYQIFSLAPFRKITDEGASFRSHLDGSKHLLTPERTVDIQVTIGSDIQMVLDVCTGPDIDHRAALEALDTTTRWAARARRRWTEQQQEQGYAGALFGIVQGNFFPDLRTEAVQRTEELDFPGIALGGLSVGEPFSTYCDILAHTAPLLPREKPRYVMGIGTPEYILAAIEQGIDMFDCVFPTRAARTGTLFTTEGRINFKSARYARSVDPPDRLIDSFGGRQYSLGYLRHLTKSNEILGCMLAAQHNLRFMKWLVDQSARAIREGTFRSFKKDFLERYAEGTRAAREGSSL

SEQ ID NO: 51517 - protein, 376 aa, unidentified
  source 1..376: note = Alkalitalea saponilacus
  REGION 1..376: note = tr|A0A1T5HGC9|A0A1T5HGC9_9BACT Queuine tRNA-ribosyltransferase OS=Alkalitalea saponilacus; OX = 889453 GN=tgt PE=3 SV=1
MDFVLHKKDAFSKARAGEITTDHGKIETPVFMPVGTVGSVKGIHVRDLEQEVRARIILGNTYHLYLRPGIDVLRKAGGLHKFNGWGKPILTDSGGFQVFSLSHRRKLKEEGAEFQSHIDGSKHIFTPENVVDIQRVIGADIIMAFDECPPGDSDFNYAKKSMELTHRWLLRGIERFDSTEPLYDYGQTFFPIVQGAGFPDLRRQSAEFIANQNREGNAIGGLAVGEPEEVMYEMIQVVNEILPEDKPRYLMGVGTPANILEAISLGVDMFDCVMPTRNGRNGMLFTSKGIINIRNEKWKDDFSPIDPDGNSAFDLIYSKAYLRHLFIAGEMLGPQIASIHNLSFYMWLVDEARRQINQGTFFEWKEQMVKQLKVRL

SEQ ID NO: 51518 - protein, 372 aa, Alkanindiges illinoisensis
  REGION 1..372: note = tr|A0A4Y7X9A5|A0A4Y7X9A5_9GAMM Queuine tRNA-ribosyltransferase OS=Alkanindiges illinoisensis; OX = 197183 GN=tgt PE=3 SV=1
MKFEKLAQTGRARRGRLTLNHGVVETPAFMPVGTYGTVKGMLPRDIEDIGAHIILGNTFHLWLRPGLEVIKEHGGLHDFVKWDKPILTDSGGFQVFSLGAMRKIKEEGVTFRSPIDGSKIFLSPEKSMEIQRVLNSDIVMIFDECTPYPATYSEAQTSMQMSLRWAKRCKDAFEGNPNALFGIVQGGMYPELRQQSLDGLTEIGFDGYAIGGLSVGEPKEDMIKILDYLPTKLPEDKPRYLMGVGKPEDIVEAVRRGVDMFDCVMPTRNARNGHYFITDGIVRIRNSQYRHDMNPLDPHCDCYTCRNFTRAYLYHLDKCGEMLGAMLGTIHNLRYYQRLMQMIRESIEINEFDAFVIDFYQRRGLSVPEMAE

SEQ ID NO: 51519 - protein, 372 aa, Alkanindiges sp.
  REGION 1..372: note = tr|A0A1S8CTE5|A0A1S8CTE5_9GAMM Queuine tRNA-ribosyltransferase OS=Alkanindiges sp. H1 OX=1907941; GN = tgt PE=3 SV=1
MKFEKIAQTGRARRGRLTLNHGVVETPAFMPVGTYGTVKGMLPRDIEDIGAHIILGNTFHLWLRPGLEVIKEHGGLHQFIKWDKPILTDSGGFQVFSLGAMRKIKEEGVTFRSPIDGSKIFLSPEKSMEIQKVLNSDIVMIFDECTPYPATYSEAQTSMQMSLRWAKRCKDAFEGNPNALFGIVQGGMYPELRQQSLDGLTEIGFDGYAIGGLSVGEPKEDMIKILDYLPTKLPEDKPRYLMGVGKPEDIVEAVRRGVDMFDCVMPTRNARNGHYFITDGIVRIRNSQYRHDMKALDPHCDCYTCRNFTRSYLYHLDKCGEMLGAMLGTIHNLRYYQRLMQMIRESIETNQFDSFVTDFYQRRGLAVPEMAE

SEQ ID NO: 51520 - protein, 372 aa, Allisonella histaminiformans
  REGION 1..372: note = tr|A0A1G5VQL7|A0A1G5VQL7_9FIRM Queuine tRNA-ribosyltransferase OS=Allisonella histaminiformans; OX = 209880 GN=tgt PE=3 SV=1
MVINYELIAQDPATGARAGLLHTPHGTFKTPMFMPVGTQATVKTVTPDELEEMGAQIILGNTYHLFLRPGTELIAEAGGLHDFMNWHKGILTDSGGFQVFSLGDTRKIKEEGVYFRSILDGSKQFLSPEVATRAQEELGSDIAMAFDECIPYPAEYDYAKKSTERTTRWAERCLKAHTRKDRGMFGIIQGGMYKDLRKQSAAEITSLPFDGFAIGGLSVGEPHDLMYEILEHTTQYMPVNKARYLMGVGTPDCLVEGVARGVDMFDCVFPTRVARNGMAMVHSGRMNMKNKQYERDFTPIEEGCQCYTCRHFTRAYIRHLYKAEELLAFRLITIHNLFFLLQFMRDMRQAIIDGNFGDFRESFMAGYSARAK

SEQ ID NO: 51521 - protein, 378 aa, Allobacillus sp.
  REGION 1..378: note = tr|A0A556PV94|A0A556PV94_9BACI Queuine tRNA-ribosyltransferase OS=Allobacillus sp. SKP2-8; OX = 1955271 GN=tgt PE=3 SV=1
MAITYELKKVCKQTGARLGTVHTPHGSFDTPVFMPVGTLATVKTMSPEELNEIGANIILSNTYHLWLRPGEDIVKEAGGLHQFMNWDKPILTDSGGFQVFSLSDMREIKEEGVHFRNHISGAKLFLSPEKAMHIQNDLGSDIMMAFDECPPYPASFEYMKKSVERTSRWAERCLAAHQRPTEQGLFGIVQGGEYEELRKQSARDLVSLDFPGYAIGGLSVGEPKDVMNRALEFTTPLLPDEKPRYLMGVGSPDSLIDGAIRGVDMFDCVLPTRIARNGTCMTSNGRLVVRNAKFARDFTPIDENCDCYTCRNYTKAYIRHLIKANETFGIRLTTYHNLYFLVKLMKQVREAIAEDRLGDFREEFFEQYGFNKPNAKNF

SEQ ID NO: 51522 - protein, 378 aa, Allobacillus sp.
  REGION 1..378: note = tr|A0A556PTX4|A0A556PTX4_9BACI Queuine tRNA-ribosyltransferase OS=Allobacillus sp. SKP4-8; OX = 1955272 GN=tgt PE=3 SV=1
MAITYELKKVCKQTGARLGTVHTPHGSFDTPVFMPVGTLATVKTMSPEELNEIGANIILSNTYHLWLRPGEDIIKEAGGLHQFMNWDKPILTDSGGFQVFSLSDMREIKEEGVHFRNHISGAKLFLSPEKAMHIQNDLGSDIMMAFDECPPYPASFEYMKKSVERTSRWAERCLAAHQRPTEQGLFGIVQGGEYEELRKQSARDLVSLDFPGYAIGGLSVGEPKDVMNKVLDFTTHLLPDEKPRYLMGVGSPDSLIDGAIRGIDMFDCVLPTRIARNGTCMTSNGRLVVRNAKFARDFTPIDENCDCYTCRNYTKAYIRHLIKANETFGIRLTTYHNLYFLVKLMEQVREAIAEDRLGDFREEFFERYGFNKPNAKNF

SEQ ID NO: 51523 - protein, 366 aa, Allochromatium vinosum
  REGION 1..366: note = tr|D3RQF3|D3RQF3_ALLVD Queuine tRNA-ribosyltransferase OS=Allochromatium vinosum (strain ATCC 17899 / DSM 180 / NBRC 103801 / NCIMB 10441 / D); OX = 572477 GN=tgt PE=3SV=1
MHFDLLERDGLARRGRLTFARGTVETPAFMPVGTYGTVKAMTPEELLEVGAEIVLGNTFHLMLRPGTEVIRRLGDLHGFMHWDKPILTDSGGFQVFSLGELRKITEDGVKFQSPVDGSPVFLSPEISMQVQRELGSDIVMIFDECTPYPASEEQARVSMELSLRWAARSREAHGDNPAALFGIVQGGMHERPRAESLEGLMRIGFDGYAVGGLSVGEPEEDRLRVLDFLSDKLPTDRPRYLMGVGTPEDIVAAVQRGIDMFDCVMPTRNARNGHLFTHQGVVRIRNAVHRTDEGPLDPLCDCYTCRHYSRAYLHHLDRCKEILGARLATIHNLHYYQTLMRGLREAIAGGRLDHFVSDFKRQRASA

SEQ ID NO: 51524 - protein, 369 aa, Allochromatium warmingii
  REGION 1..369: note = tr|A0A1H3DU94|A0A1H3DU94_ALLWA Queuine tRNA-ribosyltransferase OS=Allochromatium warmingii; OX = 61595 GN=tgt PE=3 SV=1
MHFDLLKRDGLARRGRLTFARGTVETPAFMPVGTYGTVKTMTPEELLTVGAEIILGNTFHLMLRPGTEVIRRLGDLHGFMHWEKPILTDSGGFQVFSLGELRKITEEGVKFKSPIDGSPVFLSPEIAMQVQRELGSDIVMIFDECTPYPASEEQARHSMELSLRWAARSRAAHDDNPAALFGIVQGGMHERPRADSLAGLMQIGFDGYAIGGLSVGEPEADRLRVLDFLADKMPADHPRYLMGVGTPEDIVAAVERGIDMFDCVMPTRNARNGHLFTHQGVVRIRNAVHRADENPLDPLCDCYTCQHYSRAYLHHLDRCKEILGARLATIHNLHYYQTLMRGLRESIAAGQLAAFVAEFKQRRQIIECA

SEQ ID NO: 51525 - protein, 367 aa, unidentified
  source 1..367: note = Allofrancisella guangzhouensis
  REGION 1..367: note = tr|A0A0A8E9E2|A0A0A8E9E2_9GAMM Queuine tRNA-ribosyltransferase OS=Allofrancisella guangzhouensis; OX = 594679 GN=tgt PE=3 SV=1
MTVMKFEVSKKQGKARRGKVIFPRGEIQTPAFMPVGTYGAVKSLSPAELKVMGADIILGNTFHLWLRPGTDIIKKHGDLHDFIGWDKPILTDSGGFQVFSLGKLRKLTEDGVTFSSPINGSKVFLSPEISMQVQKALGSDIVMCFDECTPYPATEKEAKESMELSMRWAKRSKDAHGDNSSALFGIIQGGMYESLRDESLEKLTEIGFDGYAIGGLSVGEPKEDMIRILDHIAHKMPQNKPRYLMGVGTPKDLVEAVYRGVDMFDCVMPSRNARNGHIFTSEGIIRIRNTKYKKDTFALDPICDCYTCKNFSRSYLHHLDKTKEILGSRLNTIHNLTFYQNLMKDIRKAIEEERFEEFRKSFSENYK

SEQ ID NO: 51526 - protein, 367 aa, unidentified
  source 1..367: note = Allofrancisella inopinata
  REGION 1..367: note = tr|A0A4R7LBL1|A0A4R7LBL1_9GAMM Queuine tRNA-ribosyltransferase OS=Allofrancisella inopinata; OX = 1085647 GN=tgt PE=3 SV=1
MTVMKFEISKKQGKARRGTITFPRGEIQTPVFMPVGTYGAVKSLSPVELKEMGADIILGNTFHLWLRPGTDIVKKHGDLHDFIGWDKPILTDSGGFQVFSLGKLRKLTEDGVTFSSPVNGSKVFLSPEISMQVQKDLGSDIVMCFDECTPYPATEKEAKDSMELSMRWAKRSKDAHGDNLSALFGIIQGGMYEHLRDESLEKLTEIGFDGYAIGGLSVGEPKEDMIRILDYIAHKMPDSKPRYLMGVGTPKDLVEAVYRGVDMFDCVMPSRNARNGHIFTSEGVIRIRNSKYKEDTSALDPDCDCYTCKNFSKSYLHHLDKTKEILGSRLNTIHNLTFYQKLMKNIRTAIEEDRFEEFRKEFLVNYK

SEQ ID NO: 51527 - protein, 385 aa, unidentified
  source 1..385: note = Alloprevotella rava
  REGION 1..385: note = tr|G5G9K4|G5G9K4_9BACT Queuine tRNA-ribosyltransferase OS=Alloprevotella rava F0323; OX = 679199 GN=tgt PE=3 SV=1
MTITDKRVGGFFTLQHSDTNSAARAGRIETDHGTIETPIFMPVGTVGSVKAVHLREIKDDINAQIILGNTYHLYLRPGLEVLEAAGGLHKFNGFDRPMLTDSGGFQVFSLTGIRKLTEDGCEFRSHIDGSKHFFSPERVMDIERTIGADIMMAFDECPPGTANYAYARKSLTLTHNWLKRCVTQFNSTQPKYGYHQALFPIVQGCIYKDLRQESAHFVTDLDAEGYAIGGLAVGEPTDMMYEMIEVVNDILPQAKPRYLMGVGTPINILEGIERGVDMFDCVMPTRNGRNAMLFTSEGIINMRNAKWAKDFSPVDPNGTSFVDLAYTKAYLHHLYKAKELLAMQIGSIHNLAFYLWLVREARKHILANDFSTWKKMMVEKLSCRL

SEQ ID NO: 51528 - protein, 392 aa, unidentified
  source 1..392: note = Alloprevotella sp.
  REGION 1..392: note = tr|A0A3P1Z1C1|A0A3P1Z1C1_9BACT Queuine tRNA-ribosyltransferase OS=Alloprevotella sp. OH1205_COT-284 OX=2491043 GN=tgt PE=3 SV=1
MTTQHFSLRPTWRKEGRLFQLEHNDADSHARAGILTTDHGQIQTPIFMPVGTLGTVKGLHTHEIVEEVKAQIILGNTYHLYLRPGLDVLEAAGGLHKFNGFSKPMLTDSGGFQVFSLTGIRKLKEEGCEFRSHIDGSKHFFTPESVMDIERIIGADIMMAFDECPPGTADYAYARNSLGLTHRWLERCIKRFSETEDKYGHHQALFPIVQGCVYPDLRRESAEFMAEKDAEGYAIGGLAVGEPAEKMYEMIEIVNEILPTDRPRYLMGVGTPVNILEGIERGVDMFDCVMPTRNGRNGQIFTWNGIINFRNAKWAKDFSPIDPQGTAKCDHVYTKAYLHHLFKCKELLAMQIASIHNLAFYLELVRVAREHILADDFAAWKRSVMPQLATRL

SEQ ID NO: 51529 - protein, 321 aa, unidentified
  source 1..321: note = Alloprevotella sp.
  REGION 1..321: note = tr|A0A496KLZ1|A0A496KLZ1_9BACT Queuine tRNA-ribosyltransferase (Fragment) OS=Alloprevotella sp.; OX = 1872471 GN=D8H91_06415 PE=3 SV=1
MSNITPSLRQTWRKGEPLFQLQHTDAGSAARAGRITTDHGTIETPIFMPVGTLGTVKGLHTHEILDEVKAQIILGNTYHLYLRPGLDVLEAAGGLHKFNGFHKPMLTDSGGFQVFSLTGIRKLSENGCEFRSHVDGSKHLFTPESVMDIERTIGADIMMAFDECPPGTADFGYARQSLDLTHRWLDRCIKRFSETEDKYGHHQALFPIVQGCVYPELRRESAQFMAERDAEGYAIGGLAVGEPAEKMYEMIEVVNEILPTDRPRYLMGVGTPMNILEGIERGVDMFDCVMPTRNGRNGQIFTWNGIINFRNAKWAKDFSPV

SEQ ID NO: 51530 - protein, 387 aa, unidentified
  source 1..387: note = Alloprevotella tannerae
  REGION 1..387: note = tr|C9LHU5|C9LHU5_9BACT Queuine tRNA-ribosyltransferase OS=Alloprevotella tannerae ATCC 51259 OX=626522 GN=tgt PE=3 SV=1
MSELITNKRAAGFFTLEHTDANSAARVGHIATDHGVIQTPIFMPVGTEATVKCVHQRELLDDIQAQIILGNTYHLYLRPGLDVLKAAGGLHRFNGFTKPMLTDSGGFQVFSLTGIRKLSAEGCEFRSHIDGSKHFFSPERVMDIERTIGADIMMAFDECPPGTADYAYARKSLDLTHDWLRRCVNRFNQTEPEYGYHQALFPIAQGCVYKDLREESARFVSELDAEGYAIGGLAVGEPTEQMYEMIEVVNAILPQDRPRYLMGVGTPINILEAIERGVDMFDCVMPTRNGRNAMLFTAEGTMNMRNAKWAKDFSPIDPAGTSYVDTSYTKAYLHHLFKAKEFLAMQIASIHNLAFYLWLAGEARRHILAGDFVAWKRDMVERMSRRL

SEQ ID NO: 51531 - protein, 424 aa, unidentified
  source 1..424: note = Alloscardovia macacae
  REGION 1..424: note = tr|A0A1Y2SSN5|A0A1Y2SSN5_9BIFI Queuine tRNA-ribosyltransferase OS=Alloscardovia macacae; OX = 1160091 GN=tgt PE=3 SV=1
MLPKPKFSPLGAQPGQPGDRSAFGFEIHTRLDGKHGRTGVIHTPHGDIQTPCFIPVATQATMKAVTREQMEDNGAQAMLANAFHLYERPGEAVMNAAGGLNEFMNWDKPTFTDSGGFQVMSLGQGFKKTLAMDVEGMKSDDVIADGKERLAFVDEDGVSFKSPLNGGMHRFSAEISMRVQHNIGADIMFAFDELTTLMNTRRYQEQAVERTYRWAQRCIAEHKRLTEERVGKPYQALFGVVQGANYEDLRRLAASQIGSLDFDGFGIGGAIEKRIMGEICSWICDELPENKPRHVLGIAAVDDIFAGVENGGDTFDCVAPARTARNGAVFTKDGRWNIKRAAYKFDFSPIEEDCDCYTCRNYTRAYVNHLLRAGEMTGATLATIHNERFFIHLLEQIRESMDGGYFAEFRDAYLARFYANGSRG

SEQ ID NO: 51532 - protein, 455 aa, unidentified
  source 1..455: note = Alloscardovia macacae
  REGION 1..455: note = tr|A0A261F4L4|A0A261F4L4_9BIFI Queuine tRNA-ribosyltransferase OS=Alloscardovia macacae; OX = 1160091 GN=tgt PE=3 SV=1
MTETKRRKRKKKKSAPQFTYVQVDTRAPEGTVLPKPKFSPLGAQPGQPGDRSAFGFEIHTRLDGKHGRTGVIHTPHGDIQTPCFIPVATQATMKAVTREQMEDNGAQAMLANAFHLYERPGEAVMNAAGGLNEFMNWDKPTFTDSGGFQVMSLGQGFKKTLAMDVEGMKSDDVIADGKERLAFVDEDGVSFKSPLNGGMHRFSAEISMRVQHNIGADIMFAFDELTTLMNTRRYQEQAVERTYRWAQRCIAEHKRLTEERVGKPYQALFGVVQGANYEDLRRLAASQIGSLDFDGFGIGGAIEKRIMGEICSWICDELPENKPRHVLGIAAVDDIFAGVENGGDTFDCVAPARTARNGAVFTKDGRWNIKRAAYKFDFSPIEEDCDCYTCRNYTRAYVNHLLRAGEMTGATLATIHNERFFIHLLEQIRESMDGGYFAEFRDAYLARFYANGSRG

SEQ ID NO: 51533 - protein, 483 aa, Alloscardovia omnicolens
  REGION 1..483: note = tr|U1RDJ1|U1RDJ1_9BIFI Queuine tRNA-ribosyltransferase OS=Alloscardovia omnicolens F0580; OX = 1321816 GN=tgt PE=3 SV=1
MTDVEKELNATPQAEATPLAEAPTPETTPRKKRKRKRKKKKSIPHFNYVQVQTKAPEGTIFPKPKFAPKGAAPGQPGDRSAFSFEIHTRLDGKHGRTGMIHTPHGDIQTPCFVPVATQATMKAVTREQMETNGAQVMLANAFHLYERPGEAVMDAAGGLNEFMNWDKPTFTDSGGFQVMSLGAGFKKTLAMDIEGMKSDDVIAEGKERLAFVDEDGVSFKSPLNGGMHRFSAEISMRVQHNIGADIMFAFDELTTLMNTRRYQEESVERTFRWAKRCVAEHQRLTQERLGKPYQALFGVVQGANYEDLRRKAASQIGSLDFDGFGIGGAIEKRILGETCAWICDELPENKPRHVLGIAAVDDIFAGVENGGDTFDCVAPARTARNGAVFTKDGRWNIKRAAFKFDFSPIEDGCDCYTCRNYTRAYVNHLLRAGEMTGATLTTIHNERFFIRLLDDIRASIDGGYFADFKDQYLARFYANGSRG

SEQ ID NO: 51534 - protein, 424 aa, Alloscardovia omnicolens
  REGION 1..424: note = tr|A0A2I1M4P4|A0A2I1M4P4_9BIFI Queuine tRNA-ribosyltransferase OS=Alloscardovia omnicolens; OX = 419015 GN=tgt PE=3 SV=1
MFPKPKFAPKGAAPGQPGDRSAFSFEIHTRLDGKHGRTGMIHTPHGDIQTPCFVPVATQATMKAVTREQMETNGAQVMLANAFHLYERPGEAVMDAAGGLNEFMNWDKPTFTDSGGFQVMSLGAGFKKTLAMDIEGMKSDDVIAEGKERLAFVDEDGVSFKSPLNGGMHRFSAEISMRVQHNIGADIMFAFDELTTLMNTRRYQEESVERTFRWAKRCVAEHQRLTQERLGKPYQALFGVVQGANYEDLRRKAASQIGSLDFDGFGIGGAIEKRILGETCAWICDELPENKPRHVLGIAAVDDIFAGVENGGDTFDCVAPARTARNGAVFTKDGRWNIKRAAFKFDFSPIEDGCDCYTCRNYTRAYVNHLLRAGEMTGATLTTIHNERFFIRLLDDIRASIDGGYFADFKDQYLARFYANGSRG

SEQ ID NO: 51535 - protein, 441 aa, Alloscardovia sp.
  REGION 1..441: note = tr|A0A4R0QQ54|A0A4R0QQ54_9BIFI Queuine tRNA-ribosyltransferase OS=Alloscardovia sp. GLDI4/2; OX = 2496842 GN=tgt PE=3 SV=1
MPHFNYVKVETSAPEGTVLPKPKFSPRGAVSGQPGDRSAFSFEIHTRLEGKHGRTGVIHTPHGDIKTPCFVPVATQATMKAVTREQMEDNGAQCMLANAFHLYERPGEAVMDAAGGLNEFMNWDKPTFTDSGGFQVMSLGAGFKKTLAMDIEGMKSDDVIAEGKERLAFVDEDGVSFKSPLNGGMHRFSAEISMRVQHHIGADIMFAFDELTTLMNTRRYQEEAVERTYRWAQRCVDEHKRLTQERLGKPYQALFGVVQGANYEDLRRKAASQIGSLDFDGFGIGGAIEKRIMADICAWICDELPENKPRHVLGIAAVDDIFAGVENGGDTFDCVAPARTARNGAVFTKDGRWNIKRAAYKFDFSPIEDDCDCYTCRNYTRAYVNHLLRAGEMTGATLATIHNERFFIRLLEQIRESMDGGYFNEFRDEYLARFYANGSRG

SEQ ID NO: 51536 - protein, 424 aa, Alloscardovia sp.
  REGION 1..424: note = tr|A0A1F1AXU7|A0A1F1AXU7_9BIFI Queuine tRNA-ribosyltransferase OS=Alloscardovia sp. HMSC034E08; OX = 1739413 GN=tgt PE=3 SV=1
MFPKPKFATKGAAPGQPGDRSAFSFEIHTRLDGKHGRTGTIHTSHGDIQTPCFVPVATQATMKAVTREQMEANGAQVMLANAFHLYERPGEAVMDAAGGLNEFMNWDKPTFTDSGGFQVMSLGAGFKKTLAMDIEGMKSDDVIAEGKERLAFVDEDGVSFKSPLNGGMHRFSAEISMRVQHNIGADIMFAFDELTTLMNTRRYQEESVERTFRWAKRCMAEHQRLTQERLGKPYQALFGVVQGANYEDLRRKAASQIGSLDFDGFGIGGAIEKRILGETCAWICDELPENKPRHVLGIAAVDDIFAGVENGGDTFDCVAPARTARNGAVFTKDGRWNIKRAAFKFDFSPIEDGCDCYTCRNYTRAYVNHLLRAGEMTGATLTTIHNERFFIRLLDDIRASIDGGYFADFKDQYLARFYANGSRG

SEQ ID NO: 51537 - protein, 375 aa, unidentified
  source 1..375: note = Unknown
  REGION 1..375: note = tr|A0A0N1BNY3|A0A0N1BNY3_9PROT Queuine tRNA-ribosyltransferase OS=alpha proteobacterium AAP81b; OX = 1523432 GN=tgt PE=3 SV=1
MTRFAFALAARDGAARTGTITMRRGVIRTPAFMPVGTAATVKAMRASEVRAAGAEIILGNTYHLMLRPGAERIARLGGLHAFMGWDRPILTDSGGYQVMSLSALTKRSEAGVAFASHLDGSRHMLSPERSIEIQRLLGSDIVMAFDELIALPAPREAVAAAMERSMRWAARSRAAFDSDADHSGRAALFGIQQGGLDERLRAESAAALTAIGFDGYAIGGLAVGEGQEAMFGVLDYATGQLPESAPRYLMGVGKPDDIVGAVVRGVDMFDCVLPTRSGRNGQAFTHDGTLNLRNARHAEDLTVLDADCTCPVCAGGTSRAYLHHLTKSGEMLGAMLLTEHNIGFYQQLMAALRAAIAGGGLTDFAATFLRRYSGG

SEQ ID NO: 51538 - protein, 375 aa, unidentified
  source 1..375: note = Unknown
  REGION 1..375: note = tr|J9DXI1|J9DXI1_9PROT Queuine tRNA-ribosyltransferase OS=alpha proteobacterium IMCC14465; OX = 1220535 GN=tgt PE=3 SV=1
MEFTLHCKDGKARRGTVITPRGEIRTPAFMPVGTAGTVKAMYMDQVKDLGADIVLGNTYHLMLRPGAEEVAALGGLHEFMKWDGPILTDSGGFQVMSLSKLRKMSEEGVNFQSHIDGKSYMLTPERSIEIQTLLGANIRMILDECTPFPATEKQARESMELSTRWAERSKKAFQLYDKGEGDALFGIVQGGVYENLRLESVSNLLDIGFDGYAVGGLAVGEGQEEMMKVLDFTLPALPEDKPRYLMGVGTPEDLVLAVSKGIDMFDCVMPTRAGRHGLAYTRRGKVNLKNARHANDPRPLDEESTCPAASQYSRAYLHHLVRCGEYLAAMLLTWNNLHYYQTLMQEMRQNIEAGTFDAFVEAFYQNYNEGDIPPL

SEQ ID NO: 51539 - protein, 403 aa, unidentified
  source 1..403: note = Alphaproteobacteria bacterium
  REGION 1..403: note = tr|A0A258X9A5|A0A258X9A5_9PROT Queuine tRNA-ribosyltransferase OS=Alphaproteobacteria bacterium 16-39-46 OX=1970490 GN=tgt PE=3 SV=1
MNTSLYPQFSFDIQVQDLESRARCGLISTPHGTVETPNFIFCATKGAMKALRMDMVKQTGAQIILSNTYHLMLSPGADLVEKMGGLHTFMNWNGPLFTDSGGFQIFSLGHGSIASEIKGNRMQKSSRSLLKINEQGANFKSYLDGRQHLLTPEKSIEVQMKLGADLIVVLDECTPFHVDKAYTERSMEMSHRWALRSLEEFKRRSKDTQALYGIIQGGVYEDLRKASTGFVNEHPFFGHAIGGSLGASKQQMADVIGMTAPLLVRDRPIHLLGIGGISDIFEGVSMGIDTFDCVHPTRLARHGGALVQPHLLPEDKKTSSREHLNLRNASYTEDSDPIDPSCPCYTCQNLSRAYLHYLLKARELVALELLTLHNITFMVRLMMAIREGIKQKTLPSLRKEWCH

SEQ ID NO: 51540 - protein, 359 aa, unidentified
  source 1..359: note = Alphaproteobacteria bacterium
  REGION 1..359: note = tr|A0A2S6RDT1|A0A2S6RDT1_9PROT Queuine tRNA-ribosyltransferase OS=Alphaproteobacteria bacterium MarineAlpha9_Bin4 OX=2013099 GN=tgt PE=3 SV=1
MIKFEISNTFNKARAGIIKTKYGKIETPVFMPVGTLGTVKGIEKSVLEKYGFDILLANTYHLMLRPGMNVIKKFGSLNKFMSWKKSILTDSGGFQIMSLGKNVKVDDEGVTFRSHLDGSLVRLNAEKSIEIQNLLGSTITMSFDECIPHPYSYLETELSLKRSTDWTMRSLKAFQQRQGYGIFGIIQGGMHKELRKKSSLELSNMGFDGYALGGLAVGEGHELMSSITDYCTSFLPVEKPRYLMGVGYPKDILQAVKNGIDMFDCVLPTRSGRTGLAFSTQGFIKIRNSIYSKDPNPLDENCNCEICTNYSKAYLHHLVKSSEILGSVFITQHNLFFYMKLMKKIRQSIIEGNLDKLKV

SEQ ID NO: 51541 - protein, 384 aa, unidentified
  source 1..384: note = Alsobacter sp.
  REGION 1..384: note = tr|A0A2T1HND5|A0A2T1HND5_9RHIZ Queuine tRNA-ribosyltransferase OS=Alsobacter sp. SH9 OX=2109933; GN = tgt PE=3 SV=1
MSLAEAPVRDFTFTVKATDGQARTGEIRMPRGVIRTPAFMPVGTAGTVKAMYPEQVRALGADVVLGNTYHLMLRPGAERVARLGGLHKMMNWPHPILTDSGGFQVMSLAQLRKLDENGVTFRSHVDGAKHVLTPERSIEIQGLLGSDIQMQLDECVKLPCSDKEAERAMELSLRWAERSRVAFGEQPGKALYGIVQGGAVPSLRVRSARALADMGFKGYSIGGLAVGEPQEIMLAMIETVEPWLPKEKPRYLMGVGTPDDLIESVRRGVDMFDCVMPTRAGRHGQAFTRFGKLNLRNARHADDPRPIDETSSCPAARDYSRAYLHHLVKSGEILGMMLLTWVNLAYYQDLTAGMRQAIAEGRYDDFAAHTKEGWARGDLEPWAG

SEQ ID NO: 51542 - protein, 377 aa, unidentified
  source 1..377: note = Altererythrobacter aquimixticola
  REGION 1..377: note = tr|A0A4T3EZT6|A0A4T3EZT6_9SPHN Queuine tRNA-ribosyltransferase OS=Altererythrobacter aquimixticola OX=2489173 GN=tgt PE=3 SV=1
MADTKPRFTFTLKAIDGAARTGEIAMKRGTIRTPAFMPVGTAATVKAMKPEAVRALGADIILGNTYHLMLRPGAERVAKLGGLHKFMNWHRPILTDSGGYQVMSLSDLRKLTEEGVEFKSHLDGSRHMLSPERSMAIQRLLGSDIVMAFDECPRADRPRDEIAASMELSMRWAKRSREGFDSGEEHAARSALFGIQQGALDEDLRRISAQKLTEIGFDGYAIGGLAVGEGQEAMFATLDFAPAMLPENAPRYLMGVGKPDDLVGAVERGVDMFDCVLPTRSGRNGQAFTWNGPLNLRNARHAEDTGPLDERCSCTTCASYSRAYLHHLQKSGEILGAMLVTEHNLAFYQQLMQAMRDAIGEGHFAAFARQFRADYLG

SEQ ID NO: 51543 - protein, 374 aa, unidentified
  source 1..374: note = Altererythrobacter atlanticus
  REGION 1..374: note = tr|A0A0F7KPH8|A0A0F7KPH8_9SPHN Queuine tRNA-ribosyltransferase OS=Altererythrobacter atlanticus; OX = 1267766 GN=tgt PE=3 SV=1
MTRFSFSIHARDGKARTGQITMRRGEIRTPAFMPVGTAATVKAMKPEDVRRTGADIILGNTYHLMLRPGAERVARLGGLHKFMNWERPILTDSGGYQVMSLSDLRKLTEQGVEFRSHLDGSRHMLSPERSMEIQRLLGSDIVMAFDECPRADQPPDVIAKSMELSMRWARRSRDAFDAGGEHAEGAALFGIQQGALSEDLRQASAQALTEIGFDGYAIGGLAVGEGQEAMFATLDFAPGQLPDDRPRYLMGVGKPDDLVGAVERGVDMFDCVLPTRSGRNGQAFTWSGPLNLRNARHAEDTGPLDEKCTCPTCGTYSRAYLHHLQKSGEILGAMLVTEHNLSFYQQLMQAMRLAIAEGRFSSFAAEFRRDYLRK

SEQ ID NO: 51544 - protein, 376 aa, Altererythrobacter dongtanensis
  REGION 1..376: note = tr|A0A1B2AEN6|A0A1B2AEN6_9SPHN Queuine tRNA-ribosyltransferase OS=Altererythrobacter dongtanensis; OX = 692370 GN=tgt PE=3 SV=1
MTRFEFEIHATDGKARTGTIRMRRGEIRTPAFMPVGTAATVKAMKPESVRATGADILLGNTYHLMLRPGAERVARLGGLHRFMNWDRPILTDSGGYQVMSLAALRKLTEEGVSFQSHIDGSRHMLTPERSMEIQRLLGSDIVMAFDECPRADRPLAEIEASMELSMRWARRSRDAFDAGGEHAERSALLGIQQGALDERLRARSAEALQQIGFDGYAIGGLAVGEGQEAMFATLDFAPGQLPEDRPRYLMGVGKPDDLVGAVLRGVDMFDCVLPTRSGRNGQAFTWNGPLNMRNARHAEDTGPIDHDCFCQVCKAYSRAYLHHLHKAGEMLGAMLLTEHNLSFYQALMAGMRSSIASGTMDRFAAAFIDRYRRPPG

SEQ ID NO: 51545 - protein, 375 aa, Altererythrobacter epoxidivorans
  REGION 1..375: note = tr|A0A0M5L4Z4|A0A0M5L4Z4_9SPHN Queuine tRNA-ribosyltransferase OS=Altererythrobacter epoxidivorans OX=361183 GN=tgt PE=3 SV=1
MAERFKFEISATDGKARTGRISMLRGDIRTPAFMPVGTAATVKAMKPEAVRETGADIILGNTYHLMLRPGAERVARLGGLHQFMNWERPILTDSGGYQVMSLSDLRKLTEEGVEFRSHIDGSKHMLTPERSMEIQRLLGSDIVMAFDECPRADQSREVIARSMEMSMRWAKRSRDAFDSGGEHAARAALFGIQQGALDEDLRRISAEKLTEIGFDGYAVGGLAVGEGQEAMFATLDFAPDMLPQDRPRYLMGVGKPDDLVGAVERGIDMFDCVLPTRSGRNGQAFTWDGPLNLRNARHAEDTGPLDERCACPTCGTYSRAYLHHLQKSGEILGAMLVTEHNLSFYQQLMQAMRDAIGEGRFTAFAAKFRQDYLQS
